United States Patent Application Publication US 2005/0208558 A1 - sequence listing, part 12

SEQ ID NO: 11275 - DNA, 35633 bp, DROSOPHILA
gcctactagtgccgtatcctttttcaaaaatattgccatttaaacccgggttgagtttggtattcccctgcatttaaagccgttggcgcctaacagcacttgtaaacggtgaacagcacactgttgtctggcagtgttgtaaaactcgcggtagttcagtggtgcaacttataaacagcgttttgtgtttcgcaaaataatatacaattttcagtcagtaagtaaacgagaagtgcaaatacttttattaaatggccgacgaaacagagcaggtatgtgtaagaataaaagcgaaaaggatattctctatattccgtacttgcagctcagtcaggtgattttgccggtaaaggagcctttggatctcatccgattgagtttagatgagaaggtgtacgtaaagatgcgcaacgagcgggaactgcgaggacgtcttcacgtgagttgatgcctctttttactgttgcccagcaatctttcaatatacacctttatctaggcctttgatcagcatttgaacatggtgctcggcgatgcggaggagacggtgaccactgtggagatcgacgaggagacctatgaggaggtgtacaagaccgccaagcgcactattcccatgctattcgttagaggcgatggagtcatcctggtttcgccacccatgcgggtgggctagcgggtcttgtttagctttaaatcaattacctgcatttatacaagctatatctaaataggtttataaatgtcttttaaaaaaaataatgtcttgtttaatttttgcttactatataaatatataaaaatcttttctatgggttgtccttaatcaattgtaatttcaaaagctacgatgccgatgtaaaccatgcgccatgcgttaaaaatggacaccgagcccattgggctttgattgtaggttatctggtggacacgcaggaccgggtgagtggaaaaagctaggcatattaagaccaatattaatgtataagcccttccgcagttttatgtcctggctcgtcatggtaaatctcgtaacctagccgtttggccactggacacgctcagccaaagcaacgaaaatttaaaagagtttgcccaacccaagggctacccagatgatgagtttctgctgccaccgggtggaatcggtggatctctgggcctcaacgagcgctgcattcttgtcaacgggctgccaaagcaggtgattcatgttcgctggtcctaaatatatgtgcatcgaaatattttcaataaaaaaaaccttttttaattacgtagttaactttaatatatttaatagtacagttataaattacacgccttacaatatttcacttcgcaacgcaatcaacgcacctcgaactcctttccatcattcagttcaaacggggagagaaacacgcagagttttcgtatttaatcggttcgcaactactacggggacacgaatgcgattttagggggaatagaatataatatacaataatgatatatcgaactttcatttggtttagagccagctgtgtataaatttatgtatacaagtataaatttacgcttttccaacatccgctaataagactgggctgccttgaaatttcaaaaatcacaacaataagagtagtacacatggttttgtatatatggtagataagataggtaactatatatagtatgttttgtatataatttcacacacagatatttttctgatttaggtagtacatagacgacgggcttgggtataatgtcaaatttttgtcaagtagatttagtatgctgctgtacttttaggttcatttgatagttggccaaacgggagcggcgattttgagatcatggggcctaatgctcccgattgcttggaaactgtcggttaaagaatatatatatattttattatatatgctagtacatgccaacaggcaagagcaacgtgtccatagaaatttttgaaacggcaactacaaagtttggttttagttctagaacttcttgtacaggatattttgatacgcgttgttcatctctgacgagtttataattactttgagcataccattaaactagttagtgtctgtttgtctgtatgtgtctggttgcgggtcgaaagtatctctgataaattcacaagttgcgtgcgaaaatgaactgaacttaaatgaacgttacaggctaacggtttattaactaaaaatttacaaatactagttataaataaattatcattcttttcagttgtataatatttattgccgcgcaagtgactggctcccttgctccgagcacatttcagtttttgtgtccgtatatctgtgttgtttatgggagttgggagtgtcccgtgttaggtcggggtttaaaatgactaggataattcagcacaggacatgggagtgcagccgatgagcgcaatcggaaagttcttgacgtgcgtttgccattgcgacgatacttggaagaacttgactcccgtccactcggtgccatcaatgtacactgccaatattaagggaaaattagtcgaacacttcacggattgcaagatagacattcttacctcgcagtggcactggatgcgattgtttcggtgagcaaatcaaacgggcgacgccctccacacattgctccttctcgagatcacgctccttatccttctttttgcccaagcgcataactgaatggataggacagtgggttaggataatctattgaacacgaagtaggaaggactcactttgcttctgcttcttttccttggtggcgaaactaacagtcagtccattgaacatatcacccaattgctgtgcatgctgtggcagacgccacacctgcaggttcctaaacgtactcttaatgctattcttgccgccagcgtcgctgcccttggacaagccacccttagactccttggcatgaccttcgcccggcctcaccaggggccaatagtcaacttgcagttccactgcttcggccgccgcaagagctccactgaaagactgctgctgcaccgacgacggcgtactaagcgattcactggtatttcgctcccgatgagaggatgcggatgacggtggcgtttgcagaggcggtgagatgcgtcccaagctctgctgctggggcggcgagccagacactacgccgtgcacattcggcgagctctggctgcctatggggatggctgagcttgaggcggatccagaacccagtccactgcccaccgcgttggagccagctgcattttcttcaagatccagcgaggcctgggcgtccagatacccaatgcgaacatcctgtatattgggaacaatagtgattagtgtgttatggcttatgaaatcattttcctcggcaatatactaacactaacaaacggcacaaatatctggcaggagtcctcgtccttgtagttaaccatagcttcggcaatgggtatctgcgtgcagggacctgccgccagtaggtagcgctgaatacgctgcaccaattctgcgatgtcggacttggcaacacctgccgcatccgcgaggttggttgtcagcgcggtggcattcactgtggtcaccgcactgaccgctgccgctgtggctgccgcccgttcgcacagctgcgtccagttgtccgaaccaaacatcaccgcgtatgcctgatccatctggctgagatggcgggcaacactgccgcaactgccgccgacggggaccaggtagaagcgcaagtgattcagccaatctggagggcgcactcccatcagttcgacgtagtgtcgcagagtggctccctgcagccaatctccaccaatcagcagcaccttcaccgtgtgcggtggcttggcgttggagttgcaactaaacgtgggcgagaaaatgcattaacattgcatatttgatgatagaaagcaaacacatactacttctggatcttggccatgagcgcctgcagcaccgccttgacctcggcagtgttttgcggcacgaaggccggcttgaaggagttggcaaagagcgtgaccagtttggccagcagcgcactgccgcccaacgcctccggcgggctaatgatggtcaccacctccggaatggcgctgtcctcgccggcgaacacgcgactcagctggtcgagcagcagcttgcgtggctccacattggtgggcgacaggcaagcctctagcacggatctcggctcggcactcaggctcagggtgtgcttcctcttgccgcctcccgatgcgctaatggcactgacactgttgccaccgcttcctgcatttgccggagtattgctggaagttcggaacaatcgtgaccgcttctccgtctgagcgggcgttatcacgctcccgctacccatgctggcagccacagagctcactggggtcaactgctgctgctgcatctgctgcaggcgcaggtagtccttgtccctgggcggactattttgcggatcagagttctggccatccgtatagccagcgttgccctcattgccggaactgtcattacccccgcgatctgtggcgagcacaaaagagatgaggaaatggtttagaccatgtgtttgggtatttggattaatctaacgcaggagctatcataatggtaatggctgtggaaaactgatatagacgaaagcccatttctattcttattcaaacattaagtgctcttttaaggcttcctctcatttttccaaagacacggccattaggatgacccggttggaggaaggggtctagtgagtgacggtgtgtgtgaaactgggggcacaagacatgcggagaccaaacaagacgagtaaaaacagaatcgtgagacagaatggcggccacaaatagtaggtcccgaaatagaacgcccctgcgaagagttacccagtccaaggagcgccgtgtaaataaataataaaaagaacggaccgaaaatataattaaagctttctttattttatgaccatgaatggggaggtgggctaaaggtggggcaaagtagccatatttctgtgaggcacaaatttcccggctcgtcgtgcttgaattttcaaagccatgcgacgattaatcaaaaaacgcacgacacgtaaataaaatgaaagtgaaagaaatgagagggggtgggtgaaaggggaaaaaccggagggagcaaacaagtacaagactttaacacgtggtaggggctatactggcggcatattgccgtgattaagggtgttgttttcaagggtctgacgtctatgtcggggctaattggaaaaccgcttcaagtgcgtcgaaggttcaattgtcatgccacagacttacacacaatctcacacatgttgaggacgtggactccgttttttttttggggggggttggttagattgcaaaaagggccggggagttttattttaagaccccacaaacatgcacctcaactatgtatactgaaaacaaacgatcaatggatttgacgcacaaatcaaaaaattccccctaatcccactccaatttcgagcatgcaaaggtgcagagccgtatggtgcaacaacaactaggatacgagcaaggcatacatttacatatccagtgtacttgtggcagtgtgtgtatgactgtgtagctgtatgcgtgtgtgggctgtgcgtgagtgtggagcaaggcaaggaatttgggtgaacgcctcctttaaatattaaaaacctgtaatcctattctataaactgcgcattatatattcctgttttttgttaagaaaacacagcacaaggcttcatttcgtttcgttttttcgattcatagattgggaaaatccgaaaaaagggcacaatctcacgaaattttgtatctatgagaatgccagagaaataatgaatagcttagtaatacagtaacttttaatatctccaggatggcgttaacccttaaaaacaagaaaatagcaaagattttctggatggaaaatgtatctgattgggtgggcgttatttatatacaaactggacacggattgcagtatgctatacatattcattgtccataggatacacacaaaacgttttgtggtcccattttttaggtgggtgattgtgtgtaatatttctataattttgattggggggtattcttttctgttttttgtttttattttttagattttgctgtaatgtacacagacctggtgttgttgccgaattgttattgtttgttaaatgaatgcatttttggtttttgttattttcaagattgtaagatgaattggtcaattggtcgctcttatccgatgatcggcgctcagagttgcctgcaagagagatttgttcaagccatgcaaaatgtatcttatgtttgtttgttgtttgtttggagttgttgttcaagtatataatacttaagtagtacagttaagctaagcacttggatcataaatgctcgacttacatctatattgaacacaattgaaagttaattcagcaaagctacgaaaaaagtcataggttgcgagcttttgtttttcccggaaaatgtgcaacgccgcgcctacttttgctcggtgggcggtggtgacagtaatggtcgacaaaacaattaactgtctgtgtcctccattttccaggaaaaacaatttgtcctttttcaactgtgtgtctgtgtgcgtttcggtgtgtatgtgacattcctgtccgcaagttttctttatttttcgtgttttttaaccttgacctaaactgttgacaatggaaaatcgcagagcagcagacagacagcaccaacaaaattttacaaaaataaaaccggctgttgaaaacagagttacataataaattttacacatttccggaaaattcccaaatatgtgtatgtatattatttctactcacttgagtttattttaaaagcaattatataaaattatcaacactagaaatattattataatttattaagcttgaatttaagtcgaaatttagtgtgtatctgtattaggctaaatagtaacgtaatgaaaacgcaacgcaacgcccacaaacttaacgcaacgcaacgcattagaaagccaaacaaaattgatagaacaaaagtcgtttagtcaaactccagttaataagcacatcaataaaaatgcaaaatcaaatccgcccgcatttaaaatatatccgccccgtactcaccagctgttccggttccgggtccaaggccaccgcccaccaattggctcagatctccgccgtttccggtgatgttgtcgtgcaacataatccgcgagttggtgaaaaagggacgcagcgatggcttcggcgtggagcccaccgatatgctgtccatgtccggtccggagtcgtcgccctcgcaacaggacagcgactccagctcctggaagagcgcatccaggtcgcgttctccgcgcagcgccgccgtgcctcgatgaccggactctccctccagctcctcgctcaccttgaaccgcttcaaaagtgccacgatcttttgcttgaaatttcgctgctgcagcgagatcgtctaaaaggaggaaagaccataaaaattattattaatatttgcttttattgcttcaattttgtaactattaagggaaagggctaaaaatattaaactgcaccagtagttgtccactagaagctacaagatcttgatcataaggaaacaagatctttatattaagttgaaaatattgttttccctgctcttgcctttcctcattaataccccttaattgccgctggatcaatctagagttgcttatgggtcattaaacgaaatctcaaggactgcgacagcgttgacgacttgtggggagctgttaaaatttatgcatcgttcttttttaattgcccagcgctcatcggtttctttttgtttgtttgttttattttttaggttttttttttgtgctacggcctgtcattagtcgactttttgtctacgccagccattcaaaatgatcctgcgataaaaagccagccacaacaaaaaaaaaataaacagcagaagccatgacaataaaagccgcaggctaattttacacctgtgctacggatgttggccaggtgcgtagataaaaaggggcgcagggaggcaatgggcgggcaccaggacgaggcaaaagtccataattggcccaaacggctgagccgagtgagtcaaagccaaacgctgtttaaatatttaagcggcagcttaagaaaattgtctttgttgtgattagtacgaatgcttttaaggggaaaaaggcataaataaagcatggaatttctaaatatgctgttcgctttgaaaagaaagtggggaaaataatcccatttaataatcctttttcgtagtacaaatccccctttatatctagtccaacttggatatattcttatgcggaaatccacgaccccgatatatagccctgagatatagccatagattcgaaagtatgccaccgggcgaatctaagcaaattgagtcgagtgagcgacacgccaaggccgccgccccaacaattgtcaactatttgccacagaaattcttggccaccccgtttggggcatgcttttccccgaacttaagtatctgtgcaaatgtatgtatatgcactctttttcttctatactatggggatacatatttgatacatatttcatttgatttggccgccgggttggtggtagtgggtctttgttttgggtcggctttttgtatcttgtatctgtgcctgcggatctgggttagcagcaaggaactgacaatatttcgcaattggcaaatgccttagcaagaatgaggaggtagcaacaaggtactaacaatgttagacaaggctaagcacagtttcgatgactagaatgggctaaatgtgaataatatggaaatgccttatagattagcttatgctaatttctgggaaattcctgaataggcatgggaagaagaaattagaacaagttaatcctaagagatatctgacagaatctatgcaaatattcgataatccaaatctttatttacatggttttgtttagtgaatatttaaatcatgccataccattttatctacttcacattctttaccatctgattaaaaggtttaaaaaaagaagaacgtttctgtttttgcgtttctagttttttagtgaatgggttctgccccttttcatttgctgtatgtgcgaatgtgtgcttgtaatctatatagatagccactaagtgatatttattcactttgcataatgaattttagagccccccaaatagaagacctccgccgcctgctgacttgttgccacgcaattatatcgagcggtaatgaaaatacttttgggtaagagacaatttttgtgttttttttttgttcttttttttttttttttttgggtgccacgcggaacagctgggcgggattacacgatatgattcgatgtgattcaattgactcacccggctaaacttggcccgtgacgaactcttgtccttcatctcgaactcgctatcgctatcgacgaccacgccgggatgatggtgctgaatgctgccgggatggtgacccactaaggcgcagtcctcgattccggagcgctgcagcttgttgcgatacttgcgcatatcatgcttggccggatggttgtagtccctcggatccttgggatcgtagccccggatcagacccagttcgttggcctcgtcgttgaattcgcccgaactgaactcggcctcctcgtcctcgtcggagtactcagcaacgcgatctgcggagcaagattaacatatatgtacatatatatattttttggataagtaatggttagctggtaaactcgtatcgctggataaaactaagataaacgctcagcggcagctggcttttgcgtttcagtttatgaaccgttaagaaatctatttggattttaattatgaacaaacacactttcgtcttatttatatggatgtattcatacacttatatttttcgaaaacaattcgagttcatggtatttaaacagttgtaaaccaaatatttatatatatttgttttcatttcaacaaatgtattatttatttaaacattttttttaatcaccttttcacagttaagtgcgtttctcatcaattttaagatttcagcaagttttttttttttttttttttcgtaaataaatcacagatagcacggttgactgtcttttttaacggttgctgttgttttggctttaggtttcaactacacccgatttatctgttcatctgccgtattattgttgttattatttcgctttctttcgccgcctctttctcctcctcgagtgccgagtgtgtgaaccgtcgagcgtttgtcagtgaaatgaatgaattgctcgcagctccgcacgttttgtgcacttgcgatgtgtgaaagagagagaccgcggcagagtggggccagtgggagcgaaagagtggggtgcagttctgcccacttggcttgtttctggctaaatatagatggctgtactgctacataggagccaccgatgaaaacctataaccaatcatatacctaatacacgccctcaaaagtaactttgttgttttcgaatatagattatattgtatatcgaatggtatttgaagaattttacaaacaaacaataggtacccttacagtctagctattttacactgatattcagccagcactggtaggataagagtgggagagagcggcggctacaacaaaagcaacacctgcgagcaaagagagatgagctactcgcgcaccgagagaaattactcaaatcaatatgagcaattggggggcaaacggacgtgcgcctcgatatatattccattatatctgaacacacacacgccgacacacgtggacttagatatacatatatgtatgtatgggtcactgttcgatattactaaacaagtgtcaaaagctcactgcatgggaaatgctcattaaagctatttttacggcccgactcgggcaattgaacttaaagtttaggtaggaagtgggtgttaagtggatataaaaaggggtgaggtacctcccaaatgggtctaataaaggggcagcgcgatgccacccactcaatcagctcattgattatatatccgaatgcatacggcatacatataggtactctaaagatatggtgtataatttaattttaatggaaatatatacaagtttgtattgaggaactcgaaaacgaggcataaattccataaattgagtttaaagggtatctggagcttgaaactcctcgatttacacatgccgttcctgttgatctagaattatagagcatgtttttggatcgtgtgaacaactggtttataaagcatatatatagagcttttcacacatatcggacaattacattgtttgcgataagatttgtgccatcgacttctgatgtcacttgttgcactccgattcccattcccataccgttgccacttcattttcgaaaactggctaccacttccactcccgttttcagtccatttcaattacgattctcatctgtttttatacccatcactgcgtaaatctaagggtattcatatgtatgtataaactcgtacacttaaatttgatatatgtatatatgttatttcttgctaaccgataatatgagctcaaaactcttgtttttaaaattaaatcagttttattagccaagcccatatatgtttgtatgtatgaaaccttttctaacgatataccattcgctatggatattatcaaaaaggtggagtaaggttttgtaatcaaactatcctagaatggtatgcatttacctgagtctccgatgcaattttattgcgtttattagcattggaaaattaaggggtattaaatactcgatcttcttcaccataaccccgccactagacttgtttgtttattttctcgcatgttgtgctgtcgttatcatttagccaaagctattcaccggccggtttctgtagccggttgtctgcgcgagaatcgtgagagtgggagggaaagtgggtgtcagtgggtgctacatctccgggtggctcctatctgggtatctatcgcgtgctaggcggtgctagtggatgagctatagcttcccatccggcactgtgtgtgtgtgcgtctgtttgtgtgggtgcggagcaaactccggttaagtgtaacttttgacagcctcaaagccgttaagtgataagtacgtaagaatgattaaaaagcgggcacagcaaggtaaacgaagaatgaggcggggatagagtgcttgggaaaaactgctggcagtggatgattaattgggccaaagcagaagctgcataccagcttattgactattattcccggccccacacttctatttgccgccttagcgtgttggttgtaaagtaaagaaaggaaaacaaaaaggagaacagagagctgaaaatatgtaagtttcctacttgagggcaattattttgtttgtcttcgttgttgcaattacgcagacaagttaatgacttctctccctggcattgttttcctgttttccattcttttcagtatctattcctttataattgcatgcaattcttaaacactttaatgaccttttccctgtctggggactttgtctatgattccaggaaggcgaacgcattcagcacaagcacactttggtccagggaatttccacgaaaagtgttttccacatgggagctaggcaaagcaaacaaacaaaggctaagagagcgagagagatatacatatactacaccataatggcagacaaagtgttgccaaaagctatgaaagatgtgtcatgggcaaaaccccaccattcagactcattccttgccaccaacacctcagcccatttggattcccatttccacctcgccacaacgcacattcatcccacgctctgttggtgccacgctgcgtatgagtaatgaaaaccgtattgaaaagcgacgagcgacattgatttagtatctctgctctctacatatatccatgcgggagctcggagaaacctaattttccgacttttagctacttcgtttcgatagcttaactatacattattttccataaaataacatacaagcaaaccattagcaatgtttagaccattacagctgccataaaataatatcttacatttttacaatgttctacattaccaacgaccttaatagattttccaaactcaagataggtcagttgaaatattaaaataataaatgtgttattgcaaaaacacaatacacccttgaaccaggcatcaagtgccgggtaaacaagccaagaggaatagcaaaactggcacagaaaggcaatacattggtttgaccttggccagcacacgaatcttgtcattagctgacagccaatggggtggccaagtgggtggaggtagatggtttggaggtcggaggctgaaaagatgataaccagaaaggggaaaagtagcaacagcagcagcagcagcagcgtggaagtgaacaatgtggatactctcgacataatttacgcatttcgccattaaccactcaatggttagggtgcgcaaaaagcagtaactttggtgtgatgtggggtaaacgggcggtaaaatagtatatatatatatataggggtggctatacggtcattagaggcgcaatacagcctccctatcacccataccaatccattccattccattccattccctcacctcttgccatgacacttctctgcacagcgtttatctctggcactcaaggacaaatgacttaattcctgtcgttgtggcaacagcacagggggaaaaaagagaaaagctgtcggagctgtcatcaacaggagcttcataagaacgagaatacgatgaagacgcggaggttcagcaggatgtgggcgtggcattatcctctacataaattataagcccttaatcgaagggaatagccacgcagatggggccagaaatcacaagttttttgattgatttgccttcggccttgcgagttatatatggacatcattaggcaaacatccaagggctgcaaattaagatgaccagccaacaagaagttattaaaaacgcaaatatagcacatttaatacaaacactttagaaatgattaaatattgttaaacaatggtaaacggagcgatttctattcatagttgataccacgagtgttattgccatgaaaaattaatgagccaaacactccgattaaaacactcataaaacatttatgagtacttaaccggcagaacacatattcagtacatattccttacaatcctctgaatttttcgtaaactagggtactgtgctacccatttacatagggctcttgtttttcggtttactggaaggcccacagtttaagcccgttatggccatggaatattcatcatgccaacaccccgctcaaaagtccacccagaaaacaagttccgctactcttgctgctcgctgaaggagcgtccgactggtaatggtgcctggctcggcatggcacctgcgggcatggatgcgaacgggtgcgggattgccagtggttgctagtgggtgggtgggtctgactggacgaggcgggtgggtgggtgttggtcggtgggcgaaacgggtcgaggtgcgccggtcggggcatattcaacaagcagcgaacagccctgcggcaatcaggccccacacccaacccacaccgaaaaaatatatatgtatataccattaggtccatattgtcagcaatatggttgcaaattggtttatttacttgagtgaatcaaggtataaaggagatatcctatgaaattaaaggtttaaaatgtgtaataccaaatcgttttaaaactacttttcgcccagtgcacatgtttggcgtttttccaccgctgccagctaccaaaaacaagaaccgagtgccatcagcagcgtttttggaggccggaccgcataaagagaaaatcaatacaccaaattgaggttgaggcaaaaaggttttcctcgcattgcccaatgctctctgttctgcttttgaattccatttttgcaaattagaaagcgagacccagagctgtctgtgcctgaccccacacccctacccacttttggccataactaagttcatttagctcgggttcaagttctgaccctcagtgtatatgggtctgactgtcactgccaaacgaaatgaacggattgaacgcacacgggagccaaattctcgaaccttggccccgtgccaagtggacagcgaaaagcaaacttctgatggccaccagtcgagtcgttcatcgtaccctggccacgagtagggattccccagccaatcctctgcagcaccaaatgaacagtgacaacagtgacatgattaatggcaaataaagttgatttacagttctcagtttggaagggaaagtaagttagggctgtgaaaccaaaagtggttatatcctattctagttagatttttaaagcgtaatacttgagtctacatgtttaaagggtgagtgaagaagctgttagccaagtaattaactccactatatagtatggaaaacaaacagagttaacaaactaatgatatcctttcaaagggaatatttatgtaatgcttttggtttggcatccccatgtcagtgattagtttgccattagaagctgcaaaagtttgaaccggaaaatcacgttgcaaagattcaattttgcatgtcatacatatttcatcagcccggcctggttagaggtgagcttggaggtttgacctttacctttaccttggccctgaccgagtgacgtgagaacattgcaaatccctcctataccatcatgccatccacccgaagaagggctcaacagcttaactactttcacaggagcactcggtgcccttttggaactcatctcaaatggccactccttgtagacccttttcttcccttcgccgtcgccttccccttcccccttccccttcctcatttatttttgtagggccaccagatgttgccgatgggaaaccgcatggtaaatgagttttccactcgctcaacgctattttcataattgaatttcctctcgacggagctcgctcttttcggttcgcacgccattctcttgtcaaacagaaatagctgaaaaataatttcaattagattgccatggatgaggcttctgttgttgccatgtgggggcctactattcgcagccatggggaaattcatggcataaattctgaaatgcgtgcgctgacgtcactcgtgggcacctcgtagtactccgcctacaacgcccatctcgccctcgtcccccttgaattgtttcacaagcaattaccataaacatcagctcaaattgggagcatcatctgatctcaggacagccactcatccgtcatggagtgctggagctgtcggtgcgctccaatctcctgccacctccacatccccacttgggtcattaattgcccagtttgcgtcattagcacatctctaatctggactgggcctgcgactcgtttgtccatttattcgtgttttatgaatttaccaataaattctttagctcagtccgtttcaagggaatgctcatctgtgtggatgtgcccatcaagcatgtgacattagtcatgcgacagtaaatcgaatagtatgaactttggaatcgtttgcatagtcaaatgaacttaaaatatctgctcatccgaattcagtttcctgcgatacttaaacatccacagaattttgtcaaactcacctgccagcaggacgctgttgttgttcttattgtcatggtcaactggaatggaagaaacgcgctctgctcgcagacaggccaccacggtgccaggtctgccattcttcccggaagcggtgagctcgatgatcatgtccatcgacttctggagcaccgcgtccatgcgaatgatgccctcggccagcgttttatagcccaaaatggtgcgtgatttgtattttttgcggcgttgcagtaaaataaccagtctgcggatgacaaggagagcatataaaatatacaaaggatattttttgtgtaatgcaacacccacctattgccatctctcttgataaagtgcggatactgcagactgaagtgcaagtccagctcggtttctgtcaagggcacagccacgcccagtccgcctccagtgcccacactacccggagtgccaacaccaccacctccaactcctccggccaccgacatcggcgagttgccctgcagggaggcggatgaagtcagggccaggccgttgatgggaatctcgtggctgcgcagcgtcctcttggagctctgcatcttcaccgcgagcgataaggaggtggtgtcaccgggcagcggagtcaggatggacagacgtgttattgtcagcgaacagagtctggaaaaaatgcaattgggaaaacatcctggattagtattaaatcgatacaggaaaagggtaaaaggaggtagttgtgatattgagaagtttgcagtgagaattaaagattagaactaaacactctttaaaatcgttttaagaaatcaagtaaagatggccaaaaataaaaaaggaagaaaatgaaaagagctcgttaaatgcatttccaatgcactgaacaatcgatcatcgaaatctaagcgaaaaaaacaatttcacgccaagagatttttcgatgcaaggcctggaaagcgatgcagaaaaatcaaaagtaaaatgcaatcaagtagaaaacaaaaatgttgtataatggaaactgaaggaaaagcaaatgaaaatggagaaaaacacatgcatgtgccgaattgagttcgataaagagtgagtgcaggggaaagacattaaaattaaagttttctctcgtgcgattttcaaaggaaatatcccactctcattttgagcaaagtcagatgtaatggccattataatcgcttataactaagccataaaggaaattggatttcagttttcgtttttctttttttttttttttttgcactgtcacaaagcaaccagccgggcaacccaacagaaatctcattttttaacgtttttggcagcacaagacaaagtccagattgtacgagtatgagtataaataatttatttcctgattaatttctgctcggtaatgccgctttgcagtgcaggagattacgtactccggacatcttttgttggacccgctcactgctcactgctcactcatcatctgcttaaatcagcgaggatggacgacgccgttgggtggagtttgggtgatcttggagcacgggtgcatcatcgtcatcatcatcgacacgatacagtacgataaagatatccggcttggtggggtgtgaaagatatgcaaatggagctgactaagcagacagccagcggatgactcgacaatggacaatgattggacgcccgatgggcgatggactgatgcagatggtggacgggatcaggtcgaaactatggccagccattgattgccggacaatggtagtcgcttattgaattcccttgaccacccatcagcgaaacagagtaaataaattcaaatacgctttgatggctattcaaaaggtaacaatacaactattttaaatgatgtaagcttattataaaatatgtaagtatttacgtagatgaaaaattcaatagcatttatttagttacatttgatttattataccattttcttgctgtgcaactgcaaaatgaaagcgcttggaatggaatgcacgaggggggccaagttcgaatgaatgcgtagtcgtcgacaacgcgcaattaattacttaattaataattcaaaacattcgttttgttgccccatgcaaatttcattaaagggggagttgaacgaggtggtcactgggtgaagagacaggaacagcacttataaggcaagtcgaacagacagttcacgcaattcaaagaattcaatgacttggttatggttatgacagaaaaagtgggacaagtctatcagtaaagtgaatgaaagaaaacaatattgttgatactgtaacaattggtaataaatggacatattaccgaaataacatttctcatagtcgatgacaattcgcgaatggatcctcaaatttgtaaaagcacccaataacaacccataaaaatcctattaatattaagttgctcgaatatttctactatatttccgcatttggacagctcttcccaagtggcgtaaataaatcaccaaacctatcacgtagatcagtacagtatttcatttttaactaccaaatgtgatcagcattagaaatgagtgttcgtatgactaacgatgtatgtatgtcacttcgattggatcggaacccccatattaccgccaaagaacactggtttccattcaatttgatttgcgtgcacttgacatggcatgttcgcattgtttgttaaaaataagttgacattttattgttgttccccgacgacttgggtgtatttttaaatgtttataagaaatcgaggggcgcgtttcgcttgttctcgtcgcctttacattattcgattttgcctttgattttggtttatttagctttattgcatttgatatttgttttcgtctgggcaatgtcattgactggtcgagtttgaaaagcaaacaacgcttcgtcttcaggtttaaacttgtgggttctgtaagttttactttttgtccgttcacaattttagcattacgtttttgaccattattttcttagcattttgattgtcatggcgtttttttttttttttttcttttgtgagctgtgcccatgaatgacacacgtcgaatgctgccggaaagcattttcttatatatttctgttgcctttattcgcgtctttatctccgtgagtacctcctcgtcccgtcatccccgactatccaatcttttctttccagttcatcgtacccaagtcgccaacaatgttttctttgttgggaaggagctttgataaatgaccaattgaggtagcggacaacggacattggacatgaatatgaattatggcctaggggattgattggctgatccatggggataatccaatcttcttcaatagtagcaaactactgtctgcggcacaaaaagatcataaaaaacgccataataagttgacttaattggaaatcagaccaattacccggttaagcactcgacaagagttttggtattaattacttaatcatctactataggtacatgtataaatagagtgcgatagcgggcgtgtacttgataagctttaacacccccgtgcacccactttttatggcacaaataaaatatgaaaaaaatggaaattgaaactgattagtgcagaaaaataggaggggaaaaatgagcgaaatgaaaatgctacataaaaacaaattgagtccgcaaatcgcctcaatcaaagtgaggagcgtataagcaagacggacatagacagcagaaagagacggaaactgtgtcactggcgcaagattcaagttgaagaaagagagggcatcacatcgcactgatctccgccggtccagagtctcaataaagactaaatattttgcttgacattttcgagtgtgtccgcataaatgtgaatttatgttgatgaatggctgctcattgtcccagtaatttatcaacaaaatttacaaaataatgctacacagctatagtaaaactattcataattcataacgtaattcgtgtgtaattcaaagacggaaaaatttaaacaataatattaaagcatcagaacaattcctgcggagtaagtaaaataatcacattgcaagtgctacaaaattctgtgcggtcatcacaggttatgtgaaaatgtatgatgtgattcgtaagtagcacctttgacaacaattccggtaataaaacgacactgggcgcaaaaacgttgccccaggttgcgtgatcgcgttcatcacatatttagcattaccattttcaatttccatttttgctttctcgttgattagctgttgtaagttgcgagttgccgtgaggcggctgttaacacccccagacaaacggatagataggcaaaacagactaaaataccgactttaactggctattttgttaacatgttaatttgcagttttgtttccgccgctaacttatccgtagattcgcatgcgaccagttactgcccgtgtgaatgggcccggtgcgatgggatgacgggaagacgggatgacgggatgatgtgcgcatgtatgatatgattcacaatgatagtcaccgccggcgggggcgactcgtagtggatggctcaactgccgccatagagtcgtatgcaaattgcactatgcatttcctgcagcgacgacaagtgcctggcttgcgtagacaacaaagacttgacttgaccaccatatggatcgagccggagacaaagtgagacctggctggatagtcgcctcgttccaaggacagcaggcccatgcggtcgcattcgctgacaagatgtcaagctgcgaaagagcccgtcaaatcaggaaatcgctgccgtacgattataaccacaagtgggtaaaccagtatggggccacgggtcgaatgagttatacctaagagtgacacacggcgtatgagtgatgcatgtaagaaaaagtcacttctaggtgcaagaaattaaatcatgttttctaagaagaatatgcatgcgtttctagtattgtgctctttttgatgatgattattaattagcggctccacagaaaaacacacccaaatgctccagggtatttgcccaaactcgaactcatctacggtcgccatcagttaagctagtttatgtcattttgtcgcgacttatgggcaacttttacggtttcatttaagcgtgttttattcgttgtcctttctttttatatatattttgcatttccatttcgcctggcagccgttcggttgagtttcagcaaggattgtgagcatgagtcacggacgcgcggggtctggttttagtttagagccactggttaaatgaatttgaggcacgatacagccaaaccggttaaaaccgatgtgtgggtggcgccacagagagtggccagaagtggccgcgaagtaagaggcaggacgatggggcttctggggggcgtttaattagagggctccgaaactttccagcctaggcattacttggcgcccgtctgtcgctggcttgggtcattgcattattgatcaactgcatgccgaatgcgttgccatccgaagttttccggagtgtgagtcttacttatgcatgccaactacttgccacgacaccagagggcaccattgggtaccagaggggacccgatcggggtgcttagttaatttatgcgagaatcacgcaggccctgactgactgactaactgactgaatgaatgacggaatgacggccataatgacaaagtggcagaccgacgaacgggacaatgcccggaaacggatggaacccccaaacaatggcaaccaaagacgagctgcaattgaattcggaatgttaaatgggaatgtttttcggggacagacccacagacgcagccacagagtttgccattgaaattctaataaccgaatgtgtagaatttgctatatagacgaacaatactctgaatatatctatagttaaaaaatgtacactttttaaagaaagaactgtctgtactgatatagtttcgtgtctaatgtataaaatgcaatgtacaaactatacaattaaaaatgatatgacagcaaaagctttccagtagcgagagttcagtaacctccccatcgtagttaacctacccatccaggagggtatgaaaatcgatgtaactagcgttggtaatttgccacaattatcaactaaatggcactttacgtttgcgttctccaaagtccctataacaacaaaaacaacaacaacacaatggcgacgtcatacggccaaagtgggtgtggctcagctcctccatatgcgaccaccccaaaccttaacccatgtgggaaaagtgctgcaggccagctggaaaggttactccggttcattcactccaccacacagccgtagatcgaatatgacacgaaacttatggtctatcaattattgagaggtaccataaaaaatggaaaaacagaaatagtttaagtgcccgcagccgcaaacgctttcttcgttcttactataaatattgtaaacatcgattgagtttcagcggctcggagtgcaatcgatgtgtttaaaagcggtacgtaattattttcacaccttattcgtttttccacttttaacacctgaatcattcatgagttttgccccaaggggttgggttcgctgaatatgtggtgtggttagcacttggcccggcgcctttaaccggcggaaaagtgcggaaaatggccagcacaacgcaaacgtaagtgacctaggacaggtcagcaataaaggaataatttaaagaagaagtgtgcaaacaaatcacaattaaataaatacttatgctaatgctgcacttaaggaaacttagatctttcttagtacgatatagaaagtggcttagactagaacccagtttaattttttaaaaatttcagactgttttggagcttgttttacctcatttttgaattgaagcattatttttacgcccacttaaagtaacaatgcgctaaagattaacatcatttaataactgattgtaaattcccttaacagcataaaaatgtacatgatttgcttgagatactttcaattcccagacacttgccgcacttaattgaaaacaacaatatgtgcaataaacaattttcagcttcactaagttggctgctttctgttgcatttttgcttttagtactgccataaggaagttcataataaacccgagatttcctgcagtttctccccagctttatagcaacataatatgtccgtaatataatttgctcaacttgaagatttcacatatccgcagtgtatctttatattttgggtgtttgcacttgagacatacataattggtgagattatgacgtggcctttacgaggtaattagctgaaatacaacaccatccatataagctggttgtgtgtgggttgatgagctcccacttggccgaatgtgtgtgactaccgatcgccaaatgactcagtgcttaaaatttgagtcttttatacgttttaaatatttatttaatactttagcgagctgttgttccaattgagcgaacgccgccgtctaaacttgaatttaacgagcaatcgtgtgacacattcctcttattatttattgtttttattactcgaacatattccatgtcgccgcacaattcgttaatgacccatatatcatatgacccgctcagtctcggccacaactcgatttttctcaattttccctttattatccccgccgccaacgagcatttctgcggcttcagattgtcttcgacttcatggttagaaaagcaatttgccaatgccattcgattgattgcataaggtattgatgccataagccgatcgaatccatcaaaagcactcgccgtcgttcctgaatcctcaagagggttcgaaatatatgcgaaacagatataaacgtaactaatccgttttttctttttctttattcattcgtcagaagatgcttttatcaaaataagtaaatattaccacatctgaactgataaaatgtgtcaagacgcaccgcaacagttcataaatattcaggacaaattttataacaatcccaaatgtgtaataaattaaaacaacctaggctgacgcaaattgttttatttttgaaacgcccattttatgtgtgttataaatacatttgaaatgtcttcagcttgttccggcctcggaaaatcaaattcaaaaccaaaaccaaacccaagctaaagccaaagaaactggcatttatccccaagagaatggacaagttggaggtgaagcacaagaccagagggccgaaagcgatttaaacgacattttccaagagtcaacaaaaaagcgaatgacaccacgttgagttaatagcccggcgcacccagaatcgagaaacttaaagtgttcgctgctggatagtgtaaggcaatccaataaaattaaccagcaactgacactatctgactgggcaaaaaaaaaaaaaggaaaagcgctcttcgaagaacgatcctactcctcgcccccaataaatccaaattggacgctgcgtgtggtccgcaaaaacccagcaggatgtggaagccaacaacggcagcacctcccaacttgtttggccgcccatttctcattttaattgcatttttctggccaatattttagtttacagtgtgtagtagtagtacgagtgttacaaccgcaaacacagaattcctttctgtgaaattgggtaatcaaattgcgatgacttgtaaattcgttatctatttcaattaaattaagagatgcaacaccagaattgttttcacagatagagttatcttgaatttcttccaaattttagtttagttattctatctatatacatcttataatagatacgtttgacgagttcaatgacattttattttcgaaatcagcaagcaactgatatatatttctagaaaacccatcgaagtaacctacaatataaattctattaatctcagtatacagttcgtttcgtcggaaatgcaccgtacatatatccataaaattaaaattatgatctgttagagcgtgctcggacttatgaatacttggctcttgtttactctcgagtataaatgtgagatagatacacagacaacgatctatatgtaggcataatgccacaagatataaacaatgaaagccttttgtttatatcaagcacccacaaaatgaagaattcctcagagatattccaatttttaattgccaaaggccagataagtataagtagattgaaattctccgacattccatagaatcttaatcatgccgatttgcgaggccctgaaatgggaattacccaattgatgagtcagtttaaataaaatatctaagcttcttcaatctttaaaagcagcaaattgtaatactagctcagaatgttatcaaattatcaaaaacagttttatccattcatggtttaataggggtagaaacttttcaaagataaacttcttgcttaaaagtgattacaaataacatgaaaacattctgctctcaaagtatttcgactttcaattataatttctcgttaacgaaagaagattacacaaatcggtttaaatactttgttgccaagtaagggccaagtcaaaagccaaagttgctcagcagctccgacgtaggaattaagctcgagctgaagtcgcaaccgcaaccaccgacctcccaaaccccaccactaccccccaaaaaccacccgcaaccctgcggctcagccacaaactgtgtcaagtgactcgcagtgaagctgccactccggctgcttgctactcttaaacccctggcccattcctccttttagttaaagttcaacattggcaaagtttttatgttaatacgcaaactataaactactttcctccgtatttattaatgagaatatgagaatatcatctgccggaattcgtgtcaagcggtcttatttccctccacttaaatactcagccagtccggtcaggccgctccaattccataattgtcgcaaaagtgccagcaaatcgttgaaaagctatttcaacatatacactttttggccacgaatttggcgaaagaaacccgaaaatagatataatgaaacctttcactttcgaattgcggctttcttccagtgactcactcgataatcacttttgcagtttgccggcacgagaccaaacaactagttaaatccaatttcgagcagagattggctgtagatctttggatgaccgaccctcaccgctatcgaatcgattcacactttcggctcaatcaatgtgttttttatttgcattttatcgcatcccccctccccccttgaggctatcaactttggacaacatccgatcatacgcatacgtaatagaaaggtgagtctgaatgggattaccgcacagagaagggtcgttaatgggttaattgaggaacgatttgctgccggtgtctgataagccatcacataaattatttgatggctctatcagccatttgattcggttagatgtagccgatattattggatattaagtgaatgggcgtgttactaccaacactccattatatttctgttggctcaactcttttacatcactatctaaaaacattgttatgtatttgttatattatttttttcattaacacaatctcaatgaatgctgtgagcttagaaatctttcaatttatcaccatccatttgttggctaccactacatttaataataaataaaagtaaattattaatcatgttttagttcactattgatgcacaaaaatatgttacatcatatccgatagatatttttactagcgcaaggggttttgttaaataattaaacaacgcctctcgttatctaatagattacactatctcagcccatcaattgttttacattaagttagattagattacttccagttgcctgttgtttttggagctttgttaaccctattagaatccagttttcaatatcttccaaatcttttcctaatgtacgagtatgcatgtatctgtggacccgtttagagccaaaatgaaatgctgggtcaacagcttataatgcatggaaacagcggctgggaaccgaaccgcacacaaatctccctaacatggccatttcatggccaacggaggaaattaaaccactccaccaggtggagcaactttcaatgttttcattctctcggtgcccaaaacctgccccgccaacgccaacggctctgctctttgcctttctgctttcctagacgacgtactttgtatgctaataaattgcacttttatgaacagctttcgatgggaggcaccatctacagctggttgcttctagtgcatacacagtagagcttccatgcttcccaacttcctttctgattaatgctcaaagaattaatgtgttagggtcgtctccaatttctttcaacaaaatcgagaatatgcaacttaatagcctaaaaaatgtttatgttagtaaattccatcaaatttcatatcatttcaacaaaaacttaaacgcaggaaatcgattcactcagcttttaggcaatacatacattatatgtgcaaagttaggaatcgtctggtggagacttccctgtgtcggagcacatgctcatcgaaggcgggggtgaaggtacaactgggggtctggaggcgaacgatttatgcagctgacatccgtagctcgtttggcctgtctgcttttggccagcatggaacctggaacatggaactgggaactgggaacttgggggagcggaagttttcgccaacttgctcgttgtttgcggctgttattgcagttgctgccgtctttggcgttgttgtagtgactgttgttggtgtagctgttgctgcacccgttcgtgttgccgctgtttgcggtgatacggtcgttgttggtgtggctgcaaaactccacttgggcgcaggttgccgggcgagtcaacaaacttgacgttgacatgcctggacaatgtcgtggtacttcaagtttccacgcttccacgccagcaccttcgccttcgccttggacgcgagtgcaaacaaaaaccgagggggaaatggaaaatggaaaatccagtgcaggcagaagcagttcgaccaacacactggatgagtcaacggtcgcgaagacctggacaggacaggatggctgccacagcagaaacaacaacactcgctctttgttgttggggaaatgaattttgcattgtttggattcgggcttgcaggcgattaagaatggatataaaacactttgattgacgacctgacttttagtttccagatcttaaaattcgatatgatggcaagtattgtagggaaaatcaatggcttgactactccaacgccgtggtatactgtataattgattggaatctaacgactctgtagtttctccttagagatgtgaaaaactgtgcttaatccccacctgacttggtcacacacacacacacacattctcatggctcggctgctggttgatgctggcatacatcgaatttaattgactttcctgctgcacttttccatcgaccctaatgaccaggagatttgccagctgtgggcattaacacgccaccagctcaactcaactcaactcgacactcgacttggctcgggatcgcggttaatgcgcttagaggagaatgccaccgccgctaccaccaaaactaataccaccatcagatgcaggggagggcatctcggatctccccgcctcctccggctgcactagagaatttgggtcgaggcccggcttctggtctctgaagggggctctccatcacccgaggggaaaattcgtttggaggaatttgggtcagagcgcggcaaacgcaacaggaaatcgattggtttgggttttagtttaggttttcggttcaatttcggtctagccgcaacaaaacagttaagaagctcgagtgcctaaccactttcttttccctactcttatcttgttttcatttattcctgttcgtggcaaactgattgctgaggtggttcccccgcccacaaaaagcactaaactcccacagtgacacacctccacaaacacccgcgtgacccacactcgaagacctgaatcatcggtcatggccaaaagcacagctgctgactcgtcgccggtaatctcgatgatgcacagatggcgttgggacagcggaaaagcatcagcagcagcagcagcaccagcagcactgacaccgtaataaagtaagtcccattaaaattgcacccagaatcaattcgaaaagctatcagcataaattggtataccctggaaaaattagcaacaactggggtatatacaatctaggttctctaaagacaataatacatatacacagtaagcaaagaaaacttaacttttatatgaagttttaaactataatgtatgtatcttattgtcaaatggttggattaagtttctatccttttgctagaggatatcttcgcgttgaacaatcaaattccattcgaacaacgagcgaaccattccgttgacataacatttcggcataaacaataaagatacaaaatattgccactgaatgcagggaaatagccaacggaatagaattcaatttgtcaaacacagacaccaatgtagatgcagatgcaggtacagctgctcggatacagatacacacgaaaagatacatgtgatgctgtgacgatgatgctctagatattgtttggattcgtgcaaaataaaagaacgacagagccagcagatgagaaaaaaaaaagttcaaggctaacttttcgtgggcaaacacgcgctacagcgaaaaaacaaaaattcagccaactgctgtcgcttgtcgcgctataaattctacttatagatacagatacaagaccccgcggcactccgcacctttaacagctggcacgatcggccggcagagatacaaattggacctgggaaatatgtcactgacaactttggccgcatctcttcggctattttggttggctttaaattaatttctagtaaaaacattggcgcagtttataaattacacgaaaacgatgaggaaaacattcctcgatgtttatcagaaatcgaaatgccgcaaagcatttcacatttatttataaacaaagagctgggcacttaaaatacaatcagacctgggcacaaaacccaaaaacaaaaacaaatgggaaaggaaagaaaacgtcgcataatggagccaataacatcgatcaatccatcatccgacgtgttccacttccttgggaacatgaaaaacatgaaatttcctggtgtaaaaataaagcgaagcgaaccgcaaataacaaatatcacaagcaacacacaaacatcaaattaaccgaacctatcccaagtgcatttttattgcgtacgccgaccgcagccaaataaatgattcgtaaatggctgaaatgcaattcaattttcaggtaaccactgaaattaacaaacgcgcaagcaaaaccaattctagataagcgccatgcaaggcgaaaggggaaggattagtgccactcaaatttatgataaggctggcaagcaaacagtttggaaaatgtttcccaaaaagtgtcctgctgataaaggcactccaaataatgtggtatgttaataaagataaagatagcggatccctaataaaatctagccttcatggagtttcaattactttcagtaaatgtcaaatattctcaagatcctcagataagaattcgagtcatatctaaattgttcgtagaaaattgtatggaaaagtattccaattacaaaagtaaaagaaagaagttcctcaagaagaaccaatccaattaatgcggtgcaaaaccctctagttttatgagaatattaagtaaattgctgcgtataacagaagataaggatatggtgattcacctcccccttcgacgcattgttaatcagaatggaaaaagtttcatttactcgtatcttccatgaaagtgaattaacagtgcggcaatttctgtatttcagcattggcacacaacttttccgcaaccctcagacaaatcaggcaaattaaaacgagatacacagatacaaactttgccaaggataatttgctacgcctcgaacttgaatgcatttcacaccctgacattgccaccaagtagatgtgtgtgtgtgtgtgtttgccctctttattccgttttctgatttgatttgaatttgattgctctgacgggtcaagcggatccggatgaatcagccagccatcggccgggtcgtcaggcaaatgcgccggatcagacgggtcacgtacgtctggcgaccgcaaggaaaacttacgctaatgccgcgtgagtcctaatcaaagtctggatatgctctacgtgccgcattcggtcgtagataaaatcaacataaagatacaatttgcgcagtcgtagggaaacagggaaataggaaatgtgacgacacatggtgcactgacataactacaaattacatttactttcggctgcaattaggcagaatgagatttttaattagccaactggaaaatatgccatctttactggcttttttgggctctggtgaaagtttcaaccccatcttcatttttcgggcgaaaagttcaaagttggtgactgaaaaattccaaatttgcttgcttagcttcagtttctaattataagccagccaagcgagcgcataattataaacaaacaaagcaaaacaaaaacggaaaactcaaacccaaactcgaaaagtgtatcccaaagataaaacataggcggcatcagcggtttatgacctttcgaacagacaaaaaagagccaccaaatggggtgtgaggtgccaaaagaaggcgagaggagcacatttggccttggccatcaaatatttagtaaatactttccaaaccgcctgatggtccttctacacagtgaaaaataatagataaattgtaaaacacttcagtttttaatacacatacaaaacattcgaatcatattcattttgtttcagtttaaaagttcattttacatgtattttgtagattgacaacttaaaaagatttttttactctttacttgcttaaactttctttgaaaatgggcgtgttcaaggcctttggctgttttgatattaatgcccgtctacttgaccagtttatcgccttgagagctcttaaaatacacaaaagcgattaaactcggacaaaaagtgcgccttgccttggctaatttctaatttgtgcgacgcagtgtggtgtccgccccaattatagattaatctttgtccagagtcaacatctgagccaaattggacaaagtctgactcatccgcatgcaaataggccgctaattcttatcagccagaccagaagaaccccaaagagtagcggccagatgagatggggcattactcatctcgggttcggggttactgggccaaagacatggcacaagacgtgtggaatgaaagaagaaaacaagcaaaacaatgccacaaaacaaacgggtttatttgcggatcgccattcaaagatagaatcttatcaacagagattgcgaaattataaattctataatttatacacaattggtaggtgtcataaaacatattttaaatattgttttgattatacagcgattattcagcctgacattcattataaatatccccttgatcttaggttacaatataaataacatgttacttccttcattatttcataattctttatgtgccttactttaatttcaaatcttccatcatatctctaacattatgttgggttaggttgggatttaattgcggtcagatttactatcacgtccaaaaatgtcgacattgttttttactacatttttggttagaggggtcaagaacgtaaaccttttttaatttttgtattccaggaattgtagtttaaaattacctccttagaacagcgtatttgaaacttttatggttttggctaaccataaaatcgattaattcctaaaagtcaatctctttcataatgcacttaaaaactttttcgatttcttgtgccgatgcgaataaataaaaatcagcgctgtcagcggcaacaacaataccttttaaataacagttagcgcagttgctgcttttgttaactaaaaataggaacaaaacaaaacccaatcgaacgaaaaccgcggcacgaaaccaaattggcagaaaatcaacaataagctgtaaacaaactgacgttgtgtattatctttttatcagatgtataacctttaagttcagtacttcgagggaatagtaatgatagggttttgtttttgttaaagctgatttaagcaaggcaaaatttatacttttttaatttatatgtattcaatgctaagctatacaaataatcttgattaacttttgtggcaatgtgatggcttcaacaacaaattagctacatcgccgactagttaagtaacatttaccaatcttgttaactcagttggcatttttgtgtcttgctttgacaaagcaaaacaaaactaaccaaaacaaaacaaaaattggcaagaaactatgcttttactgtccctacgtcgcattttgtatgtatgtacataagtgaaatttgtttacactcaccttgggatgcaattgggcggcgttcggtccacttcccaggcggcgaatagcttcatgggcaccggtttctggccagtggtcattcctgctccggcggacaagccagccgttccggatatgccaccagatccggagactcctcctccgccgccggaaccgccgcctcctccgccactttgcaggttgagcggaccgcctccagggccgctgccgccggtgccgctgattacggcaaatttatccaccaacttggacgacttatcgaccatcttcatgttgtttctttgctggttcccgtcgaaaggtattttttgtgttcttaactgttgtttatgtacttggggtgcacattatttcgatgcaaactggggaatatatgtcgtcgagcaggcacataattttcagattttctgatagttttcacaattcaatatttcgaaagtttttttttgtcgattttctggttagcccgccaatacatacatatacacacgcacgaacggacatacacgcacgttggggaagggcgtgccgccgccttaaaaaaagaagcgaagagctgtagtatacacagtgaaaaacgaggggtggttggtgggtgtgtgggtttcttctttcgttctttctttctttcttgttgttgtgatggggcgcgcgctgcaactgcactcgcactgaatcaatatgtatgtacgcgctgcggaatctgttgcggattagacagctccttctcctcggctgctagcgactcggaatcggatttggattcggaacggactcggaagctgctgctgcttgtgctgcagctttggatcgcgtcgaaagtgccgcgaacgaaccgtcatgctccagagtaaaagtgcgaatgtcgcgttataaatctggccccagttcagctgcctcactctcgctctctcttctctctctgtcaccctctctgtatcacgacccaacaataacaatgtgtgcaaatgctatgtgcacacacacacatagacgagattttcgcaaatccccacttctgtgtacgcgcgtgtgactgtgtttgagtgcgcgcacttaatgctttgctctctcttgcgcgcataaacaaaaaagaaaacgccacgaatttcggggagcaggcaaaaggcggcactcgctctatttctcttcagcactcgcgcgcgtttttatcgcgagtcgatcacaggttaaactgattgggttattatttacgattggagcggttttcatcaaatatttatgcgtttcggcacgttttatttggcaaaatgttgcggagcagctatgttgcagcttccgctttttgcgatggggagcggagcagtgtggccagagcggattccttgaaaatatcaactgggcggtgcgggtaaaatcgtatataccaatcaataaataac

SEQ ID NO: 11276 - DNA, 4956 bp, DROSOPHILA
tctgaaaattatgtgcctgctcgacgacatatattccccagtttgcatcgaaataatgtgcaccccaagtacataaacaacagttaagaacacaaaaaatacctttcgacgggaaccagcaaagaaacaacatgaagatggtcgataagtcgtccaagttggtggataaatttgccgtaatcagcggcaccggcggcagcggccctggaggcggtccgctcaacctgcaaagtggcggaggaggcggcggttccggcggcggaggaggagtctccggatctggtggcatatccggaacggctggcttgtccgccggagcaggaatgaccactggccagaaaccggtgcccatgaagctattcgccgcctgggaagtggaccgaacgccgcccaattgcatcccaagactctgttcgctgacaataacacgtctgtccatcctgactccgctgcccggtgacaccacctccttatcgctcgcggtgaagatgcagagctccaagaggacgctgcgcagccacgagattcccatcaacggcctggccctgacttcatccgcctccctgcagggcaactcgccgatgtcggtggccggaggagttggaggtggtggtgttggcactccgggtagtgtgggcactggaggcggactgggcgtggctgtgcccttgacagaaaccgagctggacttgcacttcagtctgcaactggttattttactgcaacgccgcaaaaaatacaaatcacgcaccattttgggctataaaacgctggccgagggcatcattcgcatggacgcggtgctccagaagtcgatggacatgatcatcgagctcaccgcttccgggaagaatggcagacctggcaccgtggtggcctgtctgcgagcagagcgcgtttcttccattccagttgaccatgacaataagaacaacaacagcgtcctgctggcagatcgcgttgctgagtactccgacgaggacgaggaggccgagttcagttcgggcgaattcaacgacgaggccaacgaactgggtctgatccggggctacgatcccaaggatccgagggactacaaccatccggccaagcatgatatgcgcaagtatcgcaacaagctgcagcgctccggaatcgaggactgcgccttagtgggtcaccatcccggcagcattcagcaccatcatcccggcgtggtcgtcgatagcgatagcgagttcgagatgaaggacaagagttcgtcacgggccaagtttagccggacgatctcgctgcagcagcgaaatttcaagcaaaagatcgtggcacttttgaagcggttcaaggtgagcgaggagctggagggagagtccggtcatcgaggcacggcggcgctgcgcggagaacgcgacctggatgcgctcttccaggagctggagtcgctgtcctgttgcgagggcgacgactccggaccggacatggacagcatatcggtgggctccacgccgaagccatcgctgcgtccctttttcaccaactcgcggattatgttgcacgacaacatcaccggaaacggcggagatctgagccaattggtgggcggtggccttggacccggaaccggaacagctggcaactctgagcgccgatcatcggataagagcgaccaattgaccaattcatcttacaatcttgaaaataacaaaaaccaaaaatgcattcatttaacaaacaataacaattcggcaacaacaccagatcgcgggggtaatgacagttccggcaatgagggcaacgctggctatacggatggccagaactctgatccgcaaaatagtccgcccagggacaaggactacctgcgcctgcagcagatgcagcagcagcagttgaccccagtgagctctgtggctgccagcatgggtagcgggagcgtgataacgcccgctcagacggagaagcggtcacgattgttccgaacttccagcaatactccggcaaatgcaggaagcggtggcaacagtgtcagtgccattagcgcatcgggaggcggcaagaggaagcacaccctgagcctgagtgccgagccgagatccgtgctagaggcttgcctgtcgcccaccaatgtggagccacgcaagctgctgctcgaccagctgagtcgcgtgttcgccggcgaggacagcgccattccggaggtggtgaccatcattagcccgccggaggcgttgggcggcagtgcgctgctggccaaactggtcacgctctttgccaactccttcaagccggccttcgtgccgcaaaacactgccgaggtcaaggcggtgctgcaggcgctcatggccaagatccagaagtattgcaactccaacgccaagccaccgcacacggtgaaggtgctgctgattggtggagattggctgcagggagccactctgcgacactacgtcgaactgatgggagtgcgccctccagattggctgaatcacttgcgcttctacctggtccccgtcggcggcagttgcggcagtgttgcccgccatctcagccagatggatcaggcatacgcggtgatgtttggttcggacaactggacgcagctgtgcgaacgggcggcagccacagcggcagcggtcagtgcggtgaccacagtgaatgccaccgcgctgacaaccaacctcgcggatgcggcaggtgttgccaagtccgacatcgcagaattggtgcagcgtattcagcgctacctactggcggcaggtccctgcacgcagatacccattgccgaagctatggttaactacaaggacgaggactcctgccagatatttgtgccgtttgttagtgatgttcgcattgggtatctggacgcccaggcctcgctggatcttgaagaaaatgcagctggctccaacgcggtgggcagtggactgggttctggatccgcctcaagctcagccatccccataggcagccagagctcgccgaatgtgcacggcgtagtgtctggctcgccgccccagcagcagagcttgggacgcatctcaccgcctctgcaaacgccaccgtcatccgcatcctctcatcgggagcgaaataccagtgaatcgcttagtacgccgtcgtcggtgcagcagcagtctttcagtggagctcttgcggcggccgaagcagtggaactgcaagttgactattggcccctggtgaggccgggcgaaggtcatgccaaggagtctaagggtggcttgtccaagggcagcgacgctggcggcaagaatagcattaagagtacgtttaggaacctgcaggtgtggcgtctgccacagcatgcacagcaattgggtgatatgttcaatggactgactgttagtttcgccaccaaggaaaagaagcagaagcaaattatgcgcttgggcaaaaagaaggataaggagcgtgatctcgagaaggagcaatgtgtggagggcgtcgcccgtttgatttgctcaccgaaacaatcgcatccagtgccactgcgagtgtacattgatggcaccgagtggacgggagtcaagttcttccaagtatcgtcgcaatggcaaacgcacgtcaagaactttccgattgcgctcatcggctgcactcccatgtcctgtgctgaattatcctagtcattttaaaccccgacctaacacgggacactcccaactcccataaacaacacagatatacggacacaaaaactgaaatgtgctcggagcaagggagccagtcacttgcgcggcaataaatattatacaactgaaaagaatgataatttatttataactagtatttgtaaatttttagttaataaaccgttagcctgtaacgttcatttaagttcagttcattttcgcacgcaacttgtgaatttatcagagatactttcgacccgcaaccagacacatacagacaaacagacactaactagtttaatggtatgctcaaagtaattataaactcgtcagagatgaacaacgcgtatcaaaatatcctgtacaagaagttctagaactaaaaccaaactttgtagttgccgtttcaaaaatttctatggacacgttgctcttgcctgttggcatgtactagcatatataataaaatatatatatattctttaaccgacagtttccaagcaatcgggagcattaggccccatgatctcaaaatcgccgctcccgtttggccaactatcaaatgaacctaaaagtacagcagcatactaaatctacttgacaaaaatttgacattatacccaagcccgtcgtctatgtaaaaacatactatatatagttacctatcttatctaccatatatacaaaaccatgtgtactactcttattgttgtgatttttgaaatttcaaggcagcccagtcttattagcggatgttggaaaagcgtaaatttatacttgtatacataaatttatacacagctggctctaaaccaaatgaaagttcgatatatcattattgtatattatattctattccccctaaaatcgcattcgtgtccccgtagtagttgcgaaccgattaaatacgaaaactctgcgtgtttctctccccgtttgaactgaatgatggaaaggagttcgaggtgcgttgattgcgttgcgaagtgaaatattgtaaggcgtgtaatttataactgtactattaaatatattaaagttaactacgtaattaaaaaaggttttttttattgaaaatatttcgatgcacatatatttaggaccagcgaacatgaatcacctgctttggcagcccgttgacaagaatgcagcgctcgttgaggcccagagatccaccgattccacccggtggcagcagaaactcatcatctgggtagcccttgggttgggcaaactcttttaaattttcgttgctttggctgagcgtgtccagtggccaaacggctaggttacgagatttaccatgacgagccaggacataaaa

SEQ ID NO: 11277 - protein, 1164 aa, DROSOPHILA
MKMVDKSSKLVDKFAVISGTGGSGPGGGPLNLQSGGGGGGSGGGGGVSGSGGISGTAGLSAGAGMTTGQKPVPMKLFAAWEVDRTPPNCIPRLCSLTITRLSILTPLPGDTTSLSLAVKMQSSKRTLRSHEIPINGLALTSSASLQGNSPMSVAGGVGGGGVGTPGSVGTGGGLGVAVPLTETELDLHFSLQLVILLQRRKKYKSRTILGYKTLAEGIIRMDAVLQKSMDMIIELTASGKNGRPGTVVACLRAERVSSIPVDHDNKNNNSVLLADRVAEYSDEDEEAEFSSGEFNDEANELGLIRGYDPKDPRDYNHPAKHDMRKYRNKLQRSGIEDCALVGHHPGSIQHHHPGVVVDSDSEFEMKDKSSSRAKFSRTISLQQRNFKQKIVALLKRFKVSEELEGESGHRGTAALRGERDLDALFQELESLSCCEGDDSGPDMDSISVGSTPKPSLRPFFTNSRIMLHDNITGNGGDLSQLVGGGLGPGTGTAGNSERRSSDKSDQLTNSSYNLENNKNQKCIHLTNNNNSATTPDRGGNDSSGNEGNAGYTDGQNSDPQNSPPRDKDYLRLQQMQQQQLTPVSSVAASMGSGSVITPAQTEKRSRLFRTSSNTPANAGSGGNSVSAISASGGGKRKHTLSLSAEPRSVLEACLSPTNVEPRKLLLDQLSRVFAGEDSAIPEVVTIISPPEALGGSALLAKLVTLFANSFKPAFVPQNTAEVKAVLQALMAKIQKYCNSNAKPPHTVKVLLIGGDWLQGATLRHYVELMGVRPPDWLNHLRFYLVPVGGSCGSVARHLSQMDQAYAVMFGSDNWTQLCERAAATAAAVSAVTTVNATALTTNLADAAGVAKSDIAELVQRIQRYLLAAGPCTQIPIAEAMVNYKDEDSCQIFVPFVSDVRIGYLDAQASLDLEENAAGSNAVGSGLGSGSASSSAIPIGSQSSPNVHGVVSGSPPQQQSLGRISPPLQTPPSSASSHRERNTSESLSTPSSVQQQSFSGALAAAEAVELQVDYWPLVRPGEGHAKESKGGLSKGSDAGGKNSIKSTFRNLQVWRLPQHAQQLGDMFNGLTVSFATKEKKQKQIMRLGKKKDKERDLEKEQCVEGVARLICSPKQSHPVPLRVYIDGTEWTGVKFFQVSSQWQTHVKNFPIALIGCTPMSCAELS

SEQ ID NO: 11278 - DNA, 3131 bp, DROSOPHILA
caaatttaaaatattagtttatagaattctatttttgttaatggtgctacggtaacttaagtttagacacattcactcgcggatcctcgaacattgaacccctcaaagagtgtaacattatatagaatttggaaagcgatccgaaagttggtatctatgaggcaggataaagttcttatcttcaccttccaatcgaaagagctaagtttcaatgcctaatgcctataatctgacgtgctgacttggcagctgctgtcttcagcacgcgttgtgctgtttggtttaaacaaatccccacgcttagatccgtgatcgaaatcttgtcaagctcttaaacaaaagcatcgtatgcccaagtgcatacgactgcgaaatgatggagcttgacaattatgattacgaaggcgaatgctttgagagttgaaacttggattttgttgtcgcccggtgcacgtgcaactgaattgaagttaaggttactgcgttattgtgattcccaccgagatgttacaatcgaacacatttgtattttcatttagcctaaaacattcgaaattaatcagaataagagtttagaagttatttgtttggttcaatgattgctattttatcttgttgctaatttaccaccaggttcgtttgactgggagtttttttttaaggatttttgtttttagctgggggatgttgtatctgcgggttaatttaacttggggttatttgatctagggattaatttacctaagaattttttatatgggagttagtttacctgggggctagttaatctggcggttagtttagatagtgttgcatttgtgctgttagaagggcgttacatgggccttgtgcttcccaaatgcaactaatttttgtgtaggtaacccccagttttgtttattttatatcgactagatttgtttaagaaattacattcattagcaaatagaaaatatataataatcattgctcataacgaatatttgaacaccctccttaactaaaaacactttcgatggactatggcggaaccaacttcttcgtactccaagctgtcgatccacatgttttggaagctcgtgagtgaggccaagacggaaccacccgtccaaacggagaatctgcggtctggactagcgttaaccttgattcggatggatggtggagccatttcggttaggtcttgcaggaatctatgctcgatgttacgaaacatggtcgtaccgccagagagaacaatgttcgcatacatatcctttcgcagatccatgtcgcagttggttatcgagtgatgggtggcctcgtggatgcccatcacctcctgacccagcaaactgggttggaagagagcctccgggcagcggaatctctcgcagcccaaaacgattttctgcccatctggcagctcataggtttccacctttccgtggagatccatttccttggcatagttcattgacacatagcagagtttctccttgatttcacgcacgatttcccgttcagcagaggtgcccattgtaacgcccctctccagaagcagcttgcatagataatcggtgaggtccctgccggccagatcaactcgtacacaggcgtggggcagggcaaatccttcgtagatcggtaccgtgtgcgtcacaccatcacccgagtccaccacaatgcccacagtacgcccggtggcgtaaagtgagagcacagcctgaactgctacataaaaagctggcacctgaaagtgttcgaacataatctctgtcatcttctctctattcttcttcggattcagtggggcttcggtgagtagagccggcaaatccattggatccgcccgcaagagctcgtacgtgtgctgccaaaccatctccatttcatcccagttcttgaccattccgtgctcgatgggatactttagggttagtattcccctttttcgggctgccgcctcgccaataacactatcaccgatcacggaatccagcaggacgttcaggtgacgaggtctgcccacaatcgacgggaagacagcacggggagtatcttctggggagaatccagccttacatactccagagccgttgtcaataaccactgcggcgtggtgtgaattactatctacctcgctgctcatgtttccaggagaggttgctgaacgaatcatggtcaaatcataaaatctttagcttatttaagcaacttacgtaaatgtagatatttgtgaagaatgttctgtgcccgtttatttgttatatcgattttgattcgggaaggtatttgaaatgtagacatgttgtgtgctgtgttccagtcggatttttaaacttatgacgttaatttcatggtttatttccaatttagcgccatgacatacagaggccaaaaatcgattaattcaagtatcaatcgaatggatgcagtcgatacgtaagcagctaaaatatgctaatagtcactaaagtagtatttaaacataagaaatatttaagaaatcctcaatatgatttgaatatgtttcagtgcaatgtttcaattaaaaatagtttttaatttcttttagttttactatttaacttcaatatatataagttgatctcacatcactgactgattggggtctttcgatattttctcatctgctcatctctagcagtaaattgttcaaatagaacaagcgaaataacgagaacgtaagccttgttttatttgatataaaatctgatatcgggacttagccttattagcagtcgaataaaacgcagatatgttcgtggcccgtaaaatttcgcaaactgcaaggtaagttgcgaaaaaaagtatgcccaaatcgatgccggctgattacataaatagcaacaaatggcgaccctgatcttgaggacattataaaacaagacacacttaaccctttgcagcctggcggtgcgtggcaagcacaccctaccgaagctgccctacgactatgccgccctggagcctatcatctgccgggagatcatggagctgcatcaccagaagcaccaccagacctacgtcaacaatctaaatgccgccgaggagcagctggaggaggccaagtcgaagagcgacaccaccaagctgattcagctggctcctgccctgcgtttcaatgg

SEQ ID NO: 11279 - DNA, 1131 bp, DROSOPHILA
atgagcagcgaggtagatagtaattcacaccacgccgcagtggttattgacaacggctctggagtatgtaaggctggattctccccagaagatactccccgtgctgtcttcccgtcgattgtgggcagacctcgtcacctgaacgtcctgctggattccgtgatcggtgatagtgttattggcgaggcggcagcccgaaaaaggggaatactaaccctaaagtatcccatcgagcacggaatggtcaagaactgggatgaaatggagatggtttggcagcacacgtacgagctcttgcgggcggatccaatggatttgccggctctactcaccgaagccccactgaatccgaagaagaatagagagaagatgacagagattatgttcgaacactttcaggtgccagctttttatgtagcagttcaggctgtgctctcactttacgccaccgggcgtactgtgggcattgtggtggactcgggtgatggtgtgacgcacacggtaccgatctacgaaggatttgccctgccccacgcctgtgtacgagttgatctggccggcagggacctcaccgattatctatgcaagctgcttctggagaggggcgttacaatgggcacctctgctgaacgggaaatcgtgcgtgaaatcaaggagaaactctgctatgtgtcaatgaactatgccaaggaaatggatctccacggaaaggtggaaacctatgagctgccagatgggcagaaaatcgttttgggctgcgagagattccgctgcccggaggctctcttccaacccagtttgctgggtcaggaggtgatgggcatccacgaggccacccatcactcgataaccaactgcgacatggatctgcgaaaggatatgtatgcgaacattgttctctctggcggtacgaccatgtttcgtaacatcgagcatagattcctgcaagacctaaccgaaatggctccaccatccatccgaatcaaggttaacgctagtccagaccgcagattctccgtttggacgggtggttccgtcttggcctcactcacgagcttccaaaacatgtggatcgacagcttggagtacgaagaagttggttccgccatagtccatcgaaagtgtttttag

SEQ ID NO: 11280 - protein, 376 aa, DROSOPHILA
MSSEVDSNSHHAAVVIDNGSGVCKAGFSPEDTPRAVFPSIVGRPRHLNVLLDSVIGDSVIGEAAARKRGILTLKYPIEHGMVKNWDEMEMVWQHTYELLRADPMDLPALLTEAPLNPKKNREKMTEIMFEHFQVPAFYVAVQAVLSLYATGRTVGIVVDSGDGVTHTVPIYEGFALPHACVRVDLAGRDLTDYLCKLLLERGVTMGTSAEREIVREIKEKLCYVSMNYAKEMDLHGKVETYELPDGQKIVLGCERFRCPEALFQPSLLGQEVMGIHEATHHSITNCDMDLRKDMYANIVLSGGTTMFRNIEHRFLQDLTEMAPPSIRIKVNASPDRRFSVWTGGSVLASLTSFQNMWIDSLEYEEVGSAIVHRKCF

SEQ ID NO: 11281 - DNA, 4940 bp, DROSOPHILA
gaaaaatggaaggagagtggaacctaagtaatagcattaaaagggagagtcacgaatagcaaatatgaatcatacgccatgtgtgccaaatgcgttgaaacaaacatttgaaatgcaaagaaaaaacaatttgcaagaataaacaattacgcggaaattataggtaagtttggcagataaaaacaaattgtgataaaaagttatgtaagtctcggatacattatgcattgtcattttatcactttagtttccggaactaatgtttaaagaagcaaaacgagctgaaaacaagtccacgttgattaatttaatataaattatcatgatattaaacaatttgcatttgcatttgatacatatatagatataagtttatagccaagattttcttaccccaatagctaaacatacaattcacgtgctgaaatcttcgtgatatcgtcaattgttatacgtgttagcacttttttcataaataaatattggcccattgtcgtttgtttgaaatgtgtctggttgtgttttaaaagtattgcttttggcttatttacttatcagtcaataaattgcgattatcctttggaaacagataaagaaccttctttatcccagtgggccaagaaatcatacaagtggtaacaacttggcgatgtcgtcaattgttacacgtcgaatgaccagacctttttggcacatttttcgagcgtctaatcaagatattatccaattaacaggtcggagataattgagatggcgtcaaatgggatccatctcggagaattgaacaatcaaacaagggggtttagactagatatattttattacagcccaaagagagcgagtaataagtcgagcgaggcgcgagaatccaagtccgtcaagtcacaatgccaattgaggctctgatatgtacggcaaacaagagccgggcagagaaatctacaatctcgagttcattatcagtgggatgatctccgcctttgctatcatttgacagttgcgatttgaggcgcacagacgtgcgattgaccaagaaactcgagtaacttccacatcgcaatgtatccgcaactggaaacagaagcggaggctctggaaaaggctacggcacgggctcttttaccaggtgccatcagcaagcccgccagtgaagctggcaaggctcccaggatgaacaaatggaagcgccgcctgcatcgccacgtcccggtctttcaatggcttcccctgtacagcaccgaatggggcatcgacgactttatagccggcatcaccctgggactcacaatcatacccgaaagtatggcctgtgcccttctggctggcctccccgctcgatatggtctctgttcggcgtttattggaccgctgatctatatggtcttcggatcgatcgacaaggtcatcattggacccactagcttagtggctctggtcagtgtccagttcaccgtgggacgacccatcgagttcgcctttctgctcacctttctcagcggaattgtacagatcatcatgggtacaatgagaatgggtaagttgcgactcactggaaaatattttccatgcttatttttttaagaaaataataataacgccaagcaagttattcaaaattaccagtgggattaataatatattaaagttcgtttgtatcatcaatgcacttcagcagaaaacataaatcgccatataaaatgcctgctttttaatttttttaaattttttctgagtgtatgtgacagctgaattacgtgtgtgatctcacagataaattgcctcaagtccggcatgtgttactttccccgtgaacttgatcgctgtcaagaccaattgaattgaaatagatccgtttaaaagctcactttaggcacataattaagtgatctgcacgataagtgttatgcggtttgcccgtgattagcattatttgtatcaattaacacttctttggatggcattcagtgtatgaactcggatacggaactagactagatccgtaaaaatcattgagaaggtagccaaagaagagcaaacaaaggcaggtgtcattgaagctaaatgagtaatgtttgtttttatttatcgtcagtttgcatatttcacaatattagacctgcaattggcatttcatttttcgttgagtctatattttcagtttttgactaaactaaaagcttttgcctgcttaaaaatatctaaaataatcctaatttttacaggattcattttcgaattcatctccatgccggtgatcaaagccttttcctcggccactgccattttggtaatagaatcccagctgaaagtactactaggcatcaaatacttagtggccgggctaatgaactcggttggtatgctaagttcccgcattgaagagtcgaatatggctgatctcatcatgggcgtttgtgccatagttttcctgctcttactagaggcaagtttaaataaattattataattttttctgtaattaagccttttatttcagttattggaccgtgtggccaacaatgagaagcgaaacaaaattctaaggatattctgtcgatatctatccacatctaggaacacactaattgtactcatcgcagccatcgtttcgtttatttggattcaaaaatgtggtcaggttccctatgctcttagcaagaatgctctgtccactcttcccaattttacagtgcccagtttccacattgaaactgccgagcgcaactatagtatttgggaagttttaaaagagttgaatattggaataatagttattccaattgtgggcatactaacgaatatatccattggaaaattgagtaagtaggaaaagcgaaactcgttatatataatttaaaaaaaataataaacttgcagctcctaaaggattggtggataccaatcaggaactactcaccgtgggcctctgcaacatgtttggatcctgcgtacaggcgatgccatcatcaggagcgtttacccgatatgccattagcacagcgtgtggccttaggactcccatggccaatctgtatttgggtgagtccagctgagtgtagaaatcgaatgcaaacactcaatttcattactgccccaaagaatttgaatacacgtgcaaaacgagctagttttcatgatattatgtcttcgtttgtctgatgataatcccctttattttatccaccttaatagattacaaaattgctgaattttcttaattttttctccctgtgcaggcattattgtgctgcttgctctgagctatctgagtccgtacttcaactacattccggaagcgacgctggcggccatcctgatatgctccatattcacgctgctcgacttcaagctgccgatgcgattgtggcgggattcaaagcgcgactttgccacctggttgctgtgcttttgtgttagtgtgctctttggcgtggaggtgggtctgttcgtgagcattgtggtgaccgctctgcacctgctcttcctgtgggcacgccccgagatccgggtgaaaattgagcaactggacgagatgcagtacatccgggtgacgccaagcaatggcatctactttccggccatcaattatctgcgggagcgagtgctcaaggcctgcgagcaagcggactttcgcattacggtcgtgatcgatggtcagcgcattagtggcatggattatacggctgcacagggtatatcgaagttatccagtgatctgtgccgccaggcagatgcctctagctccacgctgctgatcctcttcagatttcccgaacacctgcagaggctcatcgataacacggacaacctcgtgttctgcgagagcgagaacaaggtgaaggagttcctcacgcaggagtccctgcgcaatggctacataaacctgaaggagcacataagggcctccatagatctgggctataaaatcgacatcgattaggtggagccgccccccagttagctgcttgtgttatttatttaagtttagtttcggagaaattgtcgtcgctggctgcaaatggaaataaaagtgaaggaaaagtggaacaaatgccttgatggcagcaatttataaaatccccccccccccccaccaaacccgacaactgacctctggaggagacggggacaggatagatgcggtgccgctggcgacgccgccaatgattgccaagctaatggatttctgtttactttttcacttagtccgggcgccaaggaggaaaagcggcagaatcaggagcagcagcagaagcagcagcagctggagcacaaggaaaaaacaaggttttgaaaaatagcgcaaaagaaattagaggaaagcgaaagcgctcaactaacttctctaaccgaaaaggaaaaataggaaaaacaaggtgtgcttgggaaaagtgaggaacacagctgaaaggaaactgcgagaaattaaactaaagtcccggcgtaaagtggatcaaacgcagtaaaaacaagtcatgacataaattaaattagtccaaaacgaacatggattactcttttagttagaaaatataatataataggaagaagctatataagtacacgagtatcacaaatattactaatccatgttttgtaaattctacatttgaaatttaagaatgtattcattttcagtttataaggtaaactttcattgtaaaaatgctatatgtctaccataaaaacataccaaaaaaacacaattcaaacaagttgaaatataaaaatagttcccttataataatttgtatacccagctacaaatttgaattcttgaaaacagtttcaagtggtaagattaaaaatctttttttcataacgatgctaagctttaattcttaagtcagttgacttaatgtaacttatagagcattagagcaggaataaacgcctgcgagctaggctagttaattaactaaggttaagagaagaaagaa

SEQ ID NO: 11282 - DNA, 1664 bp, DROSOPHILA
cgatttgaggcgcacagacgtgcgattgaccaagaaactcgagtaacttccacatcgcaatgtatccgcaactggaaacagaagcggaggctctggaaaaggctacggcacgggctcttttaccaggtgccatcagcaagcccgccagtgaagctggcaaggctcccaggatgaacaaatggaagcgccgcctgcatcgccacgtcccggtctttcaatggcttcccctgtacagcaccgaatggggcatcgacgactttatagccggcatcaccctgggactcacaatcatacccgaaagtatggcctgtgcccttctggctggcctccccgctcgatatggtctctgttcggcgtttattggaccgctgatctatatggtcttcggatcgatcgacaaggtcatcattggacccactagcttagtggctctggtcagtgtccagttcaccgtgggacgacccatcgagttcgcctttctgctcacctttctcagcggaattgtacagatcatcatgggtacaatgagaatgggattcattttcgaattcatctccatgccggtgatcaaagccttttcctcggccactgccattttggtaatagaatcccagctgaaagtactactaggcatcaaatacttagtggccgggctaatgaactcggttgtgcccagtttccacattgaaactgccgagcgcaactatagtatttgggaagttttaaaagagttgaatattggaataatagttattccaattgtgggcatactaacgaatatatccattggaaaattgactcctaaaggattggtggataccaatcaggaactactcaccgtgggcctctgcaacatgtttggatcctgcgtacaggcgatgccatcatcaggagcgtttacccgatatgccattagcacagcgtgtggccttaggactcccatggccaatctgtatttgggcattattgtgctgcttgctctgagctatctgagtccgtacttcaactacattccggaagcgacgctggcggccatcctgatatgctccatattcacgctgctcgacttcaagctgccgatgcgattgtggcgggattcaaagcgcgactttgccacctggttgctgtgcttttgtgttagtgtgctctttggcgtggaggtgggtctgttcgtgagcattgtggtgaccgctctgcacctgctcttcctgtgggcacgccccgagatccgggtgaaaattgagcaactggacgagatgcagtacatccgggtgacgccaagcaatggcatctactttccggccatcaattatctgcgggagcgagtgctcaaggcctgcgagcaagcggactttcgcattacggtcgtgatcgatggtcagcgcattagtggcatggattatacggctgcacagggtatatcgaagttatccagtgatctgtgccgccaggcagatgcctctagctccacgctgctgatcctcttcagatttcccgaacacctgcagaggctcatcgataacacggacaacctcgtgttctgcgagagcgagaacaaggtgaaggagttcctcacgcaggagtccctgcgcaatggctacataaacctgaaggagcacataagggcctccatagatctgggctataaaatcgacatcgattag

SEQ ID NO: 11283 - protein, 534 aa, DROSOPHILA
MYPQLETEAEALEKATARALLPGAISKPASEAGKAPRMNKWKRRLHRHVPVFQWLPLYSTEWGIDDFIAGITLGLTIIPESMACALLAGLPARYGLCSAFIGPLIYMVFGSIDKVIIGPTSLVALVSVQFTVGRPIEFAFLLTFLSGIVQIIMGTMRMGFIFEFISMPVIKAFSSATAILVIESQLKVLLGIKYLVAGLMNSVVPSFHIETAERNYSIWEVLKELNIGIIVIPIVGILTNISIGKLTPKGLVDTNQELLTVGLCNMFGSCVQAMPSSGAFTRYAISTACGLRTPMANLYLGIIVLLALSYLSPYFNYIPEATLAAILICSIFTLLDFKLPMRLWRDSKRDFATWLLCFCVSVLFGVEVGLFVSIVVTALHLLFLWARPEIRVKIEQLDEMQYIRVTPSNGIYFPAINYLRERVLKACEQADFRITVVIDGQRISGMDYTAAQGISKLSSDLCRQADASSSTLLILFRFPEHLQRLIDNTDNLVFCESENKVKEFLTQESLRNGYINLKEHIRASIDLGYKIDID

SEQ ID NO: 11284 - DNA, 24066 bp, DROSOPHILA
gcgaatgtggatgtggctgtctgttggatgggtggcagcagcaatctatccatccatctatctaccgccttggccattacaagtgcaatttatctcgcaaatcattaatcaacctaccgtttgcctttccctttccccctcctttcccatccattcccagcccacccaacgcctaccttcaccccctacttggcaattgtttttagcccgtttttgtgtacttattggcaacaaatttaaaagggcacaaacttggcccctcccattcgattgggaaaatcaacaggacgattcggcgaatgaaaagggcggcgctcttcaattgaaccgcgcataaaactcgattgaaagatacgccagtgagccaatacaagtgcgcaaaactaaacactaagctacaaaagctagaaacaaaaaggttgtcatttatttagtatccaaaagtcttatttacttcctaaaacgcgggtaaacaactgcacatattattagtaatacatcattattaaagtaacttactaaaaatatacattttattcgaaaacaaaagcacataaacctgttaaattgcgttaacaaacgtgctaggcagtgtatctgcgttttctgcccacattctgcggatacagatacacgagcacacctctgcctcaggtgttcgtgtgtgtgtgagtgtatcggaatgagcgaataagaaggcggcgtattgcgcacactctcacacacacacgaatcgggcattgcatagattgcgattacaattttaatttaattgaccacctcccccaccccctcccctaacaaacgatggaacggccatccgattggctgcgaacgagttcggggaacgagtgtgaattggaacgtgcaattccattcgttcgatttgaacggccgttccggcaacatttgggaatgttgcagcaacttgttgctattgctgtgagatggtgtcggtgtcttattcgccagtttcttgttcgctactcagaccgatttgaactttcgagtgaacgagacgagttccgtgcggtcggataacggcttttcaaatggacacatcactgtaattagataacgtcgcaatgtggattaataacaatcgtgttctgtgtgtgtgagcgtgtgagcagtaaaactcttgatccataattaaagtgagaagcatagaagtcactaggaaccaaatcgcactaaacaaccgcaagcaattgcaaacaaacagaaaggcataaatgcaagtgaacggttcttaagcgcactctcctgtttctgttttccaaccagaataaagtgcaaagaggatcgacgatcacaagtaacggttcgcgctcacaaaaaaaaaaaagaaatcaaatgctggccgcaaagtaatgccatatagaagctaaaaacaacacaacaaaagtgtgctgtgccaattaaacttcagctaaggaaataacatcaaaagtatcaaaggtctgcgcaggtctttgatcaaccgcaacattcgttatattcgtcatattcgttatattcgtgacattcgagcagggtgatccaattcgcctcaatgcaactgcgagtgcaccctactatggactgtagcggtcgttcaaccagcaatattgaacgcgattccgatctgggggacgatttggtaagaaaaggaactttgtaacacccaatatgcacctctacagtaacgcccgaagttattattattataaaggattattatcttctttgaaaaattgatgtgacaagcactaatcagcttggcattaaaataaatgtcatacattcaagtaataaacttaattggcataatcattctcagtagaagtatccaggtgaaaagtatgtcagtaagtgccgctaaattacctctttattatcacatcgtaaaacactgatatgaaatatacaaatgaattatgtaaacaaacatgtagcattgaaatacaaataatgaagaaatatacggaattcatggttattgctaacaatcagctactgatggaaactcattcattttccgataataattctcagaagcatttcgaagtattattattatttttaccaaatgaaatttgtcaagcacaaaaattaataagataacccacctttcatctatccatcatatatgtatgtatagaatctgttttgtttttttcgcgaccgtctggtaatttgagttactaatgcatcaatatccatttgccacgcgaaaaatagtattaagtcttgacactgatgggccaagataccctattcagtctaaaaaaaatgaaatacccatttgccgtcggcacttagaggaaatccttacccaaatgcccaaaagcgatcgctttttggccataatgatctcttgtttgggtagcaacttatacttcagctttgttttctgctgtcgtgctcgaaaaggcaaaggcaattcctgcaaccgactcacattgtttgcagatgattcaaaacgtaattataatgttaaaaaaatatgtttattcaatcggggaatgggagattcaaaacggagggagctggctcttttggctttttggcgtttcagtttgccggagagccgttaaaaggtgacatgctaaatggtcgcatacaagacgattgtgttgtagcgacacactcacgtccagcgcgatatacactcacacgttgatcgagctaagtgcatggcacactcataaacacaaatagattcatctgttttggtcccacaaaaccgagcgatcggcgtaccgacatcccgagatcgttcacaatttccaccgattgaaagagatctttcaatccaagctctttgatggcgttcatatgtaaatagattgttcaaatatttgcattatttgttagtaccttaaatgaatattaaatgggttttattgcctttcaggcctttcggccattcgctttcaggtatgcagcttcatctccatctccatctccatctcatcgcgacttcttcaattcaataaaactcttgttagtcttttcctgcccctttgttttcctttcatttttattattgttaatagacattgccggctcgatcaacaatgagccagactttatacactcactcactggccggccggtcggtctggctatttacataataatttttaatagcctcgcttttggccaagaagcgaaggcggcggagacgcaatgggctgtgcaaacagcgactgaatctcggctctccaggccggcctattcgtcatccccccggatcgatgccgatgcgatgtgtgctccttgtgggcctggactggtgttaattgcgggtctctcaattgagggtccgcatgtgggtgctgtgctgtctaattaaccccactgcgatccggaccgacatgctggtgtcattcgcacatccgatccgcagttctattcaaatcaaatcctgccaccgccactcgccgctcgcattttcaattttagcccgaaagtcacgattaaacaataatgtgggctgtcaaaaagtcataaattctcgaatgaaacccagtcccagcgaagaagtcgtgcccaatggtccatggtatatggtccaatgcccaaatgcccaaatgcccaatgcccagtatcgtcatccgagcagcactttaattacatgggttaaacgcagagtttaaaattattgccgaattgttgtctgtaatttttgaatcgtttttaaattaaatcaagccggcgaacatgactcgagacaattggcttccgattcctcctccagcgccggagcagctggtggattcactccgagcgctgcacgtgctccaggcgcagttcccacattaaatcataccggccttgggttgggggaatccccccaaaaaaaaatctcagtggtggttaactggtgccgctgctggtgtttgcactgattcacactccggctccgattccgattcggccagcgtcgttttccacatttatttatgaccgcttcagtgcgccaagccagaaattttggaagagttgtaaacttaattgcatcttagttccatgggaatgcagctcaagcgcagctcaaaggtctggcatttacaaataaataagtacagtaagaaccctatgatttgtatcaaatgaatattgcattacatttacgcttactaccgaaacgagttaactgtttcacacttggctaactggcgggctaactggctgatggggttggcttacaccgcattggggtgcctgtccccttttccctgcgccactggaagcagaaatcatttgggtcggtcggaagcggcacctgttataatttgtttggcttcttgtacgctgacagccaacgatttttattaaattctttgtgggggctacgctcctcttctcccccccccccctccatcctcttcttcttgcataaccagaagtcaggggaaatatttgattaagtatctggtggggcctttgggggataggatggcatggcatggaatgaaatggaatggaatgggttgattttcggtggcgctttccaccgcaatgacaagcgaaatttgttttgcttttagtttgcgcgccaagggggcgcgaacttgaaactggccaaatggaggaggggatttgtcatttggatatatgtatgtatattggggggaaaaaatttaattaactactaatgcagttggcggcactcaaaagtgcatggcgacaaatgtcagaacggcacaaaacgccaatgaaaacagggccgtaaaagcagaaagagctcgtaaaaaatatgattattattggcagtattacagtttgcgcttttcgtattgtttttaatgaatttatgaattattttgccaaccatagctaataaaactgttaattggatttttccagtacagctgccgattgcgaaaagcgccacgaaaaacgatcgcgaatcgcaaaacaaaatgcgaatttgcgagggcacgaaccgagtatctgtgtgtattcctctctgttggtgtgtgtgtgtgcgtgtgtgtgtgtgtgctcgggggcctggataaaaagtgtatttatcatcgcgctaataaaaccctgccctctcgcttgcaccgcacatatcgccctccctttcgccgaatacaaacagaaatgggcgtgccaattggccaacgagaaaatcgcgtgagcgccaacaaattgaataatcgagctggcaaacagcaaatcttaatttggcatttggcactgaaaaacacatccttgtttgatgttcgatgtttgcctgttttcctcactttgcacctgccacaattgactagccctgccacaattttcgtataaagaagccaagcaattgcaagtgaaattcatacgtaattattatcgattcgtaagcgatgtgttttttttttttggggaattaagcaaagtacacccattaaaattggggtattaagcatttaggcaataagtatctgaaaagagcttctgccatattagccaagtagtgtagtagctatttgtgtgtgcttgctggcaacatttcctgattaacaatggtggaaagtgcggtcttaggaactttcctcatgtggcgacacccagtcataaaacacagatatatttcgggcaggcgactgtaacaagccctgcgccactcgcatccaataaagtgggctcttttgccgtccagacggccaacaatacctccagagaccaggagaccacgagacccagcgaccaggccaagagaccaaggcaggcggacttgcgggctggccaaggcaataaaataatgcagtttttaattattgccgcctgcaatcgaagctagacgcagtgaatccaccccgcagccggatgggcacaaggagtcgggtcgcaagcgctggagcttcgggaagtgcgactctcgcagttggccggccagccagacagcaggggcgtagtttgagccatgtttggatccattatgattcgtttattggtttttggcaagagtgtaatttaaattagctaatacgttttctattttctgcattgtttttacgatatgctgtttccgaaaccaaagaaaagaagagcgagtatcttgtacatagtctctttgtatgctccgctttctagcgccctttgtgattgaaagaccgactacgcccctggcgaacgtagaacccagcccaactattgccgtttaaccgttgcgttccttttttttaaccggttttgtttttttttttttttttgtatttgtatcttttattgtttacgcgaaacttttcgtctgcccgccgcgctcgttttacatgggcgtgcgtgctaaaaaaaagggttaagggggttggcttgaggggggggggtggtggttgaggtggaggaggcctgtactctgtacagccaacgccattatgttttgccattgtatatgcgtgtgtgtgtgtgtgtgtgtgtgtttgttggcccgcttttgttgtttccatttttatattttattcgccttattttttccgcttcgacgcttggcgagcgaatgaaatcgcgtttgtacgcacacacacacacacgcgaccattaagagcgcgcatctgtgtgcgtacgtgtatctgtatctttcagatacgttttgcattttaattttatttccatgctctcgttgcccgaacgcagaccacgttgcacatgtttcgtccctttttacacaaatttatttttcgcctttttccatctcctcagtttttagccgctggcttgcaatttcttttcgctttcgaatattccgctgcagttgcatcgcgttcaaatacataattcgccacggggtggatgcgtaaatgggtaattttatttatatatttattcagttataagatcccgagcacacatgtgccagcgaaacggaaaactaaaaggaaccaactcaaggggttgattggcatataaaaacggattctttgatggcctgttaacggtttggcttaagctaacaatggcttagaatctttagtcttggctgcggtccaattagcaaaattgtctgtgaatcgattccgtatacgcaatctaataaatctcccgcagattacagactcccgggggcagtgaagaattcatctccagaggccatcgtgtcatccaagattatgattttgacaggcatcacgacgatatgacatatgcacgaatgtctcttcgatctatttttataggagagatatctgtcagcacatgtttgtaaccctacactcgtgccctgcctataaataaaaaagttaagatcacaattttaaggagatctttgttataatatattgattaatttatctcgaaatacctacaattcttatccccattagccttgaagtagtgctttattggtttaggactccgaatttctaatttctcttgccttttttccaagtttaaacaatgcgcctaattactcagacctacgatttgaataagacgaacgtaataaacttaagacgccagtacgccccggtctgatcctcaaatgagactccggccgaacccacttgagtcataaggacattaggccttagtttgtcaagagagttcgggctaaaaaaaaaaagaaaaacaagaataagaataagaataaggacaacgaaaaaacaaggaaatacagttgtaaaaccggcgactcgagccacagaaaagcagaaacaaatgcggatacacatgctcgccggctcgtaatcttaatccttcacacaataaacgcccctcgaatggactgctgtatgtgtgctatgcaggactctcttctggtagcaatatcctgatcctgtttgccggcagcgcccttcacagcttcgcttctggattgtcgcattatggatttccgagcggtcgcagcggtgtgtccttttgttttaaattagcacggcatgttgcacatgcggcatcatctgtccgtccgtttgtccagttgtccgtttgtccgcattcgaaaccctcgaaaactgcgagcaatttcctacaaatttgtcgcattcgattgtcgaacagcgaatggaaattagtcaaattgcatttgtagttcatagttctgaatgcagcgatgataataaattaagatacattatttccagccacttctatcgaaatgtaatgtcaacactaattagcgataaaaagccaaggcagaggaggggaaggggggctaagtacggtctgtggcaaataaattaaatatttttcctatacaggccactcagatagttgcctccgtctgcggtgcatcgaaagctattaaggtaaattgcacaggtgccaaccgcccccccccctccccgcccactcaccaaaatgcccatgcccacatccatttgtttgagtttcggaatagtatctctatcttacatatgtagcaccgagttttcctcattgtctgtgggtctaattgcgatttaatgtcttgccttagcagttggcgacttcgtgtttagctggcgataacagtagcgttttatcaacgcaaaaattaatggaactgccgtgtcccccgccgaccaggtgggttcgccatagccatctgtaggtacatacagatacatacatagtacaccaccgccattagtcgagttccgcactgtgcgggtgttttcccgccttccattggattgggcacctaatgccctccaagtggagcacctcttatcgcttcacggtgatttatgcgtcgcttacagcgactatatattgatattccacggaagctacgtcgatattccaacgaaattccatatctgaaatgggcattgttgcggtgattttgatggatttcttccttgaaggtggaaccttttctccatcctccagctaagtgcatttcctttccgattgtttaagatggctcgaaatgttaataataagttcataacatgttaccactagttgcaatggtttcttccgtgctactttgttggctttttaatgaatatcttaaataaattgccttgtgcgcgctctttgagcatttccatctgccgatccgtatccacagccatgcgatccacttgcaccagccacattaaagcggcacaaattcgttgtgcattaattagacattttataggtgcaagttggcatggcctgcatgccgccgctttccgtggctgttggctgttggatcttggatgttggccattggcggagcccagaccactgcattctgtttggacctggtcaacagtagaccgcaactaaaacgcacacatgcacacagtgtggctgcatttacacgagcatctgcatgtatttcgcacgactccgataagttacattagtttgatatacacacatgcacaaactactaactaacccaccaagtcggtttacgtttggtctattctggagctatgcagcactatattttgattaaatcttaatctataactattattatagcttaaaacaggattttgcaattgaaaagcgtttttttaaagtatgccataatcattttgaccgcaactgcgtgtggaattgcatgtgcaacattttcgccatagaagcgctttgcattcgcgccgacttcaaagaattccaggaactccgtttctctatggtcgaggcattgtctatgccttggttttggttgcacttatgattatgccacagcgacaccaacacttgaagtaccaacaccagtgctgcaccaccaaagagccaggcgataaatgttgaacacactgggtatccggcaaatagctacatacgagtatgagaccgacttgggttggcctggcttactttgtttggcccctgctccgctggctcccccggctcctccagcacctccagctcctccgttggctgtgtttaaattgaaaattcccgatttgcacacagtcacagatgcgcttaatttgcacctctccaaatgcataaaaaccaagaagccgtgatggagttgcatcggacttgaagctagctaactctggctctggctgaagacgcagtcgcagttggtgacttcaacactcccggccatgcgtggcggacttcttggcaaagagtcacggctagcactggtctgccatgtctgctagttctcccagttttgccggccaggagcgaagcttcagtagctccccccaaaaccctccaaccggccctggagcggggcgaacagctctgggctgattgccgttttgtgggtctggcattgttaatttattaagtggttacctttgttgtcaccccgccggaggaagtggctttctgttttcagcactcgcagtctttggctttcagttgctttcaattgaaattgcgcggcgtgccaaagttaatgtgactcttggcacatgccataaaccagaatcgagatggtgatgcttttcagctggatcaatgaccactgcccacgcccagtgatccgcggtcagtgatcggagtgcctcgatatcgattctgattccgatttgccgatttgccgcctaacaaagtgtccgtattaagctggcccagcgggcagcttgttgacataagcgccgccattaattctccatcacctacatggggtcgctttgtttttggttctaggtgcactgggagaaatgttgtattaagaattagatgtataagcccctcaccaccaaaactcatttcaaaaacgatctgcgtttccttctgtgcagtcacatggtgatcgaacggacgacgagatgcgcgactgcgactccgtggatggggagcatcatcagctgagcgccaaggcggcgattgcagcccgcctgagtcacacagtttccggcggcggtggtagcttcgccagccccgaaccgcagaccgagctgcccctgaggtgagtgactgctcctgattaatgtcctggaggtgcggaggtgcggtaataatcgctgcaacaatcctcttcccacagccatcaccatcaactgccgccgaatcatccgctcaacgctctgggcagcttcatgggcatcggcggactacacagcattccaaatctccagcacagcgacgtgctggagaagctcaagatgcaggtgcgcgacatgaaggtgggcctgatggtgagtgttaagatgtctatcgagctgaagatactgtagctactatcatacagctaaagtaatttgaagggaaatcggatatttatatccgtattatattggaaatacctgtatttacccgtaggaacaggactatgctgccgcagcacatgccgctgctttcggggccaatatgctgcccacgacgatcagctcgggcttcccactgccccacaactcggtggcctttggccacgtcacatcgtcgcccagcggtgggaatgggagcagctacaacggaggcaccacccccacgaatagctccaacagcaatgcgaccaccaatggaggcggcacagccggacctggaggaacaggaggatcgggcggcggaggaggtggtggcggcggaggaggcggaggagtgggtggccaccagttctcgttcgcatcacccacagcagcgccgagcggcaaagaaggttggtatctatctatcgcgtggcaggcggcgatccatttgtgtttaactgttgcactcagcccgccactttgcagccaattccgcatcgaactcgtcgacgtccagcgaggcttccaattcatcgcagcagaataatggatggagctttgaagagcagtttaaacaagtcagacaggttagtagagtgctgggcgaagggaagggagttggaaagtcgtggggtacacacagggggcggagggcccgaggttcagtcaattgaaatcgacaaaactgtgtgtaaacaagatgcaggcaagctatcaattaactactaatagccagtcgcagtccagcgggaaagtatctcatcctcatcccacctggccgaaggggatcgaaaccagttggaagacgctgcagtccagcagtcaagctgcccggcagtccgccagtccagcactccagtttgtgatctcgtttcggatctcgtcatggtacggctaatgctagtgccgccttgaggcgttccaggcgatacgatagttccggtttgcaattgagcaattaatgtagcccttttcagggcgttaatttggtgagaaaatagctggacagcatcccccggcatgtgaggtccacatgctgaccgagtatgcgagcaattaggcccgaaatcccctcgaatccttacagtttttggtgtggtcattaaatgtggttgccaaaatcgaggcacagatacagccacagatacagatactgatatacagatagagatacggatacggatacactgtgtgaaccgcgacagcttttggttcgttttggttgggcctgactcgtctcgtctcgtcgcgcctcgcctcgcttgggtcataaaaaccgaatttcgattaactttaaatgcacacacacacacacacacacactcgccgttgctccctttcggccaaatagccatgtagctgtggccatagctatccatcaaacggagcccgcattctctatgcactataaaaactttgaccctcgcaatgcaatgcaaaagatacttatgtatctctggtggatggggctttagtcgcagctctggccgcaaatgtatctgtaacttcacgcttaacaccttcgcttacaccgtgtgcggctcttgaatgatgatgatgtgcttgcagaaaccagaaaccaagctgaccagatatacacatatgtatatatatctcacaactccctttggccacctccaacttggcttggtctgtaggtgtcggataaatccctcgcagcacattcaaaatggctgtttcgctctttcattaattgtggaaacgagacgaaacgttaattatgttaattgaagcgatagcggctggctgcgactgcgagaaaagccattttgaaagagcatcgcacagatacggtcgccgatacagatacagatacgctcattcattcgctggcttctcagccattcgcctttccccaactttaagtaaaattcacagtgcgctctgctctgattttagttctcagtcttggccatcagtcagatagtcagccatccatctatctatatatctatctatctttccatccatccatccgcagacgaagagacaacaagtaaaacaaaaatattatttttggtacatttcgctgctcatttcttgtattatatagtttctttctgccctgctctcattaatcaatgtcaattatctgtacgtactgaataattatgtttaattatagcccgaagcattttccaataatattctatataaatatattcatgtgttcttgttgaagaattcaatcgtggcgattgtgccatttcctttcaattcgatgctttttggcgcgtgttttgtaattcacttagtcgtcgcagaacttacgttctaaaatctggtgaatggtaagttaaataattgcaataatctataaagaggttaattatttaactaaaactaaacgttgactgaaatatacagagcccttttctaagcaaaaaacaaacaacttaataatttaaatggctttcggtttgacaaatcgttacaacagattaatatttaatgggtatttatttagtgcattcatcattatagcattctccagaaaattataagagccaagagatgaaataaaacataaaagacgatgaaaaaacggaaagtctgttcaacacatttcgagtaatgagtgtgaaattcttaaataaatatgccggcaacctgcagatgtatctgcatctgtagcggtatccgtatctgtatctgtatccatagcagcggatagaaaacgatgtgtgagtgctggccgttgaattatgcactcgatgcggcaggacaacacttagggaccaaaggccgtccgtgcaacgggatcatgtccatataaattttaatgtccactggaacctttttgcatccatatgctagggcaactatatctgtatctgatagttataaattacacccacacccacacacacacacacacgggggcaggcaaagggaattgatctggcgaaatccagaattcccagaatcaaggattcaaatttcaagcacccaggcagcggatttgtcgggtactaagtctaggcgacaaataagtgagattatttttataacccgaacccagaaccccgaatcccaattccagattcccagttcacgattccagatcccgaagaaacatgtgtgtgctcaggcagcggcagcagcatcttcgatagttataaaaacgattatgattggtctacggcaaacgtggcaggggatagaattcttgtttgccggttttataactttattgctacggatttgggagagatattggtagcgcttaacggttttgcggctgctgtgatgcaagttcggggatcgaaattcgggaaagatattggtaaatgaggcacaggcaggtttgcaacccttgtgcgtgaaagcgagacttcattttatgattattaatacgaacgagtacccgagtaccgcagacaggcaggcaataatgtaggtacacagatacaacacatgtgtgtgtgcgtgtgtgtgtgcggcggcagcgacgcaggcagcatttcgatccagactcctgccacaaatttagttgataaacgacctttgatggcgttgcatcgtcgcgttgatcaatgaaataaatcgaagactgcaagtgaaatatagttccgaaatcgggaaatcatctcaacaacaagtgtgaaacgaaagcatcagctcaaaatgctcatctccgaagatcaaattcaggaggtacatccacgtgtataatgtacatataaggtgtaatcagtgaaaagcaacgaatccttcgaggaaccaatccagttgaatttcaattaatttattttgtgtttggctcaaccccgagcggtataaagccacatatgtatatatgaaggttttttttttattttgttggcactgctcctatagctcttgtgggcgtcgagaatcataaaaaatatccccagcccagccagtttggaaagaagttggcagaaggattggagtccaaagtgcccggccaaagtcggggctccaagtctgacttggttttaaatcatttatgcgaggaggtggagaggcgaaaggagatggagaaggaggcagttcatcattcgcattgacttagaatgtgcaccacggatggtgcagggctccgtctgtagctccgtctccatctccatctccatctccagcttcgtttctttctttttgcagtaggcggaaagtatgatgaattccgaatttgatgagttcactccgatgttgtcattaattctgaacatactcgtaccaagttgtgactagggtttttccttccacggacttggttcctggtggcaaaggtcaaagcatgagccgcaggaaaaacgcagcacatagcgacgataaataataatgtataaatggcagatacatttatgtacttccctcgtttgtatctccggctctatctttatcacctaattatccgttgtgccactcgcgcgcccattgagctcttcacactctaacaaaagtccaaagaggcaggattggagggttaggggaatgtttctctatcaacccccagcaaacaatgtacaacattgcagggagcgacagagatggaaacaaccaaacacgcgcccctgtcatcatgagcgtctattgttggcccaacaaaaggccagaagtgagccaaaactccattttgtgccaatccattggcctaaagagtcaagttgttgtcaagtcttttgttcgattgttttgtttaaaatctcacactaatacgcttataatggttcgttttgtatgtttatctacatcaaaactaatttagtcatgatatgatgacatttaacatttttcaattaataaaaaggttgtgtaatatactattttgtgataaattacaaatataactgcggaacaatgctttagaatcttgaatgaagtcgttaatgtgcgttaaatgtttgtggcgcccccgggtggacattaactggtattgggaaagcgtttgctttaaaattagcaaacttaatagcccagtctaatctatacatttctaacacttctaattgcagctctatgaaatcaatgatgatcccaagcgcaaagagttcctggacgacttgttctcgtttatgcaaaagcgcggtaagttgcacattgcattgaagtttttcaaggggcgctcatagagttgggatggcgggactattggggggggggctgtatctcgaatctgaattatcacatttgcatatccctggcccagatgacggattgctgactcagtcagccaagtgtttttggggctcactcaaattatgttaattgaataaatttctcggcactttgacgtttgattttgagcagcgcgagcgggctaaaggggagccattaaaatatgcagaaattctggtgaaaaggaaaccaagaaaccgagaaatcgagaaaccgagagaagaagagaaatcattttggtggctgactttttgtcattttgtcacttcaaattactgtcacatacacacgcacacacactgtgggaaaagggggtaccatatgcatattggtacttaaattttaaaggcgacttgcagcggcaatcggagcaaatgcctatttataaatgcgagtatgctttcctgcacttttgtcattaattatgggcattaccgaatgcaagggaaatcggtggcatgcacccacccactccaaatgcctggcgtgactgtactttttcaataaattaacttccggttggcgatccaagcgcaatccttgagcctgtgtgtgtttgcctcgattgcctgactcgcaacccgagagggcattaaatttgtttgtatttgcacaagtcgtgttccagggaaatagtacgagtacagtgatgttgacccacggcaaactctcataaacttggcagcagaaatgtacttcaaatatacttgcaaaagtattctttttcaaaattactcttgtacttcatgtccaactgtaattaaatttacaaatttgttagatgcaaattcgtgactttgattagtattcattgccttgaaatgaaatttacattccatgctgaagacaacattatttgtttatttatgtaatttcgtatacgtttcatacaaagtattgtatataaaatctatgctctgaataaacatacttacacgtccctatatgcgtagaacatccctgacaacttaatggattttaatctgtcacatgcgttcaagttttgacatatgcacgctcacccgtcgcggtcactgcaaagggggtttttgggtgggggggacacagaaggggcaggggcgtaggagcaggaggtgggtaaggggggtcgcctgctggggtagaatgagactactgtctaaaagttgtcgtccgccatgagaaggaagcgccgaaaaatgcgactcgggccaagagtattccgtgtccgtgtccatgtgtctataaccgaatgatattgtacaattgtacaactaactaactaacggaaattatgccaaatgtaaggtataaataaatgtgatttgaaatttgaaataaatgtggatcgcttgccgtgagttgtttgtgcagcgaagagcgggcgcaattcttaattaaaagacgtcaatcacttatcaacgcggccgctattttcgtagctatttcccagtgctcaacgcccaacccaccatacaccatctttgggatttgggatatgggaactaggaactaggaactgggaactgggaactggaaactgggagaccgactcgatgtcgggacgagcgatgcgactcccttcggcgctggtggcgttatgatttcagactcgatcaagtttcccttaatttccattaaaagcgcctgacatctagaaaaacaaatgcagtcgaataagtaaataaatagatgtgcccccaaaaagagttcagtctgaaagccacaaaaagaccgcagtgggggaaaaaaatgtaaaaagctggcaggaaaaataataataataagtcggcagttggcatttggcatgtgcgtgtcaggagcagcgatcggttgggatactccggttaggatcagatcgatacccttgggcaggagattcgattcgatccgatccgatgcgatgcgatgcgacggagagtttaatgatcgattcgattgacgggcggccggagctgatcattaaattgcctttgattatgtgcgtcctgcccagatttagatttttttttggtttgtggctcgtgcaatccacaatctttttttccctggcacattgtagacggatcggtagatgtgcatatctaccagattgttcatttattttgtgttattcctttttgatacgagcatcacctcgccactcaatttgtttatatgcataaaaaacaaacgtattttcattcaatcaacacgtccatcaaagagtttgattgattcctctggggctcataaaagacaacgaaaacgaaaacgaaaccaaaagtcgatcgatcgatggatcgttggattgttggatccatggggcagcaacaggcggcaatcggtgatatggtatttggtatttggatcgtaaaaaggaaaggagcccgcgcagatttatacaactttgagttacaaacgtacagagccagcaattatgtaggttgattcgttttgttttttaatcgttttcaagtgccaaagatgcttagtgggatgtttaaatagaaagatgatatgattatagaatagtctttaagcaaatgaaccatacaatggtatccaaactatcacagaatttctctctgtgtgcaataaaaagggaagtagaaaagaaaatttcaatagtacaaatcaatagcaaatagaggccaatagaatgccaatgtgtatgatgatgattagccgccataaacagaccaacatatgtacaaacatgtgtatatactacgagtatgtgtgtgcgtgtgtttcaaatcgagcaacaattaggatttatttcagtttttatcggcctcgctctgcacttttcagctgctacaggggctacaagtgttaattgctccgtgatcgatgagtgggagtgggatgatgatcgtggatcggggatcggggggaatcgctgcactctttggggagataaatctgttttatggatctttaaatcgtgttttgcttgttggtgcatttaacgagctggatggaaaaacatagccaagtgcaagaacaagtttcattgcgcaaacagctgaattcggaatcgaatgtttagtaaaacccatccccaccccccctaatcacatttcaggaactccgatcaatcggctgccgatcatggccaaatcggtgctggatctctacgagctgtacaatctggtgatagcccgcggcggcttggtggatgttatcaacaagaagctgtggcaggagatcatcaaggggctgcacctgccctccagcatcaccagtgccgcgttcaccctgcgcacccagtaagtggatattccattcaatccgttcaatcccttgcaactcaaacatcccatcgcggttacctgccacgttgagctatgtccaaggcaaacacaaatagcatcagcaacccaagatgcgggacaaacagaaacggacaatcaaacattgcagcgatcaagcaacaatcgatcagcaatcgtggagctccctctgtgggatcgtgatttgtttgcctgtcgctttcgtatttacacgataattcaacttaaacaggacatcaacgtgaagtttgcccctttctctctctcccgctgccgcttagagcgtctgtttgccgcgcttattaataattttatgcatcttgcagatacatgaagtatctgtacccgtacgagtgcgagaaaaagaatctgagcacgccggcggagctgcaggcggccatcgatgggaatcgccgggaaggacgccgctccagctacggccagtacgaggccatgcacaaccagatgccgatggtgagtacacaaagcagcagcttggatcagccaagaacttgtggtactaatgtctgatatgctcctatgctccatagacgcccatttcgcgaccctctctgcccggtggcatgcagcaaatgtcgccgctggcgctggtcacccatgccgcggtggccaacaatcagcaggctcaggccgccgctgccgccgccgcagctcatcatcgcctgatgggcgctcccgcctttggccagatgcccaatctggtcaagcaggagatcgagagccggatgatggagtatctgcagctgatccaggccaagaaggagcaaggcatgccgccggtcctgggcggcaatcatccccaccagcagcagcactcacagcagcagcagcagcagcagcatcaccaccagcagcagcagcagcagcagtcgcagcagcaacatcacctgcagcagcagcgccagcgatcgcagagtccggatctgagcaagcatgaggcactcagtgctcaggtggccctgtggcatatgtatcacaacaacaacagcccaccgggatcggcacacacctcgccgcagcaacggtaagctcttcacgatgtgcgacattgatttccgtcctttcgagatttcgcaattgccaaatgcttacagtggcaaccagtttaattgaacgcactccaactggtttttgctttggcagattcataatgttgaaatctgcctaaattcaggttttacttaattaacaaagtaaatgcatattgaaaatagtaatatttaaaatgaattaagttggaataaattcagagtgctggcgccatccagcttacacacttctcaggcaataggaacagcgccacctgcttgcgaagcatagctgtacagcgaagacactaaccatttaccatttctctccattctccactccagcgaagccctgaacctgtccgactcgcctccaaatctcacaaatatcaaacgggaacgcgaacgggaacccacaccagagcccgtggaccaggatgacaagtaagttggctccatacccgcacaataaaatgtcagaaagtcgaggcattcaatgttcaaactttgcgtaccttatgtttgttgataattgcaaagaattgatttagtttttgtgagaagacttttgtgctaaccaaattggtttcttcatccagatttgtggaccagccacctccagcgaagcgcgtgggcagtggcctccttccgcccggctttcccgccaacttctacctgaatccacacaacatggccgctgtggcagcagctgcgggattccatcacccatcgatgggccaccagcaggatgccgcatccgagggcgaaccagaggatgactacgctcacggtgagcacaataccacgggcaactcgtcctccatgcacgacgacagcgaaccgcagcagatgaacggacaccaccaccatcagacccaccatctggacaagtccgacgactcggccattgagaactcacccaccacgtcgaccaccaccggtgggtcggtgggtcatcgtcacagttcgcccgtttccactaagaaaaagggcggcgctaagccccagagtggaggaaaggacgtgccgaccgaggacaaggatgcgtcgtccagtggcaagctcaatcctctcgagacgctgagcctgctgtccggaatgcagtttcaagtggcacgaaatggtgagttcactcgaaattaacttaaagcatttatcacggtagcaagtaagataagatcggaaataactgaagtattaaaatcactttcaattgaatagaaagattatatgtacctcagtagttggattgtagccacccaagcatatgaccattgaactaatataaaccgtgatcccttccaggaactggcgataacggcgaaccgcagctgattgtcaatctggagcttaatggcgtcaagtactcgggagtgctggtggccaatgtgccgctgtcacagagcgagacaaggacgagctcaccctgccacgccgaagcaccgacagtcgaggaggagaaggatgaggaggaggaggaggagccgaaagccgctgaagaggaatcgcatcgatcgccagttaaacaggagaacgaggatgtcgaccaggacatggaaggcagtgaagtccttctgaacggaggcgcttcggcggtgggtggtgctggtgctggtgtgggtgtgggtgtgcccctgctcaaggatgccgtggtcagctaggaaggataacgcgacgaaccggcatggaaagaagagacaaggaaaggaataccaaagtcatatttttcagaaaaatacaaaagcagttaaactcaaacacacacacacacacaagcacacagatgccgaacctaaatgtacatacacacgcatgcggcaggagcacaggagcatcaaggatgtggacaggacatgaaaagcgcattaggcgcatcccagcattcgatgttcatgcatgcagcaccatacccaaccgcccgaaactcaagtgcgagatgccgccagtagaagatcatggaatatatatacattatcgagagtgtatataggatgcgtgtgtgctccattttcacatttgcataaaagacaagccagcgagcgtgtagttatcgatagccattacttacataagcgagtgcataagcatcacttcggatacatacaaccaatccaatacccgtatatatatatgatatgatatatgaataggttacgattcccacacaccaatttgtttttagcgtgaaatctgttttatcctcttacgaacttatccttttttgtgttaggctgcaaggctttttgtacatatcaatcaatacttaactcgtaggccatatgctatactatatactatactatatatatatatatatatatatatactatatatactatactatatcggaacctagtttgtaagcacacaggggcgcgtcacaccgcagtaatacacatgcatatccattatgaccgcatcgtagacatatttagacgtaaaatcaacacaagtaataagcataaatgtatctgtcgtaaaattaaatagcgcttttggcacccacacacacacacacacaaaaacacacaccacttcgattgccccacagtttctactgctccagagccaagcggatggtggcaagccacggcagattgatgagcatattctaagcataagcgttcaatttattgaataataaatctatttaattttagttcaatgcgcattcgaatctatctcggccataaaacacacactggcccactggctaattaacgcacttggttgggaggcacatggatccaccatgtcgttggacctgggttaagtgcccgggccagcaacgaagtgagaagcactcgaacccaaagacataatatttggcttttcccgcattataaaagaaaaacatattccttttgttttgttttgttttgagcccaagcccctccaatttcgacatggtgaaaaagtcataaactcacagaaggggccgtagattatgattatcatcattgatggcggcagcctggcccgcaaaatgcacaccaaacaaagtgatgaaaagcaaatgttgttggaaacaatggatgcgtgaaattgttcgcaccccgagggcaaaacgctgcgcttagtccgtttagtccgctccaccttgtcctgcccaacatcctcagccgtattcctgcccaggtgagctcgagtgctaactacattaatgcataatgtggttggtggtggtggccaggcagtgggttcccagcgctcggagagcgataccaaccggacccatcagcttaatgacttgcgtacggcgaacgcagcctggccaaaaggaccttgataagtggcaagtgcgtttaggaccttggccgtaaacagccaaagctgcgaaatgttgctttgctgcctcgcgactcaacttcctggtctttaagagacgaaactttagctaggagggcaaaaggcttctcacattaaaaggatacatttccgctttaaattcacatcagtttcaaggtccgaattaaaattattgtctttgcactgcgaaaccgtctattgtctcttcttaaagatgattcc

SEQ ID NO: 11285 - DNA, 4161 bp, DROSOPHILA
aactttcgagtgaacgagacgagttccgtgcggtcggataacggcttttcaaatggacacatcactgtaattagataacgtcgcaatgtggattaataacaatcgtgttctgtgtgtgtgagcgtgtgagcagtaaaactcttgatccataattaaagtgagaagcatagaagtcactaggaaccaaatcgcactaaacaaccgcaagcaattgcaaacaaacagaaaggcataaatgcaagtgaacggttcttaagcgcactctcctgtttctgttttccaaccagaataaagtgcaaagaggatcgacgatcacaagtaacggttcgcgctcacaaaaaaaaaaaagaaatcaaatgctggccgcaaagtaatgccatatagaagctaaaaacaacacaacaaaagtgtgctgtgccaattaaacttcagctaaggaaataacatcaaaagtatcaaaggtctgcgcaggtctttgatcaaccgcaacattcgttatattcgtcatattcgttatattcgtgacattcgagcagggtgatccaattcgcctcaatgcaactgcgagtgcaccctactatggactgtagcggtcgttcaaccagcaatattgaacgcgattccgatctgggggacgatttgtcacatggtgatcgaacggacgacgagatgcgcgactgcgactccgtggatggggagcatcatcagctgagcgccaaggcggcgattgcagcccgcctgagtcacacagtttccggcggcggtggtagcttcgccagccccgaaccgcagaccgagctgcccctgagccatcaccatcaactgccgccgaatcatccgctcaacgctctgggcagcttcatgggcatcggcggactacacagcattccaaatctccagcacagcgacgtgctggagaagctcaagatgcaggtgcgcgacatgaaggtgggcctgatggaacaggactatgctgccgcagcacatgccgctgctttcggggccaatatgctgcccacgacgatcagctcgggcttcccactgccccacaactcggtggcctttggccacgtcacatcgtcgcccagcggtgggaatgggagcagctacaacggaggcaccacccccacgaatagctccaacagcaatgcgaccaccaatggaggcggcacagccggacctggaggaacaggaggatcgggcggcggaggaggtggtggcggcggaggaggcggaggagtgggtggccaccagttctcgttcgcatcacccacagcagcgccgagcggcaaagaagcccgccactttgcagccaattccgcatcgaactcgtcgacgtccagcgaggcttccaattcatcgcagcagaataatggatggagctttgaagagcagtttaaacaagtcagacagctctatgaaatcaatgatgatcccaagcgcaaagagttcctggacgacttgttctcgtttatgcaaaagcgcggaactccgatcaatcggctgccgatcatggccaaatcggtgctggatctctacgagctgtacaatctggtgatagcccgcggcggcttggtggatgttatcaacaagaagctgtggcaggagatcatcaaggggctgcacctgccctccagcatcaccagtgccgcgttcaccctgcgcacccaatacatgaagtatctgtacccgtacgagtgcgagaaaaagaatctgagcacgccggcggagctgcaggcggccatcgatgggaatcgccgggaaggacgccgctccagctacggccagtacgaggccatgcacaaccagatgccgatgacgcccatttcgcgaccctctctgcccggtggcatgcagcaaatgtcgccgctggcgctggtcacccatgccgcggtggccaacaatcagcaggctcaggccgccgctgccgccgccgcagctcatcatcgcctgatgggcgctcccgcctttggccagatgcccaatctggtcaagcaggagatcgagagccggatgatggagtatctgcagctgatccaggccaagaaggagcaaggcatgccgccggtcctgggcggcaatcatccccaccagcagcagcactcacagcagcagcagcagcagcagcatcaccaccagcagcagcagcagcagcagtcgcagcagcaacatcacctgcagcagcagcgccagcgatcgcagagtccggatctgagcaagcatgaggcactcagtgctcaggtggccctgtggcatatgtatcacaacaacaacagcccaccgggatcggcacacacctcgccgcagcaacgcgaagccctgaacctgtccgactcgcctccaaatctcacaaatatcaaacgggaacgcgaacgggaacccacaccagagcccgtggaccaggatgacaaatttgtggaccagccacctccagcgaagcgcgtgggcagtggcctccttccgcccggctttcccgccaacttctacctgaatccacacaacatggccgctgtggcagcagctgcgggattccatcacccatcgatgggccaccagcaggatgccgcatccgagggcgaaccagaggatgactacgctcacggtgagcacaataccacgggcaactcgtcctccatgcacgacgacagcgaaccgcagcagatgaacggacaccaccaccatcagacccaccatctggacaagtccgacgactcggccattgagaactcacccaccacgtcgaccaccaccggtgggtcggtgggtcatcgtcacagttcgcccgtttccactaagaaaaagggcggcgctaagccccagagtggaggaaaggacgtgccgaccgaggacaaggatgcgtcgtccagtggcaagctcaatcctctcgagacgctgagcctgctgtccggaatgcagtttcaagtggcacgaaatggaactggcgataacggcgaaccgcagctgattgtcaatctggagcttaatggcgtcaagtactcgggagtgctggtggccaatgtgccgctgtcacagagcgagacaaggacgagctcaccctgccacgccgaagcaccgacagtcgaggaggagaaggatgaggaggaggaggaggagccgaaagccgctgaagaggaatcgcatcgatcgccagttaaacaggagaacgaggatgtcgaccaggacatggaaggcagtgaagtccttctgaacggaggcgcttcggcggtgggtggtgctggtgctggtgtgggtgtgggtgtgcccctgctcaaggatgccgtggtcagctaggaaggataacgcgacgaaccggcatggaaagaagagacaaggaaaggaataccaaagtcatatttttcagaaaaatacaaaagcagttaaactcaaacacacacacacacacaagcacacagatgccgaacctaaatgtacatacacacgcatgcggcaggagcacaggagcatcaaggatgtggacaggacatgaaaagcgcattaggcgcatcccagcattcgatgttcatgcatgcagcaccatacccaaccgcccgaaactcaagtgcgagatgccgccagtagaagatcatggaatatatatacattatcgagagtgtatataggatgcgtgtgtgctccattttcacatttgcataaaagacaagccagcgagcgtgtagttatcgatagccattacttacataagcgagtgcataagcatcacttcggatacatacaaccaatccaatacccgtatatatatatgatatgatatatgaataggttacgattcccacacaccaatttgtttttagcgtgaaatctgttttatcctcttacgaacttatccttttttgtgttaggctgcaaggctttttgtacatatcaatcaatacttaactcgtaggccatatgctatactatatactatactatatatatatatatatatatatatactatatatactatactatatcggaacctagtttgtaagcacacaggggcgcgtcacaccgcagtaatacacatgcatatccattatgaccgcatcgtagacatatttagacgtaaaatcaacacaagtaataagcataaatgtatctgtcgtaaaattaaatagcgcttttggcacccacacacacacacacacaaaaacacaca

SEQ ID NO: 11286 - protein, 873 aa, DROSOPHILA
MRDCDSVDGEHHQLSAKAAIAARLSHTVSGGGGSFASPEPQTELPLSHHHQLPPNHPLNALGSFMGIGGLHSIPNLQHSDVLEKLKMQVRDMKVGLMEQDYAAAAHAAAFGANMLPTTISSGFPLPHNSVAFGHVTSSPSGGNGSSYNGGTTPTNSSNSNATTNGGGTAGPGGTGGSGGGGGGGGGGGGGVGGHQFSFASPTAAPSGKEARHFAANSASNSSTSSEASNSSQQNNGWSFEEQFKQVRQLYEINDDPKRKEFLDDLFSFMQKRGTPINRLPIMAKSVLDLYELYNLVIARGGLVDVINKKLWQEIIKGLHLPSSITSAAFTLRTQYMKYLYPYECEKKNLSTPAELQAAIDGNRREGRRSSYGQYEAMHNQMPMTPISRPSLPGGMQQMSPLALVTHAAVANNQQAQAAAAAAAAHHRLMGAPAFGQMPNLVKQEIESRMMEYLQLIQAKKEQGMPPVLGGNHPHQQQHSQQQQQQQHHHQQQQQQQSQQQHHLQQQRQRSQSPDLSKHEALSAQVALWHMYHNNNSPPGSAHTSPQQREALNLSDSPPNLTNIKREREREPTPEPVDQDDKFVDQPPPAKRVGSGLLPPGFPANFYLNPHNMAAVAAAAGFHHPSMGHQQDAASEGEPEDDYAHGEHNTTGNSSSMHDDSEPQQMNGHHHHQTHHLDKSDDSAIENSPTTSTTTGGSVGHRHSSPVSTKKKGGAKPQSGGKDVPTEDKDASSSGKLNPLETLSLLSGMQFQVARNGTGDNGEPQLIVNLELNGVKYSGVLVANVPLSQSETRTSSPCHAEAPTVEEEKDEEEEEEPKAAEEESHRSPVKQENEDVDQDMEGSEVLLNGGASAVGGAGAGVGVGVPLLKDAVVS

SEQ ID NO: 11287 - DNA, 3796 bp, DROSOPHILA
tcgcaggtcgagaacgtcatcggcgaagcccaagaagatcatgcagcaaatggaaagaagggcggcaatcaattccacgaactgtgtggggaataacagccgataaggtggagcacaaagacatctatcaattagatagctaccttatcatgtggaaaggtatctggtttgcctccagtaatcgcatccgtggcagctgcctcgtcgaaggcgaagggaatcggtatgaacagaaacaaggacaccaggaacacacagccaataagcacaccaaaggattcaggtctagagtttaggaagcgttttagttagaaaacctacaaaacaaaggagagcgaacttacacctgcggcttgtccttcttgcacagatcgttgccaaagagattggccttgatgaacatctcgcggaagcggggtatcatccggactgtcatgcagtaggcggcgcccgaaatggccgcattgatggctatggcgactcccgacatggtcggccttgaaaatccaccttccgctgcactaattcaattagctggtgcagctctgtgcgcagcaaatttgccggagtcacgcgtacggagtgcgctgtttcaattgggatagtgggaggccgcggaaaaccagccgatcactcgatcatggtgcagaaatcaattacgccgacaaaaaaaagtacacgcaattgaaactcaaattgctgataacaacaaactcagctgttcggcggctagtgtgcccgtactttcgactgttagacaaaccaaacagctgattttagtttactaatttaaattattcatatataaaataccacaaatgaatttaattttattttgacctaccttagtgaaaatagtttttaatttgtatagtcggcaataatcttaatttaatttcgcttacatatcaaagttagaaaatgttatagtatttctaaaatcaagagatcgttaaaaatttaaagactgaaagtaaaaacactttactagatgaaaaaggcttaactttatttaatatcaatgattacaacacttggaccaactccgttattacacatatagataaagatatctacaacgaaatagataaaatatgttgcgaatacttgttcttttcgagcttcctttgtcaatttggattcggtaaagattgctacctatccctgaagaaggggaagaccttttgcagctccgccttcgacttgcaggcctccacctgcggcagggtctccaccagattgagcagataaatctgcagctgctggcggcgttcctccacgaagaccaggttcatgttgccgaaatgcttctttggtggaaactccacggcactgaccaccggatgggtcttaagcagtgacttgtgcagcttgtagaactcgctgtagcgtctgaaaaacgtccagtgctccaaacgctgcctcatcgtgatgtgaacttcgtaagtgtagtgggaaccagatcgttgtgtctttgccagctttacatgcggaatggttatcaggaaattggagcacagcgatgagctggggtcgatgccggtctcttcaaactgtttggttagccttcggataagcaggcgattttgaagactaagctccgccacacgggtttccagcagagcgcatctttcgtttagctggttgacatgctcttccagcgcagcttgctgttggctgttagccaagcaattggcagaggaggaggacttgctccactgcgaggaggtgtcgcttcggtcttcatagagctctgactctccaacatgcgcgccaatgtctggcaagggcgtcttgagaaactccagctcgggttcaatggggtcgaagggacccaagttgacttcttcctgtggctgggctaactcctgttcgatggattccttggagagtatttgctgaacctccaccgactcgatgggctttagagcaccaagtaaatcctctgtggagctaacgcactcaatgggtcgttccaccgcaataccaggtcttttttggcgtcccaccaccggcactggactggtggtgaatataattggttcctctttgacggcaacacttggcgtcgatctcctgggtgcattaagctcagtggtgtccacattgagggcgaacagtacatcactgagggagtctacgatctctggcagcttcttggccgcctcatcgttgagtagcagggaccaaggtgtgtaaaatcgatgcagctgctcctcgtcgctcagccaggtgagcacatggctatgcagtcgcttctcgttcagtgtggcgcgtatgaaggcacgtcctctgcccacattcgtccagatctgcttaaggtccatatacctctgacgttcgtggggcgtcaaatgcgtctggcagaattcccagaaagtggcgtcattgttgttgctgcctccgcccgcatttccggacaccatctcctgcatgttctggatgaagctggcggcgctgaaggaggaagtgcctgccgattgcctaagtccgtaggacattagttcctcgagggattcgcacagttcctgaacagattcatcccgctcagtggcaagttctttgccactgaacttctgtgagattttatgcgcactttcctgtagacgtcgaaagatgtcctcgcgccgttggccaaaggtgctgcccgccagttggctgcgcatgctccggaagcctgcctctgtgggcatcgagctggatgcattttctggcattatttgtggctattattcaactaattatattttctactcatttttctcactccgttgtgtgccaacactggttgcttgacaacaaaacaagccaaacagtgttgataagcgttggaatgggcgcattcagatcaccgattaatgattttaagtgactgtgactcagcattaggtgatttattaaaataaaaaaattgtttgtaaataatttatggtacctaaaaaacttataaaactataggttgcgttatcaaaacaaaccaattataactgaaagcgcttaatttctccaattcatattggtaaggtacaacgatttcgattaaaattgtgtttttactgagataagcagtattgtacacttatcgataacaatcactctgcattatttctcgctgaacgcgaccacttgtgcatccctggtgatttagcgggcaaaataatgccaaaacgctgttgtgcgactgtgtagccctggcgtataattgccatccctgctcgcgcaaatgcgaaagaagttagcacacaaaaatctgttaaaaactattgttaaacgattgaagatccaataatatgtcataccgcaagtgctagcaactggggaaacccaatccgaacgcgtccaacgtgcaaaagtgtaagtttgcatccaggggcagcaacgtcgtaaattttcttttctgttcgcgttggctgtctgcgcaaacgcttcattgacttttcgagattgaacccatgaaatgtaaccaaaaattctgataaatcggatatatgctcgaaccttattcagttgtgtgaaactccacgcggcggctgaaattccgaccgttacgacaggcttcaatcgcatttccgtacgcttccctcaccgcgcagcatctgcgtgcagaaaaggcaaaagtagaatgaaaaaaaaaggaaaacgggaacagaaggaggcaaacaaaacgaacaacgaggaacactgggattcggtcaggatttacagcccatatggccggaacattcgccggttccaggagctattcgtaaccaaacaaactgggagcattctatgttgcattgtccataaaattgca

SEQ ID NO: 11288 - DNA, 1796 bp, DROSOPHILA
tcaagcaaccagtgttggcacacaacggagtgagaaaaatgagtagaaaatataattagttgaataatagccacaaataatgccagaaaatgcatccagctcgatgcccacagaggcaggcttccggagcatgcgcagccaactggcgggcagcacctttggccaacggcgcgaggacatctttcgacgtctacaggaaagtgcgcataaaatctcacagaagttcagtggcaaagaacttgccactgagcgggatgaatctgttcaggaactgtgcgaatccctcgaggaactaatgtcctacggacttaggcaatcggcaggcacttcctccttcagcgccgccagcttcatccagaacatgcaggagatggtgtccggaaatgcgggcggaggcagcaacaacaatgacgccactttctgggaattctgccagacgcatttgacgccccacgaacgtcagaggtatatggaccttaagcagatctggacgaatgtgggcagaggacgtgccttcatacgcgccacactgaacgagaagcgactgcatagccatgtgctcacctggctgagcgacgaggagcagctgcatcgattttacacaccttggtccctgctactcaacgatgaggcggccaagaagctgccagagatcgtagactccctcagtgatgtactgttcgccctcaatgtggacaccactgagcttaatgcacccaggagatcgacgccaagtgttgccgtcaaagaggaaccaattatattcaccaccagtccagtgccggtggtgggacgccaaaaaagacctggtattgcggtggaacgacccattgagtgcgttagctccacagaggatttacttggtgctctaaagcccatcgagtcggtggaggttcagcaaatactctccaaggaatccatcgaacaggagttagcccagccacaggaagaagtcaacttgggtcccttcgaccccattgaacccgagctggagtttctcaagacgcccttgccagacattggcgcgcatgttggagagtcagagctctatgaagaccgaagcgacacctcctcgcagtggagcaagtcctcctcctctgccaattgcttggctaacagccaacagcaagctgcgctggaagagcatgtcaaccagctaaacgaaagatgcgctctgctggaaacccgtgtggcggagcttagtcttcaaaatcgcctgcttatccgaaggctaaccaaacagtttgaagagaccggcatcgaccccagctcatcgctgtgctccaatttcctgataaccattccgcatgtaaagctggcaaagacacaacgatctggttcccactacacttacgaagttcacatcacgatgaggcagcgtttggagcactggacgtttttcagacgctacagcgagttctacaagctgcacaagtcactgcttaagacccatccggtggtcagtgccgtggagtttccaccaaagaagcatttcggcaacatgaacctggtcttcgtggaggaacgccgccagcagctgcagatttatctgctcaatctggtggagaccctgccgcaggtggaggcctgcaagtcgaaggcggagctgcaaaaggtcttccccttcttcagggataggtagcaatctttaccgaatccaaattgacaaaggaagctcgaaaagaacaagtattcgcaacatattttatctatttcgttgtagatatctttatctatatgtgtaataacggagttggtccaagtgttgtaatcattgatattaaataaagttaagc

SEQ ID NO: 11289 - protein, 520 aa, DROSOPHILA
MPENASSSMPTEAGFRSMRSQLAGSTFGQRREDIFRRLQESAHKISQKFSGKELATERDESVQELCESLEELMSYGLRQSAGTSSFSAASFIQNMQEMVSGNAGGGSNNNDATFWEFCQTHLTPHERQRYMDLKQIWTNVGRGRAFIRATLNEKRLHSHVLTWLSDEEQLHRFYTPWSLLLNDEAAKKLPEIVDSLSDVLFALNVDTTELNAPRRSTPSVAVKEEPIIFTTSPVPVVGRQKRPGIAVERPIECVSSTEDLLGALKPIESVEVQQILSKESIEQELAQPQEEVNLGPFDPIEPELEFLKTPLPDIGAHVGESELYEDRSDTSSQWSKSSSSANCLANSQQQAALEEHVNQLNERCALLETRVAELSLQNRLLIRRLTKQFEETGIDPSSSLCSNFLITIPHVKLAKTQRSGSHYTYEVHITMRQRLEHWTFFRRYSEFYKLHKSLLKTHPVVSAVEFPPKKHFGNMNLVFVEERRQQLQIYLLNLVETLPQVEACKSKAELQKVFPFFRDR

SEQ ID NO: 11290 - DNA, 7324 bp, DROSOPHILA
atgatacaatattcatttacgtctagctctttttacttgccatacaaatatcgttgattatggttatgataactaaatgcatttaaatcatcttaatattcatacaaatcaattacagacacaccgacattaaaataataaagtatacaacgttagttttctctagtttaatgccattagcccaatgtgcagaaggctctagtactttacgtggttatttttagcttagactaacatacaaaatgctgcactaccttacatttgcgaaaaatgtaagcttgcctggaggagccacaaaaaaacatttgcaatcttcttatttaaacaaattacacgcagtttaatacttgttgcttcttttatgcgcttgcttttacaaaatacgactacgattaatgtgtatacagattaataatttcttaaccactttttgtttttagttttaaattttttcaaacaattccttggcgcttgcgtttttttttttttgttgaagttttgaacgttaggttttctgcatccttgaccaaaaatagaacagaagatttaaagctttcaatttactttcgattcgtttcgcgtgttacatttttgactagcttggaagcatgagttaaattaaaacctaaagtgcggactctgaagtgtgattgaacacagaaagaataaaaagcaaatcggggcagtttacaatacgcgggacattggtataacgttttaaagctatcgtttgtcagccaacgcactccagtcggtttaagggagtaagcctaagtagaaggttaagcaattagaatcgctttggggaaagtagctgatatcaattagatattaatgtgctttgtcaaataattaaaataaaaaaaaactagaatctttatcaagcttataccgctttagaacgatttcaactaaaacacctatctatcatggctttctcccttaatgaatggtataaaggatggggacgggatcttgcccgttagctgagatcgcaccgttagcgacggtcgctgcttctggatgcggatcctcctgctgccgctgctcctccaccaccgttgccaccagcaccgggcgcctggttcaccgtctgcagctcgtactgatagtagcagtcgctgcccacgtagacggtgcgccaaacgccgtccacatctcacatctggcggtatggtgagtgcatcttgagccactgcagcaccagcgatggcccgccagcttggatttctggcggaatagtgctcagcgggcacttgtcaatgttcagatattttagattttgacacaaagccagttcaaatggcagcttctccaagccgggattctggttgatgtacagattctcaaggctctctagcgaaccaatctcctcgggcaggaactgcaggttattctcgcttacagacaggtgagtcaggttgcccaagtggccgatgctacgcggcagcatggtgatttgattggtttgcaggatcaaacgttggagctcgtgcagcaggccaatctcgtgcggcagcacctcaatgcggttctcctccaggtccagtattcttagctttcgcaaatttccaattgtattcggaatcttcttgagcatgttgtttgacaggatgagtatctcaaggttttgcaggttcatgatatcatcgggcagtttctgtagcgcatttgtggccagattcagctccaccatgttcacccaggtgccgatgtctaatggtaaagccgtcagcatgttctccttcatgtttaacttggtgagacccttggccctcgagaagatcccatagggaatcttatcgatccggttgtgctccaagttaatgctatagacattggtaaactgcgctggaccgccagtgggataacttgcaaactgatttctcgatagagtgatggtggttaatccgcttaagctggccagcatgccgtctggcagctgggttatgccattaccctccacgttgaactcgtccatgctcttgcagtttttcaaagtggccggcacgctacttaatcgattgtatctcatgcccagccgcaccagggatttcagattcccaatactatcgggtatgtccagcagttcgttgtgctgcaggtccaaagcgctgaggtttacacagttgccgatgtcttcgggcaggtgttccaaatggttgtgcgaaacgtccagcgtggttaggttcaccagcgcgccgatggcgctgcccaactcccggatcttgttctctcgcaaactcaacatggtcaggttgaccagctggcgcagatcgtctgccacggcggtgattcgattgaagcgcaggtaaagtgtggtcaagctgcgcagacggtaaatcacgggcggaatctccgccagcttgttatgccgcagatccagcaccttcagttgactgcagttttgcagggactcgggcagcgaggtcagcgagttctcgttgagcgcaaggttacgtaggctcaccagacagccgatttccggcggaagttgaccgatcttattgctgtacagataaagttccgtgagatggacgcactcctttaccgtgctggggatcaccgtgatcgaagatttgctcaagtccaagcgcttgatgcctgtggggagcgtataaaatcattatatggttgtatgaagttattaacttaattcatcttattaacaaattctaattagtaaatgaaatttcatgtattgactagcttctatttcaattctgctaattatggccttaatatatatatttccaagttaattttgaactcggtggtaagggacaaagctttctgcgccatgtttcttatttcatcaagaaaaatattaaattgtacttgccttcatcacgacagcgctgcagcgccttgatgacatcctggtcggcctggatgggcttgcttttctttgtggtgggcttgggcttgttggactccggatgcttgacggtcaccattttgggacgcgtttcgggcggcatatttgcgttgttttcgttgtgaaggtggctgtgtccgttgctgccagtcggctgttgtccactgccggttgatccagttgctcctcctgctccgttggccggactgttggcgttggacagctcctccgttccggcgatcgcgcctgctgtgcccgatcctcccgcaaagcagagtgttggggcctcggcggatccgttgctggttttgccgccgccgccgctgttaccgctgcctccgccgccttctgctcctcctcctggtactccgccgctccgctccgcctggcccgtggatgataacgatgtggtcgatgccgttgcgcccgaggaacacaagttcataattttgcccagctttgcggtcggcggcgacaatgcgttgcccagaagtgtgcccaagcaacagcagcagcagccgcggccggaggaactcgttgctctaccctgcaatgggaatattgtgattacaatgccgaaattatgccacaaacgtaatctctcaacgagacagtaactacaatctttgtatttcatgttttcctgtgtgcaatcgcagaaaagggaaagtttggaaaacagtacgcgcagccgtttatggctgcactttatcaattctgcgtcagccgggcggcaatcgcatcgtgcgtcatcgtcatggtgctcccacccacgcattcccagctccaccctggcccatttccgcccctcccccctctcagtccggcttggttacttttgcttttgtttttgtcaaccgccgtcgctccttattaaccagttgaccataaagttttcagaaaccctacacgcaaatcaataattaagcattccaacagtgacgtcaaaataaggcaatcaaaaattggtcggtgaggattctgactacgaaatacccagtgtgtgcatgtatgatctcataaatacatttcctgtataattgtaatcattacattgattttatgtaatttcgtataatagcaagttatcttaagagacgtgatcgaaaaagttccatgtggtaaattctaatttaattgctggaaaaggtacttcatggttactcggctgacttgtaagttgcgataagaaagtaactattcagggaaaggctgatttgaatactaaacaaatatgtactatagataagattagataagcatcacttgctccgcgctcattaattaaattaaatgtcagttaatgagcttaagctgctgatgtgatactttaagagctgtcaatgccgcgggccacgtgcaggaatcgcataccccgtgccgcggccaaccagcaaccttgccacccaccacccaccgcctactggccaccacccaccacgccacacacggaacgttcctgctattttagcggcaaatgtcaaggtcagcgagagggggcgtcaggcgattcctggaaaagccagagccaatgccacagtcaaaggttgaaagtgcaccgcaatctggccatatgaaaaccatatcttgggataccggacgcagcgtaacccgaactggattctcttactgaaagcaaaaatttggagacacgcttctcggatttcacagatttagcatatgcgaacaatgcacaattttgagtggctgctcaagtggaagatacacgggaagaaaagtgcagataacaagatcattactcatacttgaaatgaattttgtagatttttctaaaattcaatctggagggaaaattaaatataagctagctttcagcaaaataagtaaataacagtgcgctttatgcttaattgagcattttcgaataaattttagtttttaagacctttgagttacaaaaataattctcttcgataatttttgacgtgcaaattctctaagtataggcgagtttattcgactgatcccggaaatcgtacgcagcttatgataaagatacatagatagatagaggcgacttggcgaactgaaagtctgattcatggtaaatttccatttctttgattgccattgcactggaaccacattgttgttgttgttattgttcattcgccttgtttgtgggcggagaaccaaacacaaatcggcacagatacacactatggacacacatatctacaaggcgcaccaacgtttgtggcagcaacagcagatcgcgatgatagcacaacttactgttttcacttaatgtgccattaaaacggtctcctaacgttctttgcctctttccgccgatcagaacactactgcacgcattattatattgttattattcaatttgcacactagagctggaacacagtgcgattgcaacttgataacatcgatgcttcgactttcattcgactatcgatagtcaattcaatatatagcgtgttcatactagcctcacaataattaagtgagatcgttttcaaatccacacgaatcatgaaagctgggatattttttatttcatttcagaaggaagttacaaagttattacataaattattacagggaacctaacaaaatagtttccagtgctattattatcgataaaatcacatgtgttatgaaaagattctaaattaaagttcgatcagcaaataaaccattttacaggaagtttgcacaatcttgattatttttaaataaattatggacaataaataactgtaagcagacaactgtaaagaaagctttgcaaaaagctcctgccttggagctttaaaatgtttttgcctcaatgtatacaatgttgagacatttcacgaaaagtatgcgaaaactatgcttaactgatttttaattaacaaaagtaaaacttttttgatttcatatgttgtttcctgaataaacaatagcaaatgctacatttcgaggtcacgtaagcatatatcaaacgccaaaatatatgcaactaaacacacgcatagattgttatacataatttacgatacgcaatttgctgacattgcaacgcggaaaataattagcaacaattccacagatcaataataaccaacctgttattgaatagcgaagcgagaaaacttttcagccttcagcgctcaggaaaagcactcgtgtgtaagtagtttatatcctttgtgctgctcctgccttcccaaacaatttttgacttgtggctaacagctttgatttttcacttttcccaattctttcggttgaatatcactgccacaaacaaaacacttttggcctaagcgttaacacttaaactacaatttataataatttattagtgcgatttaaaacagtaacgatggcgtacaaaaaggatggattttccgggaaaataacggaggaaaactggcgattttcgttcgcggaggtgacgtgacgcgtgcctagagagttcagagttacacataaatacaacactgctggctgctggtatatatcctgcccgttcgcatccacgcgcaattccctgcgccttgcatcgcgtatacgacgcgtgcgccgttgacagctggcgccctctggccgcagacaacagcacccagcagctttcatatttcgccactagatgtccatccctagaagttcgtcgttactgataaattcacatgctctctccgctattatgcgataatctgccacagggataaagaaaattaaattgatttaaattaaattgattaaaataaataaaatgtgcttaaatgctttgcgtcattaatcataaaatagtttaaaatagtagctttagaggtgtgataataaatggtagatcgagaagtattgtctatggctgcagtttttcggacttacccttctggtacttgcagttgtacattcgcatcacacaactgctggcaaaggatcttaggcacccatctaggacgtccagggcacacacaacccgatatcccatgggacacacatcatggcactttttgggaactacttggacaaaaatggtctacaaaaatacctgggcagataagggatttatcggacttactactcagggtaaaaagctggccgccaactattgtaaagatccctagaagcacacaaatgagaagtattttgttgcccaacgtgcagacaatttgcatttttactatccaaccgttcgcgctttttgccagtctcgcattaaaatttaattccacaaaagttttcagagactgtaataaattttactttttatttttcgccctgtcaattgtgtcaatatttatacattcttaaaaatattcagctgcttcttctgcgcctggtaattttccccctaccgtctgcattcctccgagtcgcgtgtgcatcgacctgttgtatcttttctccactctggtgaaataatttttatattatgtacataagtatgtaaattcatgtcagttttccatt

SEQ ID NO: 11291 - DNA, 2614 bp, DROSOPHILA
tgaactctctaggcacgcgtcacgtcacctccgcgaacgaaaatcgccagttttcctccgttattttcccggaaaatccatcctttttgtacgccatcgttactgttttaaatcgcactaataaattattataaattgtagtttaagtgttaacgcttaggccaaaagtgttttgtttgtggcagtgatattcaaccgaaagaattgggaaaagtgaaaaatcaaagctgttagccacaagtcaaaaattgtttgggaaggcaggagcagcacaaaggatataaactacttacacacgagtgcttttcctgagcgctgaaggctgaaaagttttctcgcttcgctattcaataacagtccagctctagtgtgcaaattgaataataacaatataataatgcgtgcagtagtgttctgatcggcggaaagaggcaaagaacgttaggagaccgttttaatggcacattaagtgaaaacaggtagagcaacgagttcctccggccgcggctgctgctgctgttgcttgggcacacttctgggcaacgcattgtcgccgccgaccgcaaagctgggcaaaattatgaacttgtgttcctcgggcgcaacggcatcgaccacatcgttatcatccacgggccaggcggagcggagcggcggagtaccaggaggaggagcagaaggcggcggaggcagcggtaacagcggcggcggcggcaaaaccagcaacggatccgccgaggccccaacactctgctttgcgggaggatcgggcacagcaggcgcgatcgccggaacggaggagctgtccaacgccaacagtccggccaacggagcaggaggagcaactggatcaaccggcagtggacaacagccgactggcagcaacggacacagccaccttcacaacgaaaacaacgcaaatatgccgcccgaaacgcgtcccaaaatggtgaccgtcaagcatccggagtccaacaagcccaagcccaccacaaagaaaagcaagcccatccaggccgaccaggatgtcatcaaggcgctgcagcgctgtcgcatcaagcgcttggacttgagcaaatcttcgatcacggtgatccccagcacggtaaaggagtgcgtccatctcacggaactttatctgtacagcaataagatcggtcaacttccgccggaaatcggctgtctggtgagcctacgtaaccttgcgctcaacgagaactcgctgacctcgctgcccgagtccctgcaaaactgcagtcaactgaaggtgctggatctgcggcataacaagctggcggagattccgcccgtgatttaccgtctgcgcagcttgaccacactttacctgcgcttcaatcgaatcaccgccgtggcagacgatctgcgccagctggtcaacctgaccatgttgagtttgcgagagaacaagatccgggagttgggcagcgccatcggcgcgctggtgaacctaaccacgctggacgtttcgcacaaccatttggaacacctgcccgaagacatcggcaactgtgtaaacctcagcgctttggacctgcagcacaacgaactgctggacatacccgatagtattgggaatctgaaatccctggtgcggctgggcatgagatacaatcgattaagtagcgtgccggccactttgaaaaactgcaagagcatggacgagttcaacgtggagggtaatggcataacccagctgccagacggcatgctggccagcttaagcggattaaccaccatcactctatcgagaaatcagtttgcaagttatcccactggcggtccagcgcagtttaccaatgtctatagcattaacttggagcacaaccggatcgataagattccctatgggatcttctcgagggccaagggtctcaccaagttaaacatgaaggagaacatgctgacggctttaccattagacatcggcacctgggtgaacatggtggagctgaatctggccacaaatgcgctacagaaactgcccgatgatatcatgaacctgcaaaaccttgagatactcatcctgtcaaacaacatgctcaagaagattccgaatacaattggaaatttgcgaaagctaagaatactggacctggaggagaaccgcattgaggtgctgccgcacgagattggcctgctgcacgagctccaacgtttgatcctgcaaaccaatcaaatcaccatgctgccgcgtagcatcggccacttgggcaacctgactcacctgtctgtaagcgagaataacctgcagttcctgcccgaggagattggttcgctagagagccttgagaatctgtacatcaaccagaatcccggcttggagaagctgccatttgaactggctttgtgtcaaaatctaaaatatctgaacattgacaagtgcccgctgagcactattccgccagaaatccaagctggcgggccatcgctggtgctgcagtggctcaagatgcactcaccataccgccagatcgactgctactatcagtacgagctgcagacggtgaaccaggcgcccggtgctggtggcaacggtggtggaggagcagcggcagcaggaggatccgcatccagaagcagcgaccgtcgctaa

SEQ ID NO: 11292 - protein, 677 aa, DROSOPHILA
MNLCSSGATASTTSLSSTGQAERSGGVPGGGAEGGGGSGNSGGGGKTSNGSAEAPTLCFAGGSGTAGAIAGTEELSNANSPANGAGGATGSTGSGQQPTGSNGHSHLHNENNANMPPETRPKMVTVKHPESNKPKPTTKKSKPIQADQDVIKALQRCRIKRLDLSKSSITVIPSTVKECVHLTELYLYSNKIGQLPPEIGCLVSLRNLALNENSLTSLPESLQNCSQLKVLDLRHNKLAEIPPVIYRLRSLTTLYLRFNRITAVADDLRQLVNLTMLSLRENKIRELGSAIGALVNLTTLDVSHNHLEHLPEDIGNCVNLSALDLQHNELLDIPDSIGNLKSLVRLGMRYNRLSSVPATLKNCKSMDEFNVEGNGITQLPDGMLASLSGLTTITLSRNQFASYPTGGPAQFTNVYSINLEHNRIDKIPYGIFSRAKGLTKLNMKENMLTALPLDIGTWVNMVELNLATNALQKLPDDIMNLQNLEILILSNNMLKKIPNTIGNLRKLRILDLEENRIEVLPHEIGLLHELQRLILQTNQITMLPRSIGHLGNLTHLSVSENNLQFLPEEIGSLESLENLYINQNPGLEKLPFELALCQNLKYLNIDKCPLSTIPPEIQAGGPSLVLQWLKMHSPYRQIDCYYQYELQTVNQAPGAGGNGGGGAAAAGGSASRSSDRR

SEQ ID NO: 11293 - DNA, 2870 bp, DROSOPHILA
aggtaatccacatgctgcactcagttaattagatggcataggaagtgcacataaataaacaattaggtggcagcagataaccgacgcgtatacatgcaattgctgcatattaattgaagctcactcgcacacatcgccttcttggagcttgaacaccagtccccttccaatggcaagttctcccccgaaatgactgagtcatcagcccgcagatttgccccaacttgggagtaatttaaaacgctactgcttgtgaatgcatttgaaatgcttttccaccgccttccactcgatgcgctcgagtgtcgcacccctcgaagtggagggcaaaatgcatctgccaacaccaacgccattatcctgggcatatgtctaagtcagatcaaagccataatgctggctgagtgcaactcgggtgtaagtgcggatgacagcgatattagggccaattagatgtccgactttgccgacgagtatcacggcgaaatgaaatgaatggcctttatttgctggaaaatcacattcagcggcgatcaaataccagcctcaaggattagctgagcagtttgaattgttgtattctaagtaagtcgaatgtagcatagaacattttatttatacctattcaaaaacaaatcttctgagctgagaaaaactcaagataataaacccttttacagttgaatgtttagtacctaatagctatattattaacatacttgttgttgttttgttaggtagttccgcatataagagtatgtttgctcacgttcatgctataatttaaatatatttctaagtctacttatgtcacgacacggttcattcatgagtcagtcacacctgaggcaaatgatgtcaggtctttttagatatttgtacagccgtttatttaattatattcagggtcattgagaatattcagctcgagagcagccgtcaaaaacgaaatgtatacgcatcttgttagacatttgatcacatctacttgttggtgtaggatagaagaaaagcaatccataaatataacgtcatgaaactgttaatatggttgtgcctcctcggcttcctggccagtgcctatggcattttcctggacaagattaccggtcgaggggattcatctggaaacggcctactagacgatatctttggactcgaagactcggataacagcagccacaacaaaacctcccaacatgcattgccagcgtcgggaatttttactccggttaaagtagctgttgacgttattcaaaatatatgggatgaattttctaaggtaagtaaaagctacgaatatcaaaaaacaaatccatcaagaaagaatcacctttctttacgaagacaagaatttgttcgtaaacgttttgttttgaggttttcgtagcagatttcgtgtcactcaaaatagaagtgaggctgttaagtcgtagaaaaccaaatgttgtacaaagtattgtataagtttgttggttttagaattatgcatttaactgctgtccgtagtgatactttttttcttcatatacagggagttttaggccttatgggcagttttggtaccggtgatgatggaggcgaatcaccgccgtctgggaatacagcgcctgtcacaacagagtctagtttgccatcgcaagaaaccacaacgactagaacaacgccgtttacaacaacggaatccagaacggaatcggtcttggaaacaaccacaacagattcatccacgagtactttgccgccataaggagaaattctgtcgcctaaccttcgcatcggatattgcttgtcattgtttgtttcccagctgctttctgtctggtgtatttaaacaacgagaatgtaaatataagtaccagccacgcttctacgcggcctttttttttattatttcgatatttacgcaaatgttggggaacctcgttcaagagacaaccataaagagttctacgctcataggaggctgatcgataatgtctcgacatagcaactggttttgcatcctgtttttagctatccaatatccggatttcgtcctgccagctcctgctggaaatgttcctcttgatgcatccgatggtcttgtgacgttcaggatgactattgacagagaattcgatcaattgcagcccgaacttcaacttagatggttgcaagcacaacggcaggaagatggtaagtttgatctacagaatatataagatgtatatatatataatggattgctcttcagattttgaagtgatgcgcatgcaattgctgcaaatgaacttactgaagttgttagtcgccttggattgctttatcttgttgtgcatttggtactacgccagagaagaaaaatattacccggtgcaaaacgtttgacaacttttttatgcctgccttcatttcataattaatatagttcgtaaaatgtaattaattcagtggagaaaaatatgaaattcccagtaaataataccattttgcaaattaattttcaaaatgttataggtatgaaaagttagatcatctattaaattgtagtgactacatcaatgaagccctaatggtgtgttttaaataaactgttattgaataattacgagccaattcacgcctgctgtttgtttaggtcctttttggctggcatccaatataaagccagttttcgcagcacacaaattcgcccaccgaatgcatcgttaaatatcgacaacagttggctctattcggttgtttgttgtttgaacttttggttcataaatattaacagctattaaagcacaaacaaatacgggcgaacaaggccagttgttcagcccgacaaataccagctaaaaattaattttaaattttaaaactaactgcatgcaatttacgcg

SEQ ID NO: 11294 - DNA, 618 bp, DROSOPHILA
gatagaagaaaagcaatccataaatataacgtcatgaaactgttaatatggttgtgcctcctcggcttcctggccagtgcctatggcattttcctggacaagattaccggtcgaggggattcatctggaaacggcctactagacgatatctttggactcgaagactcggataacagcagccacaacaaaacctcccaacatgcattgccagcgtcgggaatttttactccggttaaagtagctgttgacgttattcaaaatatatgggatgaattttctaagggagttttaggccttatgggcagttttggtaccggtgatgatggaggcgaatcaccgccgtctgggaatacagcgcctgtcacaacagagtctagtttgccatcgcaagaaaccacaacgactagaacaacgccgtttacaacaacggaatccagaacggaatcggtcttggaaacaaccacaacagattcatccacgagtactttgccgccataaggagaaattctgtcgcctaaccttcgcatcggatattgcttgtcattgtttgtttcccagctgctttctgtctggtgtatttaaacaacgagaatgtaaatataagtaccagccacgctt

SEQ ID NO: 11295 - protein, 154 aa, DROSOPHILA
MKLLIWLCLLGFLASAYGIFLDKITGRGDSSGNGLLDDIFGLEDSDNSSHNKTSQHALPASGIFTPVKVAVDVIQNIWDEFSKGVLGLMGSFGTGDDGGESPPSGNTAPVTTESSLPSQETTTTRTTPFTTTESRTESVLETTTTDSSTSTLPP

SEQ ID NO: 11296 - DNA, 17193 bp, DROSOPHILA
ttccccgaactgcgatcaggaattcgatttccaacttgcgacttgctgggtgcaacgtctgtccgctttgttgttgttcgctccggatgacatgcaacttttgccccgagctgtttgttgctgtcgttgttgtgttgcaatcgacaacaaactggaagagcaacaaatgctgcctcgactgccttttattaaataacgtttcaatattccaacattttctgacatatcaattttcgcgcggcgtagccagcatagatatataaagtcatgcactggcagaaatacctaaaaatttaatcatttatcaaaaacattattcatgctgtgtgaacagctttggttaatcctaaaagccttctaaatctaaatctatttttcatgcctcaagatcaattcgattgattccttatattgcattagatagtgtagatatcctgaatatcctgatggcgaacatgtagtttcgtatattctcagtgcaaaagaaatacgtttatagatttgagctgcgatatgaataaagttttgcatcttgctccgtttgcttggcgagtgtttgtgggtgacagcaaattgtttagatatggcatgaaaattgaaatttatgtccttgccattgacagattgctagcagcaaatactcgagagttggtctgcggttagcaaataaagattgtgcgatttcgcaagtgttcctgaatggtttgatggggtgttgggcgtggaaagcgagtggaaaatggattttctttcgattgcgggggtggaaagtatcgcagaatgctccgatcaatttgagcaattgagattgcgaaatagtggcgcaatggccatccatttgcagattaaccgcgattttaaattcggcaattctaggccaaagttgctctttagctgcttaaaattccttttcgctggcgctaaagtttccaaataaagttttgaatggtaaggctggggaataacaaaagactatgctaatctctggcttatctaacctatgagcccagcccttttccaccttttccacccagttaatttcccagcgtttgcattatgcaaaacaaaacaaaaaggggtgaaatatgcagagaaaaaaactacttagctgctaagctgccgggtcttttgccgcatatgcaaatctaaacaaattaattccaaactgagtcctttgagcggaaattcctctgcccccaactttcagcccccatttgctgcagtttcagctgcgacttcatttgcaacgtcaacggcaatgcgcattaacattgttttcatttgccaacgagcgattttccctcctttttttttaattttttcgtttcgtttcttttcgcatttgtacaaaccgctgacgatgatgacgccgccgctgactgacgcagcggaaacggaagggggcctttcccatttgatacatacatatatattccacattcctttcatatccacctctgtctcctcttttttcaggatcccatccgccgcggatagtggagcatcccatagatacgacagtgccgcgacacgagccagccacgcttaattgcaaagccgagggcagccccacgcccaccatccagtggtacaaggatggggtgcccctgaagatcctgccgggctcccaccgcatcaccctgccagccggcggattgtttttcctcaaggtaagcgacgggcggagatgcgccggtggaaaattgaaaaggttaagtgcagccagggggtaaatggaaattgggatacctggatacctggatgtggaacgtgaatgattgtggtatttatggaaaagtatgcttgatactaagtccccctttttatacgaggcacaaacttattaattcaaaatgactgcttacatagatgatttcgttttatataatcaagagaataactacaattgatgtgctcaataaggaacttccttcggagtcagtgagaccatgttcctagccaaatggcctgtggtgtatttacattatttcgccagcttggattttcttcacttcagttcgtcctcttgttctatttgcatgcataattattatttcagttgagttccatgctttcattcataatgaaagagacaatggcgaggagtaaaggaagatcctgcgagttgcttaaaaaatattcattttgccaggccatctgttgagtgatgagcaaactaattgcttttatttttaactctcctttgtcggccaactttttccgttcgtatcatttggcggcaagctgcaaaaatatttttgcagaaaaattgttcggtcttcgctgggcaacaacttcattaacgcaaggtaaacaaacattaagcggggaaagtcggaaaagcgggaaagcggagaaaggcagcggcgcaagagaaagcgacagacagacaaataaagacgtaacggaagccggtggaagcggagccagcaaaagtcagttgcagcctgatgagctctgattgggaggaactgggatggctgaacactgagagaaatgaatgcgtactcaaaattctgatatttctcgatttaaatcgtagtattttgttcataactttcttagaaaacttctgaagatagaatgtcatacctcgttgaactcgtaataaaatttgcatttacgcctaaaaattttattttttagccatttttcgcaaaaaatcatgatgttacccctttccaaaattcgaaaattttgaaaaaaatttttttttccgaaacgttcaaaaagtgattctattggttagattaggtcaacagaagttcaaaacagtcgcaaactcgactgtgtgactatttttacacatttggcaaaatatcgtatgtcgttttaaatgcaagatatttctctcagtgcagcaagtatgagtgactgctacgagtgactccctggccacggactcttcgctgagctgagcagagcactcagcaaatttacgacgcaaaaagccaacgggagccgcgttgattatgctgatgatgcagttggaatcgcagcctccactgcgtgggaaggggatttgggctatatggagctgggattcgggatagagaattcggaattcaggattcagaactcagaactctggattctgggtgcaggatgcagggtgcagcggactggggatgcgaaggcactctgagcttgccacttttcacactcgatctgcctgggtgtctgggcgcttatggttctgtatttgtgcttgccgcatgccactgtatttgtttatcacttaagtgcaaaaagggatttgagcattttccttcagccattgcctctggcatttccagactccggcttccgctgatgcctgcgaaatgtctctgtgccatcgctttttgcggcgctctcctaacgacttttaaatgaattaattccacgggtgtcctggcaccacatcctgccatctaatgtgttctttgccttcgctgagccacgttctatggcgttagtggcaatggtgagtttgccagccattccctttgatactatttagttcttaaatccctcagttccaaaagttaaagtaatggaaacacaggcctactttctagaatttaataactttttgcaaggtccctgacctatcttattactttatttacaactgtttcggcatatgaaaccctctgtaaatgtttcacaaacccagaacaaatatacttcacatcatttcattgctccccagaggcataatttaaattctaattccggcaggcttccactccccgaaaaggacattcatcttacttataagtgccagaccacttcgaaggaaacttcaaccagacattattgctataacgatggagcccagttgagaacgagacgggcagaaagtgtgcaacactatcgaatgtggcgcctccaaacagggggagctgaaaggaaaatccctctttaatttagggggcgaaaataaagttttcctgttcttttttttgggggctttaagtgctgaaggcaagcggagtatggtcgggaaaatgtacaggcgaatagggaatatgcaataaaatacaaaagcatgtacaatgtgtatatttgcgggagagatggagtttcgaccgaaaaaataggagcagcacgctggaagcgtagtgagaagtgacacggaggagcgagcgatggcaagacagacaataatttacgtaactccacgacaggaaaatggggaaaataaggcagaatcgaagaaacacacacacttgtgcgggggaaacaaatgtctgcgtgttggtgctcaagtgtgcgtgtagtcgtgagcagcactttccgcacatcatctggtggaaagtccttaaagctggcactcgtgctgagttctcaaggagtcactcttccggtcacgaaatcggcaatgggttattctaggaaaatagttttttatacgcaaaccatgcatttaatgcacggatgtaataagatcagaaatcaaaagatctaatcaaaggaactagttaaatatagttaactttaaggctagcatctcccatgtcgctgcatgcagagacatccttccatttcgcgtccttgactaaagttacccgagctctctgtttgctctgtctgactctgaagtgctagcatgcacttacatatacgtacgtacatccgtctgcctgcagccatccctcttcctcacctcctcaccaccggaccaaacttaacgtttatttaaatgtctgccacatttggtcatagtttctttgccgcacaagaactacttatccttgcttccagactgcggcaactttaaaaaaggcaatcaggtggcgcagagcggaggcgaataaatcaaagcgtgactttggatcctggctgattgcattttcgaggtgctgcccgagaagagcgtaattaaaaagcagtcgaggctcaaaagttaatgcctcccttttgggcggaaataactttatgcacttcactgtacagtgagcacattttaatgagtttacaaacgctcgacacattcgcggggccataaaataaaaatctcttcccctatatatgcacatacataaataaataaatacagggctcgagccgagttgagtggtgttgggaccaacactgcgtatgagttatgtttttatgagcagggtgacgatttttccatcatgtgcttttttttctcttttttgctttcctgtgcctcagggctgtttattaactgaaggtgtgagggaaaaatgcttttgagccgcgtttaatgaatgagcggaagggaaatgggctgaggggctgaaacagggcttaagaaattcccctggatgattgaattagtaaaggaagggagggggggagctgaggttaaaaggcggatttttaatgaggagattaacggggaagtggggttaaggcctgaacgatgcaagacttattaaaaggaataaacaagaagtacacttgctttcaaaatacttttttaatggagttttggtgctttgcagaagttggaagccatacggaactttgattgacatgtttttaattcacttatatcgtaatcggataagaagcaagtattaattaaaaagagaaaatgtattcatatgttatgttatgttattcctttctttcaagatgagttactcgaatctaatacatatcctctttttctactttgatacaaagaaaataccatttattttttatcaatgctccaaattggaatgttataacccttcgagagctaattgctctcacttttcgctgcaaattcgcttccaaattaaaagtgaaagtattttaaccaaaaccatacccattcagtcgacaagcagatttgcctaattccatttcgtttcagactcgtttcgggctcaattaaaaccatttacacgtcgcactttacacgagctttaaaatttaaaccaaattataaaacactcaagagttagaggggattccccctcgtaaaaaacggaggcctccgagtgcgagggaggcggcgacagataggccatctccctctggcacacgcagcagacaattacgaaatgttgcaacatgaaaacgggaatggctcccaaatgaaatgtttgaaaatttatgggtattttaaattaaaacggaagcgtgttttcaacgcgcttctctcgcagactcgcacacacacacacacacacacacacagagacacagtggcagtcacacagatacagccaatatattttatagctcccccttgtcacccgaaaaccccacgaaaagagattcccccccacaaaagttgcacgtagcacacggcaaatatttttccctagctgctgctgttttattttttgctctttggtgtcaaatcagtttcaatgtttgcacgcacaacaacaaagagaacaacaagcggggaataataacaacaataaatacaagcaaccaattcgctggctcaagtcattaaagatataaataaatttatgtgacttctggcaatgttttcttcgcttttctgttgtaatcctacgttgttcttcttttttttttgggctcacaaaggcagttacttgccaagtccaaattaaattttcagcagcagaaaagcagggaaaacgaaggacaggacagtgcgttacaaaaccatagttgttgggaaataataatgtaaattacaccatttctgcatagggtcgagttaatcactagtaacttcacaagtctaaaggtttctttttcaaataataatacattttttagagaaattcttatttaaatataagtactttccagcccttactgtcaccttatatactccgttttcttcatctgctcctacggttgccattgcaacgaatactgtttaattttatttgagatttgtgccccagctccacgaaaggatagtgagcacggctcctgggaggaagccttcgtggcgcctcgccctagtaattcatttcaatttttaataggaatccgccctgtgcccagctaataagcttagcttcggcttacctttcgcagggaccacattgcgtatgctgaatattcagcgcgccagttgatgatggaaatgggtcagtggtaatggttagattgagttggctaagtaccttgcttggtttatcaaagttgacaaagctatgtaaaaggaaaagttcaggtggagagtagggtttgactttaaactgacccgatttgaaagcaaggaaagaagtacagaaaattaattaaagttcttcgcatgccctctttaaatgtgcgcatacctacacgactttaatatcctttaagactctgtaagcaatggatatcctagtaaatgtgtctgctcgcactttgtgctacgtaatcttacagcctttgagttgtttcctctgtgttgtttctgtttttagtcgctgttctgttcgctttttcttgccaactcgcgcacatatgaagtatgacaatcgaggagcccgaggcgctccaacttatttgttttataaagcacacccgcggctcaggactcgggattcaggactaaggagcaaggactcgctgacgacatgtgtgtatacagctggcgagggaagattaaatgaaagaataatacagctgaagaacccttttgtcatcttcacttagcgcaacacttaatttcacttggatgaggcacaagttgtgtaaattgtgcgaactttgttgccgctgctgcctctcattttctcctgctgcaaggagcagataaatatgccacacacacacacacacaaacacacacacagaggacacaaacacacttagtttgacatttaattttaagcgcatgttggggaattcttttgtgctccgaaaaacaaataaacaaacagtgtagacaacaaacccaaagggcgaaggattccgccagaagggcgaggggtgccacgagatgtagtaactataaagttgctcgagagacattttatgatttgagcacttgaaggcagcagacgcgcaacagacaacagattgccgtctgttttatggcctcgaataaccaaggggttccaggatgtgccggacggaagtccatcccttgaaggagcatgggctctagagagcctggagagccagcaaatcaacgtcttagggattctggctggtgtatctcagagttgtatctttcgcagttgccatttgtgaaattacaaataggaacggattgacgaggaaaggcgaattgaaagtactctttgaattaaaaaataagataaagggggatgctaaagatactaaatgcaatcaacgaaataacgaatcttttagggttgctattcaaaattcagagagataattgcgcgaaaatcaaagtgcgttgcaaagtcaaagtatcccaaacagaatccctttccatttactactaagacctgctcatttcaattaaaattacccacagcttgcccctggctcatgatcctttctcaaggtccctgcaaacaatttttttcgcagctcgtcttcagtacttaactcattctaatgccaccatcgtttcttatccacatctttttgcaggttgtcaattcacgtcgcgaaacagatgcgggcatctactggtgcgaggcgaagaacgaactgggcgtggcaaggagtcggaacgccacgttgcaagtggcgggtaagtcaaatccagagtcccccccatgtccttacactgataaaaaaaacacatgactgcatgatgcaaatacgatttaatgtgggattaaagttaatgactaaatgatacataaacaaaggaactttaaattagttagtagctattttcgttcaaaaattgaacaaattcgaaagaagatctttcttttctttctctgcatcaactcctctctagaagcgtgtggtgtgcgtttttaatattctaaattgatgttgatttttgctgctgctggtgatgttcttgatgttgttgttggttggggcagtgggggcgtaccagctttgccctttttccccagccagcagcccaaatcacccgcccacttaactaactagctgtggagctgctgcgtatacaagttttccgctcgaacgcacccacttgtcttgccagaggtctcctgccatctccctccctccacttgtggccgtctctttctctgggcacgctctattgccgcctccattaacccgttttcatttcagcctttcctccttttttttcttctatttttggttatatttgccagctattttttgcgtttctgatgcctttttagctcagtctgatggctgaaaatggtggacggtgggggaaggggtgaagtgttcctgtgtgtgagtactggatttattggaccatatgcaaaaccaaagaggcagtggttagccatttccaagttgggtcaggtctgagatgaattttgatggcctatgtcatggattaatgcgtggccaaacagaagagagatttaattaaaattgatccccagcctcctacttttagttttttatatttcctttataaagttatcaagatgattttcatcggggttcagcataatacggctcctacatattaataaagcatacgccatgtggtgccatacatattatggaaaaagtaaaacaaaaaataatatctttaactagtcaagattctgaaaaacatgtattttatagatagtagatattttgtttctggggatgggcaccatagatttttctcctcaacagttggtagtgaatgtgatggagggtagtgggtcctatccaccatccatcgatgccacccacgtggcactcactccattgcggctgagaccgccactttgtcttttgttggctaatatttcttttatttgccgctgccttttcattcctgaatgtctgtctggcggtccgcccaggccgcctgtcatgtcctggatctcctcccacatgaaaatcgatattgctcagtgtggagtttattttgccttcgtgctggattgcccctgcttttgctggtgtctttccctgcttttcgagtcctgtttagcctcagcccgagctgggtttgctttttgcggtatgtccttggggaatatttttcaatatttgcatgtaaatcacgaaaagcacgtcaaatttgtttgcttggttaaaacgtcgttattgcggcttgcggtgttggtgaaacgaaggcaagaggcgttcacattgattgggttaggcaataaaatagcgaactggcaaaggaaaaggatcgagagcaggagcagaagcagaaaaaggacctcaactcgtaggcgggctcccttgttcacgtggcttttcctacgcttttttcccggggccgggagtttgtcaatagtaaacataagttgcacattgtgggcaaataagtatatacatttgatgttgtcagcgcaatttcgctttgagggctgtcaacgcacatgaagcctttgacctgatattaaaaggagtcctgtgcaggacgaacgagcggaagggcggcggtaggagtcacatgctaaatgtgaggaattagaaaattgtaggggaattatttccggcgtttcgcaatcatatctgtaatttcgtcgggcctttacttcgtcggattacatatattattagctggcaaaacgaaaagtaaatggacgacttcaatattttctctgtgcatgttattaaagcggctttgaaatgttgttaactaaacattgctttagaaatcataatgtactaagaacttgaggctgtcagttacacaataaatcgtatgaatagatgccgcataacttggcggccatagttgttctcaattaagcctgaaatcactgttcattagcttaaattgatcacgtcgccgacttgaagtagttgccatttcgggcatccatccaatcataaatctcccgtgagcagaaccgggctgataaatatagataaacggtcatttattaactcattatcagaagctgtccgaattggccgctagaagcgatttgcacctttgtaaccgaggcttttccgctccgattggccctttaaccatgacctctgacccgggagtcacgaggagaatggaaaagccgaagccaacaaggacgaggcctacacaacttttgcccagtggcactgaacctgacactgattatgactttgattaatttattgatggttggcgtgtttcccgctgtgtgggcttcctttttttttcctttttccggtttatttcagggctctatcaaaagtttgccacgactttaatggaggttggctcccctctttgattcatgctgatttattgcgcttcaactttaaatttaataacagtcatggttttagcacattttgcataaccaagacgggcaaactaaaccaaagcaaaaacgaatctcaaccgaaaaaatgtgtaaaagaattcgcttattcactttgaagattaaaaaaatgaaaataaaggaagagcgaaatttaatttacgtaaaagctgctttcgctatggatttattcgttgaatttctcagcccacatatatatacatatactatactatattttttcgctgcacaaaaggttgcttttgagggcaaacgagaagagtcgaaaaaagcggagaaattcacttcgcttcgcttttcaagtgcttgaaagttgcttgatttattacaccagaagcacaaatactcgcagcaccgcagtttcccaactttccttctttcgatttgcacacaggacaaatagagctctgaggtgtgtgcagattactccactccccgctgaccacgctctcaaaggacataggacaaaggacgataagaggcagaaccagccgaattatcctgccgctctgcgcttttgtcgctccaaatctgcgactgctgaagcaaaatgttgataatactctgatttactatgcaaaaggagggggaaaatagagagctcggaaatgcgttccgggaataaatgcagttgcgatgattgtggcacaaaaatgctcgaaagtaatggcaaataaagtatgaaagagatcttaaggatggaaatcattttaaagcagattacgttggagtatctcagctatagtgaaatgcataaaggtttacaaagataataaagaccgaacttacatttatataagtgataaaacccaataaatattctatataaattttttcggctgcaatatcgaacctaattaaattagcctaaaagctgcgtggaaaccgctgtccctgatggatttttttttacaaattagagggtcatctttcccagaatttcctcgttctcctccatgaggcgcataaaaatcacatttatgccatttacccacgatttatctttgctgtcaggccgcaaacacgggctttctcgcacgttgagaaagagggatggccaggggtcagaggtcaaggcaacgggagggacaaagagacaccgacgtggggcatttatcatgcaaaaacccccctggtaatttataacccccaacaaatggacatggcccaggccacacacacactctccgcaataatcatttgctcatctttcaaccacttgcccatcttctccatcccgccatccagttctccgcgatgagttccgcctggagccgcagaacacacggatcgcccagggcgataccgccctcctcgagtgcgccgcccctcggggaatccccgagcccacagtcacctggaagaagggcggccagaaattggatttggagggctcgaagcgagtacgcatcgttgacggcggcaatttggccatccaggatgcccgacagactgacgagggtcagtaccagtgcatagccaagaatcctgtcggggtgcgcgagtcctcgttggctacactcaaagtgcacggtaagcgattaaaccccttcatcaagtgtgctttttaacatctagaaaataatgttgataatgttgataattttaagtactttttttatataatttataatacttgtttcatataaaatcttaacataatcctaaaacttaaagttaagctctcagtttatttatatttgtattccttacgtaacattcctcgttagtggtcttataaggcccgtgtgccctcatgggttaaggactagaaaagggtccttggccgccgtccaatccaagcacctccaatcaatgtgtcatgtccaatttgccggaatgtgactagggttgggttcggcgtggtagaaagcggtcttattggtttgaggttttttgattaaattgccgcttatcatttcccacgttggctgtttccattgcagtcaagccgtacatcatccggggtccgcacgatcaaacggttttggagggcgcctcggtgacctttccctgtcgagtgggtggtgaccccatgccggacgtactctggctgcgaaccgcctcgggtggcaacatgccattgggtaagctatacaaacaagggatttttaattgagttgttgcttaaagaatattattttaaagatcgcgtgagtgtcctggaggatcggagtctgcgactggagagggtcaccattgcggatgaaggcgagtacagttgcgaggcggacaatgttgtgggcgccatcaccgcgatgggaactttgactgtttacggtaagctcctttttgtaagatcccattacccgattatagacaaccgctagttgggcactttagctaattagtctatccctgctccttcccccgcacactcactgtagcccccccgaaattcatccaacgtcctgcgagcaaatccgtggaactcggcgccgacacatcgttcgagtgtcgagctataggaaacccaaagcccaccatcttctggaccatcaagaacaacagcacgctgatatttcccggagccccgcccttggatcgctttcatagcctcaacactgaggaaggtcactcgatactcacgttgaccaggttccagagaacggacaaggatctggtcatcctgtgcaacgccatgaacgaggtggccagcattacctcaagggtgcagctaagcctggactctcaagaggatcgaccaccgccgatcataatctccggtccggttaatcaaaccctacccatcaagtccctggccacacttcagtgcaaggccatcggtttgcccagtcccactatttcctggtatcgcgatggaataccagtgcaacccagttccaagctgaacattaccacatccggggacttgataatatcggacctcgatcgacaacaggatcaaggcctatacacctgcgtggccagctcgcgggctggaaagtccacttggagtggtttcctccggatagagttgccaaccaatccgaatattaagttctacagagccccggagcagactaagtgtcccagtgctccagggcaaccgaaaattctgaacgccactgcctcggcactgaccattgtttggccaaccagtgacaaggcgggagcatcgtcattcctagggtacagtgtggaaatgtactgcaccaatcagagcaggacttggatacccattgcatcgcgtttgagtgagccgattttcacggtcgagagtttgacgcagggagcggcttacatgttcattgttcgagcggaaaactcactgggcttctcgccaccctcccccatatcggaacccattacggcgggaaaacttgtgggcgtgcgggatggtagtgaaagcaccgggacctcacagctcctcctcagcgatgtggagaccttgctgcaggccaacgatgttgtggagctactggaggccaatgccagtgattcgacgaccgctcgactgtcttgggacatagatagtggtcagtacatcgagggcttctatctgtacgcccgggaactgcactcctccgagtacaaaatggttacactgctcaacaagggtcaggggctgagctcctgtacggtgcctggactggcgaaggcctccacatacgagttttttcttgtgccattttacaagagcatcgtaggcaagccctcgaactcgcgacgcatgagaactttggaagatggtaaggatctagtgtgccatcctctgctcgttattgaatctatttctttcggatttattatgatttattgcttatctgctggcattaacttggcttcaacttctttcgcagttccggaggcaccaccttatggcatggaagccattcaattcaatcgcacctcggtcttcttgaagtggttacctccacaaccaaatcggactcgcaacggttagtaaatattttaattgttaatataagcttctgagcagggatcttgaacattggtttgatatgataactggtttttggttaccaaaccagaaatgtgatagaccctgttccgattcccttataattgaaccaccaaatagctcggctaaatccactcgttgcggatgagttctcagctctttgtttacatttaatttcattttctctgtccaaccgcccaaatatccccgtggcacaggcatcctcaccagctacaatgtggtcgtcaaaggcctggacgtgcacaatacgacgcggatattcaaaaatatgaccatagacgcggccgcgcccaccctgctcctggccaacctcaccacaggagtcacctactatatcgcagtggcggctgccacgcgggtgggagtcggacccttcagcaagcctgccgtgctccgcatcgatgcacgcacccaatccctggacactggctacacgaggtgagtgggctgcactgggagaaaaagccatttttgtactcgaattaaatataaatcgaaataatatcgtaactaatcacttgttctgtgacttaattttataataagttacattaattcgagatactcgttcagtatgctggaaccttttgttaaaattttatttcacacccgaactttcgccaagtgtaggctttgtgggcatcgggcattgtggagctgctcatttgactgccaagtgtcgcttcggggtccacatcaatccattaacggccaacgacaatggccaacgacttttgcgaccattaaactaagcctccgcccggcacgtacggagctccatcctggatagcgttctcattccgggttctttattgtgtgcctattgcagataccccatcagtcgtgatattgccgatgactttttaacgcagacctggtttatcgtcctgctgggctccatcattgccataattgtgtttctattgggcgcattggttctattcaagcgctaccaatttatcaagcagacctcgctgggcagtttacatggtgagtgaactttaatttaaatttatacttatttccattttgtgcacttcttttggggggggagcttgttctttttgtgtaaggatttacgggtgagttgatgtttaatttactcgcgaaatgggggatgtttagtcgggataatggtcgtagtatttaaggtttaagcggcttaaaaactgtctatactctaaatgaacatttatgatcacagccataagtatcgtttgcgtcacgaaaatgttcaaatatagaatacaatttgcattctctgaatttattttcctatactagtattctacctctgagctccttcatctggatgtactcccctcttttattggaccatctccattccagcctgggacatgcaagcgttttgcttcagctcctcctctccgtaatctatgatttatgactgagcatttatggccggtctcaattaggttgccattttgtaagccacaataactgcagacatcgagacacgcactcataacattgtacagactcgagaaccaaaaccaagggtaataatctttggcagtaagccacagcgccaagattaaaccgactataaaaagataaacaagccacgataactggagcagaagtcgtggagtcttgggggtagtcgtgggaaagggtggggtttatatggcttataagaacgacaaatgctcacgtgaaaatcacatcaattgtctgactgggaaattctaaatatagttagaaaacaagtcgttttagctgactatggggaactagggataccctatgaagtaagagcagcagaatgaagtcaagcagcagaatgaaaaatatgcttaaggattgttctgcagacagattcacagcctggatagaaagcacacagataccaagattatcaagaccaaaggtcgtttcagaaatcaaatgcgaacttattcgctcaacccatctacttaagctgaactacagggcatttgctatgaggttggaaaacggcgtgcaggagctcttgcc

SEQ ID NO: 11297 - DNA, 2658 bp, DROSOPHILA
atgagcccagcccttttccaccttttccacccagttaatttcccagcgtttgcattatgcaaaacaaaacaaaaagggccgcggatagtggagcatcccatagatacgacagtgccgcgacacgagccagccacgcttaattgcaaagccgagggcagccccacgcccaccatccagtggtacaaggatggggtgcccctgaagatcctgccgggctcccaccgcatcaccctgccagccggcggattgtttttcctcaaggtaagcgacgggcggagatgcgccgttctccgcgatgagttccgcctggagccgcagaacacacggatcgcccagggcgataccgccctcctcgagtgcgccgcccctcggggaatccccgagcccacagtcacctggaagaagggcggccagaaattggatttggagggctcgaagcgagtacgcatcgttgacggcggcaatttggccatccaggatgcccgacagactgacgagggtcagtaccagtgcatagccaagaatcctgtcggggtgcgcgagtcctcgttggctacactcaaagtgcacgtcaagccgtacatcatccggggtccgcacgatcaaacggttttggagggcgcctcggtgacctttccctgtcgagtgggtggtgaccccatgccggacgtactctggctgcgaaccgcctcgggtggcaacatgccattggatcgcgtgagtgtcctggaggatcggagtctgcgactggagagggtcaccattgcggatgaaggcgagtacagttgcgaggcggacaatgttgtgggcgccatcaccgcgatgggaactttgactgtttacgcccccccgaaattcatccaacgtcctgcgagcaaatccgtggaactcggcgccgacacatcgttcgagtgtcgagctataggaaacccaaagcccaccatcttctggaccatcaagaacaacagcacgctgatatttcccggagccccgcccttggatcgctttcatagcctcaacactgaggaaggtcactcgatactcacgttgaccaggttccagagaacggacaaggatctggtcatcctgtgcaacgccatgaacgaggtggccagcattacctcaagggtgcagctaagcctggactctcaagaggatcgaccaccgccgatcataatctccggtccggttaatcaaaccctacccatcaagtccctggccacacttcagtgcaaggccatcggtttgcccagtcccactatttcctggtatcgcgatggaataccagtgcaacccagttccaagctgaacattaccacatccggggacttgataatatcggacctcgatcgacaacaggatcaaggcctatacacctgcgtggccagctcgcgggctggaaagtccacttggagtggtttcctccggatagagttgccaaccaatccgaatattaagttctacagagccccggagcagactaagtgtcccagtgctccagggcaaccgaaaattctgaacgccactgcctcggcactgaccattgtttggccaaccagtgacaaggcgggagcatcgtcattcctagggtacagtgtggaaatgtactgcaccaatcagagcaggacttggatacccattgcatcgcgtttgagtgagccgattttcacggtcgagagtttgacgcagggagcggcttacatgttcattgttcgagcggaaaactcactgggcttctcgccaccctcccccatatcggaacccattacggcgggaaaacttgtgggcgtgcgggatggtagtgaaagcaccgggacctcacagctcctcctcagcgatgtggagaccttgctgcaggccaacgatgttgtggagctactggaggccaatgccagtgattcgacgaccgctcgactgtcttgggacatagatagtggtcagtacatcgagggcttctatctgtacgcccgggaactgcactcctccgagtacaaaatggttacactgctcaacaagggtcaggggctgagctcctgtacggtgcctggactggcgaaggcctccacatacgagttttttcttgtgccattttacaagagcatcgtaggcaagccctcgaactcgcgacgcatgagaactttggaagatgttccggaggcaccaccttatggcatggaagccattcaattcaatcgcacctcggtcttcttgaagtggttacctccacaaccaaatcggactcgcaacggcatcctcaccagctacaatgtggtcgtcaaaggcctggacgtgcacaatacgacgcggatattcaaaaatatgaccatagacgcggccgcgcccaccctgctcctggccaacctcaccacaggagtcacctactatatcgcagtggcggctgccacgcgggtgggagtcggacccttcagcaagcctgccgtgctccgcatcgatgcacgcacccaatccctggacactggctacacgagataccccatcagtcgtgatattgccgatgactttttaacgcagacctggtttatcgtcctgctgggctccatcattgccataattgtgtttctattgggcgcattggttctattcaagcgctaccaatttatcaagcagacctcgctgggcagtttacatggtgagtga

SEQ ID NO: 11298 - protein, 885 aa, DROSOPHILA
MSPALFHLFHPVNFPAFALCKTKQKGPRIVEHPIDTTVPRHEPATLNCKAEGSPTPTIQWYKDGVPLKILPGSHRITLPAGGLFFLKVSDGRRCAVLRDEFRLEPQNTRIAQGDTALLECAAPRGIPEPTVTWKKGGQKLDLEGSKRVRIVDGGNLAIQDARQTDEGQYQCIAKNPVGVRESSLATLKVHVKPYIIRGPHDQTVLEGASVTFPCRVGGDPMPDVLWLRTASGGNMPLDRVSVLEDRSLRLERVTIADEGEYSCEADNVVGAITAMGTLTVYAPPKFIQRPASKSVELGADTSFECRAIGNPKPTIFWTIKNNSTLIFPGAPPLDRFHSLNTEEGHSILTLTRFQRTDKDLVILCNAMNEVASITSRVQLSLDSQEDRPPPIIISGPVNQTLPIKSLATLQCKAIGLPSPTISWYRDGIPVQPSSKLNITTSGDLIISDLDRQQDQGLYTCVASSRAGKSTWSGFLRIELPTNPNIKFYRAPEQTKCPSAPGQPKILNATASALTIVWPTSDKAGASSFLGYSVEMYCTNQSRTWIPIASRLSEPIFTVESLTQGAAYMFIVRAENSLGFSPPSPISEPITAGKLVGVRDGSESTGTSQLLLSDVETLLQANDVVELLEANASDSTTARLSWDIDSGQYIEGFYLYARELHSSEYKMVTLLNKGQGLSSCTVPGLAKASTYEFFLVPFYKSIVGKPSNSRRMRTLEDVPEAPPYGMEAIQFNRTSVFLKWLPPQPNRTRNGILTSYNVVVKGLDVHNTTRIFKNMTIDAAAPTLLLANLTTGVTYYIAVAAATRVGVGPFSKPAVLRIDARTQSLDTGYTRYPISRDIADDFLTQTWFIVLLGSIIAIIVFLLGALVLFKRYQFIKQTSLGSLHGE

SEQ ID NO: 11299 - DNA, 4034 bp, DROSOPHILA
cttttttatctctatctctttggttagcggactcatttctgatttccgtaaacgaaatcgattaaataatgagcgagggcgaaaaaatcaatgccgagagcaaataaatatttgaatattcaactgcaaatgcaaaagataataagacaatcagctaaaaatgaaaggagactaaaaaaaagtgttaacaaacaaacagacatttggcttcttttttctcactggttcggaaggaaaccccctccgttaaaatctccttcctctaatgtagcacttaactaattcaacaaaactacgacgtacccccacaacaccgacaactcaatgaaatcaataataaaaaaaaaaaactgaggcgaaacaaaaaataatgaaaagcacacaaaagcatcatcaacatcgtcatcatgatgataataaacgaacatgaactacgcagttatgaaatttaactagatacttatagaaaatcagccaataaatacacagtagccggttgggtttaacttcaagggaatactaaaatgtagaatttgagctctttgattagtttatttagctcggccactagatttatgcacccttcaggtagaagtcaggctcatcttacccatttaaaacttaagtttcgcctattcctggcgataatttcaaatgaattgaaacgtacactttattgagcgaaagattatttacttttcgtcataatttcatgtttttaagtgctcaaacgaactcatgacaattttttttttcttttatatattacgtatacgtcgtgttgctctgtgcaattatttacctctttcattttccacttaagccccacccccttcgcgatctttgtgcttggcgtcgttttgtgtgcttttaatttaataaacaaataatggaaaataatattcatgtttgttcttgatcgaatttcgtacctcttgctctcgtatttaatttaaaatgaattctaatggtattttctttttctgctctggcattttacaggatttcatttctacaatttactgcaatgtgctagtaaaactgaaccgatgaaattgattaattctacgataaagatatagctgaattaaaccaacaaattgaaaacctatgcgtaaccgtgtgacgacaaagtggagaagtgcaacaaatttatgaatatagaagtagatgaatagaaattccaagttaaccaagatcaccaaaatattttcataatttctaagaaatattttaagtgtgataccaagttttgaaaccacgtttaagcaacaagcctactttcgaaaacgaatcatccaactgtagaaactgaatcaaatcgaattgattcgattaacagctgtgctgtacacatgcaccggtgtgtgtgagaggctgcgcgcgtgatctggtcaagtcgcatctcatgatagcggtgcgcgaggaggtggaagtgctaaaagagcgcatctccgagctgatggacaagatcaacaagctggagctcgagaacagcattctcaagtcgaacatcccgcaggagacactgcagcagctgcagttgcagctacaactcgccgcaccgccggccacgcccgccattcaagcggcaccggcggtacaaagtgtcgttgctccagctgccgcgggtcaggcagttcagcagcaggccgctggagcggtagcggtaacgggtgtggccaccagtccagcgtccgcggtggtacccacgagcattcccaacggcagcgccgagaacggcagcagtgcagtcgagtcagcagcggtatcggtggagcagcaggtgcagcaggtgacatcagcagcggcagcagcagcatcggtagtcacagccaatggtcccatgtcctaaacagttgctgctgtggcccgaacacacagtgtttgttttttttaaggcgcccacgcaccgtggtgtgtgtggggggaaatgaacgtttttaagaatgaaaaccgtaatgttaactcagccgcagtctctttcttagtcggaggaggcggggccgaggagagcagcgaaagtattaggccaataacaacaagaacagcaatagcagcgcagcggcaggcagactcacccaaacatgttaagttcgtgttaggtagactagcctgctgttaagaattgttatgttgttgctggctgttaatctgctgcagccgccgttttgttaatttctcgattgtgatatttgtttaacacacatacagaccaccacacacacacacactcatacgcatttacacacacatccatacgaaatacacacacaaacacacagatagactgcacgctaacagcggctgcggctggcgctgttaacgtccgctgttaactcgaagcgagtataggagttcttttaaatatcgcgctgctgcgcctccacatttttgtttaataccttttatttttgtttacccgtttgtttccacgttgttaacgctacgaaaataaaaacataagaatcataaacaaacacccagaacaccacaccacaaaaccaactcaccaaaagctggctgcaaaataatacttgacgaaagtaaaatttttggccaacggggaaaaagagcagcagaaaatgcaaaaatacaaatcgataaagtgtactagagtgccagggaaaacacacagaaaatgaatagggacagaagggaaaataaatgaaataatatgtgataatttgcattgtgcagtcagagacataagatgtaaattgtaaaaaaaaaaaacaaaagcaaacccgagaagcaaaggacaggaaagtaggattcaaatttccaaacattcaacattgatcgataaattaaatacaaatacaatttaatgaaacaagaaaaggccagctgctatttttataatttacctttaatcctaacttttattgtaaaaatacaaggggaaatattaactacatcataaatatgaatatgtttcaaattaaacaatggataacaaaaaaaaaaagtagtaaattatagtaattctagcatattctcaagctatatttcaaagattgtatagctattcaaaaaaaaaaagaaagaaaacaacagccaaacagaaaaagaaagcttatcaaaattgtttgttaaactctaaaaactatctgcaaacaaaaaacccaaaaatatctgtaaatattgtgtaaaactaaaaactaaaattgagaacaaacttcgaaagtcgccgacgaggaagatacattgcaacaaaaatttaaatcacacaaaatcaacatgatggaaaagctaaaattgtaagatgaagacaaactcgtcctattttttgttaaaattatttagtcgataattttggattactcttagttggaaaattccttaatgttcatacgaaatctgttataggattttctacacattaactattgcgtttcacaacccgcactcttagaccgacaagaccacaagataaaaccacaaaaagatccagaactgctgcagcagtaaaaaaaacggaccaatctccaaagaggtctcccgcctcccagagttgtccctgtccgaagttggccgccctgtagacgcccagttttgcaatgccaaagtgcactcactcgtttttggggcagggcacacgattctgccccagagaacacaaaatgcagcctgcggagacgcaaattgtctaaggctagcgtggattaaacaagaaaattatcatccaaaatgaaaagggattaaaaccaaatatgatactccaactccaagtgccgaaaactagctgtctacagggcaaacaccaatggacagacaaatcagatagacggacggacaggacagactaatgtcacatcccccgaacacagtaattctgttgaaaagtatttccctttatgatttttgtattcaattcagagaaccatcttcatgcgtttcatgtttagttcttctcctatgagttttacgacttaagcctctttttaagctaactattaatttattaattagtttgtaagcgcaaaaataattaaaatacatctaaacaaaataactgcaaacaacctata

SEQ ID NO: 11300 - DNA, 5139 bp, DROSOPHILA
aggatttcatttctacaatttactgcaatgtgctagtaaaactgaaccgatgaaattgattaattctacgataaagatatagctgaattaaaccaacaaattgaaaacctatgcgtaaccgtgtgacgacaaagtggagaagtgcaacaaatttatgaatatagaagtagatgaatagaaattccaagttaaccaagatcaccaaaatattttcataatttctaagaaatattttaagtgtgataccaagttttgaaaccacgtttaagcaacaagcctactttcgaaaacgaatcatccaactgtagaaactgaatcaaatcgaattgattcgattaacagctgtgctgtacacatgcaccggtgtgtgtgagaggctgcgcgcgtgcctcatcccctgaaaattcccaggaagcactgcccttgctccgacgccagcaatcagccgcagcagccacagtagcagcagcagcagcaacagttgcagccacaaccagcggaacatcgcagcagcagcagcaacagcatcgcaacagcatcagcaacatgttcgatcgcacggtgaatgccaagttcaagccggcttcctcaaatgccggacctggcaacaatccggtccgtcggaactcgatgctgacaccatcccgtggagtcactatcggtggcactggcggtaacatacgcaagctgaccaaggtcagctcactgaccagcaaccatcactttgctgtgtgctatccacccagcaacatctatcagaatagcaacaatgccggcagcaattcggctttgcagcgcaccaccagcgaaagtttgcgtttgaacatgatgagtcgcgtggcagctggagcgacacccacaacggtgtccagggccagtagtaactccagcctggccacatccacctccacatcgctggcacccaagtccagcagcagcagtggtggcagcaattcgacaccgcagcagcaacagcagcagctagtgagcagtaacaacagcagtagcagcagcaacaacagcttcaccaaggccagttcgcccaacaataatggagcacgttcggtgggcggagcagctacgtcagctgctactggcacaaccgctgcagcaggcagtcatcatcatcagccacatcaccaccatcatcatcatcatcaccaccatcagcatcacaaccaccagcagcagcagcagcaacagactagccttagccaaggacacgcttcgttaaccgttgccggtggatcagcttcagctggtggtggtggtggcggcggcagtggaagctcctcggggaccgccgctggtggcaccaatcgcaaaccaaagacgacttcctcattcgagatcacctcggtgacggtgggccatcccaagttgaatgctgccggcgatactggagacgagtcggccgatgatctggacgaatctcacacggatgacaatagtcggataacggacctggagaacgagacgccctccatgtcggaagatacgttctccaaggaggaggtgtactatgccaacaatgccctcagcaccaatgcaccggtgataccgactagctcgcaatacggccttgtcgtggtggatcccatcgccccttcgttgggccagacgatccagaatgtccaggtcaatgtatcggataacattatcaatgtggtgagcggtgccgtcacaccgggcggcaccaagaagaaggacgacatcaaggagacgcagcaccgcagtgagcggttcaaggtggtcaaaattgagtccacggagccgtttaaacgaggccgttggatgtgcatggattacctggatcactcgagtgtgggtaatggcggtaataacaacgaaaagactggctcttctacttccgaggcgcacgccgcaacaacggatggcggcgcagcaggtgttggcgctggatctgaggctccggcccacaagaccacccaaagtatgattctgccacccacccagaagctgaacgagaatcatttggaggccaactcgaccgatgccaactggaactatgccgagcagcagcagcaacagcagcagcagcagcaacaacaacaaacaatagttggcaacgccctgaccaagacattgcccgtggctcttcgcaatgtgagtcgcagttcctcggtaacccgaagtcctaatgccacagtcgagttcttatctcccaatttgcttgcccagcagcaacagcagcagcagcagctcttcgatagcgtcaatgccaatgctgccagttcaccaaatcccgccggtgaccccaacaacatggactatgcgcgcacggcggcgatgcaattgcatcaaacgttgcagcagctcaagcagcgcgaggacgctatggacgtgccgccaggggcaggaggttatgccaactatcaaaacggtggtgattcagctgttggagcggctagcaacaacaacagcgctgcagctgcaactggagaatcgcagctgagcaccagctacgttgagcaacagcagcagcagcagcagccattatccccagcaccactaacgccccaggctgcacccacattcgcagctgttgctgccggacagtcgcccaacttccaattggagcaacagcagcagcagcagcaagcaacatcgcagatagatggaatagtcccacagccatttaacccacaacagcagcagcagcagaccccacagcaatcaacagctcagcaagcagcagcagcagcaaatgcaacatctgcagtgactgcaccaccaccacaacagacttcaaacacttccaatgcagcggtaaccactggccagggtcagacaatgccgctgttatcacacatgaccagctacgagcagcagcagcctaatctaggagcagcagcagcagcagcagccgcaggaggcactgcagcaacatcggtggctgcaccgcaagcgattcccacgctgcaattgcagagtgctccctcaacgattgccgatccgcagcaattgatggtgccacagcaacagcagcagcagcagcatcaggaggagcagcaacagcagccgcaacaacaacaacaaccgcttccgccagcaaatatcgcgagtgctagtgccaataatagtaatctaaacctaacgaatacgaatgttgtggccaccggcgaggcaacaacaaacgcgctgaccttgaccgatgaacaggcgaccgcggcacttgcagctgcatttgcgaccggcgcagcagcagcagcaactggagccacatcggcagcggcagcaacgcagcagcaaatccaacagctacaacagcaaccaaatgcagagtccgagactgaaagaaaccaaaaattattgatacacacaaaacccagtgaaaatcaaaaaataaaaaaaaacccaaagccaaatatgatgggcactatgtcgctgcgccagccagagaattggctatacgagatttggcagaagggctacgacagcccctgctatgtgatggtgcctaatgcaaaagatctggtcaagtcgcatctcatgatagcggtgcgcgaggaggtggaagtgctaaaagagcgcatctccgagctgatggacaagatcaacaagctggagctcgagaacagcattctcaagtcgaacatcccgcaggagacactgcagcagctgcagttgcagctacaactcgccgcaccgccggccacgcccgccattcaagcggcaccggcggtacaaagtgtcgttgctccagctgccgcgggtcaggcagttcagcagcaggccgctggagcggtagcggtaacgggtgtggccaccagtccagcgtccgcggtggtacccacgagcattcccaacggcagcgccgagaacggcagcagtgcagtcgagtcagcagcggtatcggtggagcagcaggtgcagcaggtgacatcagcagcggcagcagcagcatcggtagtcacagccaatggtcccatgtcctaaacagttgctgctgtggcccgaacacacagtgtttgttttttttaaggcgcccacgcaccgtggtgtgtgtggggggaaatgaacgtttttaagaatgaaaaccgtaatgttaactcagccgcagtctctttcttagtcggaggaggcggggccgaggagagcagcgaaagtattaggccaataacaacaagaacagcaatagcagcgcagcggcaggcagactcacccaaacatgttaagttcgtgttaggtagactagcctgctgttaagaattgttatgttgttgctggctgttaatctgctgcagccgccgttttgttaatttctcgattgtgatatttgtttaacacacatacagaccaccacacacacacacactcatacgcatttacacacacatccatacgaaatacacacacaaacacacagatagactgcacgctaacagcggctgcggctggcgctgttaacgtccgctgttaactcgaagcgagtataggagttcttttaaatatcgcgctgctgcgcctccacatttttgtttaataccttttatttttgtttacccgtttgtttccacgttgttaacgctacgaaaataaaaacataagaatcataaacaaacacccagaacaccacaccacaaaaccaactcaccaaaagctggctgcaaaataatacttgacgaaagtaaaatttttggccaacggggaaaaagagcagcagaaaatgcaaaaatacaaatcgataaagtgtactagagtgccagggaaaacacacagaaaatgaatagggacagaagggaaaataaatgaaataatatgtgataatttgcattgtgcagtcagagacataagatgtaaattgtaaaaaaaaaaaacaaaagcaaacccgagaagcaaaggacaggaaagtaggattcaaatttccaaacattcaacattgatcgataaattaaatacaaatacaatttaatgaaacaagaaaaggccagctgctatttttataatttacctttaatcctaacttttattgtaaaaatacaaggggaaatattaactacatcataaatatgaatatgtttcaaattaaacaatggataacaaaaaaaaaaagtagtaaattatagtaattctagcatattctcaagctatatttcaaagattgtatagctattc

SEQ ID NO: 11301 - protein, 1137 aa, DROSOPHILA
MFDRTVNAKFKPASSNAGPGNNPVRRNSMLTPSRGVTIGGTGGNIRKLTKVSSLTSNHHFAVCYPPSNIYQNSNNAGSNSALQRTTSESLRLNMMSRVAAGATPTTVSRASSNSSLATSTSTSLAPKSSSSSGGSNSTPQQQQQQLVSSNNSSSSSNNSFTKASSPNNNGARSVGGAATSAATGTTAAAGSHHHQPHHHHHHHHHHHQHHNHQQQQQQQTSLSQGHASLTVAGGSASAGGGGGGGSGSSSGTAAGGTNRKPKTTSSFEITSVTVGHPKLNAAGDTGDESADDLDESHTDDNSRITDLENETPSMSEDTFSKEEVYYANNALSTNAPVIPTSSQYGLVVVDPIAPSLGQTIQNVQVNVSDNIINVVSGAVTPGGTKKKDDIKETQHRSERFKVVKIESTEPFKRGRWMCMDYLDHSSVGNGGNNNEKTGSSTSEAHAATTDGGAAGVGAGSEAPAHKTTQSMILPPTQKLNENHLEANSTDANWNYAEQQQQQQQQQQQQQTIVGNALTKTLPVALRNVSRSSSVTRSPNATVEFLSPNLLAQQQQQQQQLFDSVNANAASSPNPAGDPNNMDYARTAAMQLHQTLQQLKQREDAMDVPPGAGGYANYQNGGDSAVGAASNNNSAAAATGESQLSTSYVEQQQQQQQPLSPAPLTPQAAPTFAAVAAGQSPNFQLEQQQQQQQATSQIDGIVPQPFNPQQQQQQTPQQSTAQQAAAAANATSAVTAPPPQQTSNTSNAAVTTGQGQTMPLLSHMTSYEQQQPNLGAAAAAAAAGGTAATSVAAPQAIPTLQLQSAPSTIADPQQLMVPQQQQQQQHQEEQQQQPQQQQQPLPPANIASASANNSNLNLTNTNVVATGEATTNALTLTDEQATAALAAAFATGAAAAATGATSAAAATQQQIQQLQQQPNAESETERNQKLLIHTKPSENQKIKKNPKPNMMGTMSLRQPENWLYEIWQKGYDSPCYVMVPNAKDLVKSHLMIAVREEVEVLKERISELMDKINKLELENSILKSNIPQETLQQLQLQLQLAAPPATPAIQAAPAVQSVVAPAAAGQAVQQQAAGAVAVTGVATSPASAVVPTSIPNGSAENGSSAVESAAVSVEQQVQQVTSAAAAAASVVTANGPMS

SEQ ID NO: 11302 - DNA, 2960 bp, DROSOPHILA
attcaaactagaaaatctgctaacgattagtaaaattcgccaacttgaatgctgagatgaacacgcacctgtagagctccatctccttgcgcgactcctgcatgtagacctccttctcggagtcggaaaggcgagtccacttggcggtggtcttttggtgccactcgcggtaggtttgcttgtcgccctgcggagtgttgatacgttcgctggcgatgaatcgcaggaaggccgaagcgggctttttgggtcgccccagctccttgacccgcttgcgcagctggcggcgctccttggcgtcaacgaggtcctgcttgagctgcttgatctcggcccgctgctcctccgtgagtgtggcatcgtactttgttcgctcctccacgtagatttgttggtcccgcttgaactcggcctgcaggcgctccttcagctgcgcatcggcatcggaccagttcttagacagctggcgcaccacctcgacggtggtaatctggggattggcagccttcagcttgggccgctgctcccgcatgaagcgaaagtagggagtcagcggtttctttggtcgcggcggcaggcccaactgctcctccagggtcttcgacggcaccgccggagtgttgctgatgctggcggctgctaggggcctagggggtgtgaggggtcggtggtcggtgtcattggcacgagatggatcactgggtggccaatctttggctacaacttgcctgactttgttgatcagcgagccgatgaggccgccgcgcgaggacatcagtgttgtggtgtagatcatgatctcaatggcgaacctgcttccttgcgttgtaagctatttaaaaatcacggggaacttgttgcatttacggaaaaaaggatttacgtaaaaaatgcggcattctaggccgagcgttgccacctggtgagttacttcagccaagtgctgccaccaagtcccaagcttttgttatcgaaagctgaccatctccattaaccgtagccataaccttgtttattttgtattgtttttcttagttaaaattataaaatcataaaataagatgaccaacaacgatgcggccgtggaggcagccggctccagtcgggccagcagcagcaaacagcagctgaagctggaaatcaccgagaaggtgcgagtcctgtgcctgcacggttaccgccagaatggagaagccttcaaaaacaagctgggctccttccgcaagttcgccaacaagtacgcagagttcgtgttcatcacggcgccgcacgtggccaaggcactggagtcggcggcggagcctgtgccggagcagaggagttggtgggccaacaaggacgatggctccttcaagggaacaaacaaaggtggtcccgccttcggctttcaggagagcctgcgctgcgttgaggaggcgtggcggacgcagggccctttccagggactgctaggcttctcacagggcgcctgtttcgtgggtcttatatgcggcctggccaaaaagaagtgtatgccatgattttgtctgaaaatacagtccttgttataactataccatcacccgtagtgacctccatccgtccggagtttgctgtgctagcctcgggcttcttgtctggcagtctggtgcacatgagcgcctacgaagaggccatcagcatacccacgttgcacatctacggacagacggatgagatcattcccaaggagatgagcgagtccctggctgcgcgcttcaagaacgccgaggtgctggagcacagcggcggacactacttcccggccacggcgcagcagaagcagacattcatcaacttcttccaggatcggctgcaggagtacctggagcacgaggagttgcagcagagcggcaatgcctcattcgtggatagcggagcggaggacgacaacgatgccgaggtggcggccatgacggccgagctggacgagagtgattagccgagggacgggggttttttcgttcgtttttaataataattaaatcttattattacaaaaataatgatttgattataaattataatataattagatcccaatattagttaaatattcactctgctcacgaaggatcaagcggatcgggtattgaaatgtctgcacgttcgctcagttcgcacatattgtttttatgactttgtgtattttctcaacaaattcgtataaatttcattaaaaagaaacaatcaaggggttagggtaaaattaaagccgaatattatcaatcccattccaaagttcaattttgtgtcggaaccatagtaaattaattgttccttgctattaacaacgaaaaatgcatatttagctattgcagttgagacggcagcttttgcttcttcaccacgctgggaagttgagaatcgcagacaaatagatcttcctcctccttcgtccggtccgaccatcaacttcgatttcaatttcatacatttcgtttgcgtgggacaagcgagcgacagagttagcggatttattttgtctcgatttgctgctgctgttgattttgatgatgtgtttgctgctgtttgttgttctcgtaggggtgattgactgactgactgctgtggctgcatccttatgccacctgctcctgtccgttcgaggcctcttggtttttcatgacttcgggtaagtctggtggtgccgagtagggtgtcatgtccagtgtctcaaagtcgcccacctcgttccttaaagacagatagctatgttgtactactacgctgagctgtaagcttgtaagcggcacacgtgccgcacgcccgccttgtccgctagataacccgcaaccggcttatcagcgactctcacctgaatgtcaagcccagctgtgccggagcctgcgccttggccgtggacaccgtcacgccgtagtcctgcaacgtgctgtcgtcctccatgacatcgttgtcctgattgtataaccgctggtcca

SEQ ID NO: 11303 - DNA, 901 bp, DROSOPHILA
ccataaccttgtttattttgtattgtttttcttagttaaaattataaaatcataaaataagatgaccaacaacgatgcggccgtggaggcagccggctccagtcgggccagcagcagcaaacagcagctgaagctggaaatcaccgagaaggtgcgagtcctgtgcctgcacggttaccgccagaatggagaagccttcaaaaacaagctgggctccttccgcaagttcgccaacaagtacgcagagttcgtgttcatcacggcgccgcacgtggccaaggcactggagtcggcggcggagcctgtgccggagcagaggagttggtgggccaacaaggacgatggctccttcaagggaacaaacaaaggtggtcccgccttcggctttcaggagagcctgcgctgcgttgaggaggcgtggcggacgcagggccctttccagggactgctaggcttctcacagggcgcctgtttcgtgggtcttatatgcggcctggccaaaaagaagttgacctccatccgtccggagtttgctgtgctagcctcgggcttcttgtctggcagtctggtgcacatgagcgcctacgaagaggccatcagcatacccacgttgcacatctacggacagacggatgagatcattcccaaggagatgagcgagtccctggctgcgcgcttcaagaacgccgaggtgctggagcacagcggcggacactacttcccggccacggcgcagcagaagcagacattcatcaacttcttccaggatcggctgcaggagtacctggagcacgaggagttgcagcagagcggcaatgcctcattcgtggatagcggagcggaggacgacaacgatgccgaggtggcggccatgacggccgagctggacgagagtgattag

SEQ ID NO: 11304 - protein, 279 aa, DROSOPHILA
MTNNDAAVEAAGSSRASSSKQQLKLEITEKVRVLCLHGYRQNGEAFKNKLGSFRKFANKYAEFVFITAPHVAKALESAAEPVPEQRSWWANKDDGSFKGTNKGGPAFGFQESLRCVEEAWRTQGPFQGLLGFSQGACFVGLICGLAKKKLTSIRPEFAVLASGFLSGSLVHMSAYEEAISIPTLHIYGQTDEIIPKEMSESLAARFKNAEVLEHSGGHYFPATAQQKQTFINFFQDRLQEYLEHEELQQSGNASFVDSGAEDDNDAEVAAMTAELDESD

SEQ ID NO: 11305 - DNA, 4194 bp, DROSOPHILA
ttatgtaagttaatatacgattagaaatgcagcgtacacaatgtgctcgactggccactgctccagcccaattcctgctagtgtacttgatgagtgtatttacaagtcaggaatgagagcatcggcatgtgtccgttcatagtttgctttagttttcgtaacaataaatttggatttacagtaccaagcaattaaataattaataagatacatgaatttgtcaaacttcaacgtgtccgtggtaatcgtgtgttaagcccgtccccttatcctagtgaattcccctaacgggtgtgggctccggcagcacttatcgttttcagcactataaatcccagcatggtagctgcggccactcctagtcccgcctttaaccacagcttggggtcctccgtcatcaggccgaattgcctcaggtgactgcatgtgggagaaaagaatcgagttagaattggaaaagcagaggcaggattttacaaggtatcgtaacgataaaactaagaactacaggatgctgccgcacaccaaattaattaagcggttatggatgggaatctgtgcgccccaaggtagtaatacgggcaccgtggcagatggaataacaaatataaggctgatattagtaacgagttcagtttaaatggtaacacttacgccgactcccacagctgtaccaacctgtgcttgtagaacagtatccaggcggcctggaagcgactgcatatccgagaagccgtcgacgtgtacaaacatcaaacaacacagaaaacagacaccaaccattacacaaaaaaaaggggtagaagagaagataataagataagtaaccattaatcccgaatgttagatgcaatctaaaactactataaagtgaaatacttttaagggttggtttatgaaccaacgtaacatgaagtcaatccaaaagtatttcactgcttttgcctaggcgtattagcttacaaaagaagcacccaagagtggatcacaaaaggtgtactcacggaaacgctgccattgtggccagcttggtatacagttcttttttgttggttttcaggctgaagagatgcggaggcagcaacttgtacttgtcacagaattcagagggctgcattagatagtcctgccggcgttcgtccatgtcgcacttggtgccgactatcatcactggaatcttgctctccgcataatacttgatgtagatgcgggccacgtactcaaaggaacggggattagatgagtcgtagactaggcaggcaacatcgcaattgacttcttgtggctggaggggatcgagggcatgcctgacgtctatgtcacgcagaatgaggtgcttttcctggccatacacctgcacagagttgatgcaattaaccacattcgttttaaactcttttccgattagtttgtgcatatcctccaccaggaatcccctgcacattccagtctttcctgatccctttggtccaatcacatgacacttgtaaacggaccgactgctttggcgcttggccaaatcgatgcggcgctctcgagttacgtgaattgccgccaactggctgtcgttttcatgaacattgaagcccaaataggccaaatactccattgttttgaccacatcaatcagcgtcatcagtgtccaccgacatagccacccgtgcagtgtcacccatccagttgtctcgttgatcgggcaggacttgcgtatgtcggtggagtaggaccacggagcagccgggcatgtgctgaagagcatcttgtgctcctcaggtgataaggctccgtcgccatcgcgatcatagcgctcaaacacggcaatcagaaactgctgtccgcggtgcgagagttctgtgctgctgccaggcggtattttcagcggtggcctaagatactcctggcacatctccaactggtcgttatagccaaagcgccgtaacaccgcccaggttgtctcgttccttccccgctgaatgaaaaggcagtgtaagaagaggaagcccttcagggtgaccgcatcgttgtatatgccatcgggcacatttttctgtatcacggccttcacctcatcaaggatttgcggctggagtggtgtgttgaaacagcgtcgctggaataaattcagctcgtaatcgttcaacagattgtccccgtcaatgtcgcagatcttgaaaatgcgcaccagcgacttcttgcaggcggatgtgagctgaaaatgcgaagttttattagaagagtacaagctgattacctatcgcaaaaccgccaattacggcgcaatgatatagttgcgacctatgatccactccggaagcacttacctcctgttcttccatcatatacaggggagaagtcgggtgcagcacagccttctgggcgtagtaaaacatctcggagatgttgtgcagcgacttggcagagcactccacgcaactctcaatctcggggtagtcttccatgatggccagcacgctgtccatggtggaatactcgatgaggtctattttgttacccaccagaacgattggcttccgaatgggctctcgttgtgtgtctccttccgcctccgcttcggcatcaccctcgccgtccagggagggattgcacttggcccggacgagcggcagccaatgggatgtgatccgatccaaagtgtcgtcatcgtccacggcgtacactatgcacaccacgtgcgccttgttaatttcggcggccagggcatcctccgactgctccacggccgagaagtcaactatgctggtgggcacctgctcgggcgtcacgttcgccggaatggtaatctcctcagccctaggcggaacctcctccgggtactcctcactgaccagagacagaatcaacgacgtcttacccaccccggcgtcgccgacgagcaggatcctaacattcttgcgctgcgacgccgtgtactgtcccattccgactgctctccaagtgagatatgccgctcctgtgctcgtgctctgctggtcagagatcgctggcgtttaggccgaaattctaggattttgttatgcaaaaacgcaaaaaaaaacaacccagagtgatggggatggcagtaggtgtatcaaggtcgatatatcgcaacccagctaccagggctgccacactaggcgaccgccaaataatgcgatatttttccccaattttccggcaattgtgtttgaattctacgaatttaacaaatcaaaactattatttcgatcagttgcttaaaattgatcacgtaatttaaatatttccatccaaaaacatcggatccgaaactgtctggtaactttattgacagctggatctctacgatatgacaagttagcgtttttccgctaaatcagccaaccgttaaggatgttgtaaaggacacaaaatgttttctgttaaaaatattcgtataaacaaaaaggaaatgataaacaaggcaataaatcaaacttaccttcaattacgaatgtctccatactgcacttcggtgaaagtctcccaaattatatttcatccgttacattccaccatttaaactttgaaattgcctgtttgtctgacttcacaaccttgcccgctagatttggtaatcgatagttggtcagcactggctgggactccagagcttagcttcaattttcaacgtagtgagagttgtaagtgcggaagaaaatcagtactctcggatatcagcaaaatgagcactagctcaaacgacgtacaacaataatattcgagatttgtttgtttttttgtgcggcatcgatacaaacgcgtgccacggccaaccgatttggcttacaaggataatttccccgtgcaactttcacggggttagggcaaggagagcagggggccggagtgctggacgcgcagacagcgcggaatcgatatcgatggtacgcactaaaaaccagtcgtcctcctccagcgccagcagcagcagcaccaagtcaccaataaagtccagcagcggggcaggatcatccggcggaggactcggtggtcgccagtccactcaccgctcgtcgagcgcctcaaacgttgctgccgttgttgccggcggttcatctgccgccggtggaggctcctcatcgaatcgccgtagtccgggcagctcacccgacggcgacgacgacaccaccaccacagatgacctgacccccacaacgtgctccccacgcagcggcc

SEQ ID NO: 11306 - DNA, 2082 bp, DROSOPHILA
tagaattcaaacacaattgccggaaaattggggaaaaatatcgcattatttggcggtcgcctagtgtggcagccctggtagctgggttgcgatatatcgaccttgatacacctactgccatccccatcactctgggttgtttttttttgcgtttttgcataacaaaatcctagaatttcggcctaaacgccagcgatctctgaccagcagagcacgagcacaggagcggcatatctcacttggagagcagtcggaatgggacagtacacggcgtcgcagcgcaagaatgttaggatcctgctcgtcggcgacgccggggtgggtaagacgtcgttgattctgtctctggtcagtgaggagtacccggaggaggttccgcctagggctgaggagattaccattccggcgaacgtgacgcccgagcaggtgcccaccagcatagttgacttctcggccgtggagcagtcggaggatgccctggccgccgaaattaacaaggcgcacgtggtgtgcatagtgtacgccgtggacgatgacgacactttggatcggatcacatcccattggctgccgctcgtccgggccaagtgcaatccctccctggacggcgagggtgatgccgaagcggaggcggaaggagacacacaacgagagcccattcggaagccaatcgttctggtgggtaacaaaatagacctcatcgagtattccaccatggacagcgtgctggccatcatggaagactaccccgagattgagagttgcgtggagtgctctgccaagtcgctgcacaacatctccgagatgttttactacgcccagaaggctgtgctgcacccgacttctcccctgtatatgatggaagaacaggagctcacatccgcctgcaagaagtcgctggtgcgcattttcaagatctgcgacattgacggggacaatctgttgaacgattacgagctgaatttattccagcgacgctgtttcaacacaccactccagccgcaaatccttgatgaggtgaaggccgtgatacagaaaaatgtgcccgatggcatatacaacgatgcggtcaccctgaagggcttcctcttcttacactgccttttcattcagcggggaaggaacgagacaacctgggcggtgttacggcgctttggctataacgaccagttggagatgtgccaggagtatcttaggccaccgctgaaaataccgcctggcagcagcacagaactctcgcaccgcggacagcagtttctgattgccgtgtttgagcgctatgatcgcgatggcgacggagccttatcacctgaggagcacaagatgctcttcagcacatgcccggctgctccgtggtcctactccaccgacatacgcaagtcctgcccgatcaacgagacaactggatgggtgacactgcacgggtggctatgtcggtggacactgatgacgctgattgatgtggtcaaaacaatggagtatttggcctatttgggcttcaatgttcatgaaaacgacagccagttggcggcaattcacgtaactcgagagcgccgcatcgatttggccaagcgccaaagcagtcggtccgtttacaagtgtcatgtgattggaccaaagggatcaggaaagactggaatgtgcaggggattcctggtggaggatatgcacaaactaatcggaaaagagtttaaaacgaatgtggttaattgcatcaactctgtgcaggtgtatggccaggaaaagcacctcattctgcgtgacatagacgtcaggcatgccctcgatcccctccagccacaagaagtcaattgcgatgttgcctgcctagtctacgactcatctaatccccgttcctttgagtacgtggcccgcatctacatcaagtattatgcggagagcaagattccagtgatgatagtcggcaccaagtgcgacatggacgaacgccggcaggactatctaatgcagccctctgaattctgtgacaagtacaagttgctgcctccgcatctcttcagcctgaaaaccaacaaaaaagaactgtataccaagctggccacaatggcagcgtttccgtga

SEQ ID NO: 11307 - protein, 608 aa, DROSOPHILA
MGQYTASQRKNVRILLVGDAGVGKTSLILSLVSEEYPEEVPPRAEEITIPANVTPEQVPTSIVDFSAVEQSEDALAAEINKAHVVCIVYAVDDDDTLDRITSHWLPLVRAKCNPSLDGEGDAEAEAEGDTQREPIRKPIVLVGNKIDLIEYSTMDSVLAIMEDYPEIESCVECSAKSLHNISEMFYYAQKAVLHPTSPLYMMEEQELTSACKKSLVRIFKICDIDGDNLLNDYELNLFQRRCFNTPLQPQILDEVKAVIQKNVPDGIYNDAVTLKGFLFLHCLFIQRGRNETTWAVLRRFGYNDQLEMCQEYLRPPLKIPPGSSTELSHRGQQFLIAVFERYDRDGDGALSPEEHKMLFSTCPAAPWSYSTDIRKSCPINETTGWVTLHGWLCRWTLMTLIDVVKTMEYLAYLGFNVHENDSQLAAIHVTRERRIDLAKRQSSRSVYKCHVIGPKGSGKTGMCRGFLVEDMHKLIGKEFKTNVVNCINSVQVYGQEKHLILRDIDVRHALDPLQPQEVNCDVACLVYDSSNPRSFEYVARIYIKYYAESKIPVMIVGTKCDMDERRQDYLMQPSEFCDKYKLLPPHLFSLKTNKKELYTKLATMAAFP

SEQ ID NO: 11308 - DNA, 15069 bp, DROSOPHILA
aataatcattgccaatatttgggcttttatgaatttataacaatcgccaagagtttttgacaattgtgcgggtgctctgtccatattcgatgagagtttcaatgaaactgcgacacgaactggctttcgtaatcgaattaaaataccagatatgcactgcagcgcgcatttatcactctggcttatcaatgtcaattaaactagtttaactaattaagctgggaattatcaaaaaaaaagaggagcgggaaggtccaaagttaatgtaggtcagtacgcactaggctactgaatatataaaagttagggattgaggggatagctgacacatctacttacataaaaggaggttccattaatgagacgctttttagggcttaacacgctcctgctcagttgaagtgcaaggtttacataaataagtttattttagagccttccattatattgttcatatttaggactggttgtttaaaagctaattagctaggaaacagcgggtaataaagttatataaaatgtgttgtttgcttgattgcctttttaatggatttaagacctttcgcggacttacgaaagcaattcaatctaacatgcaaatctgttagcaagcccattgcactcgcctggtattccaattaaccaacacccacttcgctcttccctcttgcagttatccggatcatgtgaccagtatctccgctggccatcagtcaatcaatcagcagaccgcagcccaaaaatgtttcaattatgttatcgccagcaacaacgacatcgtccagaatcgaaagcatcgaaccagagcagcagcaaccacaagaaggcagccgcactgtccaggacgaaggagtaagacgtgcaattccgcaaaggctaaatccggatacggaaccggagcccactgcaaaaccgaaatcacaaggcaaccaagagcaatttagcatagcaaccgcaacgcaatcagccaggccaggatcagaagcaggacttcttagccatgggctgttctccgagtactttgccccccgccccttccgctggtcagaccggcgaacgaggatccctgccgctggacgcctctgaaaaggacgagagccgcctcttctgcatcaagctgcggcgcagccgcctgcgccgctgcagctgtgggggcgtgaccttgcagccccccagcgacgggaatggcagcacggccggagacaacctgtgcggccaggtgctcctcaatccgctgcagaccaagagcgaggccgactacgaaaaggtaacccaatgcgctcggccagagcccccgtactcccggtgttcacttcttgtcttccaccagctgagcaccggcaaaaaggactcgattgtgacggtggccgccctgggcaactttacacacagcgtagtgcgacgggccactggaagtaagtagagcaagtaactaacgctaagatttgctccaagtagtaacccgatatggaagtgccaacatcctttcatgcgccgaaataatccaccgccttggttctcaagaaggaagcagaaatagtttggaaagaatttttaaaaagtttgaataatttattcgtggccatttgaaaattgcttgtgtctttgatggttaggttgcatttttgttaaatcgattaaatggagcttgatatttaaatcgcttgtaacaattagtctgaaatcattagagcgctttgatatcgtttctctgcgtgttttttgctatatgatacctcggcagcatcatttccctccgtaataccctctaatgcgaggagtcggttaccttcaatactcaatagaggggctatcaaagtagataagggctgcgattgaggaaatctgcttgggcttttgcttctggttctgattcttctaatctgaagtgaggctactccaccgtcaagaggttccgctctgctgtttgatagtactcgtagtagtgcttatcaatgggaatctcaaaagcggttgcacattttcttttcttcagattttctgatgatttactatgctccaagctatagccaatcgactcaagtggctgtcaaaactaatgctagataaatggggattaggattgattaggaaatataggatttttagtagtttgttctcctacacctttcatttgtaatgtagggtatcagaagtgctgtgcaagctaacagcttgtccaggtaactcgatcccagactcgtaagagtcagctggcgcttgtcggggatccaaagcgcagctgttttgtgtcgccgtccaattaacagattcccgctctctgccgcactctctctctctctctccctctctctctctcgctctggctgcccctttcagtggagccgtgcccagagagcgcatgagcatcggtgaaacttgatcgtgctcagcaaacggatcgggatcggattggggtggagaaatcggagagccggagagcgagcttcgattgtcaaagcaaagctcgctctttccgagtgaccgcaacagctgctccccagttgtggagtcagttgctgtagattctttcgccgcgacggttgttcggtcgcagttgcagtcgacgtcgccgcaacatacatatgtgaatcgcagtgcccgtgccatatagaatcggaatcggcggctatatagccagtgcagaagtaaggcgcttgatgcaagtgccgaataaaaaagacgagaccgccagctgcaaactggtcgccacgaatcgccatctaatgcagctggagtcgcttgaatttggccaagtcgtggctacggcgcacaacatgtataacatataacccagggccaaccagtcgtcgatccaaagcgattgcaattaaaaacgcatagagccgactgaaaatcatgtacgcgctgaaattcgttggctgcattcgcccgaggtggaaaaaaacagcttagcgtgctctaaaatacaacaaaagtgtgcatagccgcgcacgaatataaaaaaagtgttaaaaatcaaaacaaacttcacaactaagtgtgccaacaaccgcggcagaaacagcaagtgtagcgagtagcgatctctggatagatctccgatggtctcccatcgccaccacatacgcagatacccccccacccagagtaacgcagatccagcctccagcctcgaaccaccccccaaattcagagcaccatttttgacccattgatggttgtaggttgtccgaataacgccctgtgaaaaagcctcaattaatatgcaaaaattcacatgacagtatctggttttctgccactcgcacacagcagccgtataagaacagaaggagagcgagatcggcatcgcagtacgacgaactcgcacttctctttctgaatctcaatcagaatctgaatccgaattgaaatccgaatacgcatctcagtgcgagcccgattccgaaaccgagcccccgtaaacaatggatcgcacacgggaatggcgccaaaacatcaatcacagccaaagaaaacaaaccgaacgatccgtcgaacgattcgacgctactcgattcattataggcggctaatcccacgcgtcaaagttctgcagtttatcagcgttccccataaaatgggaaattgagcgatgacgcccgcgtagcccgtggtgactaccacgacttttgcgattctcgcacaattcttacacaaattacgtatagtttagccgccacgtgaaggtatagaggccgattagattacccccgaacagagagagagtactccctatcaatatgggtttcccattaccatacaccgctcctcttgcggccatatgtccagtagtccagccggcggctatcgctgagtcaagaagatcggcccagataggcccgcctggccgattcgataccgacttcgacacagggccattcggtcattcggccatccagccattcagctaaccagccaaccagccaaccaaccattgtagccctcagatgtagattgtgcacgcgttgcggcctatctgtaactgtatctgtatctggccgtttttgtatctgcatctgggcaagagtacctgtatccgaacctgtgccgtatctcgacgcacacagcctaaacatctgaatactatgagcaaacttgcctgatattatcttatcacaaattaattggtcgccatgacaacggcccaaggcgcaaaaggccccaaaaccgagggcccaatgcgattcggccagcgggactgaccgggagcccctgctaatccgctcatagaatttgagttgaatttgccagtgcttttggttgcgatggcattgcacctgcctctataacgctaagcgccttataagcgcacccaaaagtatctcacggattgccgctaacagaccgttagcttttgccgcagcgcacattcgctgtcaccatcgccatcgcagtcgccatcgcagtcgcagtcgcagtcggtgctcgcagtccactgcctctggcagtttgaaaatccgtgcgagaattatcatctggcaaacagttcttcataccggattagaacggacgtttcgcccattccggctcgagtttaattctattttccatattttttgttagctgcgccagtttgattcagggtttatcccccgcaatttcgccactcgatcgcgtgtgcaagtgaagttaggtagtgttgctctcgggcgaacaaaaaaaagtagatgcgcccgcgattcccgccgctctgtgtgtgaccctgtactctgtactatgattaggagtgcgagccaaggcagtaagtaacttggaacaccaagtacgcactacgtggtgctgggtccagtttttgaggtgctcccgaaattcagagacgtcagcggctgctggccgccttttatctaaacaatttatcgattttcgcttagattacaccaccacccaccaacggccccattccgctccactttactccccggctgctccgaaaaataacaccaacgataagatacacccgacccatttgaataagcgcaaacatactgtccccacggcgtgtacaacgcacacggatcccgtccgctcgtgggtacagccatgggtatgggtatgggtatgggtatgggtatgtactgggcacagagacccatactctccactactttccgtactttccccggctagtttttgtttatgccccattccggcggctatttatattaagagtgctgtgctgtgccgtgcgccgtatctgctggtctgtgcgtatgtagtggtgtgcatgtggggcagtttatcattacgcactaattgtgtgaaatcaatgccgcagccagataaacaaactgttgcacataaatgacaattagcataatgccacgaaagtaatgcgaatttgtgtgacttcatttgcaaaacaccaagaaaagcggtagtgccaagcgaagggaataaataaataacgaataagcacaacagcacaaacaatgataatttccagccaaccgaatttggctggatcggcgacgaccacgaccaccacaaccatcagcagtgcccatgtgagccaggagggtaccatgccactgccgttgcctattcccgtaaccatgccccttcccaacgccggcacttgcaactgcggggcagttggcgtgggcgtgggcgtgggaatgggaatggccctgggggccagacagtgcccatctccagccgtggatccgacgacagcaacggccacacccacgtccacgacaccaggcagagattcattaacgcgtccggcctccgagtccgagctgaatgtgggtaaggttcctccgccgtcgcctccactctgctggggtcaaagtggagtttgatgatgcggttaacatgcgtgtccactggggagtgacttgggctggccgaaatgatgatgatgatgatgaagacgccctcctgcccaggggtcttggcaattaaaaatcagcatgaaagtttcttcatcaccttttcatctatagtaaatgttggcagctaagcgaattgccaccagcttgtgcagaaatttaaaactttaggcaacggagcaagatgtgaaaagttatgatcgcattccccagaaccaagtgcatgaaaattatgcattcaagaggtgaaaaacattaaaaagacgagagctcagtccgcagagcaaaaatgagtggattagtgggaattaaattgagtagtggaagaaacataattaattaaagcacaatccactaaacgtagtttagttgcaataataagtgcttagcagaaaattcctttttaataattgcattcacaaaatataagctcgtaagtgaatgactgcatattgtgtgtactgaaggcataaattggcattatattctttaaaatgtcgtaacacaagtattgtaaataatttaaataatgcatacttaacaagaaagcagcctgccatgtggatactccttatcaactcgaaaaagagccctcagaacaagacccaaatgccttgttgataactttaatttgcttgcagggaatccgtacaaaagccacgaacaaatttcgttacacagaaagtttgtttggtcaatcatttggggtcttaaaaattgtttgggcctaagcacacataacttgcgagaagccgcagaattttaatttcccccaaacttttgccaggcaactttgcttgcagaatgcctgcgaaggtatgcggggctcccaaagcttcaatatggatttgaaattccctacttaaatatgtacacaaactttaatgcgctgggaattattgaaggttgaacaggtcgatcaattggattgcaagtttctttttttttcttctttccttttcatttcctcatggcatccttttcgcaggattcttgtttagtttgctcggcgcagcataaagcagcataaagtgggttgttggaaggccggacctgtttctcattaagtgaaatacaatttgtgcggcttagttcctcgggggatcccccgttcggttgacagataggaagcccaggctcgagcgccgcccccaaggacctttgtaccctttcgccggcactcacacacacacacacactctcgtgcgtgtgcgtgtgcccgtttataaagtgtttctgaaatgccaacgtttataattaaataaaacgtgcaacaagaggaattaatgtgcgtgcgtgtccctgtcaaagtgttggtaactgagtggttgcttatgtgtgcgtgtgtttgtgtgtggtgaccattcattttgattgtggtcgtgctgtcgacagcccccaagtatgcagcgcctgcgagcaccgaaacgctcggaaacgtagcatacttttcagggaattttcctcgcctcctaacgcttttcccctcttctaaccgttttcccacatacgcaggcacaggcacatcgggcaccagttcatccggcgggaacagccgtccaggtcaccgcaagtcatcactagccctcgctctcaccccggaagatgagccgatggacgtctaccaggtgagtctgccaattcacacactgtgaccgaccattcagtgggtctgggggtggtgatgggtggtcgggcgatctcagccacatggctgttacgtcttttgataaggtatcttatcacgggcaacacagtttatatggcagcgggccgagcggagagcgttgcgcttttcggtttacattccgctttaaatagccgctcgcgcacaccaacgacgcgcgcgagtgtgtgtgtgtgtgtgtgtgtgcttgtgtggcttgcctataaacaatacgctaccagagaaatcaaatcaattaacattgaaggtgggaaatcaaaaggcaaagaaagagattataccctcgatcaacgcgactcagttcattccgtttcagttcgacgtttgagcgtcgcgaagtcgcttactttcgaccacgaaacctgtgaattattcagaactgattccgcattgaatcacccaccgatcgagatacagacagccgcagatagagatacaaatacagatactgataccgatctagatagaggcagagatcgagattgtcgcattagaggacggcgtggaaaagttggaaatgccactcgcgacgcgccgcgttctctgttcctattcgtatgttcgcggagcttatgcaaacaacttgttattgatctaagacattggacctcaagtggcgagtgtaattgttttgtcgctgtcattgttattgcgctacggattgcttcgccccactctctgctctctggccagtggtcgtggtcgagtgttggtttataattagcagaatgcgcaactgcttgccaaaatttagcaaagtctttcgccgcaagtcctccgcgaagtcatcctcttcgtcggccggccgagaaaatccgtccagcgagccggactccgatacggagccgtatgccatagccatcgcggctatatccgatcggagtggagataaccgtaatgaaagaccaagaccgctgccagatgacgatagcattcgcagccggctgataagcgctgctcatttggatttggatgtgggtttggaattggcctcagattcaacggcagtgccggccaacggaggcattcggccaaagagcgagggcgcctgcccggaaatgaaagtggaaacgatttcggcggccacgtctccgcctccgcctcggcctctgcatggcacttcaggtccagtggccatttccctgccatttgtgggacggaattcgagtaaaacgcccgaggaaatggagctggaatacgaggcgaatgtggaggccgaaagtcgtgacataatgaccccactgcgccgcaacacaaggccgctgagcgtgtccttcggcggaggaggaggacgcagtgcactgcagccggaaatagtcgaggccatacgcagcctggacgtcccggctctccgcttgaacaatctgagcttcgacgggagcacagacccgaagggggaacggaatcatgcggaggaagagcccctgacaccgggccacgaccatgaggactcggtggtccttcggcgcaaggtcaactgcttggagcgcaaggcacatagtctgtacgagcgccgattgcccagggtgccgaaactccatcttctggtggctggcaagaagaatccaccgacggaggaggaggagttccgcactttccaggtagctttccgcattcagctttcgtcgcaggaccaacttttccgctcggcactggcattggcattggcatggccatcaatctgccgccttagtcgcgtcttatgccatgttgtgatacatttccgattacattttcattcctctgattgacactgagcccagcccaccttcggtggatttaatgtgctcgtattataaatctgcagcgcacgagcgtgccacacataagtcagaatcagcagcaagcaattttattttaatttatcatcatttaagcgacacgaacgacgaaacacacgcaacggacgtcctgactggggtatatacatgtagatacagatatatagggatacagatacacagatacgtctgtacatacgcaatgcgaagccgggttaagccctcttattttgatggcaaagccggaggagctgcagatttatattaaattttacacgttgtctcacctgttctgacaccatccccccctccccaccactctcttttcttcccttctcttttcatgtcctgatgcagcgaaatctcatggacctgaagtatccaaccgtgctaccaccgaatcccccacttaaggtaagccctcctcggaccatctttgagcatgggacaattcaatcagtgcaatggctttgactcgcccttaggcccttctggttttccacaagtcggacagcatctgcgaggcgatcaccgcggcctgccagcgccaccagctggacgttacgctggtcaagtccaaggaggaggccctggacactctgcagaagtcgtacgccaccgcccagtgctaccacctaatcataattgatgcgcgctcctccaagaacctggatgcggagcacattgcgaggtgggtagtgataatggcagtggtttggggcagtaagtgccagatgtgaaatgggtttcgggtcgagtttgggcttgggcttgggctggccaccaaacttctcgaaacttttccattttcataaacttttcactttgctataaaacttggcgtctcctcttttcggtgcctgccgcctccacagaaccattcgtcacacacacggccaccatttaacgacaataattgcagtctgcaagaagaggtgagttcagtgctcagtagttggacgccaatttccactaacgacttgcgcccaacgacttttgcagtttcttcgaaaaggatgatgtgctaattgctctattggacgctggcgttaatagagtaagtttccgttaattgccccatcggaggaagggatctggtcgggggaaacagcaatggcaacagcaacagaaaccgaaacacatgctacaatgccaccttgtgtcttgtgtattcacagtgcgtagcggagacgaccaacctggccatgtgcagtgtggaactgaagcagatactgcactccatcatccggccgcacaatgtcatgtccactcaacaggtaatctagttaatgccgcaccgtcactcggccattcgcttctgcaaattaattcaattaaatggaagcgtgcaagcgctgtcctgcagcccaatgaaattgtaaacccgcactgtatgtacactcaatccctacactcatccccccaggccctctacacggctctgcatcggctaaaggaggtggtgctcatcacggacgacttgctgcggattcagtacgcgaaccgtgccaccgagaggctgctcaacatgcggctggtaagtgggtctgcgtgggcgggtggattgtttgcgattgcggcattaatgagatttccgcgttggacaacaggacgagatcattagcaagcagctggaggacatatttgtgtcggacctctccaccatcagcgagcagtgcaagaacatcaaggagttcgatggcatcctgacggtgcgtcgcaagagccaggagggcatacccatgcacgtgcgcgtcgtgccggtggcctgcataggcaggtgagtgaccattcgtccaccgatccccccgcaatcgagcgagtctaattggcaattttgtaccaacagcgcccccacgcacctgattttcaactttgatgtgcccggcgggcagatggacttcatagccacgctgccgcagcccaaggaggcgcctcggggctccctgcactcggtgcggcgctgcagctttgatgtccgctccatcgcctcggacggattgcggaggacgagcttggccaagctgacgtcgctgccactggaggcacccatcactaaagtatgactccgcttccgcacttgggttgtggctgcagcacgttgcaactttgggagggctttttggattgcctaaattgctaaattgtcgtccgtgcctgtgcctgtgccgtgtgcctctgtccgtccgtgctccgtctgtgtgtgtgtcctggtgaccaggtgtcctgtcatgccccgtagcatatgcagcaatagcaacggcagcagcagcagcaactgcagcagcgacagcaataacattagcaacaatatttgcacaagcacatgcacacagaccatccacacccgcaccccacgacacaggcaccgacacacactgaaatccgaaggcaaatgcatttaccggattggagtagtgctgactttgaccatcggtgtttcgtgaccagccagctctctgcttttaattatcaaattagccaatcaaattttcgcaatcgaatcgaaagggtttaaaacccagctctgttataagtggcgcccgaacaggaaccttagtaacaaatggcgcccaaccagggactttttactgctgtagcatgtaattaaagatttgcaagcaggaagcacgcacactccaagctacccaaatgtatttgacgtacataaaaagtaccgacaatgggtcatttttaacccacattgctccactgttcacccatttgagctcctaatttgtcataacttaatgcctactaatcccaaattcaacagtaacagcacatctaagccaccatgttcttacattgattctctttttatctcttaattgttatgttctcttttttacttttatgttttgtgtactctcgaacaatgaaccaactcataaaaaaaaatattacaaataatgtaccaaactgttcgttcgcacgttcgctcgctcgctcgaattgctcgctgtgcgtcgctaaccaaattcaaaaaaaaaaaaaaaatgtacaaaaccaacaaacacaaccgaaaataccaaaatcaaatcaaaaacaaaaacaatatcaaacgcaaccactgcgcactcgcacattagataatcaatttactatcacaagtacaggagaattgttcggccgatgaggcgcgtctcatagacaaggtcttggagttcctgaagcgtgagggactctacagtccgcagatgaaggagatacgaacggacgatcccatagccaccgatctaatcggtgccctgctaacggtaggtccaccaactcctgcccatgggatacatctaacgcgatacctctaacttttccagggtcccagcgtgtactcatcgcgccgcagctcgaatgactccatcatacgcactggcagctccacgagaactgccgccattgtgcccgccaaaatgaaggtgggtagtcagttgagggttctcttatcatattttaccatgtacgatcccttgcagtccaatcccatcatcatggaactacttgacgaatctctcagctgggactttgatattttcaaattggaggagatcaccgactaccacccgctgctctacctgggcatggagatgttccgccgcttcgacgtctttgccaccctgaacatcgatgagaacgtgtgcaaggcgtggttggcagtgattgaagcccactaccgcaagagcaacacatatcacaacagcacccatgccgcggatgtgatgcaggtgcgttgctcaaagcaaatccttgccttaacaatctcataacattcgaatttcaacataggccactggcgctttcatcacccaactaaccaacaaggatatgctggtgatggatcgcatggaggaggcgactgccttgatcgccgccgccgcccacgatgtggatcatcctggtcgctcatccgccttcttgtgcaactccaacgacgccctggccgttctatacaatgatctgactgtgctggagaaccatcacgcggcaatcacctttaagctgacactgggtgagtgtcttcctaaatcgattaaactcactggaactcatgttatgtgtgcccatacttccaggcgacgacaagatcaacattttcaagaacctggacaaggagacatacaagtcggcacgcagcaccatcattgacatgatcctggccaccgagatgacccgccactttgagcacctggccaagttcgtgagcgtttttggcggcgaggagccgcgtgatgtaagtcaccatatgagacaccttaggaaatcagctagttaatgctttccattaccagcacaatccccaaacggatgaggagacgtccatactcatgcgtcgcatgctgatcaaagtggccgatgtgagcaatcccgccaggccgatgcaattctgcatcgagtgggcccgccggatagccgaggagtacttcatgcagacggacgaggagaagcagcgccacctgcccatcgtgatgccgatgttcgatcgggccacctgcagcataccaaagagccagatcggcttcatcgaatacatcatacaggacatgatgcacgcctgggagagtgagttccacgcggcagatcctgcagaccagtaactaatgacttacgtcctttgcaggcttcatcgacatgccacagctgatcacctacatgcagatcaactactcgcaatggaagaagtacgacgagcagggcgtcaacacgctggcggagatcatggccaagcagccaccggtgggcaagatggccaactccaaatagcatacggccttccggagattgttctcgggtctactgaagccactgccggcccacgcgccaggtacctccacgattggcgagaacgagatggaggacgtgctctagtgacggcgtcgaaggtcctgcgacgtctgactccggacccgcagtctctcggcctaatcctcccactgaagtcgcagctcatcacggcttgacgcccacccgagtccacccgctccctggactgccccacacttatctctgaacggaccaacggactgggggcggttggcccgaaatgggcggctggctggcttacgaagtggtgcccctgtgcggtgtcacaaatgcggtatcatgcaaagcaaaactaactaaggcaaacaagtaaacaattattgggctggactcaaaattaaatgtttaagatgcatcacaagaagcgaactttctatttctatatataactatataaaccatgtgagtctgtgtgtgcgtgagtgtgtaagtccctccctccatcatcatataaatgtgtatgtgtttaggctaacgaaagcagacttgcagactagcaaagtagcatgctgtgctagcaagctagcaagctggcaagaagtcccacagcatattgaccagatcatatggcgtgcgctccactgtacctggcaacggtataatgtataataacagtataacggttttgtagaccgtatagcggtactaccgacccaagtgttacaagcatgtagttctctcccatcatgaagacaatctctgttaaatactgcgaggccaagtaaatatagtttaattgctgtccaagtcagattcgtaatcggattcgaattgggatttggatttggattcgggttcggaacgagtacgaggccatagcatagatgaagactatacatatatacatatgcacatgcgggcgagatcgcggcaagcacgatacatatatacatatatatactgtactatcactagcgactagctgaccagctaacaacta

SEQ ID NO: 11309 - DNA, 3183 bp, DROSOPHILA
atgggctgttctccgagtactttgccccccgccccttccgctggtcagaccggcgaacgaggatccctgccgctggacgcctctgaaaaggacgagagccgcctcttctgcatcaagctgcggcgcagccgcctgcgccgctgcagctgtgggggcgtgaccttgcagccccccagcgacgggaatggcagcacggccggagacaacctgtgcggccaggtgctcctcaatccgctgcagaccaagagcgaggccgactacgaaaaggtaacccaatgcgctcggccagagcccccgtactcccggtgttcacttcttgtcttccaccagctgagcaccggcaaaaaggactcgattgtgacggtggccgccctgggcaactttacacacagcgtagtgcgacgggccactggaaaatctgaatccgaattgaaatccgaatacgcatctcagtgcgagcccgattccgaaaccgagcccccccaaccgaatttggctggatcggcgacgaccacgaccaccacaaccatcagcagtgcccatgtgagccaggagggtaccatgccactgccgttgcctattcccgtaaccatgccccttcccaacgccggcacttgcaactgcggggcagttggcgtgggcgtgggcgtgggaatgggaatggccctgggggccagacagtgcccatctccagccgtggatccgacgacagcaacggccacacccacgtccacgacaccaggcagagattcattaacgcgtccggcctccgagtccgagctgaatgtgggcacaggcacatcgggcaccagttcatccggcgggaacagccgtccaggtcaccgcaagtcatcactagccctcgctctcaccccggaagatgagccgatggacgtctaccagcgaaatctcatggacctgaagtatccaaccgtgctaccaccgaatcccccacttaaggcccttctggttttccacaagtcggacagcatctgcgaggcgatcaccgcggcctgccagcgccaccagctggacgttacgctggtcaagtccaaggaggaggccctggacactctgcagaagtcgtacgccaccgcccagtgctaccacctaatcataattgatgcgcgctcctccaagaacctggatgcggagcacattgcgagaaccattcgtcacacacacggccaccatttaacgacaataattgcagtctgcaagaagagtttcttcgaaaaggatgatgtgctaattgctctattggacgctggcgttaatagatgcgtagcggagacgaccaacctggccatgtgcagtgtggaactgaagcagatactgcactccatcatccggccgcacaatgtcatgtccactcaacaggccctctacacggctctgcatcggctaaaggaggtggtgctcatcacggacgacttgctgcggattcagtacgcgaaccgtgccaccgagaggctgctcaacatgcggctggacgagatcattagcaagcagctggaggacatatttgtgtcggacctctccaccatcagcgagcagtgcaagaacatcaaggagttcgatggcatcctgacggtgcgtcgcaagagccaggagggcatacccatgcacgtgcgcgtcgtgccggtggcctgcataggcagcgcccccacgcacctgattttcaactttgatgtgcccggcgggcagatggacttcatagccacgctgccgcagcccaaggaggcgcctcggggctccctgcactcggtgcggcgctgcagctttgatgtccgctccatcgcctcggacggattgcggaggacgagcttggccaagctgacgtcgctgccactggaggcacccatcactaaaataatcaatttactatcacaagtacaggagaattgttcggccgatgaggcgcgtctcatagacaaggtcttggagttcctgaagcgtgagggactctacagtccgcagatgaaggagatacgaacggacgatcccatagccaccgatctaatcggtgccctgctaacgggtcccagcgtgtactcatcgcgccgcagctcgaatgactccatcatacgcactggcagctccacgagaactgccgccattgtgcccgccaaaatgaagtccaatcccatcatcatggaactacttgacgaatctctcagctgggactttgatattttcaaattggaggagatcaccgactaccacccgctgctctacctgggcatggagatgttccgccgcttcgacgtctttgccaccctgaacatcgatgagaacgtgtgcaaggcgtggttggcagtgattgaagcccactaccgcaagagcaacacatatcacaacagcacccatgccgcggatgtgatgcaggccactggcgctttcatcacccaactaaccaacaaggatatgctggtgatggatcgcatggaggaggcgactgccttgatcgccgccgccgcccacgatgtggatcatcctggtcgctcatccgccttcttgtgcaactccaacgacgccctggccgttctatacaatgatctgactgtgctggagaaccatcacgcggcaatcacctttaagctgacactgggcgacgacaagatcaacattttcaagaacctggacaaggagacatacaagtcggcacgcagcaccatcattgacatgatcctggccaccgagatgacccgccactttgagcacctggccaagttcgtgagcgtttttggcggcgaggagccgcgtgatcacaatccccaaacggatgaggagacgtccatactcatgcgtcgcatgctgatcaaagtggccgatgtgagcaatcccgccaggccgatgcaattctgcatcgagtgggcccgccggatagccgaggagtacttcatgcagacggacgaggagaagcagcgccacctgcccatcgtgatgccgatgttcgatcgggccacctgcagcataccaaagagccagatcggcttcatcgaatacatcatacaggacatgatgcacgcctgggagagcttcatcgacatgccacagctgatcacctacatgcagatcaactactcgcaatggaagaagtacgacgagcagggcgtcaacacgctggcggagatcatggccaagcagccaccggtgggcaagatggccaactccaaatag

SEQ ID NO: 11310 - protein, 1060 aa, DROSOPHILA
MGCSPSTLPPAPSAGQTGERGSLPLDASEKDESRLFCIKLRRSRLRRCSCGGVTLQPPSDGNGSTAGDNLCGQVLLNPLQTKSEADYEKVTQCARPEPPYSRCSLLVFHQLSTGKKDSIVTVAALGNFTHSVVRRATGKSESELKSEYASQCEPDSETEPPQPNLAGSATTTTTTTISSAHVSQEGTMPLPLPIPVTMPLPNAGTCNCGAVGVGVGVGMGMALGARQCPSPAVDPTTATATPTSTTPGRDSLTRPASESELNVGTGTSGTSSSGGNSRPGHRKSSLALALTPEDEPMDVYQRNLMDLKYPTVLPPNPPLKALLVFHKSDSICEAITAACQRHQLDVTLVKSKEEALDTLQKSYATAQCYHLIIIDARSSKNLDAEHIARTIRHTHGHHLTTIIAVCKKSFFEKDDVLIALLDAGVNRCVAETTNLAMCSVELKQILHSIIRPHNVMSTQQALYTALHRLKEVVLITDDLLRIQYANRATERLLNMRLDEIISKQLEDIFVSDLSTISEQCKNIKEFDGILTVRRKSQEGIPMHVRVVPVACIGSAPTHLIFNFDVPGGQMDFIATLPQPKEAPRGSLHSVRRCSFDVRSIASDGLRRTSLAKLTSLPLEAPITKIINLLSQVQENCSADEARLIDKVLEFLKREGLYSPQMKEIRTDDPIATDLIGALLTGPSVYSSRRSSNDSIIRTGSSTRTAAIVPAKMKSNPIIMELLDESLSWDFDIFKLEEITDYHPLLYLGMEMFRRFDVFATLNIDENVCKAWLAVIEAHYRKSNTYHNSTHAADVMQATGAFITQLTNKDMLVMDRMEEATALIAAAAHDVDHPGRSSAFLCNSNDALAVLYNDLTVLENHHAAITFKLTLGDDKINIFKNLDKETYKSARSTIIDMILATEMTRHFEHLAKFVSVFGGEEPRDHNPQTDEETSILMRRMLIKVADVSNPARPMQFCIEWARRIAEEYFMQTDEEKQRHLPIVMPMFDRATCSIPKSQIGFIEYIIQDMMHAWESFIDMPQLITYMQINYSQWKKYDEQGVNTLAEIMAKQPPVGKMANSK

SEQ ID NO: 11311 - DNA, 3071 bp, DROSOPHILA
tcaatcgtctgacgaagatagagaaccttgacaagctggtcaagctggagaaggtctactttgtgtcgaaccggataacccaaatcgagaacctggacatgctcaccaatctgaccatgctagagctgggggataacaaactgaagaagatcgaaaacatcgaaatgctcgtgaatctacgacagctcttcctgggcaaaaataagatagcaaagatcgagaacttggacacattggtcaatttggagatactcagtctacaggccaatcgcattgtaaaaatcgagaaccttgaaaagcttgccaacctccgcgaactctacgtttcggaaaacggagtggaaaccattgaaaacctctcggagaacaccaaattggagaccctcgacttggccaagaaccggttgaagggcattgccaatctggaaaagctggaactgctcgaggagctgtggctgaaccacaacggagtcgatgactggaaggacattgagctgttgaaggtgaacaaggcgctgcagaccatctacctggagtacaatccgctggccaaggatgttcgctaccgctccaaactgcgcgacatactgccgcagctgcagaagattgatgccaccctgtgcaaggtgcccggtacctagatggaaccactgtaaaccccttgaaagactaatccacggcgttgcgccactacatttatatcgattaactttgaaaaactgcgtttaaaatatacatacaaattaaccactaatggttctatctacgaattggtgggtgcagtgatttagtttgctttcagaagaaggtatatttggataagttactcaaagcgtgaagtttacctaatgagtcagataaattatccatctaggctaccgcctaacatataaaactaaaaagtattttatatatacacataaataatgtaaattgaatctaaaaagatgaaaacattttagttaaacaattctggtttctcttaaaccaaaacaatacatttcagtatgtcagagtacattcaacggaatgtatttttatttatatcaaagttattgttctatcgattgaaatcacagagctcaactgataagtggctttcataaaggcctttgtcttcattctttccctttgtggcagacatgttgtgcaaatatgcttatcatttcattttttgacaaagtatatgaggcgtcagttggattgcttttggaggagttcatcaattcgaaacagcgtaatagtcagaggcgctcactttatgaggacctccatagaagtccagaacaaagatattgctaatttccagttcgcaaaggtagaaattgtgagctgtaaaagaaacaacgtatttattattagtacatacatatcgagctcttaatgaggttcgctttcaccaaccttttacccaattgatggcagctggatgacgcctcacataggcatccagcgatggctgatagcttttgtcgctaggatccatcttcaaatgagccaaaacattcttaatccattttaaataggatttaattcatttttcataccttcttcacctgtccactgatcatggaacgggcacatgtaggctccatgggatcctttccgccctccttgcatcttagggtctgctcgtcactgaacaggagtgtgaccttgttgtccttctgccagtcgggaccagtgaagtccaaatcggttagcaggaatcgaatacgtccagtggacctgttattagcatcgctgtcgtcgatggagataatgttgaccatgggataccccttcacccgttcgttggtggagagacttcccacagccgcccaattggcgcgatggaccaaatctctggcgatcttggcgtgatttaactcttgctctcgcttatattctctaattatacgctcatctttccggcgggagtaaccggaagaggggtccaggctcacgagggccaaaatcagggcgaatagtagggagtgaaaggttttcatggctagactgcaagtataacgatgcggttctgaaagatcactgaacactggacagctgacgggtcagcatttatggacagggaattcgcaatgactggcttatcttccggtcatcgtaatcgcgtataatccgcacttttagtactctctctgattcacgatgtaggccgtaaacaaagcggactacggatagcgttgaccttttacgcctctttcattttctctgtgcgccgcattctgccagtaatgcccatatatatatgtatttatgcctacctggaggatctggactaatggcccctgtcggtacttctgctttgcgatttgtttgtcaactgactgggctactattgcgcctttattatcacctgcttcgagtacaaagaaccacaaccagctgttttcagcaggtacctcggatgcggtggggtgtatgtgacgcatatgttcgtgcatttttctcagttcttctcagtctctcaaaaatccattagtgtcttttattacaagatgattttaaatgcgccccattaactggttattttgagcacttagtcagtaatgtatgcagaaagcagcgataaattgtaaataaaaacgaatatctaattaattaaagtttggactttaggaataagaataatgtgtgtggtaaattttaactttcaaagaaaacagctgccgtaaaattaaatcaccattgagattaaatagtttgatgtaaaggaaaataaaatttaagaattattttaacaaattccttttgggtaaattggcaagccgagtaaaaacgtaacaccaaactagttagccattcgtagtccgagggtaccaaccgagcgatcatccaataacggtggcatacagcattgccagcttgaataaagtagactgctataaaactaggctcgtataagcagatcttgagcagagattggtgtagtttaacattttgttttcttttattttgcaaatatgtaggtatgcttaaatatgatttttgtttttaggagtatcattatgcttgacttaatcatctttaccatataacttgtacatttcactttcatttaacttgac

SEQ ID NO: 11312 - DNA, 938 bp, DROSOPHILA
ctgtccataaatgctgacccgtcagctgtccagtgttcagtgatctttcagaaccgcatcgttatacttgcagtctagccatgaaaacctttcactccctactattcgccctgattttggccctcgtgagcctggacccctcttccggttactcccgccggaaagatgagcgtataattagagaatataagcgagagcaagagttaaatcacgccaagatcgccagagatttggtccatcgcgccaattgggcggctgtgggaagtctctccaccaacgaacgggtgaaggggtatcccatggtcaacattatctccatcgacgacagcgatgctaataacaggtccactggacgtattcgattcctgctaaccgatttggacttcactggtcccgactggcagaaggacaacaaggtcacactcctgttcagtgacgagcagaccctaagatgcaaggagggcggaaaggatcccatggagcctacatgtgcccgttccatgatcagtggacaggtgaagaagatggatcctagcgacaaaagctatcagccatcgctggatgcctatgtgaggcgtcatccagctgccatcaattgggtaaaagctcacaatttctacctttgcgaactggaaattagcaatatctttgttctggacttctatggaggtcctcataaagtgagcgcctctgactattacgctgtttcgaattgatgaactcctccaaaagcaatccaactgacgcctcatatactttgtcaaaaaatgaaatgataagcatatttgcacaacatgtctgccacaaagggaaagaatgaagacaaaggcctttatgaaagccacttatcagttgagctctgtgatttcaatcgatagaacaataactttgatataaataaaaatacattccgttgaatgtactctgacatactgaaa

SEQ ID NO: 11313 - protein, 211 aa, DROSOPHILA
MKTFHSLLFALILALVSLDPSSGYSRRKDERIIREYKREQELNHAKIARDLVHRANWAAVGSLSTNERVKGYPMVNIISIDDSDANNRSTGRIRFLLTDLDFTGPDWQKDNKVTLLFSDEQTLRCKEGGKDPMEPTCARSMISGQVKKMDPSDKSYQPSLDAYVRRHPAAINWVKAHNFYLCELEISNIFVLDFYGGPHKVSASDYYAVSN

SEQ ID NO: 11314 - DNA, 3164 bp, DROSOPHILA
aggaatatattacaattgagattgaaattggagcatcaactatttaaccgcaatggttatttatatttcatatcacttaatatacatttaatattataaaattttatagtccatacaattaagtcatatattttttcttagtgtacaagcaacaacaaaaatgctttgcattcattatgatttttatacccgttactcgtggagtacacactgggttacactggattcgttgaaaagtatgtaacaggcagaaggaagcgtttccggctatataaagtatacatatatatatatattcttgatcaggatcaatagccgagtcgaactgtccgtctgtccgtatgaacgttgagatcttagaaactataaaagctaaaaggttgagatttatcatacagattcttaagacatagacgcagcgtaatgttgccacgcccactaggcgccctaaaggcaccaaaccggtcacgcccacactttgaaacaatttaaacattttttttattttttattttattccccaatatctatcgatatcccagaaaaattatgaaacttcgcatttgcatttccactagctgagtaacgggtatctgatagtcggagaactcgaatatagcattctctcttgttactcctcgttttcgcttctcaatgggcagaaggggtttcgggatgtttgggccaaaagtttgactttagggcgtaatttcattgcaaaatatttgcagacacacatgcatggcgagaagaggcactgcaattgaaatgtttaataaatatatacgtatgtacattcatgcaaaattcttacttattgttgtagctgctgcatgaaacgagttaacagatgcaaaaagaagaactcacatatataaaaaacaatgaaaaaacagttacattcataattttatttccattttatttatattattttttttttggccatcgctttctgttgctcgtaactatttgtgcattgcaagcaccaccgacaactatgcattatttgttggctgtatccttaagctttgcttcgccaatcccccttttggaacccttgtttggcaccctttggagaaataaattgtagtcatatattttggaaatatgcaatgggtgctacatacctttgggactaaacattttccatgtggcttgcaagccttttttaaacatataaattaagaaaatccccccctgcaccgaccacctatttggtggtttcggatttgaaatctcaacttacattaaagtggtaaaaaaaatcaaatgttacttttctttctctgtacgaatacacatgttagggcattttcgattcgaacgctgttttccgacaccttatgagttctatctattttttaaacattaccccactccacaagagtgctctttccttttccattgcattttagttttgccgttgggaaattcttctaattggcaaaaaccaggagtttgagcgattcagtgttcatgttcgtcagttagtttcgaattttcacttttcctgatatgtgttagggtgctgttctttgtgtttaagcatcgagtgtgaaaatgatttgctagtagtggaataaaagaaccactcgaactggttattcctgagttaataacgtaaaaaataaaatgaagaacatttttcaatcttcaagagctattagaatgcttgttattgttttatttaagagaaaagctctatttaatgaaaagtacattatattttacaataaatcagtctattcatcttatttctttaacaaattgcagtatattgtccatgcaatattgtttataagctacgaatttcttacagaaaacactggaaagttttctgattacagcccaatattatggccaattaattttccttactgactgtcgatttaccccaatccaccattgcagcaactaccagcaaatccagcacctgggatactatggacacgaaatcggaacggagagcatctcgcagcagcaaggactgcaggataagggctacgaggagtgggtgggcgagatgattggcatgcgtgaaatcctgcgacacttcgccaatgtgtccgtcaacgatgtggtcggcatgcgagctccgttcctcaaacctggccgcaacacccaatacaaggtgagttgcagttgttattgcaaagggtagcagggggttgttgcgtggatggcaggtgtgtcagctctgcacaaaagaaatgcaaacaatgagaattgacatgcaattgtcgattgcgatttcttgatatcacaaccagagggtgtgggagctacggggtggagctacagagatcccaaacggaatcgaaaatcgaaaagttattcatttaaagctgcaatttcagtttctgtcaacgccgcgacactgaatgggaaaacgtacccaattggttcggaaacaaacagaaggcaatctgaatgtaaagttaaatttgtactttataagagtttgaagacaacaatatagattttaagcagtaaagtgtttaccaaaatatgttacttaccatattagttacctaggtaacttaattaagtgctaacattaaatggccgtaattgttggaactgcttataaaaatttgtatacacgtccctcgaagagtaaacacaggtacacgacttttgcgtgttaaaaatataagtaagcgtttcctaccagtcaagtgtctacctagtggatcaagattaccagacgagtcgtcaattaatgttccggaacaatatgacatgatgatgatgatatagtcgtccggttgccaaagatttagtcatttagtcatttggattctttatcaattatattatatattctttactttactacggacagacaggcggaagtgtgcgagaagactcacttgattctacttaagaaaatatacactttattgggtcggttcctttacctgttacagttaatttggtaatatttttgactttactaggatcgggtataaaaaccttattttttaggttatgcattgtttttaaatctgctcattgtatgtgatagttatttcatttaaattgatgaggtcttggttttaaattgaaattgagtttgttgatatccaataaggcaatggcaacctaaccgtaacctcaacccaccgaacacacacaatttgactccgacgaaaatttct

SEQ ID NO: 11315 - DNA, 261 bp, DROSOPHILA
atgcattatttcaactaccagcaaatccagcacctgggatactatggacacgaaatcggaacggagagcatctcgcagcagcaaggactgcaggataagggctacgaggagtgggtgggcgagatgattggcatgcgtgaaatcctgcgacacttcgccaatgtgtccgtcaacgatgtggtcggcatgcgagctccgttcctcaaacctggccgcaacacccaatacaaggtgagttgcagttgttattgcaaagggtag

SEQ ID NO: 11316 - protein, 86 aa, DROSOPHILA
MHYFNYQQIQHLGYYGHEIGTESISQQQGLQDKGYEEWVGEMIGMREILRHFANVSVNDVVGMRAPFLKPGRNTQYKVSCSCYCKG

SEQ ID NO: 11317 - DNA, 7026 bp, DROSOPHILA
tctagaagtaagcgtagacctaagaccgatgatatacttatacacacccacaaagatacatttaccagcgcagaatcgtatttaagttttaatagttatcactgtccgtatggttagtctagtttagttcctttgtttcaatctatgtacctacagccataaatacaatcgtctccgattcacctatattattagtaacacacccaaaaatgttgtacctagcaggtgcgtatggatctggtgttatcagatcgatcagatacatcttcacccgcgcacatgcccgtcgcttatcgcgacacattgaaccagcttcaacgcagctcgcccacccggaatttgagttctttgactagttactaaacacagatacaaaaaaaaactacatgcatataaaactatatatataaagaaatctatagaatacgctaaataaaatcgatttcaagaaacatcaattgcattcttaatcatcaacaaaattctaagctattggaaaccattggtagtgtattgagaattgagcaacggctgacatcaccaggtgcatttaaattaagagaaagtaagcagaagaattaagcattcatgaaaactagtttcgcagaaaaactgcgtctcactagagaatattaaagctataaaattcattcatgtatgtatgttataccttaagaaaactttttagcacaattgtaaaagttaattactttttaactatattttagactccgctgaatcctccaccagatttgtagtagtagtaaccacttctatcatcaatgatataaattaaagtttgaaataataattccacatcctaattcattacctcaatataaaaaccagcgtcccttcgttttctcacttgttttatatatttttttgcttctttattttacattttacatatttatatcgcatttcgttttccacattggaaatatacaatatgtatgctcgaatttacattctcttagtgactaaatttgtttttcctcttgtttttgcattcggcttgcttgcttgcggctatcctttcatcccactgaaactaccctctttccgtcttcagttttcgttgacacatgttccacatagttacaattacaatttgctttgtcacgtttttgtttcgattgttttctttttgttttaactctgtcgcgcgtaattagcattttctcttttcagtttttatttgtttgtttttgttgaatttctcattcggtttattttatttccgtttcgtttatacgcctatatctgcttaaattagaaatcattaaattaatttaacacgtacttagattggattagattgttacagctacccgcccatcgcccggagcttttcaattgatgttctttcagttgtcgccggcgtggatcacttgaagttgagctccacgcaccgccttaacgttcgactttggggggctatataccacacccgattccgcttccttccaccgcagtcagccgcaaccgtagccacaacttcaaagtggacactcgcgcatccttaataatctccagatacattgccaccgtcaatgtggctgctgccgctggtcaacggcatggccaggagcggctccgactttgctactactcggtattgtacgtaacctaaacgtgcgtaatgcgcttgcaactgctgcaggtgcggaagctgatgcagcagaggtggttgtggctgcggctgggggcgacttcccggatgctgcaaacggcgtcgaagctggcgtcacatctcagctcattgggtctggtattgtggcatcgcagcactgtacatcatttggggggcaagtgatccgttcgctgcagcggccgcggatgctgcggcagccgtcacaccgggcaccacagttccgggcacgccccatgctacattcggcggcaccatgcggtatccagccgctgaaaattgtatgcaagctgtttaagccaaggtcacgattattcagcaactgagaaaagtaaacttacggactcctcccgcttgctgagcactggtagggtaggcgtagggatagtagccctgctgcatgtattgcgtctgcatctgggttgtgggataagtctgcagaaaagcacaaagttagggtcaatctttaggtcactgcgtatttaaagaatacaacacttaccgcaggtggataccagtagcccatctgctggtacgcgtatggatactgcgccgcaatctgctggggtgtcatcatttggccgggtatcgccgctcctgttgcggcggcgatctgttgctgcgtcatcatctgaccgggcatacccgctccagcggcaaccgcagcattggctgccgcaacggcggcaacattggcagaggctgctgccgcggcagcggcggcattgaggttattggccgagttatcgcctccgttctctttgccccagaagcactttaccaggtttccatgtacctcgctgttgtgcgtgtgctcgatggcgtgggcggctgcctccttggtaacaaacttgatgaacgagaagcccttgtccttgaagacccgcacgtcctggatgggaccaaactggacgaagtgcttgtgcatcaggtcgtcactgatgacattcggcgggaatccgccacagtatacggtggtgttggtggggctcgactggttatacacttcctcgaaggtgtggcgttgacttccctttacaccggacccattgcccggtccgccacccattccgcctccctggcctccgcccttggaaggctcgcgtggtggtggcagcttgcgcgtggaccagttggtgcgtatcgagcgcgagccaatccactggccgttcatcgcctggatggcgttctctgcctccgcctttttcacaaacgacacgaaggcgtaaccctttgacttcatggtgtgagggtcgcgcacaatgcgacagttggagatctctccgaatggggcgaaagcctcgcgcagtgtttctgtctcaatctcgggactgaggtcgcccacgaatatgtggtggtgcgaactgatgtctgtcttcggctgattgccgggactggtggcccagttgacctgcgaagagcattcgtttaataggtaataatcaattaagttctacataattaaaataacatgagggcttggtcgtggggaatgtgtgtgttgcaagagtgtagtttcgaacaaaatgaatgaaaatgaccgctgtccacttgataacttaagagaagctaatcagcttaccttgatttccttttcgaggaataggcgtttattcatggcggtcagagctgttgtggctgcctggtagttggaatattcgatgaaggcatatggatcgttgcccggttcccgaatgattttgcagcttttgacgggccccatggtgctgaagagggcaattagcaggtcctcggacactgagctatccaggttgcccacgtatagggtcttcggttgcgactcgtccatggctgtcggatgtcacgggactgtggcttttttgatctgattatacactaggctacagcgacaatctactgactctacactaaaaccggaattgcaactactgcacctggccgcattaatcggaaggggatgtatcaaaaatttgcagattaagttcctagctacgtacaaaatctaaagtgtctgctaattaaacaggtgtatttgcggcaatctaattggtgctagctgctaacaggaaactccaagagagatttgaatactttgattttctactactttcgacttactctcggcttggcttgatttttttggattatataaactttatatgctcaatctaggtaggttgatctatttgcttaacgctgaggttcgtcgtttattgctttattttgttcctaatctggcgcctaattgaaaatttcgttaaacatctatatgtatacgtataaatatatctgtcctaactaaacgctaatggagtgttttggaatatacgattagtcgcctaatatatatgtctataatcggttgacttcctttcctgggggcctgggatttggattcggggtttcttggtgtacactacttggtatttcagaattgctcgatccttcttcgatgatccggatgttgttgttgtgattataaatagttgtccgttccaatatacaggattgtataaatgtacatatgaatacttggttgcgactacttattcttgctcttgtacaaaaattagttagctaagttaaacagcgtgaaagttcgcaggctgagtgtacttttcgggtttcgaagctgacccctggaatcgttgctgctgtaaaagagagaggtaaatttgggttagttttgcgctgataaccggaagagtgggacaaggtctaatggcacatgatcggtgggccttaaaacaggcgcaaatgatatggatataaatcgactaccccgccccgcccccttttcgcatgatgggaacaaagaaggcggcaaagcagtgcagggacacgcacacacagacgcacgctcacacacactggcgcacacgaaaaacacggggagagtgagtgagctatcttcggagcgagagaggcgggtgggaaaggacaggggaaagagactgcctgtctttataacaaagcgaatggccaacaattgacaatagccattcattcgcaacaaatttgcgggccttgcaaaatgatttagtttataattaatatatttctgtattcacatttacaaatttttttttgggccactcacgcacagcacacagaaatgcacactcaggcacgccagcgagacgagggcgaaaggagaacgacgaaaatcgactagaagatgaatgaccgtcgataacaaaatgaggagaaagaaaaacagggaaaaggaagagaaagatgtgggaaattttgcgaaaccggcgggcgggtgacacacacggttgcattagattcgtgttcttcttcttcacactttgcgaaatcaaattttaatttgcatagaactaaacttgattttgattatttctgcggcggcggcgctagaaaatgtcagtcaaagtcacagaactgaagagacggcgaaaagggaatggcggggtggttttggttgctcatttgctgcttattttcttcgtctctttttcgcacacacactgacacattagcaccgacacgcacacacacacacgcagagagaggcgtcttgcgctggtctttttgtttgcgttttcctcacatgagtctccacttttcttttgcttttgcttttttccgcttttggctattgagtgtatttaaactaatgccaatataccaataccaagacgatttgaatgcgggacttttcatttgccttttcagcttgccgctatatgtacgtatatgtatgtatcttgttcgcttttgtgctgccatcttttaatgccgctcccccgccaccaacaaccgccacgcctccgccccgaccctgctgcctgacagcggtgccgaaaactgggcttaacaattatcgtccccgccgcactatagtgcattcgcttaatgtccattgttcagactcgaatttcgctgtcaaaattcgcactctcttcttttttctttaatgcgctctctgtgacgtggctgcgtttgtaaatttaccgcattttacttgctctgcactctgttcgcacacttcatttgacggtcaagtttagccgctaccggtttgtattaattttgcgaaactttcaaagttgttaggggctgcaaatgtacgttgaacgcgtcgctaaaattttaccttcgtcgtctaaaatgcgaactaattaatgagattttgtgtgcgagagccagggctgccaacttgctgagaaataaaaacgcaatggcggcaagatgggaaatgcaataaagagtatggacttgacaagatttttttataaaattacttacgtaggggtatttaatggaaattcagcgataatatgacaaggatcacacattaattcgcgactttaagttatttgaagcaacgttatcgaaaagggggcaaccctagggcaggcgataacgcttgcatcaccgctttctctctctaacacactcaccgcgggcgcaaatgcagcacaaagcagactagaaataacaatcgttatcgaaaaggtcgtcgaaatgggcataaatatttttataaacagtaaatatataatttcttgtggagatcacgttaaatgtgatgagctttacagtcggattgcggagaaaacagtgagtatgttatgtataattttcataagattttgcaatgtggcccttttttttacagaacctgcaaccaggggaatactacttagtcagcaatggcaagcgcttggagggagaaatttcatctggagatgttcactgcgttctccgccagctcggtggcaaaggaggatttggttccatgcttcgagccattggtgcgcaaattgaaaagacaaccaatcgcgaggcttgccgcgatctaagtggtcgccgtttgcgggatatcaacgaggagaagcgggtgcgcgcctggctggagaagcagggcgaacgggaacgggaggccgaggagcgtaaaaagcgaaaaatcgagaaactgctggccgtgcccaagcacgactttaaggacgataagtacgaggaagccagggctaatctgaccgagaaggtaaacgacgccttcgaggagggactcaagcaggccgaggagaacaaggagaaaggcgtcgaggaagcaacttccagtggcacaaagaggaaatcccccgccgtagacaagaccaaggcaaaaaagaagaaaaagggcacactctggatagacgatgacatctctggatccgactctgactctgacgacagcgaggaggagccaaaaacacagaaaaaagctatacaaaactagataaataacttttgaattaagtatgtaccaaagacgttcttatttcaaaatttacctgaaataaacataacaatataaatacttctcatttaaaatttgaaagatttagatttaatactatggggataattaagtaatt

SEQ ID NO: 11318 - DNA, 3389 bp, DROSOPHILA
tcgcctgccctagggttgcccccttttcgataacgttgcttcaaataacttaaagtcgcgaattaatgtgtgatccttgtcatattatcgctgaatttccattaaatacccctacgtaagtaattttataaaaaaatcttgtcaagtccatactctttattgcatttcccatcttgccgccattgcgtttttatttctcagcaagttggcagccctggctctcgcacacaaaatctcattaattagttcgcattttagacgacgaaggtaaaattttagcgacgcgttcaacgtacatttgcagcccctaacaactttgaaagtttcgcaaaattaatacaaaccggtagcggctaaacttgaccgtcaaatgaagtgtgcgaacagagtgcagagcaagtaaaatgcgcaacgattccaggggtcagcttcgaaacccgaaaagtacactcagcctgcgaactttcacgctgtttaacttagctaactaatttttgtacaagagcaagaataagtagtcgcaaccaagtattcatatgtacatttatacaatcctgtatattggaacggacaactatttataatcacaacaacaacatccggatcatcgaagaaggatcgagcaattctgaaataccaagtagtgtacaccaagaaaccccgaatccaaatcccaggcccccaggaaaggaagtcaaccgattatagacatatatattaggcgactaatcgtatattccaaaacactccattagcgtttagttaggacagatatatttatacgtatacatatagatgtttaacgaaattttcaattaggcgccagattaggaacaaaataaagcaataaacgacgaacctcagcgttaagcaaatagatcaacctacctagattgagcatataaagtttatataatccaaaaaaatcaagccaagccgagagtaagtcgaaagtagtagaaaatcaaagtattcaaatctctcttggagtttcctgttagcagctagcaccaattagattgccgcaaatacacctgtttaattagcagacactttagattttgtacgtagctaggaacttaatctgcaaatttttgatacatccccttccgattaatgcggccaggtgcagtagttgcaattccggttttagtgtagagtcagtagattgtcgctgtagcctagtgtataatcagatcaaaaaagccacagtcccgtgacatccgacagccatggacgagtcgcaaccgaagaccctatacgtgggcaacctggatagctcagtgtccgaggacctgctaattgccctcttcagcaccatggggcccgtcaaaagctgcaaaatcattcgggaaccgggcaacgatccatatgccttcatcgaatattccaactaccaggcagccacaacagctctgaccgccatgaataaacgcctattcctcgaaaaggaaatcaaggtcaactgggccaccagtcccggcaatcagccgaagacagacatcagttcgcaccaccacatattcgtgggcgacctcagtcccgagattgagacagaaacactgcgcgaggctttcgccccattcggagagatctccaactgtcgcattgtgcgcgaccctcacaccatgaagtcaaagggttacgccttcgtgtcgtttgtgaaaaaggcggaggcagagaacgccatccaggcgatgaacggccagtggattggctcgcgctcgatacgcaccaactggtccacgcgcaagctgccaccaccacgcgagccttccaagggcggaggccagggaggcggaatgggtggcggaccgggcaatgggtccggtgtaaagggaagtcaacgccacaccttcgaggaagtgtataaccagtcgagccccaccaacaccaccgtatactgtggcggattcccgccgaatgtcatcagtgacgacctgatgcacaagcacttcgtccagtttggtcccatccaggacgtgcgggtcttcaaggacaagggcttctcgttcatcaagtttgttaccaaggaggcagccgcccacgccatcgagcacacgcacaacagcgaggtacatggaaacctggtaaagtgcttctggggcaaagagaacggaggcgataactcggccaataacctcaatgccgccgctgccgcggcagcagcctctgccaatgttgccgccgttgcggcagccaatgctgcggttgccgctggagcgggtatgcccggtcagatgatgacgcagcaacagatcgccgccgcaacaggagcggcgatacccggccaaatgatgacaccccagcagattgcggcgcagtatccatacgcgtaccagcagatgggctactggtatccacctgcgacttatcccacaacccagatgcagacgcaatacatgcagcagggctactatccctacgcctaccctaccagtgctcagcaagcgggaggagtcccggctggataccgcatggtgccgccgaatgtagcatggggcgtgcccggaactgtggtgcccggtgtgacggctgccgcagcatccgcggccgctgcagcgaacggatcacttgccccccaaatgatgtacagtgctgcgatgccacaataccagacccaatgagctgagatgtgacgccagcttcgacgccgtttgcagcatccgggaagtcgcccccagccgcagccacaaccacctctgctgcatcagcttccgcacctgcagcagttgcaagcgcattacgcacgtttaggttacgtacaataccgagtagtagcaaagtcggagccgctcctggccatgccgttgaccagcggcagcagccacattgacggtggcaatgtatctggagattattaaggatgcgcgagtgtccactttgaagttgtggctacggttgcggctgactgcggtggaaggaagcggaatcgggtgtggtatatagccccccaaagtcgaacgttaaggcggtgcgtggagctcaacttcaagtgatccacgccggcgacaactgaaagaacatcaattgaaaagctccgggcgatgggcgggtagctgtaacaatctaatccaatctaagtacgtgttaaattaatttaatgatttctaatttaagcagatataggcgtataaacgaaacggaaataaaataaaccgaatgagaaattcaacaaaaacaaacaaataaaaactgaaaagagaaaatgctaattacgcgcgacagagttaaaacaaaaagaaaacaatcgaaacaaaaacgtgacaaagcaaattgtaattgtaactatgtggaacatgtgtcaacgaaaactgaagacggaaagagggtagtttcagtgggatgaaaggatagccgcaagcaagcaagccgaatgcaaaaacaag

SEQ ID NO: 11319 - protein, 464 aa, DROSOPHILA
MDESQPKTLYVGNLDSSVSEDLLIALFSTMGPVKSCKIIREPGNDPYAFIEYSNYQAATTALTAMNKRLFLEKEIKVNWATSPGNQPKTDISSHHHIFVGDLSPEIETETLREAFAPFGEISNCRIVRDPHTMKSKGYAFVSFVKKAEAENAIQAMNGQWIGSRSIRTNWSTRKLPPPREPSKGGGQGGGMGGGPGNGSGVKGSQRHTFEEVYNQSSPTNTTVYCGGFPPNVISDDLMHKHFVQFGPIQDVRVFKDKGFSFIKFVTKEAAAHAIEHTHNSEVHGNLVKCFWGKENGGDNSANNLNAAAAAAAASANVAAVAAANAAVAAGAGMPGQMMTQQQIAAATGAAIPGQMMTPQQIAAQYPYAYQQMGYWYPPATYPTTQMQTQYMQQGYYPYAYPTSAQQAGGVPAGYRMVPPNVAWGVPGTVVPGVTAAAASAAAAANGSLAPQMMYSAAMPQYQTQ

SEQ ID NO: 11320 - DNA, 2420 bp, DROSOPHILA
tcctttacctgttacagttaatttggtaatatttttgactttactaggatcgggtataaaaaccttattttttaggttatgcattgtttttaaatctgctcattgtatgtgatagttatttcatttaaattgatgaggtcttggttttaaattgaaattgagtttgttgatatccaataaggcaatggcaacctaaccgtaacctcaacccaccgaacacacacaatttgactccgacgaaaatttctggttgacatgacatgacatcaatgtcacaatacatgaacgttcacatcggttcaagtgctccattatacgacatccatccatccaggctccccattccacctcccaaatctcgatcagagtcgttggcacattcatgcatttaaaatcatatccatggcaaatctctttatgcagataatgggcccaaatgaaagagtgtaagcgacgtgaccgcccatcgatgttgtattgtatcgcactcatggattttgtctgtgtgaagcgatgctttccttacatcctaggaagggaaagcatattttattacaattaatcaattaaataacaaatcttttctgtggcatacaattttttcaaaagtcgattttcaaaaagccaacaatgcaaaaccaacataatagaaatttatgtcccaaattaatagggggcaaacagaaggacgaacgtgcaataccgtcaagttggaaatctacgattttttttaaaaacggttcagcttcggatgatgaaaataaacgtgctttaccaaacattcgtaaaattaaagctgttgggctggccacacaaaatgcccattatgtctagattaaatacacaaatgtatacattacaaagcatattgctagtctggtcactgaaaaataaaacttttgacaaaaatacatttttaaactttccatattttacctcttttaaacaaagtgttgtataaattgtaaatgtattgtttatttatttattaattgcttaaatgccaaaactgtctgctttttactaccaggtgctggaggactttgggtacatctatgacagctcgatcaccgttccaccggtacccgtgccagtgtggccgtacaccctcgattacaagatctcgcacgagtgcaagagcggcacctgtccgtcgcgcactttccccggcgtttgggaggttcccctgaacacacactacgtggagggctatgagggcggtcactgtccctatctcgaccagtgcgtcttgcacaacctagacgaggaggaggtctttcagtggctacaggaggacttttcgcgctactacgaacagaacaaggctccatacatgatgcccttccacactaactggttccagaccaagccgctggagaacggcctccacaaattccttgactgggccctcgaactgtgagtttgatacacttaatatctagggatattgggggaaaataccaatatttcggataatatggataataatgttttaatcgctataaacatactacaccaaaatcaataccattgaaatgactacctagatctatgaactcagagcatttggcaacgatctaggcatctgtccatatcaacgtgaaaagtttatttttaaatattgctacatttcgcccactttcattagatgtttgacaggtaactgatagtcgagcaactcgactacagctttctctctaagttttaattgactgtttattagtatttatgcttcatctttatctggagacgtatttacattcaaattgatagtaaaaaaaacaatacattgggtgtttgtagtaccttacctacgataacaatacacctacgcttgacccaccaccacccatgattaaaagccacatacttaatcatacatttaatgggtcatatcgcttttaatttgtttaaaatgcaagaaaactccgtcttttttggatatcaaacaaaactttatctttatgatattgtatatcttttcagagatatactttctagatattttttttttacatcgttaggggtttctgtgtctgttatatgcgcacactgcgtttttttttttcataaatttattttttcaactttttccatttttggccttatacatagtatatttttgttgttggtgttttcataattgaaagccaactttggaacaggctccctctctcataccatctacttctatctacacatgggcagctggcgtttcctgccgattgccgctggcaagttttatattcaattaaaaaaaaaaccaagagagatgagagccggaagacggaataaagaaaagcgggagaaagcagggagaaagtgggccgcaaaaggcagaggcagaaagctggagcagtagcaaaattggcaattgctataaaaattgcttgtagaagcgtcggcacatgttgcctgtc

SEQ ID NO: 11321 - DNA, 420 bp, DROSOPHILA
atgccaaaactgtctgctttttactaccaggtgctggaggactttgggtacatctatgacagctcgatcaccgttccaccggtacccgtgccagtgtggccgtacaccctcgattacaagatctcgcacgagtgcaagagcggcacctgtccgtcgcgcactttccccggcgtttgggaggttcccctgaacacacactacgtggagggctatgagggcggtcactgtccctatctcgaccagtgcgtcttgcacaacctagacgaggaggaggtctttcagtggctacaggaggacttttcgcgctactacgaacagaacaaggctccatacatgatgcccttccacactaactggttccagaccaagccgctggagaacggcctccacaaattccttgactgggccctcgaactgtga

SEQ ID NO: 11322 - protein, 139 aa, DROSOPHILA
MPKLSAFYYQVLEDFGYIYDSSITVPPVPVPVWPYTLDYKISHECKSGTCPSRTFPGVWEVPLNTHYVEGYEGGHCPYLDQCVLHNLDEEEVFQWLQEDFSRYYEQNKAPYMMPFHTNWFQTKPLENGLHKFLDWALEL

SEQ ID NO: 11323 - DNA, 2862 bp, DROSOPHILA
acctgaatgtcaagcccagctgtgccggagcctgcgccttggccgtggacaccgtcacgccgtagtcctgcaacgtgctgtcgtcctccatgacatcgttgtcctgattgtataaccgctggtccacgggctgcacctttagtatgcctgcgatcgatggggttgtatgatcagtcatggagttacccaataatggcgctgctctataaatagaagccaacacttaccctcaatcattcgcttcagctcggccaccgttgtgttctccttggcgtccgtgaagatggtggtcttttgccgcctgatcataaggaacacgtcctgcaaaagagagggttagccattagatttgattcgatgcgaagtgattcgtttcggtcaaagttcagtggcgctttttcagtgtgtcatgctttctgatcttgccatcacacaggcgacatttgtgcacatgcattaagagcgcgacggtgtctatggcagcagcatctgcgatgcactgcatccttgctaggctgcacgacaccggcacgagcactcaccatattgaggagtttgtggcgctggctgcgactgaggctgctacgcggatgtgggttaaccaggtgcgtgggctagtgcgctgtgttcggcaactgacggcgtgggtggcgcttcctttggcggtcgcgggcggacgtttcgatcggctggaattttcctacttcgcttgcaccaccgctgctgggcgcttctattttttgctctgtgccgctcgaccggagttgggggcgggcgcaggtgggcgtggcgtgcggttcgcggtacgatgagcgtgcgtgagtgtgtatgtttgtgcaacagcttcctcggttgccccccacttgtaggttttcgtagttttacgattttttctagccttttgctgctgctttctcaactaattagagctgtcaaaccatcgatggtcgcatcgatagtgagctatcgatagttcagggtcagcggccttcgttgtctaatgccatcgctaatccgatattattgcagggcttttagcaagggattgtctaaagccttggtgaattctattaatgtgtattaacaaatacttcacaattccgtttaatgtatattttccattagtttataaataaaataattcgcataagtaatgagcttttgcagccctggttattgccaagaaaatgtactagaaaataccgccatagctgtcagtgtcacttttcccgtttctcctgttttatttgccacgaaatggttttgctagacaattcgaacgtaaataaatgaaatacctttaaaagaagccgataagtaaccgtatctccttacagtttatcctgcgcctggagaagatcgcaaatgcggccaagaaggactcctccttcacgctgacgttcaagcgatgtgagtgttcgacaccgaaaaacatggtacactaggaactaatttacaatttatttaatgtgccgcagatgatggcaacgataagcccgtgccgagggaaggacggccaccgctgcccaagccggagacctacatgtgcctgatgcgcgcccagtccaagtcccaaaaagtaagcccgattgaaagctccacgtttcgactccttaccaaataaacctatttttccggcagatttccaccgttgtccggcaggaggatgtgcccgccatgatgagcatgtactcgcagttcatgaagagcaagatggacgggctaaagcgggttaagaaagtcaaaagcaaggccaaggcgacaaagggttaatcggggcatagtcttagttagattttatttgactgtttactggtcgtttgttttaaaccttaaatgcatcattttgtacggaaagcacgctatacttcttatttctatcatcaatctgacgcagatcgagcagccacttcggcagttcccactgccgcaacccgtatatgaactttggtcttatcaggtcaaccaaactgtaaagatcctcgtttatttggttctcagctaatagctcttcgtccacgtacagtacatcgattccctgacagaggcccgtgtgaagggagcccgaagcctttggcagaaagtccagatacccagataggcagtccacaattaaatatcgtgcatggccgtctgcaaagagataagtgttctcagactaccaacaggaaccaatggctcagtactcaggtagtactcactttctatgtagaataggttgcactccaagccgttttcctttcttcctgctggtatcaatgtgattgtgatctcgttttcatcgtacactagtcgggtgggcttattcggcagtagtatttcaaaagtgcagctttctgaaacatctgcatgtgattgcagccgtgagatgtccagctgcgaacccacagctaactggcaccaattttgtggtgctattagatctcctaaggcggctgacgtgaagagcaagggtccacggtgctggagggccaaattgtattggaagtgaatttatataaaactaggtggtgtacgcacctcctcgtaggaactgtagacttttcctttttccagtattaagggctggcctatatcgtttaaaaacattgttaattatgcgccaattcctcaggaaatttgtttttctatgtgttaccagatcgcattgacaagaaaatcccaattcttcaaggactattttctaagttcaaaactacagcgcgagattttaaagtagaattctggataattttggaaatatttgcagaaaatcccctcattgaaagaaactttttaagtatttaaatattaccatctgcactatgaaatcatccaaccttcccttttgtagcgcacttcaataaaaaacacagattgtag

SEQ ID NO: 11324 - DNA, 518 bp, DROSOPHILA
atgccatcgctaatccgatattattgcagggcttttagcaagggattgtctaaagccttgtgtcacttttcccgtttctcctgttttatttgccacgaaatggttttgctagacaattcgaactttatcctgcgcctggagaagatcgcaaatgcggccaagaaggactcctccttcacgctgacgttcaagcgatatgatggcaacgataagcccgtgccgagggaaggacggccaccgctgcccaagccggagacctacatgtgcctgatgcgcgcccagtccaagtcccaaaaaatttccaccgttgtccggcaggaggatgtgcccgccatgatgagcatgtactcgcagttcatgaagagcaagatggacgggctaaagcgggttaagaaagtcaaaagcaaggccaaggcgacaaagggttaatcggggcatagtcttagttagattttatttgactgtttactggtcgtttgttttaaaccttaaatgcatcattttgtacggaaagcacg

SEQ ID NO: 11325 - protein, 142 aa, DROSOPHILA
MPSLIRYYCRAFSKGLSKALCHFSRFSCFICHEMVLLDNSNFILRLEKIANAAKKDSSFTLTFKRYDGNDKPVPREGRPPLPKPETYMCLMRAQSKSQKISTVVRQEDVPAMMSMYSQFMKSKMDGLKRVKKVKSKAKATKG

SEQ ID NO: 11326 - DNA, 2841 bp, DROSOPHILA
tttcaaaatcgaaaaagttgatcatatacactcttaactttatagataaagattagtagttgactcgaaaacttaatacgttccacgacttaagagggcgggatggggtcatatggacgctaatagagacgcatagatacatgcaataagtgaaaatcgggcaatcagtcaagctagcgttaaccaatattctaaagacagttaaagggagagtggacaaaagctaatacgatatataccaaacatatttttgccagcatatacctaacatatacacacatctgatctgataatgataaactatagtcctaaacacttcgagggagaataggccatgttaatagttgcatacgacgaatttgaaacccaagttaaccagttaacgaaatagcaaacaaaaatgaaatcaagggatcttgtacgagatgcgcacaaaatcccccctacatatatattcaaatattaatcttgtagtacgcattatatctatttcgtagttgttccattatatctctcatacatacacaatatgcctttctactgatactaagccccgtacttctcctgtgcattattatagcctgctgagcgcaacaatcagttttacgtttgtatttcggatttctttggaaattgtactgattttttgcttttgataagacaattatggtttttatatacatatatctatataaaatgttatcctgtattgattatgaatctattaccattatgtactttaatcaaacaaaatacattattagatttttgcgaatttactttctcagagttgaagattttggatattttgacatcacgtaagtagtgcataaagaaaacaggaacgagtagagtattgttaaatacctgataaaaggaaagcaagcaaatctaacaaacccaacaaaatatttttaaaaaaacaaaaattaagagtggagctatggcttgacttgactgtggattgggatttaggtgtatagtttagtattcacaacgttcactcacccagagaaggtatgttgatacaaagggcatgcgataactttaagtaggtacgaccaagctcataggaacagatttgctgtacgtcgctgatgtcgatgaggagatctgtgaagatatgagcagtcaataagctactctttaggcaaaatgaatgcactactcacgggaggtgccctctgtcctgcaggtcatgtacacgcaagcggcgtagatgtgggtgctcttcctaccgcgggtcagatgcctacccaatgccatcttgaagaaattcagagcagtatctgcatagtgctgggatagctgcagctgctggcagagtagtgtgatgtccttcttggcctttttgatggtcacctcgcgggattcggtgcccgatcccacctgaaacttgccgtagccatagttggtggcaccgcccgacgactcggcggacacaaactggccaattgcggctgctccatggccaacttcctcgaactgcacttcggaaacaatgagggaatcctccaataccgagccgcagttcatgcaaactacagtgaatgggtgaacgtcgttagtgtcatggatatgggtccttggatgtcattatacctcgatctccgcgagcattgtcttcctcgatctcgttggatccgcaattgcgacattttaggcccgtagacatgattgtttgttctttgctttaataaacactgccacctgcaacgcttcgtttttatccgttgttttgacagtttaaactacttgtttgctgtcatttgaaagccattttcgagtcttttttaaacaatttgcaatttgttgccaattgaatcaacacgcttggaaaacatctgattgaaccccgccggcgttgcttaacactgatgatagaagaagaaatgctagagatgcgcatttctcaatcaagaacgacattggcacaactgcttgaaaaacttaaaagagatattaaaattgtaaaaattacgtaaagctggttccaaaaattatgttctagtttatttggcaaattatcaatcaatatttgtttttcatttacattggaatatataataatacaggtttagcatcgtgttcttaggtgcacatctctagtagaaatagtgttaaagtgccggtaaggtgactaagtattttgttgacatattgaacaagttggaccaaaaggagtatacagtcatcttggacttaacttataaatattaagtaaatattttaatacatatttattttaaatttacatatttatatttaccgtgtgttcttgcttttgtaacagtgtcaagctttgacgtcatatttaaagaaagtcaccccactttgttccaccctgagcagcggaataaacaacaagtcaagtcagcgttcaattttcgaaagtcaacttgaattaaaaaaaaagaaaagccggtcaaaatatatcagtcatgggcgatgctgatcgtgcgatgaacgaaccagaagccgcgaaaactgtgtccggaatccaggtgattcccgccgaggatgtggcttccattgaggatataatcacaatcgatccggactgctacgagcttgatctgaatcatcgccggatcgagaagctggagaacttcgagccgctgactcgaatcgagcgcctgtttctgcgctggaatctgatcaagaaaatcgagaacttgtccagcctgaaaacactgattgagctggagctgtatgacaaccagatcaccaagattgagaatttggacgacttgccccacctggaggtgctggacattagcttcaatcgtctgacgaagatagagaaccttgacaagctggtcaagctggagaaggtctact

SEQ ID NO: 11327 - DNA, 721 bp, DROSOPHILA
ttttccaagcgtgttgattcaattggcaacaaattgcaaattgtttaaaaaagactcgaaaatggctttcaaatgacagcaaacaagtagtttaaactgtcaaaacaacggataaaaacgaagcgttgcaggtggcagtgtttattaaagcaaagaacaaacaatcatgtctacgggcctaaaatgtcgcaattgcggatccaacgagatcgaggaagacaatgctcgcggagatcgagtttgcatgaactgcggctcggtattggaggattccctcattgtttccgaagtgcagttcgaggaagttggccatggagcagccgcaattggccagtttgtgtccgccgagtcgtcgggcggtgccaccaactatggctacggcaagtttcaggtgggatcgggcaccgaatcccgcgaggtgaccatcaaaaaggccaagaaggacatcacactactctgccagcagctgcagctatcccagcactatgcagatactgctctgaatttcttcaagatggcattgggtaggcatctgacccgcggtaggaagagcacccacatctacgccgcttgcgtgtacatgacctgcaggacagagggcacctcccatctcctcatcgacatcagcgacgtacagcaaatctgttcctatgagcttggtcgtacctacttaaagttatcgcatgccctttgtatcaacataccttctctgggtgagtga

SEQ ID NO: 11328 - protein, 184 aa, DROSOPHILA
MSTGLKCRNCGSNEIEEDNARGDRVCMNCGSVLEDSLIVSEVQFEEVGHGAAAIGQFVSAESSGGATNYGYGKFQVGSGTESREVTIKKAKKDITLLCQQLQLSQHYADTALNFFKMALGRHLTRGRKSTHIYAACVYMTCRTEGTSHLLIDISDVQQICSYELGRTYLKLSHALCINIPSLGE

SEQ ID NO: 11329 - DNA, 6279 bp, DROSOPHILA
tttattttgtttttgttgcatttctttcttaaatgtaatgtaaaacactgcaaatgataatctgtatgtgtgacaaagcttaggtgttacaattcaatttctcaaccgaaaaaaagaaacactaacattactttcgtttcctataatttacgcatgcatttgttgttgatacgtacatatgtactttatagctctatttatgtctagtgcatcaacttaaggcagatatagagattaacggatgttgatcatgatagtggtagcgatacacaatattaaagcccttagttacgcgtagaaagttcgttggatttttgatttttcgttacaaagttaggagctgggcaaatcgaatttggattcgtttgctggccaacagtgtttgtgtagacacataaatttataaactaatatggcacagtctgcgcaaaattaagttgagtaaacgtccaagtaatttacttaatataacattttacaaatacaaagtacagcaaagacagcacattaacaaaaagacagccctgttgccaagctaagcgaattcggaaataaactggtttttagctagtagtattggatcccatttacagattttactacatttctaaattctgggtcactgaacaatcttaaaataaatatatattcgatgacaagccgttttatcaattccgtttccgatacattcaaattcaaataaaattggacttttataacagggccattacaaatttgggattctaatttccctgcgttgacggtttagtctgttgttgttgttgttgttgtgattgtgtggctactttcgtagtactgctcctcctttactatatcttcgtgttctcattcggtgtcagtcttttgaaataccattttgaaatcgattcatctgatgcaagctgcaatttgttcgttcgttgtggttgcgggaatgttctgtggttgcctcgtttcagggagtgagtgagcgatgtggtgggtgggtgtttttttttttggctgtgcacgtttcaaggtttaaagctaactaaactagataaactaggctacaatgagtacaatatatattcgagtttctgtgtgttcttgggcgcccggcttattcaaaggacattaggttggtgggcagaggtttgggcactcgcatggtggccaatttgcaaatggcattcgaccagagatgcgtcatctggggactgtccgtccggaagcgatagacggtgcccagagttcggtggcacagttcgaaggtgttcttgtgcttggtgttatcgctcacgtgggcataccatccatccaatggacacactttgcacggttcccgcttaaagtcgttgcgttcgcttcctttaaaggatttgggtgggaaatacaccagcgagttggcccaaatctgtagccagtatcgttgccaagatgccaccgctggcttccttccctccttttgaactgttttacgccggacacatccgtgcatggcggctgctgcctctggtgacatcaaatcgcaatcgctgccggtaaaatcacacataattccctctgcactttccaacgatgttagatctgcttgggatagggcatcgctgtgctccaagaccgaatcatctagcaggtggtgacgaggctgcacttgactcggatcaagttccaggtgcaggtggtgaggatgtccatcgctgtggttgtgcgttgcaatcttgccaaaaatgctgtaaaaggagaaaatggtttagtcaagatattcttgcgggttggagccattcatgctgttcatacaaatgagaagaaatgaaatagcaaaaaggcaaacaagggtgaactgcgattcgtatttgtaggttatatcgatttattctcagcatagaattgactaaggtttcttgtttaaaataaatgcgatagaaccttctaatatgttcggggaagttgtgtgcgtaaggttggtgagtaatgcatggtttcccaaatcaaaatcaaatgaaatgagtcaagtgttgggtcgtgtatttgtgtatatcatagcattttcaactcgggtccgtgcaaaagaaaagaaaatgaggagacgataactgaacacatcaaatgttaaaatgaggataacgcatcgaatcagtagtattcagtatcaagctggcaatacacacatatcctagctacaggactctgttctggactcaccgacggcatctgcaacgcttgttggagatggtgccgatgcccggcgcaatcatgacgatgcaacattggcacttctcggcaaagtttcgcggcaggctgctgctgcgaaatcttcattcgttttgggcagaggcggatgtttgacaattaacgaacacacacacaaaacgaaagcataagacaaaagcaaaacggtagaagtgagagacatagagatttaaacgattaataaggacccagtgtacaaatgtccaattcttgcgcagtgattcgaggtggtggatttcaaacaggtggttaacaagggaagccaagtgttggctctcaaaacgtaggattccttttacttacttggtgcccagactgcgacacttgcgatggcctggcacaaattttgtgccgcttgccattcgcatggagccaatggttttggccggcgagagatttaggcatccaagggccggagtaactacttccacattgaaggactcttttgagctgcaggacgaagaactgggtccagagggcgacgcaggttccaggtttagagagcgcctgaaaggttaatgagtattataacagcattatttttagataagaaaacagctcggattcaaaagattaatcttacttgtactgatcctcctcgaatatgttctgcaactcctctatataccttatcgaagtcaaatacttttgtgtcgcctcatgcttctgcaaatgcttatagttcgactgttgatagttcgaaattacacgcaatatattgttcatcttattgcgacgctgctctggctccaatccgcccttatgtgggtgggccaaatcgatgtagatcagatcggtgagaaagagacccagataggggatgcagggcaggcggaggctctcgaggtaggagcgcagattcgcccagttgtcctgatcactgaatatatcgctgaggcgatcgaatgcatttcgatcctttttcgataagcaagcccaggttttagttaggcgatatatgctggcgctttgcatggccgaaataatggcaaacagcgagtgcagattgttgagctcgtggagttttttggccacctaaaagggaaacattcaatcaatatgtgaaccgacatattatttgggggctcaagtctactcacctttataaagtgtgtaataatctcggctctctgctttggctgctcggcattgagaatctcctggactgtccaaaagctcgtgtggttaaatcgcttagtaaatgccacaatgttcggcgtattgacatgcttatcctttttcgtccacgcacaactgctcagctcatccggttggatctgggcaaagactgggaaatccagtagcgtaatctgattagccaacacatcggcgggtacacgtaacgcgctcaaaataaccgcatccaactgcttgatggaggcgtgggctggtaaactttgcgacttggacggtggtgctgccgaggctctacaaattgaaagaactgtgcttagtggggaattcatttgtctgaaactttggatgccgagtaactactacatacatatacaaattgtataaatatgccgagctctaactactgattacttacgctatagtgtagtagcaaccaggcgaatctggcgaggaggagaaactattcaaacaaccgatggaattcttgcggcgcgtgctcttgatatttagagttttgctggcctgcggttgcatactgggcggttccatttgctgctccttgtaggtcttctcctggcgcaaacaggccatggtgtgggcactaccattggtattcggacttcgttgcttggacacccgagttggctgctgctgctgttgtgaaggaggaggaggaggtgagctctgcttgaattgagtcgcggcataggcctgacccgtatatccattatagtccgtggtgggctttctgcttaactgaaataacgtaaaatctttaatatcgaactacaatcgagtgggaagaaggtatagatagccacctctgagtagcgcagattatccgtggacaggtcgcgtgagatttccgagtatcgcatcatggcagccaactccggctgtcgttgcacttcgacaagctcttcaaaactgtaatggacaagactcaagttaacttcgtgattaagttttggctctcggtgttccgcacactgggcagactttttgttgactgaaaccgagtttgttttcctcagttctgcattgtggcttttgtgttgcacgaacattcgtaacagaaaacaacaaaagaaattaaaaacaaaaaagtataggaaaaaactggtggcaagccgaaacgaagcttctggcacgcttcgctgctcgatttccaatggagcgggccatgtgagtcacgagcggtgcgaggaaaccattccatgctcttttatggtagctctcaagtggtcaaatggcttttcgggggtgcaagccgctgataaaaagtcacgggctgcagcggtcagcggaaagtttggttggaaaacaagtcacccgtttagaaaccaaattggttttcagcccagttcaatgaacccgtcgaccaaggcatagaaaattaaaatttaaataagccattcgtttccggcatttttctcatttccacaaaaacacaaaacaaaatgcagtcgcttaagtgcgaaatatacaatcaagaaatgacacaatatgtacatatgtacatatacgtttacgtaattaaaggagaaacatatttatttgaaataatgaaatgaaaacaaaagtaaccacttacattacggatcattatcggcatgtacaaccttctagaaaccactattcatttatttcccatcattgcaccaaccacaatacacatatgtatttaaaattcctctaagactgactgttttgaccccgtctgattaatttcaattaagatataatcatttgaaagcaaaagctgatcaaaagcaatgacgtccacactttgtcattggtatatctgggcttctgcctgcggtttccttcgattattttgcgcttttccgtttgagcaaattgaattatccgactctgaaataacagcgcaaatatctcgagactagtgtgggcgaaatccaaaagatacattcccaagacggatgcaaataaaatcggttggggaacgatattgtttttatgctgttcttatctattatgaattccattctaaatcgtttcaaactcattgtgctcagttgggatttaatctacatacatatatatctctattgcagcaaaagaattaaaaaaatacagtcctatatattttagatttgtagtatacagatgaattgaaaacaaattgggcggaaaggcaacaaaaacagaaacaagatgtagacaagacaccaggcgtatgcgaattatatttcaaaatgccagacgactgcctcaagattttgaacaaatggactttattgactatttgaactattccatatacacatcacttctctccttattgaattcatatatatggccatacatacatatacatatgtatctgtatctgcgccaatctgtgccatttttcttctggacttcccttcggctggtcggcgttttaatggagatatcatccaatgcaattaaagcccaacgatttacttgcctcatctgagggctcgtaaagttccacccactggatacaatttaatccatagcatttgtaaataattcctgccagacagcgcgctcctttaatgcgaatttgtaaacttttgatgggcgaatgaatactgattgttttttttttcgtggtcagggatatggcgaaatatgtacatatgtatgcctgcttggaggcaaaaacatcgcccactatatcgatactcccacagaaaattcagtgtgtttattgcttttacacaaatttcttaaaagaaaacaaataacgcagctgtagaattcaaggaaatcacatttgcctatgggcgatttcgattcttggttttttgtttatcagactagcaattgtatttaaataaaatacaatagcatatactgacgagcacatttctacataatcttgaggaaactcggtgagatttctcgtttcttttt

SEQ ID NO: 11330 - DNA, 2570 bp, DROSOPHILA
ctagtctcgagatatttgcgctgttatttcagagtcggataattcaatttgctcaaacggaaaagcgcaaaataatcgaaggaaaccgcaggcagaagcccagatataccaatgacaaagtgtggacgtcattgcttttgatcagcttttgctttcaaatgattatatcttaattgaaattaatcagacggggtcaaaacagtcagtcttagaggaattttaaatacatatgtgtattgtggttggtgcaatgatgggaaataaatgaatagtggtttctagaaggttgtacatgccgataatgatccgtaatttttgaagagcttgtcgaagtgcaacgacagccggagttggctgccatgatgcgatactcggaaatctcacgcgacctgtccacggataatctgcgctactcagagttaagcagaaagcccaccacggactataatggatatacgggtcaggcctatgccgcgactcaattcaagcagagctcacctcctcctcctccttcacaacagcagcagcagccaactcgggtgtccaagcaacgaagtccgaataccaatggtagtgcccacaccatggcctgtttgcgccaggagaagacctacaaggagcagcaaatggaaccgcccagtatgcaaccgcaggccagcaaaactctaaatatcaagagcacgcgccgcaagaattccatcggttgtttgaatagtttctcctcctcgccagattcgcctggttgctactacactatagcagcctcggcagcaccaccgtccaagtcgcaaagtttaccagcccacgcctccatcaagcagttggatgcggttattttgagcgcgttacgtgtacccgccgatgtgttggctaatcagattacgctactggatttcccagtctttgcccagatccaaccggatgagctgagcagttgtgcgtggacgaaaaaggataagcatgtcaatacgccgaacattgtggcatttactaagcgatttaaccacacgagcttttggacagtccaggagattctcaatgccgagcagccaaagcagagagccgagattattacacactttataaaggtggccaaaaaactccacgagctcaacaatctgcactcgctgtttgccattatttcggccatgcaaagcgccagcatatatcgcctaactaaaacctgggcttgcttatcgaaaaaggatcgaaatgcattcgatcgcctcagcgatatattcagtgatcaggacaactgggcgaatctgcgctcctacctcgagagcctccgcctgccctgcatcccctatctgggtctctttctcaccgatctgatctacatcgatttggcccacccacataagggcggattggagccagagcagcgtcgcaataagatgaacaatatattgcgtgtaatttcgaactatcaacagtcgaactataagcatttgcagaagcatgaggcgacacaaaagtatttgacttcgataaggtatatagaggagttgcagaacatattcgaggaggatcagtacaagcgctctctaaacctggaacctgcgtcgccctctggacccagttcttcgtcctgcagctcaaaagagtccttcaatgtggaagtagttactccggcccttggatgcctaaatctctcgccggccaaaaccattggctccatgcgaatggcaagcggcacaaaatttgtgccaggccatcgcaagtgtcgcagtctgggcaccaaatttcgcagcagcagcctgccgcgaaactttgccgagaagtgccaatgttgcatcgtcatgattgcgccgggcatcggcaccatctccaacaagcgttgcagatgccgtcgcatttttggcaagattgcaacgcacaaccacagcgatggacatcctcaccacctgcacctggaacttgatccgagtcaagtgcagcctcgtcaccacctgctagatgattcggtcttggagcacagcgatgccctatcccaagcagatctaacatcgttggaaagtgcagagggaattatgtgtgattttaccggcagcgattgcgatttgatgtcaccagaggcagcagccgccatgcacggatgtgtccggcgtaaaacagttcaaaaggagggaaggaagccagcggtggcatcttggcaacgatactggctacagatttgggccaactcgctggtgtatttcccacccaaatcctttaaaggaagcgaacgcaacgactttaagcgggaaccgtgcaaagtgtgtccattggatggatggtatgcccacgtgagcgataacaccaagcacaagaacaccttcgaactgtgccaccgaactctgggcaccgtctatcgcttccggacggacagtccccagatgacgcatctctggtcgaatgccatttgcaaattggccaccatgcgagtgcccaaacctctgcccaccaacctaatgtcctttgaataagccgggcgcccaagaacacacagaaactcgaatatatattgtactcattgtagcctagtttatctagtttagttagctttaaaccttgaaacgtgcacagcc

SEQ ID NO: 11331 - protein, 702 aa, DROSOPHILA
MMRYSEISRDLSTDNLRYSELSRKPTTDYNGYTGQAYAATQFKQSSPPPPPSQQQQQPTRVSKQRSPNTNGSAHTMACLRQEKTYKEQQMEPPSMQPQASKTLNIKSTRRKNSIGCLNSFSSSPDSPGCYYTIAASAAPPSKSQSLPAHASIKQLDAVILSALRVPADVLANQITLLDFPVFAQIQPDELSSCAWTKKDKHVNTPNIVAFTKRFNHTSFWTVQEILNAEQPKQRAEIITHFIKVAKKLHELNNLHSLFAIISAMQSASIYRLTKTWACLSKKDRNAFDRLSDIFSDQDNWANLRSYLESLRLPCIPYLGLFLTDLIYIDLAHPHKGGLEPEQRRNKMNNILRVISNYQQSNYKHLQKHEATQKYLTSIRYIEELQNIFEEDQYKRSLNLEPASPSGPSSSSCSSKESFNVEVVTPALGCLNLSPAKTIGSMRMASGTKFVPGHRKCRSLGTKFRSSSLPRNFAEKCQCCIVMIAPGIGTISNKRCRCRRIFGKIATHNHSDGHPHHLHLELDPSQVQPRHHLLDDSVLEHSDALSQADLTSLESAEGIMCDFTGSDCDLMSPEAAAAMHGCVRRKTVQKEGRKPAVASWQRYWLQIWANSLVYFPPKSFKGSERNDFKREPCKVCPLDGWYAHVSDNTKHKNTFELCHRTLGTVYRFRTDSPQMTHLWSNAICKLATMRVPKPLPTNLMSFE

SEQ ID NO: 11332 - DNA, 3170 bp, DROSOPHILA
tttccatgctctttcgagaacttcgaataccactagtgaagtgcgtcgcattatttgaacttcgtctgcgccaattattaggccattgcactcaaaattcgaggagagaatttgctcatcgcaccacaggggatcgtgactagaatcgtccttgaagcaagtctcttgctttggtggtgcaaatcgatatccttcgggcacttccggatttaatttgataaaagatccggtggccaaacgacgcgtcacccactctatgtgcaccatctggcattttcgtgctataaaagcgttatcgccacactgatccacgtaagcggttcggattcccgcctcattgagtagcctaaaaaccagtccatttgtggtatttgagatagccgccttgccttgaagctcatgggccatgagtccatcaaaagctgtaatgcgatccttgctcaacagcagacataatcctggatgatccggtaggtcgtacaccttcttggtcttgccttcgatcaggatcttgcccaattggtagcctccaatggttgtgattgacatggttggcaaataaaaactgaatctaaattcactttaagagctactattataaacgaacttaagcaatttaatcacatttataaggtcataaaactaatcgtgtgataatcgagcgcttgataatcataaacgagcaacataagtttcttttatttctaatcagtataatcttgaaaattataaaagccaaaaatattggaaaattctatttcagagatattaacgtttatacagaggggccaataggctgacttcaggccaaactaacaaacgtggcttatgattgtgaaattatgaaaatatatacttaataatcctatacttacttgttcactaaagaacatacataattaggttagatattctatgataccgatttgtatttttttatttataagtaaccgcaaaacgtataaaaagcgagtgattatgagtgtggtattccataggcatggagaacgatacaagaaagttggagcgcttagtggtcttcgactgcgacattggaacggacgacgcctgggctttggctctcctactgcgtggagaacaattgtccttggcgagtgggaggcggtacaagctgattgcgattacttgtgtacagggcaatacggatgtggtgaatggagcccagaacgccctaaaaatacttcgattattggaaaggcgtgatgtaagtttctagcaaataaaatttttaaattagggcacgactattttggccaaagatctttagagcttatattgattttccactactttatgcgtatcgcaggtgccagttttcaggggctgtgccaatcccattgtaactcggacatggttggacatttcccgcttccacggcactgacggccttaatgacattggcggctacccagatgtgagtgatctgcaggagcaactgcagcaggagcacgccgtgaatgccatgtatcggctagtgtgtcaatatccaaaacaagttgactttctactttgcgggccactaactaattttgccagctgcattaatctatatggcgatgattttttggacaaaatcggtggaatatttataatgggtggaaatatatatggtcgcggaaatatcatgaagtgtgcagagttcaattttatgatggatccggaggcggcgcatacaacattggagcgtttgaaggtgccagctgttattcttccctgggaacccagcattgatgacgacttcaatctgtcacttgactggcggctggatgtcttgggctctgtagaccatcccctagtcgagcttttgtccagggtggagcgatccatgttggtgccacgtgacataaagcattggattaatcccgatgccgctcttgcagcagcctatatcttcccaaaggcgatgattgccgagcagttggattaccatgccacagtggagttggccggagtccacacccgtggccagatggtactggatcatctgcgaggtcgccgtgtggatgctatccatgggaaaaagagcaatgtgcggatcataacacatctcaatagagaaccatttcgcactattatgtcctggacgggattccttccgggcgtagatatcacagagctctgcgagcaggaacaacgtaataatctttaagatacaattatttgctttttaaatgaaatgaagaataactttaattgttcttatgatttgtcttggcacattggatcgatcttaagtttacgaatgtaataaaaacatattagaatactttgtgtgaccccttttagaagtccgtttctgggctctgtggcctcggactctcaggttgcggttgatggtttggatgaaggtctctggttatcggaagcacagcttggacctgcggttgggtgaccaccacatcgtcggtgtctacagtgtctagacccctgtccgcctcctgtttgggaggattgaaggacttcaggttgcccaactggctgcgaacgtccgactcggagagcagatgcaatggtacgttcgctgggacggccaaccgcttgggactggtgctaccatcatctggcttacgtctgtctggtggaaagaccacttgtgcataggtgaccccactctcactgggctccacaatgctctgtgctccacccgatgaagtagtcaccgaactgggattcctgaataccgctgtctctgtccgtggttctggagcggcatctctgcgttgaatgggcgatgaggtggtggtggtggttactggacttcctccacgtggagcactgggcgacgttgtcgcatcctcatgcggaattggtgcgtacagagagggtgtgtaattattgtccgtcaccttgcagttgtaaagattgagtcctttggcgaatatgtatacgagtatgtcgaaaagcacactggccaggatcaatgaggctgtgagaatatcgaggatgttgccatgcttcggcgtttctcgcagcagacagcgctcgtagttgggtgcccagtaaacgcaggttgtacctaatcaaaagaaagtttatgtagcttagactatatttaagttcaatttttaaattccactcacgggtgacaatgtcgtagctgagatgcactggaacataggcgaaaaggcccacgatcattagttcaaagg

SEQ ID NO: 11333 - DNA, 1068 bp, DROSOPHILA
atggagaacgatacaagaaagttggagcgcttagtggtcttcgactgcgacattggaacggacgacgcctgggctttggctctcctactgcgtggagaacaattgtccttggcgagtgggaggcggtacaagctgattgcgattacttgtgtacagggcaatacggatgtggtgaatggagcccagaacgccctaaaaatacttcgattattggaaaggcgtgatgtgccagttttcaggggctgtgccaatcccattgtaactcggacatggttggacatttcccgcttccacggcactgacggccttaatgacattggcggctacccagatgtgagtgatctgcaggagcaactgcagcaggagcacgccgtgaatgccatgtatcggctagtgtgtcaatatccaaaacaagttgactttctactttgcgggccactaactaattttgccagctgcattaatctatatggcgatgattttttggacaaaatcggtggaatatttataatgggtggaaatatatatggtcgcggaaatatcatgaagtgtgcagagttcaattttatgatggatccggaggcggcgcatacaacattggagcgtttgaaggtgccagctgttattcttccctgggaacccagcattgatgacgacttcaatctgtcacttgactggcggctggatgtcttgggctctgtagaccatcccctagtcgagcttttgtccagggtggagcgatccatgttggtgccacgtgacataaagcattggattaatcccgatgccgctcttgcagcagcctatatcttcccaaaggcgatgattgccgagcagttggattaccatgccacagtggagttggccggagtccacacccgtggccagatggtactggatcatctgcgaggtcgccgtgtggatgctatccatgggaaaaagagcaatgtgcggatcataacacatctcaatagagaaccatttcgcactattatgtcctggacgggattccttccgggcgtagatatcacagagctctgcgagcaggaacaacgtaataatctttaa

SEQ ID NO: 11334 - protein, 355 aa, DROSOPHILA
MENDTRKLERLVVFDCDIGTDDAWALALLLRGEQLSLASGRRYKLIAITCVQGNTDVVNGAQNALKILRLLERRDVPVFRGCANPIVTRTWLDISRFHGTDGLNDIGGYPDVSDLQEQLQQEHAVNAMYRLVCQYPKQVDFLLCGPLTNFASCINLYGDDFLDKIGGIFIMGGNIYGRGNIMKCAEFNFMMDPEAAHTTLERLKVPAVILPWEPSIDDDFNLSLDWRLDVLGSVDHPLVELLSRVERSMLVPRDIKHWINPDAALAAAYIFPKAMIAEQLDYHATVELAGVHTRGQMVLDHLRGRRVDAIHGKKSNVRIITHLNREPFRTIMSWTGFLPGVDITELCEQEQRNNL

SEQ ID NO: 11335 - DNA, 6825 bp, DROSOPHILA
tctagaagtaagcgtagacctaagaccgatgatatacttatacacacccacaaagatacatttaccagcgcagaatcgtatttaagttttaatagttatcactgtccgtatggttagtctagtttagttcctttgtttcaatctatgtacctacagccataaatacaatcgtctccgattcacctatattattagtaacacacccaaaaatgttgtacctagcaggtgcgtatggatctggtgttatcagatcgatcagatacatcttcacccgcgcacatgcccgtcgcttatcgcgacacattgaaccagcttcaacgcagctcgcccacccggaatttgagttctttgactagttactaaacacagatacaaaaaaaaactacatgcatataaaactatatatataaagaaatctatagaatacgctaaataaaatcgatttcaagaaacatcaattgcattcttaatcatcaacaaaattctaagctattggaaaccattggtagtgtattgagaattgagcaacggctgacatcaccaggtgcatttaaattaagagaaagtaagcagaagaattaagcattcatgaaaactagtttcgcagaaaaactgcgtctcactagagaatattaaagctataaaattcattcatgtatgtatgttataccttaagaaaactttttagcacaattgtaaaagttaattactttttaactatattttagactccgctgaatcctccaccagatttgtagtagtagtaaccacttctatcatcaatgatataaattaaagtttgaaataataattccacatcctaattcattacctcaatataaaaaccagcgtcccttcgttttctcacttgttttatatatttttttgcttctttattttacattttacatatttatatcgcatttcgttttccacattggaaatatacaatatgtatgctcgaatttacattctcttagtgactaaatttgtttttcctcttgtttttgcattcggcttgcttgcttgcggctatcctttcatcccactgaaactaccctctttccgtcttcagttttcgttgacacatgttccacatagttacaattacaatttgctttgtcacgtttttgtttcgattgttttctttttgttttaactctgtcgcgcgtaattagcattttctcttttcagtttttatttgtttgtttttgttgaatttctcattcggtttattttatttccgtttcgtttatacgcctatatctgcttaaattagaaatcattaaattaatttaacacgtacttagattggattagattgttacagctacccgcccatcgcccggagcttttcaattgatgttctttcagttgtcgccggcgtggatcacttgaagttgagctccacgcaccgccttaacgttcgactttggggggctatataccacacccgattccgcttccttccaccgcagtcagccgcaaccgtagccacaacttcaaagtggacactcgcgcatccttaataatctccagatacattgccaccgtcaatgtggctgctgccgctggtcaacggcatggccaggagcggctccgactttgctactactcggtattgtacgtaacctaaacgtgcgtaatgcgcttgcaactgctgcaggtgcggaagctgatgcagcagaggtggttgtggctgcggctgggggcgacttcccggatgctgcaaacggcgtcgaagctggcgtcacatctcagctcattgggtctggtattgtggcatcgcagcactgtacatcatttggggggcaagtgatccgttcgctgcagcggccgcggatgctgcggcagccgtcacaccgggcaccacagttccgggcacgccccatgctacattcggcggcaccatgcggtatccagccgctgaaaattgtatgcaagctgtttaagccaaggtcacgattattcagcaactgagaaaagtaaacttacggactcctcccgcttgctgagcactggtagggtaggcgtagggatagtagccctgctgcatgtattgcgtctgcatctgggttgtgggataagtctgcagaaaagcacaaagttagggtcaatctttaggtcactgcgtatttaaagaatacaacacttaccgcaggtggataccagtagcccatctgctggtacgcgtatggatactgcgccgcaatctgctggggtgtcatcatttggccgggtatcgccgctcctgttgcggcggcgatctgttgctgcgtcatcatctgaccgggcatacccgctccagcggcaaccgcagcattggctgccgcaacggcggcaacattggcagaggctgctgccgcggcagcggcggcattgaggttattggccgagttatcgcctccgttctctttgccccagaagcactttaccaggtttccatgtacctcgctgttgtgcgtgtgctcgatggcgtgggcggctgcctccttggtaacaaacttgatgaacgagaagcccttgtccttgaagacccgcacgtcctggatgggaccaaactggacgaagtgcttgtgcatcaggtcgtcactgatgacattcggcgggaatccgccacagtatacggtggtgttggtggggctcgactggttatacacttcctcgaaggtgtggcgttgacttccctttacaccggacccattgcccggtccgccacccattccgcctccctggcctccgcccttggaaggctcgcgtggtggtggcagcttgcgcgtggaccagttggtgcgtatcgagcgcgagccaatccactggccgttcatcgcctggatggcgttctctgcctccgcctttttcacaaacgacacgaaggcgtaaccctttgacttcatggtgtgagggtcgcgcacaatgcgacagttggagatctctccgaatggggcgaaagcctcgcgcagtgtttctgtctcaatctcgggactgaggtcgcccacgaatatgtggtggtgcgaactgatgtctgtcttcggctgattgccgggactggtggcccagttgacctgcgaagagcattcgtttaataggtaataatcaattaagttctacataattaaaataacatgagggcttggtcgtggggaatgtgtgtgttgcaagagtgtagtttcgaacaaaatgaatgaaaatgaccgctgtccacttgataacttaagagaagctaatcagcttaccttgatttccttttcgaggaataggcgtttattcatggcggtcagagctgttgtggctgcctggtagttggaatattcgatgaaggcatatggatcgttgcccggttcccgaatgattttgcagcttttgacgggccccatggtgctgaagagggcaattagcaggtcctcggacactgagctatccaggttgcccacgtatagggtcttcggttgcgactcgtccatggctgtcggatgtcacgggactgtggcttttttgatctgattatacactaggctacagcgacaatctactgactctacactaaaaccggaattgcaactactgcacctggccgcattaatcggaaggggatgtatcaaaaatttgcagattaagttcctagctacgtacaaaatctaaagtgtctgctaattaaacaggtgtatttgcggcaatctaattggtgctagctgctaacaggaaactccaagagagatttgaatactttgattttctactactttcgacttactctcggcttggcttgatttttttggattatataaactttatatgctcaatctaggtaggttgatctatttgcttaacgctgaggttcgtcgtttattgctttattttgttcctaatctggcgcctaattgaaaatttcgttaaacatctatatgtatacgtataaatatatctgtcctaactaaacgctaatggagtgttttggaatatacgattagtcgcctaatatatatgtctataatcggttgacttcctttcctgggggcctgggatttggattcggggtttcttggtgtacactacttggtatttcagaattgctcgatccttcttcgatgatccggatgttgttgttgtgattataaatagttgtccgttccaatatacaggattgtataaatgtacatatgaatacttggttgcgactacttattcttgctcttgtacaaaaattagttagctaagttaaacagcgtgaaagttcgcaggctgagtgtacttttcgggtttcgaagctgacccctggaatcgttgctgctgtaaaagagagaggtaaatttgggttagttttgcgctgataaccggaagagtgggacaaggtctaatggcacatgatcggtgggccttaaaacaggcgcaaatgatatggatataaatcgactaccccgccccgcccccttttcgcatgatgggaacaaagaaggcggcaaagcagtgcagggacacgcacacacagacgcacgctcacacacactggcgcacacgaaaaacacggggagagtgagtgagctatcttcggagcgagagaggcgggtgggaaaggacaggggaaagagactgcctgtctttataacaaagcgaatggccaacaattgacaatagccattcattcgcaacaaatttgcgggccttgcaaaatgatttagtttataattaatatatttctgtattcacatttacaaatttttttttgggccactcacgcacagcacacagaaatgcacactcaggcacgccagcgagacgagggcgaaaggagaacgacgaaaatcgactagaagatgaatgaccgtcgataacaaaatgaggagaaagaaaaacagggaaaaggaagagaaagatgtgggaaattttgcgaaaccggcgggcgggtgacacacacggttgcattagattcgtgttcttcttcttcacactttgcgaaatcaaattttaatttgcatagaactaaacttgattttgattatttctgcggcggcggcgctagaaaatgtcagtcaaagtcacagaactgaagagacggcgaaaagggaatggcggggtggttttggttgctcatttgctgcttattttcttcgtctctttttcgcacacacactgacacattagcaccgacacgcacacacacacacgcagagagaggcgtcttgcgctggtctttttgtttgcgttttcctcacatgagtctccacttttcttttgcttttgcttttttccgcttttggctattgagtgtatttaaactaatgccaatataccaataccaagacgatttgaatgcgggacttttcatttgccttttcagcttgccgctatatgtacgtatatgtatgtatcttgttcgcttttgtgctgccatcttttaatgccgctcccccgccaccaacaaccgccacgcctccgccccgaccctgctgcctgacagcggtgccgaaaactgggcttaacaattatcgtccccgccgcactatagtgcattcgcttaatgtccattgttcagactcgaatttcgctgtcaaaattcgcactctcttcttttttctttaatgcgctctctgtgacgtggctgcgtttgtaaatttaccgcattttacttgctctgcactctgttcgcacacttcatttgacggtcaagtttagccgctaccggtttgtattaattttgcgaaactttcaaagttgttaggggctgcaaatgtacgttgaacgcgtcgctaaaattttaccttcgtcgtctaaaatgcgaactaattaatgagattttgtgtgcgagagccagggctgccaacttgctgagaaataaaaacgcaatggcggcaagatgggaaatgcaataaagagtatggacttgacaagatttttttataaaattacttacgtaggggtatttaatggaaattcagcgataatatgacaaggatcacacattaattcgcgactttaagttatttgaagcaacgttatcgaaaagggggcaaccctagggcaggcgataacgcttgcatcaccgctttctctctctaacacactcaccgcgggcgcaaatgcagcacaaagcagactagaaataacaatcgttatcgaaaaggtcgtcgaaatgggcataaatatttttataaacagtaaatatataatttcttgtggagatcacgttaaatgtgatgagctttacagtcggattgcggagaaaacagtgagtatgttatgtataattttcataagattttgcaatgtggcccttttttttacagaacctgcaaccaggggaatactacttagtcagcaatggcaagcgcttggagggagaaatttcatctggagatgttcactgcgttctccgccagctcggtggcaaaggaggatttggttccatgcttcgagccattggtgcgcaaattgaaaagacaaccaatcgcgaggcttgccgcgatctaagtggtcgccgtttgcgggatatcaacgaggagaagcgggtgcgcgcctggctggagaagcagggcgaacgggaacgggaggccgaggagcgtaaaaagcgaaaaatcgagaaactgctggccgtgcccaagcacgactttaaggacgataagtacgaggaagccagggctaatctgaccgagaaggtaaacgacgccttcgaggagggactcaagcaggccgaggagaacaaggagaaaggcgtcgaggaagcaacttccagtggcacaaagaggaaatcccccgccgtagacaagaccaaggcaaaaaagaagaaaaagggcacactctggatagacgatgacatctctggatccg

SEQ ID NO: 11336 - DNA, 3046 bp, DROSOPHILA
caagttggcagccctggctctcgcacacaaaatctcattaattagttcgcattttagacgacgaagcaacgattccaggggtcagcttcgaaacccgaaaagtacactcagcctgcgaactttcacgctgtttaacttagctaactaatttttgtacaagagcaagaataagtagtcgcaaccaagtattcatatgtacatttatacaatcctgtatattggaacggacaactatttataatcacaacaacaacatccggatcatcgaagaaggatcgagcaattctgaaataccaagtagtgtacaccaagaaaccccgaatccaaatcccaggcccccaggaaaggaagtcaaccgattatagacatatatattaggcgactaatcgtatattccaaaacactccattagcgtttagttaggacagatatatttatacgtatacatatagatgtttaacgaaattttcaattaggcgccagattaggaacaaaataaagcaataaacgacgaacctcagcgttaagcaaatagatcaacctacctagattgagcatataaagtttatataatccaaaaaaatcaagccaagccgagagtaagtcgaaagtagtagaaaatcaaagtattcaaatctctcttggagtttcctgttagcagctagcaccaattagattgccgcaaatacacctgtttaattagcagacactttagattttgtacgtagctaggaacttaatctgcaaatttttgatacatccccttccgattaatgcggccaggtgcagtagttgcaattccggttttagtgtagagtcagtagattgtcgctgtagcctagtgtataatcagatcaaaaaagccacagtcccgtgacatccgacagccatggacgagtcgcaaccgaagaccctatacgtgggcaacctggatagctcagtgtccgaggacctgctaattgccctcttcagcaccatggggcccgtcaaaagctgcaaaatcattcgggaaccgggcaacgatccatatgccttcatcgaatattccaactaccaggcagccacaacagctctgaccgccatgaataaacgcctattcctcgaaaaggaaatcaaggtcaactgggccaccagtcccggcaatcagccgaagacagacatcagttcgcaccaccacatattcgtgggcgacctcagtcccgagattgagacagaaacactgcgcgaggctttcgccccattcggagagatctccaactgtcgcattgtgcgcgaccctcacaccatgaagtcaaagggttacgccttcgtgtcgtttgtgaaaaaggcggaggcagagaacgccatccaggcgatgaacggccagtggattggctcgcgctcgatacgcaccaactggtccacgcgcaagctgccaccaccacgcgagccttccaagggcggaggccagggaggcggaatgggtggcggaccgggcaatgggtccggtgtaaagggaagtcaacgccacaccttcgaggaagtgtataaccagtcgagccccaccaacaccaccgtatactgtggcggattcccgccgaatgtcatcagtgacgacctgatgcacaagcacttcgtccagtttggtcccatccaggacgtgcgggtcttcaaggacaagggcttctcgttcatcaagtttgttaccaaggaggcagccgcccacgccatcgagcacacgcacaacagcgaggtacatggaaacctggtaaagtgcttctggggcaaagagaacggaggcgataactcggccaataacctcaatgccgccgctgccgcggcagcagcctctgccaatgttgccgccgttgcggcagccaatgctgcggttgccgctggagcgggtatgcccggtcagatgatgacgcagcaacagatcgccgccgcaacaggagcggcgatacccggccaaatgatgacaccccagcagattgcggcgcagtatccatacgcgtaccagcagatgggctactggtatccacctgcgacttatcccacaacccagatgcagacgcaatacatgcagcagggctactatccctacgcctaccctaccagtgctcagcaagcgggaggagtcccggctggataccgcatggtgccgccgaatgtagcatggggcgtgcccggaactgtggtgcccggtgtgacggctgccgcagcatccgcggccgctgcagcgaacggatcacttgccccccaaatgatgtacagtgctgcgatgccacaataccagacccaatgagctgagatgtgacgccagcttcgacgccgtttgcagcatccgggaagtcgcccccagccgcagccacaaccacctctgctgcatcagcttccgcacctgcagcagttgcaagcgcattacgcacgtttaggttacgtacaataccgagtagtagcaaagtcggagccgctcctggccatgccgttgaccagcggcagcagccacattgacggtggcaatgtatctggagattattaaggatgcgcgagtgtccactttgaagttgtggctacggttgcggctgactgcggtggaaggaagcggaatcgggtgtggtatatagccccccaaagtcgaacgttaaggcggtgcgtggagctcaacttcaagtgatccacgccggcgacaactgaaagaacatcaattgaaaagctccgggcgatgggcgggtagctgtaacaatctaatccaatctaagtacgtgttaaattaatttaatgatttctaatttaagcagatataggcgtataaacgaaacggaaataaaataaaccgaatgagaaattcaacaaaaacaaacaaataaaaactgaaaagagaaaatgctaattacgcgcgacagagttaaaacaaaaagaaaacaatcgaaacaaaaacgtgacaaagcaaattgtaattgtaactatgtggaacatgtgtcaacgaaaactgaagacggaaagagggtagtttcagtgggatgaaaggatagccgcaagcaagcaagccgaatgcaaaaacaag

SEQ ID NO: 11337 - protein, 464 aa, DROSOPHILA; identical to SEQ ID NO: 11319

SEQ ID NO: 11338 - DNA, 3711 bp, DROSOPHILA
cgcaaaactgataagataactgaaatcttcacatagaaccgggccaacacctcaattatatttccctggtcaggttagcattttcccatttttgcgataatgctgctcgcttactcacccacaatcagtggattccaaccgaactgaaaggaagcctgtttggccgacacgcggaagtaggattcgcaggcgccctgtagggttcccgagatggccagtaccaggatgaaggtgcgcagtcgggcatatttctggcatccgggaccgcgacaccatcccagacccttgatgccacaatcgacgctgtctgtttggtggtgggaagggggtagaaattctatatcaagtatacgtaaaggggaaatcagggatttgggtcacccaccatcgggtatattgttggcattgacagctatctgcgataaatcggagttgcgcgtattatgcgccatattccgtattcgattcgatttcggattcgtttatgttcactacaccacttcaattcaattcactagcttgttgtattctctattgattacattagtcagtggccgtggtacgttggcatcttagccgcgttaacacagcactaacgtctattcgaaatgaggaacgggagcaaactgaggagccgcacctgtcgcggaaccgtaactctcttttttttaacttcggtttgataagcgcattcttatcttatcatatttttggactttttagcttttttcttaattgcaactttattgcttatgtatcgtgagcaacatgttgaagcaacatgtgtccaagcagtgctagttgaataagatcgtaattgaaatttcactagtggaataaagaactaagaacaattcttaccaaaataaagtatgccaaaaagtataaggcatttcttgtttatttattgaacctttaaaagtgtattaagcaatttacaacataagcaagccagatctttgcttcaaatataagtaatcaaagctactgggaattcaagatgtatttcatcgcaagtcttttgttgatagttcctatcgccttcggctcagccccagtgactagttcaccaccggttttggtctggggcgtcgatacgtaagtttaaacaatcaaaaatataagttatttgccataaaggcgctttcttacagccctaaagccaccagtatttttcaacctgtaacaacggcgcagtttcgaaagatcatacgaaatctgcagaagaataatatgatagttatttacttggcctcggaggtagattacaactcacttatttgagagcattcttatagattaaatatccttttattaaagcttgcggcgaaggatataaactgtgacttgtgctttccctatctcaccaagatccagccgatgaactactacagccaggtggaggagcctctaaatgctgtggagcgggtggctgaaaagacaggagatattatctggcacattccgaagatctcagaaatgggcagcttggaggcggaaatggagttgccatgccaaaaaggggagattcacgcattcagctttaacgatcgcaatttgcttgctcacggtaggttaaatatttaattatgaaataacatatattctatatagcatcattcaatttattatatatgtatatactgatttcagcaatttattaagaccttgtgagctattaaaaattttacaacttgaccgctgtatttataaaataaaattgattatttcagatgctgctatggcggtggcaacctatcagttcagcgactgcccggtggtgcatgtgtacaccgcttacacggaggaggacaaagccctccagcgtcgcaaatcccagaagacccaacacatgtccattaagaataaaatcgatggacagccgagcaactctgataccgaggtggaattacagccgcatcagatcagccaaagccaggctgataacatgaccgtgctgcgtaacgaaatgatcgttctaacctttcgcagcatactactggccaccaaggagcagcgctccgtgctatcccccttcaatcgaacggaggtgatgctcgcccagggaagagagccactgcaggtgggcctgctcaatagccatgacatctttggcggcattgtgatggtgctgaatacagaactaggtccgctaatcgtggagctaataccatcgcagggcaattggtaccttacgcgcatgatcttcatgaacaacacccactatccacgcgatctctacttctacggctttgagttcagtctttgctgcacggacatcactgtctactcctcggaggcgtcgcgtctaagtttctttgactttcatctggatatcctgtggcaaggtatgtagcaaggtatacttattttagtacataataagacatctgctgtttccttttcgttgcatacgttttggcgacctttgcagctttatattgcttcccatttatctcgaaaaaaaagccattgtagattatttgaattttcttgcagacaaggacaatggcttggacttgcaatacgaggtgaagccctgctggaactgttccatactcatgacaccgaccatggcgcagaccatcttcgtggtgctgatcattgctgcgatactgtggatgggcctggccattctactctcgattggtcagaatcaattgatgcaaaacgccaacgatcctgacctgcacatcaagacggacacttaggcgcacaactagaaactgtggtggctaccctcggccacgctctttgatgcacatgcggcacagtagtagcctacacattctgctaattcacttgcttacaattctaatcgcatggtgggcagcggctagcgacgagcccagggggttagagatcgtaataataatgtcattgtcgcgtttctctattgtctgttttgtattgtccataccgcctgatatcgcctgaactctccactgagccgctactctgcacgaagaaaacaaagagctacgatatgccgtgcaggtatatatatgtacatatatattctgagatactctctaatacatgtccaaaaatttcttttgcacgtgggccggcggcgagagaggcgattgtcccactccgcctttttatggcctgataaagctttatcgggcttcgattggcatcgagcggacacggggcacagtccctgggatttttaagttccatttctcagtttaactcgcgcctcgcttcagaacggatcggatcggatcggatcggccaacactatcttcgtccactcaactggccgctgcaacgggagcggttcctgcgaaaaaggaactcgagcggcaatttaattaatcgcataagtgccgattagattgtacggtgtacgagtgtgaccaccactatttggcaattgataatatgcgcaccatatagttagcagcacttcactcgcgtctggaaacgtacgtacacctgcctggtaatcgcttgattggcgctttcgggggcggcactagtagttcgacattggggtagctcaccatgcggaaggaacctcagctctacggatgcactcgatggatttcagggtccatttacaattcatttacaagggactcaagtcgtatctaaaggaggtttatgagtacttctcagtttggcttaaaacaagttcagagatctacaaatagtaaatatctttagaatttaatcaagaagaaggttttttgaatggttcat

SEQ ID NO: 11339 - DNA, 1281 bp, DROSOPHILA
atgtatttcatcgcaagtcttttgttgatagttcctatcgccttcggctcagccccagtgactagttcaccaccggttttggtctggggcgtcgatacccctaaagccaccagtatttttcaacctgtaacaacggcgcagtttcgaaagatcatacgaaatctgcagaagaataatatgatagttatttacttggcctcggagcttgcggcgaaggatataaactgtgacttgtgctttccctatctcaccaagatccagccgatgaactactacagccaggtggaggagcctctaaatgctgtggagcgggtggctgaaaagacaggagatattatctggcacattccgaagatctcagaaatgggcagcttggaggcggaaatggagttgccatgccaaaaaggggagattcacgcattcagctttaacgatcgcaatttgcttgctcacgatgctgctatggcggtggcaacctatcagttcagcgactgcccggtggtgcatgtgtacaccgcttacacggaggaggacaaagccctccagcgtcgcaaatcccagaagacccaacacatgtccattaagaataaaatcgatggacagccgagcaactctgataccgaggtggaattacagccgcatcagatcagccaaagccaggctgataacatgaccgtgctgcgtaacgaaatgatcgttctaacctttcgcagcatactactggccaccaaggagcagcgctccgtgctatcccccttcaatcgaacggaggtgatgctcgcccagggaagagagccactgcaggtgggcctgctcaatagccatgacatctttggcggcattgtgatggtgctgaatacagaactaggtccgctaatcgtggagctaataccatcgcagggcaattggtaccttacgcgcatgatcttcatgaacaacacccactatccacgcgatctctacttctacggctttgagttcagtctttgctgcacggacatcactgtctactcctcggaggcgtcgcgtctaagtttctttgactttcatctggatatcctgtggcaagacaaggacaatggcttggacttgcaatacgaggtgaagccctgctggaactgttccatactcatgacaccgaccatggcgcagaccatcttcgtggtgctgatcattgctgcgatactgtggatgggcctggccattctactctcgattggtcagaatcaattgatgcaaaacgccaacgatcctgacctgcacatcaagacggacacttag

SEQ ID NO: 11340 - protein, 426 aa, DROSOPHILA
MYFIASLLLIVPIAFGSAPVTSSPPVLVWGVDTPKATSIFQPVTTAQFRKIIRNLQKNNMIVIYLASELAAKDINCDLCFPYLTKIQPMNYYSQVEEPLNAVERVAEKTGDIIWHIPKISEMGSLEAEMELPCQKGEIHAFSFNDRNLLAHDAAMAVATYQFSDCPVVHVYTAYTEEDKALQRRKSQKTQHMSIKNKIDGQPSNSDTEVELQPHQISQSQADNMTVLRNEMIVLTFRSILLATKEQRSVLSPFNRTEVMLAQGREPLQVGLLNSHDIFGGIVMVLNTELGPLIVELIPSQGNWYLTRMIFMNNTHYPRDLYFYGFEFSLCCTDITVYSSEASRLSFFDFHLDILWQDKDNGLDLQYEVKPCWNCSILMTPTMAQTIFVVLIIAAILWMGLAILLSIGQNQLMQNANDPDLHIKTDT

SEQ ID NO: 11341 - DNA, 3217 bp, DROSOPHILA
gataaatctttacatacaactatgtatatttgttactacatctgtttgctccttgcaggttaaggattataaatgttaagatttagtcaaatttattgtaaaaaccaaacacaacaaaaaacaaaagaaaaacaaacacaaacaagaaacaaaacaaaacgcaaataatacaaataaaaatccagcaaaatggaaattatctacaaaagccaccgatccgaatatgggggatcatcgggtcaaggttgttggccaacttggctcattctaggccaatttgcgattctttatggggcccaactagtattgcccattagtatttcatattcacttcgtcaataatgatctacctattcatttggtgcgagacccaccctctgtgaatgcaaacaacctgttatccgtagctaatgactgtcattcttccaaatccgacgactgcccaaatgcgtcttcttaatttcacctggccgcctcgatcgaaaggtaaacaatgcgagcgtttccagcccgaaaactttctttcgaacgtttcggacaaagaaagtcttttcgtcattcaatcttacagcaccatcgatcgattcatgcagcccaaaatcgtgtcgcatatgtgtaaaaaacgagtccggttacgcgttaattgcataataccgcttggcgattggatggcgatggatgcgtgatattggggccaaaactcatatacataagtgcttttgaacaattcgaatttgattttgacaagttagttggtagacatatctaaggctatttcgcaaaatgctaaagtcaccgaagcaagcaaatagtgtttattttatattaataaacctacgttatatatccacggacctcaaatcggaagccattaattccgatttgaggtcccttccttaacgatcgtgtcacgctgccatctccaagtcgaggaaagagccgagattctgctgccgatccatgggtgtttctcaagcagcgtttaatgcggtttcaactgccgagccgatcagttcgatcaatcgttcgcccacttgagccacctagccaccccatatcgaagatgccccagtcgagcttctttgccaagagcgtgcccttcgagcagatcgacaagctggccatcagtggcggctactcctcgatcttcgccagcagcaagccgtcggtgccggtggtcgggaactgggagcagcgtttctgccgcctggcggacactttccagccggtcctggatcgggtgtacgactttgaggtgcgggacgacgacgtgtggattgtcacgcttccgaaatgcggcaccacctggatgcaggagctggcctggctggtgatcaatgagtgtgattttgagacggccaagagcgtggatctcacgcatcgatcgcccttccttgagtgcgttcccaagtcatcagcatagctaagtgaaggatactaatcaaccaacaatcctctccagattcaatggcgtggttcccaatgtgccacacgacaccatcgccgcagcgaatgccctaccatcgccgcgcctgatcaagtcccatctgcccgcctggatgctgccgaggcagatctggagcaagaggcccaagatcatctatgtgtaccgcaacccaaaggacgcggccatctcgtacttccaccactggcgtggaatggtgggctaccagggcaccaagtcggactttatgcactccttcatcgacggctatgtgaacttcacgccctgctggccgcacatcctggacttttggcagctgcgccacgagcccaacatcttcttcaccagctacgagcggatgaagggccagctgggccaggttatctcggaggtggcccagttcctggagcgcagtgtcagccaggagcagatgcagcagatgcagcgacacctctccttcgagagcatgcgcgacaatcccgcctgcaaccacgtcaaggagttcgagagcatgaaggcggctgccggcagggaggtggaggagttcaggtaagtctttggatcatgtgctctccaggagcaggctaatcagaccaatcttcctcgcaggttcgttcgacgcggagtcgtgggcagccacaaggatgagctcaccgccgacatcatacgggaattcgatctctggtccgatagtaatctgcgggacttcaaattgaacatggatgactttgccaactacagcaagtttgcgtccacgtaattctctctaattgtcttcgctaaagtgtttcttgggtaatcttcgttaatagtctttaagctgtgatgatatatgtacatatatgtttaataaataattgcttcccgtatactgtatgtaacttaattattttatgagcgaattgtttacgttcccgtggttggcactccattatctactatgaccgcattatgtggcatattatcattaccagcagttacagtctaataaacaagtaacattataaataccatatatatgtttatatctagtttttaagctactttctttgataaaaaaatacaaagctttccgctcatctgacctactttattaaaaagaagtgcatctacatatatcttggctgggcttgttttcattgctattatcaaccgaaatgaaagatgcgtcccattaactacagtgcaatcttatcatcgtagtgcgaagagagaactgagagaggcgaaactgagaaatttctcttaaatagttacccaaccagtaatatactccacttcattccccacaaaagctcagtacgctgtcgctatgaatcgggttcaggtcacgccgcggagctatcccacgaaccttatcgataaggactggggaaatcgaaagcttttttatacgaaagattcggagaactttcttcgcttagtccacgatatgaagctcagggatgacgatgtctggatcgtaactctaccgaaatgcggaaccacttggatgcaggaactgctctggttgctcctcaacaactgcgatttcgagggggcgttggccaaggatcaggagctgcgaactccgtttctcgagtgagtgtatccgtatacgtgggcatacatatgtatatacttaaacctccatgtcttcgtcaggttcggttactccgtttttcacgacccgaaccgctcattcgggcctatcgaggacctgaagtccccgcgactgataaaatcccacctttcgcttgccctcctcccatcaaaactttgggagggaaaaaa

SEQ ID NO: 11342 - DNA, 1093 bp, DROSOPHILA
ccgagccgatcagttcgatcaatcgttcgcccacttgagccacctagccaccccatatcgaagatgccccagtcgagcttctttgccaagagcgtgcccttcgagcagatcgacaagctggccatcagtggcggctactcctcgatcttcgccagcagcaagccgtcggtgccggtggtcgggaactgggagcagcgtttctgccgcctggcggacactttccagccggtcctggatcgggtgtacgactttgaggtgcgggacgacgacgtgtggattgtcacgcttccgaaatgcggcaccacctggatgcaggagctggcctggctggtgatcaatgagtgtgattttgagacggccaagagcgtggatctcacgcatcgatcgcccttccttgaattcaatggcgtggttcccaatgtgccacacgacaccatcgccgcagcgaatgccctaccatcgccgcgcctgatcaagtcccatctgcccgcctggatgctgccgaggcagatctggagcaagaggcccaagatcatctatgtgtaccgcaacccaaaggacgcggccatctcgtacttccaccactggcgtggaatggtgggctaccagggcaccaagtcggactttatgcactccttcatcgacggctatgtgaacttcacgccctgctggccgcacatcctggacttttggcagctgcgccacgagcccaacatcttcttcaccagctacgagcggatgaagggccagctgggccaggttatctcggaggtggcccagttcctggagcgcagtgtcagccaggagcagatgcagcagatgcagcgacacctctccttcgagagcatgcgcgacaatcccgcctgcaaccacgtcaaggagttcgagagcatgaaggcggctgccggcagggaggtggaggagttcaggttcgttcgacgcggagtcgtgggcagccacaaggatgagctcaccgccgacatcatacgggaattcgatctctggtccgatagtaatctgcgggacttcaaattgaacatggatgactttgccaactacagcaagtttgcgtccacgtaattctctctaattg

SEQ ID NO: 11343 - protein, 338 aa, DROSOPHILA
MPQSSFFAKSVPFEQIDKLAISGGYSSIFASSKPSVPVVGNWEQRFCRLADTFQPVLDRVYDFEVRDDDVWIVTLPKCGTTWMQELAWLVINECDFETAKSVDLTHRSPFLEFNGVVPNVPHDTIAAANALPSPRLIKSHLPAWMLPRQIWSKRPKIIYVYRNPKDAAISYFHHWRGMVGYQGTKSDFMHSFIDGYVNFTPCWPHILDFWQLRHEPNIFFTSYERMKGQLGQVISEVAQFLERSVSQEQMQQMQRHLSFESMRDNPACNHVKEFESMKAAAGREVEEFRFVRRGVVGSHKDELTADIIREFDLWSDSNLRDFKLNMDDFANYSKFAST

SEQ ID NO: 11344 - DNA, 6105 bp, DROSOPHILA
ccactatccacgcgatctctacttctacggctttgagttcagtctttgctgcacggacatcactgtctactcctcggaggcgtcgcgtctaagtttctttgactttcatctggatatcctgtggcaaggtatgtagcaaggtatacttattttagtacataataagacatctgctgtttccttttcgttgcatacgttttggcgacctttgcagctttatattgcttcccatttatctcgaaaaaaaagccattgtagattatttgaattttcttgcagacaaggacaatggcttggacttgcaatacgaggtgaagccctgctggaactgttccatactcatgacaccgaccatggcgcagaccatcttcgtggtgctgatcattgctgcgatactgtggatgggcctggccattctactctcgattggtcagaatcaattgatgcaaaacgccaacgatcctgacctgcacatcaagacggacacttaggcgcacaactagaaactgtggtggctaccctcggccacgctctttgatgcacatgcggcacagtagtagcctacacattctgctaattcacttgcttacaattctaatcgcatggtgggcagcggctagcgacgagcccagggggttagagatcgtaataataatgtcattgtcgcgtttctctattgtctgttttgtattgtccataccgcctgatatcgcctgaactctccactgagccgctactctgcacgaagaaaacaaagagctacgatatgccgtgcaggtatatatatgtacatatatattctgagatactctctaatacatgtccaaaaatttcttttgcacgtgggccggcggcgagagaggcgattgtcccactccgcctttttatggcctgataaagctttatcgggcttcgattggcatcgagcggacacggggcacagtccctgggatttttaagttccatttctcagtttaactcgcgcctcgcttcagaacggatcggatcggatcggatcggccaacactatcttcgtccactcaactggccgctgcaacgggagcggttcctgcgaaaaaggaactcgagcggcaatttaattaatcgcataagtgccgattagattgtacggtgtacgagtgtgaccaccactatttggcaattgataatatgcgcaccatatagttagcagcacttcactcgcgtctggaaacgtacgtacacctgcctggtaatcgcttgattggcgctttcgggggcggcactagtagttcgacattggggtagctcaccatgcggaaggaacctcagctctacggatgcactcgatggatttcagggtccatttacaattcatttacaagggactcaagtcgtatctaaaggaggtttatgagtacttctcagtttggcttaaaacaagttcagagatctacaaatagtaaatatctttagaatttaatcaagaagaaggttttttgaatggttcatattacacctggcgatgcaattaattaagatttatgtccattcttgggcccacaagaatagttttcataagctatgaaaaatcatgaccagtgggacgttacaacttgaatgcccataaccttttgtttattcaagtaatcaatcacgtcagttttcaaatcaaaatttttgataagccctatgcaccagacacatttggtgctgaaaacaaataaaatagccatgaaatagactgagtcacaataagatacccttttaattcggtgtgatgataagcaacgaattacattacggaacatactacaattctaacatcagttggttgtagcccatcggtctgagttcattaaactgatttcagctacctgtaaaaacgaacattttttcgtaattatgattgattgacaagtagcgataattggaagtacatagtttgcaggtccttttcgccttggccatcttaatctttataaaaatttagtgattattgtgatttggccaataagaagagatggtggtcatcgttatgcggtaaatatagctgtttataaaagctacccccgaccatatagatatcgtatatttggtatatttggcaaaggaactccggtttatctaatcgcctcggcctagacccaatgtgatcttgagtagacgccattatcgacacttaatcagtaccgcgaattaccctatcaacttcttttatatgccctaaacgatatttgatggtttctcgatccggagagtcatgattaccggagttatttgtaattggcccgtagcgtgatgaaattgaatctccgcataggaacccttttccaggtggccctaatgcattctgatttacaagagtccagtgtcccttgcagattgtttgctatcatcaccaatcactccactggctatcaggaagagccgtgtccgcaatcttatcgcccacaatcgatggtgtgctgattcccacagactagacagtagcatcccgcagtcggtggcggtacggtatcgaagatggcggaagtgaagcgtcgggacccaaaccgcccgcccggacactacttgtgcggcatggccaactggcatccgccctggctgcagaagtacgccaccaccaagatgttcatgggcgtctacgggctgctcggcaccattcaggcgatgtcctacatgtacttcatcgtcactctaaccacgctggaaaagcgcttcaagattcccagccaaacgacaggtaatattggaaatttataagataatatatggcaacaaacagtcttaatagaagtgatcttattgtaaccccatattttattttgattacattgaatcttgtaatttttataggcataattctaagcggcaatgaaatctcgcagatcatgctctcgcttatcctctcctacatcggtggtcagcggaatcgtccccgttggattgcctggggcattgtcttctgcggcctgtcctgctacatactcgtcctgcctcatttcatctacggagctggtcacgaggtgctgcagttcaccaaggagtaccaggatagtctattgaatgggactactggctcggatcactcctttcaagtgggttatctgcgccatcatcaagtacgatcacaatttaatatcctatttatatttagaatatcagctcagtgaagaccgagcgactctgtggagtggacaaaaccgaggatgactgtgacgatctgttctcctatgtgccacttgtgctcatctttctctcgcagttcgttctgggcgtgggcaacaccttgtactactccctgggacagacctacctcgacgacaacaccaagaagacgaacactccgctcatgctggcggtggccatggcactcaggatgattggaccagtcgtgggattctttttcggtttcatatcgcttaacaccttcatcgatccaaccaagacgccgttgatcgacagcaaggacccccgctggctaggtgcctggtggctcggctgggtgatcctgggcaccctcatgtgcctcttctccggtcttatcggactgtttcccaagcaattgcccaaagtaaacgcatcaaggacaaactcccatttgccgttggcactccgtcagacgaaggaggagcttaagcgggaggagaacctctcactgagcagccgcttttcctccaacgccgctctggataccattggagcagcggccggtgccaatgcagatctgcccaagctaaaggactttccacgtgcccttatgagactgctgcgcaacaagctgctgatcttcaacatcctctcggcggtcttttatatcctgggtgcttccggcttcatgacctttctcaccaagtacatggaggtgcagttccacaaggatgcgcaaagcgccacgattgtaaatgaccacttgatttcaattgcataattgtgattattattacaaatatttgtttaagatcgttggacccatatccatcatgggcatggtcgtgggtctgattggctcgggtatggtgctttccaaaaagaaacccagcgtcagcaaggtgctcatgtggaacgtgatcgttggtgggatctccatcttgggacagatctcatacgcttttctctactgcccgaataccttttccatgacgcaagcgggacagtaagtatcagtggaactagcaaattcttgaatatgatttatgatcttaatctttttaaaactacaggcttaacctgacgagcaactgcaacatgaactgctcctgcgagggcatcagttacacacccgtctgccacgaaccaacggacaccaccttcttctcggcctgtcatgcgggttgccgtggatacaatgccacatccaagttgtacgaggactgcagttgtgtggttaatgatccagcgccaaagagtgcggcacagcgtctgctgaatctattgcaacccactccggaacccgaactcgataccaccacgtactttgatgagtatctgagcggagtgccattgctggacgacaacggtgacttcgatgatcagctgctgtccaggaccaggagatccacttccgattcagtgatccgaccgggcatttgtaccaaaaactgcaactggagtttctgggccttttccattacctcgatgatcgttagttggttcggttcatccggtcgcgtgggcaacgtattggtcaactatcgagccgtggcccacgaggacaagtccttcgcccaggggctggcgctgatgatgattagccttctggccctcataccgggacccatcatattcggccgcctcatcgactccacgtgcctggtgtggacaaagacctgcaatggcaatggcaactgtcagttgtacgaccagacccgtttccgttactccctcaactttttatcctgccgtaagtttgattcaaaatatgtaataagataacatattctctaccttcttgctaacttccagtgctcacctttatgggactcctcttcgattacctcgtttggtactacggacgcaacctggacatttatggcgacaaggaggccaaggaggaggagcgtgccaacagaaaagaccagcccattactccgctcctggccaagaaatccgaacaggagtaaaatcaacaaaaaaaagaaagtgcaacccatccgtgatactcaattataaggagtagattcatatgaaacacgccagttccgagtatttcataacaataattcaaagcacattcctagagttagtttttgaaatcaaaatagagaaagattgggcaaagcctgtactccaacgccatatgtacaaatcttccgcttttcgataggaatttagctattgaactcgcgctgtcaaatgtcttctttcagtgtacaattgttaattacttttactttgtgctaagatcaattaaatataccatgcttagtttaacaacaaaaatgaaaagaatttatgtgtacgtatgtataaaaaaaaatgtttcaaataaaaatgtatgtttattaaaatattatgaggagtctaaatcataaatatttatattttatatatattaattttgccaaaatattcgattgcaatccataaaaccagaatataatttcttaggtttcattttttttttttttttgaaattttcttttcacttttattgataaaaaatgttcaaatttatgcagatcgtttgtttttcattccatacgtatatgtataataataatacactttaatttcgatttttgtataaatattcattcccgtttgtctatataatttctattattacgatcgctcttattcctcagtggcgtagttttcgacttccgttccgatttcgcgagtgatttgttgcttgagtgtcagtgttgggtgtctgtgtgaaacattttgaatgaatttccgcgttgtcaacaattatatcgcactcagtattattacaataataattaattaattaattatcattcgcgttcgattcgtaggaggctgcgagaagcgttaaaagctggcttaagtccttcatttactaggtccgcaatgtaagtattaatcagttaattaaattaacttagacttcaggggactgctcaacgtgcttaattgatattattttatttactt

SEQ ID NO: 11345 - DNA, 2486 bp, DROSOPHILA
atcggatcggatcggatcggccaacactatcttcgtccactcaactggccgctgcaacgggagcggttcctgcgaaaaaggaactcgagcggcaatttaattaatcgcataagtgccgattagattgtacggtgtacgagtgtgaccaccactatttggcaattgataatatgcgcaccatatagttagcagcacttcactcgcgtctggaaacattgtttgctatcatcaccaatcactccactggctatcaggaagagccgtgtccgcaatcttatcgcccacaatcgatggtgtgctgattcccacagactagacagtagcatcccgcagtcggtggcggtacggtatcgaagatggcggaagtgaagcgtcgggacccaaaccgcccgcccggacactacttgtgcggcatggccaactggcatccgccctggctgcagaagtacgccaccaccaagatgttcatgggcgtctacgggctgctcggcaccattcaggcgatgtcctacatgtacttcatcgtcactctaaccacgctggaaaagcgcttcaagattcccagccaaacgacaggcataattctaagcggcaatgaaatctcgcagatcatgctctcgcttatcctctcctacatcggtggtcagcggaatcgtccccgttggattgcctggggcattgtcttctgcggcctgtcctgctacatactcgtcctgcctcatttcatctacggagctggtcacgaggtgctgcagttcaccaaggagtaccaggatagtctattgaatgggactactggctcggatcactcctttcaattcgttctgggcgtgggcaacaccttgtactactccctgggacagacctacctcgacgacaacaccaagaagacgaacactccgctcatgctggcggtggccatggcactcaggatgattggaccagtcgtgggattctttttcggtttcatatcgcttaacaccttcatcgatccaaccaagacgccgttgatcgacagcaaggacccccgctggctaggtgcctggtggctcggctgggtgatcctgggcaccctcatgtgcctcttctccggtcttatcggactgtttcccaagcaattgcccaaagtaaacgcatcaaggacaaactcccatttgccgttggcactccgtcagacgaaggaggagcttaagcgggaggagaacctctcactgagcagccgcttttcctccaacgccgctctggataccattggagcagcggccggtgccaatgcagatctgcccaagctaaaggactttccacgtgcccttatgagactgctgcgcaacaagctgctgatcttcaacatcctctcggcggtcttttatatcctgggtgcttccggcttcatgacctttctcaccaagtacatggaggtgcagttccacaaggatgcgcaaagcgccacgattatcgttggacccatatccatcatgggcatggtcgtgggtctgattggctcgggtatggtgctttccaaaaagaaacccagcgtcagcaaggtgctcatgtggaacgtgatcgttggtgggatctccatcttgggacagatctcatacgcttttctctactgcccgaataccttttccatgacgcaagcgggacagcttaacctgacgagcaactgcaacatgaactgctcctgcgagggcatcagttacacacccgtctgccacgaaccaacggacaccaccttcttctcggcctgtcatgcgggttgccgtggatacaatgccacatccaagttgtacgaggactgcagttgtgtggttaatgatccagcgccaaagagtgcggcacagcgtctgctgaatctattgcaacccactccggaacccgaactcgataccaccacgtactttgatgagtatctgagcggagtgccattgctggacgacaacggtgacttcgatgatcagctgctgtccaggaccaggagatccacttccgattcagtgatccgaccgggcatttgtaccaaaaactgcaactggagtttctgggccttttccattacctcgatgatcgttagttggttcggttcatccggtcgcgtgggcaacgtattggtcaactatcgagccgtggcccacgaggacaagtccttcgcccaggggctggcgctgatgatgattagccttctggccctcataccgggacccatcatattcggccgcctcatcgactccacgtgcctggtgtggacaaagacctgcaatggcaatggcaactgtcagttgtacgaccagacccgtttccgttactccctcaactttttatcctgcctgctcacctttatgggactcctcttcgattacctcgtttggtactacggacgcaacctggacatttatggcgacaaggaggccaaggaggaggagcgtgccaacagaaaagaccagcccattactccgctcctggccaagaaatccgaacaggagtaa

SEQ ID NO: 11346 - protein, 709 aa, DROSOPHILA
MAEVKRRDPNRPPGHYLCGMANWHPPWLQKYATTKMFMGVYGLLGTIQAMSYMYFIVTLTTLEKRFKIPSQTTGIILSGNEISQIMLSLILSYIGGQRNRPRWIAWGIVFCGLSCYILVLPHFIYGAGHEVLQFTKEYQDSLLNGTTGSDHSFQFVLGVGNTLYYSLGQTYLDDNTKKTNTPLMLAVAMALRMIGPVVGFFFGFISLNTFIDPTKTPLIDSKDPRWLGAWWLGWVILGTLMCLFSGLIGLFPKQLPKVNASRTNSHLPLALRQTKEELKREENLSLSSRFSSNAALDTIGAAAGANADLPKLKDFPRALMRLLRNKLLIFNILSAVFYILGASGFMTFLTKYMEVQFHKDAQSATIIVGPISIMGMVVGLIGSGMVLSKKKPSVSKVLMWNVIVGGISILGQISYAFLYCPNTFSMTQAGQLNLTSNCNMNCSCEGISYTPVCHEPTDTTFFSACHAGCRGYNATSKLYEDCSCVVNDPAPKSAAQRLLNLLQPTPEPELDTTTYFDEYLSGVPLLDDNGDFDDQLLSRTRRSTSDSVIRPGICTKNCNWSFWAFSITSMIVSWFGSSGRVGNVLVNYRAVAHEDKSFAQGLALMMISLLALIPGPIIFGRLIDSTCLVWTKTCNGNGNCQLYDQTRFRYSLNFLSCLLTFMGLLFDYLVWYYGRNLDIYGDKEAKEEERANRKDQPITPLLAKKSEQE

SEQ ID NO: 11347 - DNA, 4223 bp, DROSOPHILA
ggtgttcaaaacaatagcatctttatttcaagatgtgctgtgcaatagtctttgctttcaataaataattgtatttctaatatgattttactgattttactcgtattaaagtttaacaaataaaaagcacacacctcggtttttatttcattctctctgcatcgagctaccactgtatgtccaatttctaattggtgtgcaaacaaagccatctttgagttaagaagcaacaaaagtttgaaaccttctccaagtgactcctttatggaatataaaaaatcagtgctattgctttggtcaccactgttttgtatgcaagcaaaacttcggttgattcactgtgccgcatacacacgcacacacgcaaagttcacccgcatatacacacctatacacatgacgttgaagacgaatccattctggacactcttgttgaccagttggtcaggcaagctgtcgaatcccacgtgaccggactgcttcagggtgcggaggtgcacctccttcttgtcgacgaaatccacctcaacggacattttccaatagtcaagtcaaataatccaataatccgggcgcagagtttggatcaaaggcgtcgccagcgaatatgcaagtgtggccagatacgcggagcccaaaataccagcggctcaaagaagtgtgtggatatagatgaacaagaaaattataacttaacaaagaattaaaaaacaattatttaatgaattacatgtgccataatggcaaatagtgaaacgaaattgataatcaaacagtgaaatgcacttcatggattaagattttagtacacatcatttagcgtttcagtttttaataactaataataaaatgtcccattcatagatatttatgcataagttattaattaaatgtaaatagtttaaaaaattaaatgtcttaactgtttccgccatctggcatctctggttgcacacagaagcgatctggcaggtccgcattgctgatgtgtctacagctgtaaaaacttgcatgttaaacggaaagtcgaaagtttaagtcagtgaataaaatatatattaccacccactaacgtgctgagcaaacaggatgtcaaaggacgctaatcccaaggaggcgctcataaaggcggcttacgctgatgtgaataagttcggcaataaccaggagtttgacaaggctgtcaaggcagtgaatcgcagtaagtttttcagattaccgaggttataatccagaagatgactccctatgatctctcatagtcctaggcgtagcgcccgacgatcccaccgccctgcactgcaaggtagtctgcctggtgcagctttccaagttcgaggaggcctacaagtttattgagaaaaatcgactgtcctcgcttttctttgagaaggcctactgcgagtaccaacttaacaagcagcagcaagcgcttaagaccatagacgatgcgggtctgcagcccctgcctccgaaccttaaggagctccgaacccaggtcctgtaccgcttggagcgctacgatgagtgcctagactcctatcgcgacatcattaagaacaccagtgacgagtacgaggaagagcgtcggaccaatctcagcgccgtggccgccaacttggctgtggatcagaccaaggaggtgcccgaggtgccggaagacacctacgagcagtacttcaacagcgcgtgcatccaggctaatcggcagaagtatgctgaagccgagcgcaagttgcgcaccagcgagaagctctgtcttgaggatgagtgtgcctccgaggaggagatcattgaagaggtagacgtcattcgcgtccaactggcctatgtcctccaactgcagggcaagaccaaggaggcgtccagcatctacgcggactgcctgcgtcataagccaaaggacgcagccctggtggccgtggcaagcaacaacttggtggtggtcaataaggaccagaacgtcttcgattccaagaagaagatacgcgctgccctagccgacgcctgtgagtctaggctcacctcgcgccagaagcaggtcatagccctcaacaactgtctgctagcactttacactaatgccggcgaccaagtgcaacagcttagccaaaagctagctcagacctacccgcaggtggaattcgaggcgctgctcattcgctgcacccagctggccaaagatcgcaagcacaaggaggccatcgagcagctacaaaagttcgctgcagcccacaagtcgcacgaattcgtcagcaaatttgccatcatacaacttcagctgcttcaggtaagttgccataagtcgtaagtcgaaaatggaatcttattttttgtatttcgttgctttagggcaaccgcaaggatgcaattgaaacactgctgtcattgggcgaagccaagtacaagcctggcgttgtctccgctctagtatccctttatctaggcacggacaacaagacagcagcctctgcgctgctgaagtccgccgtcgactggtacaagaagaacgaggtgagcagtggtgatctgtcggacatgtggcgacaggcagccgagttccatttgcgtggtggcgcgtccgagacggccgctagctccctggaggaactacttaagctgaaccccaacgacaccaaggtcttggcccagttggtcatcgcctacgcccagtttcagcccaagagggctcttgagttaagcagaaagctgcccaaactggaaacgttgaccactgcttccgaaatcgacgccctagaggcggccaactgggtgatgtcagctaaggcggccaagaagactgccaataccaaggtcgaaccctcgccgagcacaccgctagagaaaaagaagaacaggaaccgtaaacgaaagggcaagctccccaagaactacaacgccgaagtggctcctgatccagagcgctggctgcccaagtacgagcgcacaggcttccgaaagaagcgaggtggcgctcgcggcaaagatgtcattaagggctcccagggcatggcctcaggagcagccgatcaatagtaagctcgttagatagtaaattgttaaaatggttctaattaaaatgtttctttacagcgacatgtccagccgcgtgaatctgaccaagaactcccccgccacacccgtttaccaggaaacagctccaggtccaaggcagcagcaccgcaaaggtggccacaaaaagaagaagggcggtcgcttctaaactgacacagatcacatgcctttatactttcgaacgctgattataaaaaccgcttttgcattttaccttattgtacaagtgtaaattgattggattttatttgttaatgttcataaaaaaatctatcttattcgtcattgtcgtcatcaccacctttaaccttcttgtcttcggaggaaggtggaggcgcgtcctccgtccgcgtgtcgtacgagtgataatgcaatgttcctatccagtcgagcatgttacgctgctcggcttccgtcttatagatctggctaaagatctccctctcgataaactcctggacttgcgcctcctgcgcctgccatgtcagcggattgtggatgccgtccttgccgtagcgatcgttgtagcgctcgtagtgcactgtgtccagcacgaggcccagtccaggggccatcggcaggtccagacgctcctccgtcagtgcccgctctaaagtggccgccgtcgtgttcccccttacaatggcaatggctagacccaccatcttgcgaatctggtgcagcataaagctctgacccttaaccttaagtgtgacaaattcgatgtcctggggactccggaatggctcgctgctcgtaaaggacatgatgaagcgcttggacgaaggatccagaaagcttctacaagggtagtaaacaaaatattagttggagcagaaatgaagtataaacctggcttatttacttcttgctggtgaagttgtggaagttcttcgtgccctcgtagagcttcagggtttctttaaccttctgcagcagctctggtgaaatccggaaggtgtcgtgcacgtcgtcgaccttttcctcaaacggagcaaaggccacggtgggcagtgtgtaggtgtaggtccgagcattgcattgatccttggcattgaagcccttagtcacgcgttctacgccaaacagacggatctgttgcggcagatcggcattgaaggcctccaggtccagctcctcagctgcag

SEQ ID NO: 11348 - DNA, 2042 bp, DROSOPHILA
taaaaacttgcatgttaaacggaaagtcgaaagtttaagtcagtgaataaaatatatattaccacccactaacgtgctgagcaaacaggatgtcaaaggacgctaatcccaaggaggcgctcataaaggcggcttacgctgatgtgaataagttcggcaataaccaggagtttgacaaggctgtcaaggcagtgaatcgcatcctaggcgtagcgcccgacgatcccaccgccctgcactgcaaggtagtctgcctggtgcagctttccaagttcgaggaggcctacaagtttattgagaaaaatcgactgtcctcgcttttctttgagaaggcctactgcgagtaccaacttaacaagcagcagcaagcgcttaagaccatagacgatgcgggtctgcagcccctgcctccgaaccttaaggagctccgaacccaggtcctgtaccgcttggagcgctacgatgagtgcctagactcctatcgcgacatcattaagaacaccagtgacgagtacgaggaagagcgtcggaccaatctcagcgccgtggccgccaacttggctgtggatcagaccaaggaggtgcccgaggtgccggaagacacctacgagcagtacttcaacagcgcgtgcatccaggctaatcggcagaagtatgctgaagccgagcgcaagttgcgcaccagcgagaagctctgtcttgaggatgagtgtgcctccgaggaggagatcattgaagaggtagacgtcattcgcgtccaactggcctatgtcctccaactgcagggcaagaccaaggaggcgtccagcatctacgcggactgcctgcgtcataagccaaaggacgcagccctggtggccgtggcaagcaacaacttggtggtggtcaataaggaccagaacgtcttcgattccaagaagaagatacgcgctgccctagccgacgcctgtgagtctaggctcacctcgcgccagaagcaggtcatagccctcaacaactgtctgctagcactttacactaatgccggcgaccaagtgcaacagcttagccaaaagctagctcagacctacccgcaggtggaattcgaggcgctgctcattcgctgcacccagctggccaaagatcgcaagcacaaggaggccatcgagcagctacaaaagttcgctgcagcccacaagtcgcacgaattcgtcagcaaatttgccatcatacaacttcagctgcttcagggcaaccgcaaggatgcaattgaaacactgctgtcattgggcgaagccaagtacaagcctggcgttgtctccgctctagtatccctttatctaggcacggacaacaagacagcagcctctgcgctgctgaagtccgccgtcgactggtacaagaagaacgaggtgagcagtggtgatctgtcggacatgtggcgacaggcagccgagttccatttgcgtggtggcgcgtccgagacggccgctagctccctggaggaactacttaagctgaaccccaacgacaccaaggtcttggcccagttggtcatcgcctacgcccagtttcagcccaagagggctcttgagttaagcagaaagctgcccaaactggaaacgttgaccactgcttccgaaatcgacgccctagaggcggccaactgggtgatgtcagctaaggcggccaagaagactgccaataccaaggtcgaaccctcgccgagcacaccgctagagaaaaagaagaacaggaaccgtaaacgaaagggcaagctccccaagaactacaacgccgaagtggctcctgatccagagcgctggctgcccaagtacgagcgcacaggcttccgaaagaagcgaggtggcgctcgcggcaaagatgtcattaagggctcccagggcatggcctcaggagcagccgatcaatacgacatgtccagccgcgtgaatctgaccaagaactcccccgccacacccgtttaccaggaaacagctccaggtccaaggcagcagcaccgcaaaggtggccacaaaaagaagaagggcggtcgcttctaa

SEQ ID NO: 11349 - protein, 650 aa, DROSOPHILA
MSKDANPKEALIKAAYADVNKFGNNQEFDKAVKAVNRILGVAPDDPTALHCKVVCLVQLSKFEEAYKFIEKNRLSSLFFEKAYCEYQLNKQQQALKTIDDAGLQPLPPNLKELRTQVLYRLERYDECLDSYRDIIKNTSDEYEEERRTNLSAVAANLAVDQTKEVPEVPEDTYEQYFNSACIQANRQKYAEAERKLRTSEKLCLEDECASEEEIIEEVDVIRVQLAYVLQLQGKTKEASSIYADCLRHKPKDAALVAVASNNLVVVNKDQNVFDSKKKIRAALADACESRLTSRQKQVIALNNCLLALYTNAGDQVQQLSQKLAQTYPQVEFEALLIRCTQLAKDRKHKEAIEQLQKFAAAHKSHEFVSKFAIIQLQLLQGNRKDAIETLLSLGEAKYKPGVVSALVSLYLGTDNKTAASALLKSAVDWYKKNEVSSGDLSDMWRQAAEFHLRGGASETAASSLEELLKLNPNDTKVLAQLVIAYAQFQPKRALELSRKLPKLETLTTASEIDALEAANWVMSAKAAKKTANTKVEPSPSTPLEKKKNRNRKRKGKLPKNYNAEVAPDPERWLPKYERTGFRKKRGGARGKDVIKGSQGMASGAADQYDMSSRVNLTKNSPATPVYQETAPGPRQQHRKGGHKKKKGGRF

SEQ ID NO: 11350 - DNA, 25988 bp, DROSOPHILA
ataaaactattagccaactacccaccaatccgacgtcgttgttgtgcttctccagcgccttcttgcaattggcgaaggtgtatccggttttcttcctcagcgccgccagggcactcttctccaggccaccggatccgccagagccggcataaagctgccgcgtggagtgaagtgcgcgtgtgaaaaacctttgtagcagcatttttccaaaaaatttccgaaatttactgggaggccaaaatgatttctagcgtgatttgtgtgcgaattgaattgttgctctttgcctgctgtcaagggcaactcgccggcttgtttgtttttccgttttccgacctgtcgctatgtagtagttgcccggaaaatcaattcattctaaacaacggaaaagcctgtgtgagatttgcatttgttttcaactccttcgtatgttcgcttcggttcaagaaaaattaatcgcgttgcggcgcgaataaatccaaagcgagtgtggtgcctcgataggtgaacgactggtaagcgtcgatagtttagttttcggcttttctgtgtgcttaattcgagcaattaattttgaaactgaaaattttgacaattttccgtgttgcacaattcggctgttagggatggcaaaaaagccggtagggcgcgtgtgcggagaacagctgttgcgaagcgactatcgatagtggcgacgctatcgttggccaaatgacgtttagtggatgttacaacctattaccggttacaaccgattcgaaatggattgaaaccaaatatttaaaacttaaacctaataaatagttttttttttaattctggcgcacgtagttattttcttaattaatattttagtgtttttttttactttaaatagtactttgattaataactcggcgggatacaatcgttttatgtttcaaaaacaattattgaaaacaattttcattttctgtagtcacattttgattcgaacgttgaaccgatttcaggcttcaacatgcagggcagacagaatccgaatcgggagttcagcatccccagcttcacgtccatatgcggcggtcgccgcctatgcgagaagtcgaagatgctgtacacgcgacccaagccggatgtgctgcagagcatcctgcagtcaaaggccaatccggagtacaagtcgcgtcgcctgtggtacgaactgaacatgccggaatgcgccagctccctgctggacggcaagatgaaatccgacctgccggacaacatactctgcgcgaagaaacagcagaagaaacgccagaagaagcgtgagagcggcgtggccaaggccaactacatgaccatgcgactggagcgggagcacttccgccgcaagctggtggagctcatcctgcacatggacgacgaccaggatcccgagctggccgcccagtgcgccgtaccctttcccgaccaggaggagcgcgagattctgcgatattactattacatcaagcatggcattgacaccattcacgtgtcgccgttgagcaagaagatcctcaagaggtgcgttccactgaacactttcaaatgtatctgcttttttgctaactgctttccgtctgcaggataaccgatcttgtgccaccactgctctacaagtggcagacggcactcaatgaaaacatagccgaagtccgggcggactacgtgttcgccatgaagaaggccgttgtggacttcgtcctgcggcacacggtcctcgatcgcctaaccaaggagggcgtgggtggcaaatacgacaccgccgagcggcgggaggtgcaatccatgacgaacttttggcgctatcggtgagtctccatgatgctaatgtcaaattcgataaaagtcttcgatttctattcgataaatggcaaatgaaacttttgatccgttaaaagtgtataatccaggcagaatatagaaacatttttcacgtttttcgttagctttttctatgcaaaaaaaaaaaagaaaaaaatacagcaatgcagatgaaattgcaacttctcttaagccaaatggattttgagaggcaaaatcagagtagcgtaattgatattgaaatgcatgcgttgtttggttcgacaaagttgaaaaaccaatgcaagcgaagggcgggaatttaaagttagaaacttccgagcgtgtgggaaattcaaattttttaattaaaataaattacacccgcaccaagtgccacgtaaattgtgcgcattgtaaaaagggaggcaggcggcaggcaggcaggcaaaaaaaaaaaaaaatgggtaaaagaaaaagttgctataattgaatgcgagtgtgttgtgtgtaacttgcctgtaaccgccagcaacgcatttggcgcaaaaaaagcgtgcaattgacatgcaattacgcccaaccaaactggatcacgcccccacatatggacttttatattcacggatgccttggctttattgcggattaaaaaaacgaaatgaattgccctttgagtcgaccgcgcgcgaaatcttatgaaaataactgacaaagttgtcttgccagggggggtggggggtgaaaggcgttaagaaaataaggaaaataacgaaaataacgaaagtcgtgcgacattattaaaagcttcttgcgattggggggaaaacgcgagaaatcgctttgcggcgtgccaaaaactttttaaccgcactttttgaactacaatgccgcggaaatggaaaagtggaaaaggctgtgtgtggaaatggaagcaacagaaagttaagtcctcctgtgtattggtttgacatttgatgagcaacagcatctccagcagctggagaagatttgggtggctcgacataaatttgcaaaaaggatatgcttaaaaatgaattgtacttgtttgtggcatcaacaagggagtttcgcgattttggggccaccatctcgttctgtctattgtggaaaacatccaacaacttgggttatctgctgcaaagttgaacaatggacccattagcgggcatgattgatctccaatttatcacggaagttatcactttgtagtatataattgggatgaatacgttgctgttcgctgcacttaatacatttgaaaatgttttagtttaaaggcgattttggtatttcaatctaccttcttcatcacgtcttttttggttccaaactgggtcgaaggagcatccatcgatgtacaggtccgcgtgaggtttgctaatttattgccttcgagcatttggcatcattaagaagggcctttggatgctttttgtgattcggggattcgatggttgggtggttaggtggttgcccgctgggtgctcctgtggctgggcggttgcggttgcctgcactgtttaatgggctgtgacggaatagctggagtgaaaagtttcccttggtctcgagataatttgcataaaaagacggtactaactgtggtcgccatcgcctcatctccatctttatacccatacccatacccatacccatggcatacaatttatcccgcagctacgacgagaaccgcaatgtcctgatgaagacgctcttttgcatacatcgaagtgtggccagcatcttggagctgtggagcatgaaatataaggataagtccctcatcgacagcaaggagttggccaaagtcgagagtcccttttcattattcacatttgtggtaagattaatttattgggcttatcgagtagttcatttttgaatatagtctttggttattaatatatttaatatatatctgcgtattttactccttatcagtacttgtgcggttcccatatcgataatggaaagactctgctggaggagagctggtatggtgagatacactcctcattgctgaaggctagcaaacgtggacagcttccggacattcggcgttttactctggttaaacgattctttaactgcgtggccgctttgatgactcaacaactggaggacatatgcatcaggagtctgaaggagtacgccgactttatatgcgattatggggtgagaattgtgaatggtaaacattaagaaaaagtcaaataatactcaaaatatcttatctagcactcgaatcccggatttgagatttctgtgatgctggccgacgaagacaccatacaattcaatcccagcttctcgaaagtccagagtgaattgcttcgtgtcatcgattcgatcatgctgagcatacaaatgctgccccgcatcgagagcaaactatataccgatctaatcgtctcgaagaagatcttcctcacacccacagtgcccgaaagtattgttcaggagacgaagaatcggatatgcgccatgttggaggagcagcgcatcggtccagagctgcgactgcaggactttgatccattcattgatctaatcaatggaagcgatgctgagcgggtgggaaacttcatggaaagtgatgccaccttcgaacagtatgcggatatggtgtacgagtacaaggagaaggaggatcgcattgccaaggaggtgtgggctgtcatccggatgggtttctacgagtttcacagggataagttcatcacacatctggagagcttgtgcaggcagttgcagttggatttgctggctagaatggtgaccgatcaacaggctaggatcactcgattgggcaaagagtacgatgccattgctaagaaggccctaactgtgcccaaggacacggccgaattgatgcaactgaaggcctatgtggttcatgccgaagagaatctagtgccagagatggaggcgagattgaaagtgaatatgagcgaaattctctggcttatggatcatactttgtactccccgctggagatcaagaacaacagtaactcctttcagtggtatctgaagcttccgtccattttcgagcaacatcgtgcgattattgccgagaaggtgatcgagtaccaggaactgctcaaaaaacgcatcgagctcttccgacgcgaactgcaaaattactacgaacaggtgcaaacgtacgacacgtggggcgacattaagcagctttctaggtacaagaagcgggctggggtgctggatcagagattagtgcaggccatggaaacgattgatcaaattaatgaagaggaaacgtcctatggctgggatctatcccagtatcccatgagaaagaaagcccatgaccagcttaagccgtataaaacacttttcgatgcaggacaggacttcatggacaagtgggacctgtggatgcattctcaagtgggctccttcgatcccgacgagatcgatggcgatgtgtccaacttctatcgcatcatccagaaactagataaacagatgggcgatcatcccattacgatgcagctaattcaggatgtcaaggcgcaaatcgaagccttccgcgagcacatgcccattataaatacgctgggcaatccaggcatgaaggcacgtcattgggagctggtatccgagattattggcttccccattaaggtgtcgcccgaactgacgctggagaagattatcgagtaccagctggacgagtatgtgcccaagttcgaggccatctcggagagcgccaccaaggagaacaatttggagagggcaatggccaagatggtcaacgagtgggaaggtgtagagttctccatttcgccatacaggtgagtagcatttacctttctgccaggtgggggatacggcctataattgaaatgccacccgcagggattccggcacattcaaactggctgccgtggatgacatccaaatactgctggacgatcaaatcatcaagacgcagacgatgaagagttcaccctacatcaaaccgttcgaggcggacattatgtaagtgaatcgatttgggtagtcatctgaaaaaatttaaggctttgacggattccgggaaagtttatttacttttatgtccaaaggcagaggaaaatttgccttccactcgtatttgctatttctcaaaaaacgacttcaaattcatttgtttaccgcagtagagtaataaggattcgggttgttacgtatttttgtttcacctctttgttgaaccgtcagtgtcagcggcagacgagccacacgtcgctaatctttgttgtccctttgcagcaagtgggaggccaagctcatgctgctccaggagatcctggacgagtggctgcgcgtgcaggccacctggatgtatctggagcccatcttcagcagtcctgacatacagcagcagatgccagaggagggccggcgtttcagtgccgtggataaggtgagtttgccacaactcacttcctttgacattgctgaaaaagaggaaaagtgggttgtagttaaattttgttgtttcgccacgaattttcattagattataatatttaagcaatgataattaatccctttattttacagatttggaaagagctaatgaagcaagtgtcgcaggatcccaaagttatggttgtggtgcaaatcgacaagatgaatgacaagctgaagaaggcgtacagtctgctggaggtaattcagaagggtctgaacgcctacctggagaagaaacgtctctacttcccaagattcttcttcctctccaacgacgaactactggagatcctgtcggagacaaaggatccgactcgtgtgcaaatacacttgaagaagtgtttcgaaggcattgccacgctaaattttaccgaggagctggacgtgacagcgatgagatcctccgagcgtgaggaagtcactttggtggacgttatctcgacctccaaggcacgcggacaggtggagaagtggctgctggaactagagatcgatatgaagaagagcgttcaccacaaagtgtcagaggcgttctacagttacttgaagatgttgcgtcatgtttgggtgctaacctggccgggccagtgcgttcagtccatctcgctcacgtactggactctggaaatcaccgagtgtttcgagagcgaggagcctaaggagaatctggccaagtatctgcagaaatgcgtcttgcagatcaacaagattgtggatttggtgcgtggcgaccttaatacccagaatcgtatcacattgggcgccctggtagtgttggatgtccatgcccgtgacgtcctggccgaaattgtggctaatcaagttgaagatctgcaagatttccagtggctatgtcaattgcgctactattgggaggataataatctggatacgaggatgataaactgctcgttgccgtatggctatgaatatttgggaaacaccccacgactggtggttactccactcacagatcgttgctatcgtaccctgttcgctgccttgaatctgcatttgggtggtgcgcctgaaggtcctgccggcactggcaaaacggagaccaccaaggatctggccaaggctgttgccaaacaatgtgtggtatttaattgttcggatggtttggattacctcgctttgggtaagttctttaaggggctggcatcttgcggtgcatggtcctgcttcgatgagttcaaccgaatcgatctggaggtgctctctgtggtggcacagcagatcttgaccattcagcgtggcatcaactcgggcagccccacgttggtcttcgaaggcaccactttgacactggatcctacttgtgctgtgttcattaccatgaatcctggttacgccggacgttctgagttgcccgataacctcaaggtaagactttagatttcaacttatcacttttatataactaacatattgtggcgttctaggctctcttccgttcggtggccatgatggtgccggattatgccctgatctcggagattgagctgtactcttatggtttcctgaccgccaaaccgctgtccgttaagattgtggccacatatcgcctgtgttccgagcagttgagtacacagtgccactacgattatggcatgagagccgtaaagtcggtgctgaaagcagccggtgctttgaaacttcgctatcgggatgagaacgaggatatcctggtgttgcgctccattaaggatgtaaatttgcccaagtttcttaaccaggatattcccctgttccagggcatcacctctgatctgtttcctggaacagttttgccggaagcggactacgtactattcaataaatgtacacagatggcttgtgaaagacaaaataagcagtgcactccatttgtgctggagaaggtgcaacaggtgcgtaattcagtcaattggacaatccattgaagatccaccacttatatcggtgttatgcctttagttgtatgagatgatagtggtgcggcatggtcttatgttggtgggttatccatttgggggcaagacaaccacatatcgcgtcctagcggaggccttggagtgtatggagaaaacggttcgttagtacatttcacgtttgatttggggaaacattaactattttaattctatttatgtctcaaggatggttccgaaaacaaagctatttacacggtgataaacccaaaggccattacaatgggtcagctgtatgggcaatttgatgcagtgtcccacgagtggagtgatggaatcctggcggtgaactatcgtatctttgctatatcagattcaccagatcggaagtggctcattttcgatggtccagttgatgcgatttggatcgaaaacatgaataccgtgctggatgacaataagaaattgtgtctgatgtccggtgagattatccagctatcaaataccacaaacttggtgtttgaacccatggacttggaggtggcctcgccagctacggtctcgcgctgtggaatgatctatctggagcccagttcgttgggttgggagcccttagtggcctcttggaagaatactcttcccgcggccttccatacggtcagcaagcaactgatatcgatgctcatctctcggttttgtcctattctcttgtttattctgcgcaaaagtctaaaggaaattgcacccacctcggatgcgaatctgatggtcagcctaatgaacttctttgagtgttttatagatgactttcgggatgagaagtatgtggctaatgtttccgacttggattttcgagcccaaacggagggaatattcctattctcgtgtatttggtcgcttggcggttcattggatgcggacagcagggagaagttcaatataatatttagagcattgatggagaagacattcccacagagtctatatgatacgtatggcgtgcccgaggatctttatgtggagtccttggccaagccattcatattcccaattcccaaacaaggatccgtgttcgattataggtatataaaggagggaaaaggcaaatggaaaccctggcaggatgatgttaactccgctccaccgattccacgagatatacctgtcaatcagataatcatccagaccaacgaaagtgtccgcatcggagctgttttagacttgcttaatcgtcacggaaagcccattatgttggtgggtccaaccggaactggcaaaagtgtctatgtgatcgattatatgctcaagaagatggacttatccttttacaaacccttgctgatcagcttttctgcgcagacatccgctaatcaaacgcaggacattatcatgtccaagctggacaagcgtcgcaaaggagtctttggtccacctctcaacagccgttttgtgatcttcgtggatgatgtctcgatgccgctgaaggagaactacggagcccagccaccaattgaactcttgcgaatgatgctcgatcacatgatgtggtacgatcgcaagaacatcgtgcccatgaagctaatcgacttgcagatgatcgtggcgatgggacctccatcgaccggcaacacggtgactcctcgtttccaacgcttcttcaacgtgatatccattgatgattttaacaatgatatattgaataccatcttcagtaagattgtgctgtggcatctggacacgaggtaagatgggtgtataaacaacaattgtctgtccgattaatgaattttaaacttcggtgtccgaagttctcgtcttaaaatatatcctttaatccattttccctcaactcaaaccaacccaggggcttttccaaggagttcgatccttgtattgacgagatcgtaggcgccaccctgaccatatacaatgacgccaaattgaatctgctccccacaccggctaaatcccactatctcttcaatctgcgcgatttctcgagggttatacagggtgtcctgctgtccgttcccgaagcaactgaagatgtcaactccatgaggcgactgtgggtgcacgaggtgttgagagtgtatggggatcgattggttgaagatgccgatcgcagctggctgtttgagaatatctgcagcacggtgaaatcgtgcttcaatacggacccctctcgcctcttcggtcgccttgtggagaaggacaaatccctgcaggagtccgatttccgtcagttgatctactgtgactttaccaatcccaaggcggataccaagaactatgtggaggtgcaggacctggaggagttgcgccgtgtggtggaggcatatctggtggagtacaacaacatgtcgaagaaacccatgaatctggtgcttttccgtttcgccatcgagcatttgtcgcgcatatgccgcatcataaagcagccgaggagtcatgctctactcatcggggttggtggctccggacgccagagcttgactcgattggcttcgcatatatgcgactatgagctgttccaggtggaaatcacgcgattgtatgggccgtacgagtaccacgaggacatcaaggcgatcctacgcaaaattggggcatccgagatgcacggcgttttcctctttacggacgttcaggtggggaaccgcaattggcaaatccgactgtgtcctgggctttccttggtctcgctaactcttttagactcttacagatcaaagatgaatccttcctggaggacattagcaatttactgaactccggtgaggtgcccaatctcttcaccaacgaggagaagatcgaggtgcaggagaagatggcccaaatcgacaagcagagagataaggccgtacagacggatggcagtccagtggcgctgtttaacttttttgtcacggtggggtcttctgacaaaatctacataacctttctattccacccattacttattttatctttgagaaaagttttcaaagctccaaaattagatctgtgttattggtgcaacgaaaactaacataatattgagtagttcttcatttccattgcgcaattctttatcattgtgactcacatcgactaataagttataatttttcctgctaatacagacttgtaaggatcagctacatattgtattggccatgtcccctattggagatgcgttgcgaaaccgcatacgaaaattcccctcgatcgtcaattgctgcactattgattggttccagtcctggccagaggatgcactactggccgtctcgacacgcttcctggccagcgaggatctcaccgccctggagcgtcgcacagccattgacatgtgcatggaattccacacgtcaactcaagagctttccgcaaagtttttctcaagactgcatcggtacaactatgtgacccccacttcgtatctggagttgatccagacctttaaggcactgctcagtcaaaagagaaagtgagtgtgaatgtggggggaggggtattatcatatattattcatgaaattcatattcgctttagcaacattacaaataatcggaatcgctacttgaccggcatttcccagctagacattgctgcccagcaagtcgctgtgatgcaggagcaactgatcgccttggagcccaaattgaaggaagcctcagagatcgtggctgaacaggtggccaaggtgacggccgatagcaaactggcggaggagcagcgtgaaattgtgaagctcgatgagagcgcggccaaggagcaggctgctgtagcccaagagatcaaggacgaatgcgacgccaagctgggagaagcgctgcccattctggaatctgctttggccgctttaaatactctaaccacagcggatattgcggtggtcaagaccatgaagagtccaccaattggtgtaaggattgtcatggaggcggtttgcatcctcaaggacgtgaagcccgataaggtgccgaatccaagtggcttgggcaccgtggaggactactggggtccctcgaagcgtgttctcagcgatatgaagttcctggacagtctgctcaatttcgacaaggataacattccggtcgaggtgatgaagaagttggcgcaacgcatactcagcaacgaagcctttgatcccgataagattaagagcgcgtccacggcttgcgaaggtctgtgccgttgggttattgcgctgaccaagtacgatgtggtggccaagattgtggcgcccaagaaattggctttggccgaggccgaggccacctataatgcggccatgaagacgctcaacgaaaaactggccatgttggccaaagtggaggccaacctggccgccatccagaagattctcgacgagcagctgcggcaatatgggtaagtctaacattgatttagttatgctagttatgtgtaagccactggttaacttacaccttttagcattttgctggcggagcacgaggcttgcaccaaaaagctccagcgagcacaggagctcatctctggcttgggtggcgaaaggacccgttggtctgagacggccaaaatgctgcaggccagctttaagagtgtaaccggcgacgttctcatctcatctggcgtggtttcctatctgggccccttcaccatcgactttcgggtggatcagattcgcaagtgggtgaccaagtgccttaatttcggcgtaacatgcacagctgatttccaattggccgtcgtcctcggcgaacctgtcgaaatacgattctggaacatatgcggtctgccaacggatgcgttctccattgagagtgcgattatgatgaagtgagtataaatatttgaataatttaaatttaaaacttttgatttacactcatcaatcataaagcgtaactttcaaggtgagcttgcttttggatagatatgtatttgaaaatctatagctaaaatttgtatccaagtgccactataaccacaagctatggcaacagctggcaagggccacttggtaaatcccccgtggtgatcgctaagccagctatcgcatcaattaaacaacctgacacggtaattatagtcctgcctcctgcacgtcagcggcacagaagttccgagtccacgaacggcttctgtatttctttttcgttttctaattacaaaacatgaaacgttagaattcacgcgtattaggaaaattaaagatacgcctcgtgcggacgcgggtggaggatgtgagaacggcaccggatgctgcacaggaccgcgaactggaacggaatcgggtgcgggggtgggggggattcgggagtggaggtttcgggaatgggtatgaaaacagtagcagtgggggtaggtgtttaggtggaaaagggggagggctgcatgcgcgcattaagcagcgtacccgcatgtggctaaaaggactcgttgccaggacacgccatctcggtggtggtggtggctgctgtgccagccaaaggtacaaagggcacaataaaccgagatggtatgcactgcaaaaaacgatactagatgcgtctttattttcattttattcaattcaatttgaaagaattaacacgttttattatatatcatttcatttgatcatttaattgagccaatagaaaagtttattactttttttatctccaatatctggcttttaaaagttatttttttccgtgtacagtggggagggggcagggaggctggcaggcagaattttcatgtttgatgcgtgtattacgcatctggtgagtttctcggaggtcagggaacgggccacatgccactcaacgacgctcctttcgatttaataaaggaaattcctggccgctatccacgaaagtgttcaaagtaatttggagcatgcccgaaaatacctgagggtccctgggtttcctcgaagggagtggcatatgcgggcagcaaggagggtaactccagcattcagcatccagaatctagattctagaatcgccttgtataagcaattgattaatgtgcgcccagagcggattaggtttaatttctatacagccggaggggtagctgcgatgctatgcgatggctttcaacgattgcacatccttggggatttgttctctagtttctgggcctttgtctatcccgtctgtctatatagacgaatttgtatttgcacttggcaaatatccggagagccaccctgttggctggaatatcctgttgtccttactattaacattcatttgcctaatatttcgggtgacacgtagcacatatggtgacctccgcaccattctcgcatcctttcgagcatcgtaaaatgcgatggctgtgtattgggtatcaggtgtatcagccatgttttccatttcggccagcgggtttttaggatactgtgaaacttgagggccgtgcctttgattaaataatgttaatttgaaaaaggcaaaacaatttgtagaagaacgtccattttgagaccctttgggtgcttgaattttaagtaatggtaaagagttgggggcgggcatgttttacgttaaatagttgcaaataagatgaatcgaattgagcttaatattaagtggtttcagcttgaaaaagaatgaatataagacaatataaacgattttgtagatcgctaaaagatttgcgcttttcattttgtcaccaaatctctatccaaatccccaaactccatttaccagactctcaaccggcttacaatgcaagttgtgttgcatttttaacagttttccaactatttgccgggaaattttcgcttttattttgggacagaaacttgtatcgcttccaatcccagctctttattcctccctggcgatgcgctttgaactttaaccgggtattcacatggacgaccaccgactaccaccgtgctcccacagactccatggcgtttctattgtattccgtgtcctggctggcacatcgcgtggaatgcgctgttcgaaaaaaaaattggtggcgcttttatttttgcttttggatttttggatacatgtgccgactgtggcgacggcgaaggcatattggtcttttgtttttccatcaaatatttttcattcatcaagttttcaatttacaaaaatgttcattcattcgcacgagcaatttgtattcggtgtgaatttgtcatgtgttggctgctcctgctgcaactttttcctgtttttcccgcttcttctctatttttccttgtgtcccgttttccacttccatgtatttttccactctggctgtgagttatcgcatcagttaaatgtgtatatgtatgtatgtatgtatgtaaccggcacacccaacagccgcaatcgaagtatacatacatgtatatttatttgaatcaggggcttagtcagcgaaatttatgcgctttatgtgaaatttggttataataacccttattgaaaactttagaactagaagatgaattcattcgttcaacaatattatataatatttaaaaaatctattctttataagtggaaaagaggagatccctttttccagggactctgcccaaagtccttttgtgatatagttctgtttgtggcttaacgttcgcatgatgtattggcatgattgaagccagaggttttgctcccatttcaaacccacaaagcgcacatataccaccgagtaatgcgagcagaaaatatatatacatatttctttagcattatttacgcttatgaattattgacgtaaatattgaatgtgtatttctgtggtattttattttttaatattccaactccaactaactgatgagcttgttgcggtgacaaattgtttgctttgtttcgcttaaagttcgtatgataagcaagctgattgaaatgatttgcagaaacgctcgtcgttggcccctgatgattgacccacaaggacaggcgaacaaatggatcaagaactatgagaagaacaacaaactctgcgtgattcggctcaatcaagcggattacacacgtgtcatggagaatgccatacagtttggtctgccggtgttattggaaaacattggcgaggaattggatcccgtcttggagtcggtgctccaaaagacgcttttcaagcagggcggagcgctctgcataaaactgggcgactctgttattgagtataatcatagcttcaggtcagtaccattttaagttgatagaaattgaaattgaagattttaccgagtaaattgtcttgttacagattctatatgacaactaaactgagaaatccacactatctgcccgaggtggcggttaaggttaccttgctgaactttatgatcaccactcagggattacaggatcaattgttgggcattacggtggctagggaacgacctgatttggaggcggagaagaataacctgatagtccagggtgccgataacaaacggatgttgaaggagactgaagaccagattctggaagtactctcatcggctgagaatattctggaggacgagactgccgttcagattctgagctcagccaaggcattggcgaatgatattagtgagaagcaggtcatcacagaggccaccgaaaagcagatcgatatcgcacgattaagttacgtgcctatagccgagcactcaactatattgttctttactataggtgagacattttattcattcattctgttctgctagtacaaccatgttttttttcacagtggaactggccaacatcgatcccatgtaccagtacagtctggtttggttcgtcaacctgtacatgtcatccattgataatacggagaaagtggacgacatagcggcgcgtttgttggatctgcgaaatcacttcacctacagcctctatgtcaacatttgtcgcagtctcttcgagcgtgtgagtgcccattggattaacgcaattatcgtccgattattcatccgctgtccagttacctggacctttagcctcgttagtcccgtaattgcgcataatctgataatgtgacatttgaagcgtggtcctttgcgtttcatttgctttgtggctgagcatcctgctcagcttgacttggcttggcttgacttgacttgactgctttaaaaataatatttaagcattattgctccacaactacacggtactgtgatgccacttcagcggacaatgcagttgaagcagttgtcgtaactgaaaactgtgtgcttactgtggatagacttcataaaattctcagggaaaaatatttgaacaaattaacatatatttatgaataattagcatcaaatcaaatttaaatcgagaaggaattttctccagtgatatcaccagttttcaatgtgtgtacgtttcttttcgattcgtttaaagccactgtgcagctgcttgaataatgttattacattgctggtgcaatcaaaggatgtgcctagccaaaggaagctggggcaaaagggaaatagtaatccaaacaagtttctagctagctttatgctgttttcagtcaattatgccatggcctttgcccgtcccttaacctttgccatcgcctcctgtggcgaaccttccatcaggtaacctttgatccccagcttttaattttcttgcgcacaaataaaaaaaaccaagtgaattgccatcgcagcagcttggcctcggaaatgctttgattttggcgggcaacctttccgtgtaacccatttaatgtgaaattgagcctctaagccctgaccctgaaagatcccaatcacattacatcggctttttgtcccttacccaattatacatttagagaaaactattagtacttctgacttccatgaaaatccattccttacattagaaatattattagttagataacattttaatttccgagtgtaacgaaatgttttccactttgaacacaggataagctgctgttttcgctcatattgaacatcaacatgatgaagcacgacaatcggattgacaatgccgaatggatgtttctgctgactggaggcgttggcttggagaatccgtataagaatccaaccacctggctgggcgtccagaattgggatgagctctgtcgcctgaccaatttgaccaattttaagggcctacgcgaggacttcaatgaaaattcggctcaatggaaaccattctttgattcgaagtcgccgcaggataataaggacataccaaagtcctgggacaaccgagtgagcgtatttcagaaacttttgctactccgcgtctttcggccggataaactggttccggctgtgttaaattttgtaagcggagaactgggtgaacgatttgtggacccgcctcaattcgatttgatggcttcgtttgctgactcccattgctgtgtgcccttgatatttatattgacccctggctcggatccgacggccacactcctaaagtttgccgaggatcagggcttcggcacgaatcgattgttctcgctgtccttgggtcagggtcagggccccattgccatgaagatgatagatgaaggcgtcaaaatgggtaattgggtggtgttgcaaaattgccatctggcagctagtttcatgcccttgctggagaagatctgcgagaacctcttgccagatgcaacgcatccagacttcaggctgtggctcacctcatatccggcggatcactttccggttgtggtcctgcagaatggcattaagatgaccaatgaaccgccaaagggcttgcgatccaacattctgcgctcgatgatcagtgatccgatcagcgatccggagtggtatgagtcctgcacacagccaaggatcttcaagcagctgatatactcgctgtgcttcttccatgcggttattcaggagagaagatactttggaccgatcggctggaatattccctacgagttcaacgaaactgatctcaggatatccctgatgcaactgaggatgttcctcaaccaatacgagactgttaactatgatgcgttgcgatatttgacgggcgagtgcaattacggaggacgagttacggatgactgggatcgtcgcacgctgaaaaccattctagataagttttattgtcccgctgttatagatttagagaccccatactatctagatgaaacgggtctgtactatgtgccggtgttcaaggaggtggatttgtatctaaacttcacgagagatctgccacagatctcggctcctgccattttcggattccatgccaacgcggacatcatgaaggaccaaaaggagacagacatgttactatcacacactctgctcacgcaggtgagtacaacaattttggtggtggagaaacagaattttggcttgtgtatagttttgctaattgttattctgaatgttgaatatttttgctttgtatttgcctgcttcgctttaaaaggaacgttgggtaagtcattttagagttaaacgaaatacatagaataatcggtacgcttttgttgttacactttgcccaggacctctatgatcgacgcgtaagtactggctagtcctaaatgctttaacatttcaaacagctactttaatattcccttgtttgacacgctgcgctttagaaattggagaaaaaacaaagggtttatgtagaaacgcttagtagacgctttccagaaaacctttccctacccacttatcccacctgtcctcccttccttgccctgtaccaaatgtccttgaaggatactagtgcctcctcagatgacagtggtggttccaaggcactaactcccgaagaggttgtcacaaatgtggcaaccgatattctggacaagttgccaaagctattcgaccgcgatgcggccctgctaaagtatcccactctctaccaccaaagcatgaacacggtgctcgttcaggagatggtgcgctttaatgtcctgctgaacacgatccgaactagccttatcacgctgcgaaagggaatcaagggtgagtaagccattttatttatgatacccttgcagatatcgtaatgatttttctatcgatatgccaaacaaaaatttcaactagctatataatgggtatctgatagtcgaagaactcgactactttttgtttttattttcatcaaaactttataaagtacccctatcgttcctactaatacatttcagataaatcattatacaattacaccgaaataaatcaaaatatacatttattttggcaatttgtttatgacagattgttcacttctaagattctcttttcagcacacatttttagtttttattcagattctggtacaatattatctatgttctcagcggttttgtccttaatttggatatggttcttgctcacggagccaatatatctttcctcaacttcatattgatcggttatggatttatttctaggccttttagaagaatgcgatcctttctcagatttaatcggttcgactgttgaatttctgacccccgacgaacgtacgggtgggataaaggactcccgttctggccagagcaaaagttcggatcccggttcgtcttcgagatccggtccgagttcggcatccagtccgagttcggcttccggtctgtttagaggctcaagattgaactcgactaccgagcgcatttccctagacgtttccttttcttggtctaaatcgtttgttgttgtgtttgtatcgttggttattatactactagtacccaaggaagtggtgggtattacattctcagaaactaattcagtaaccggctttaattcaactgaaggggagtctctagttttcgcttcaccaggagatggggtggttaagctttctaattttaatggagatgaatccagtggttttaaattctcttcttctggttgcttatcgtgcgattcagatgctgatgaaatcctcgtcctcaattccattgtcgacagaattttatgaaatgataccttcggcgagtctatatcagtccctgtaatttcagaaaactctgaagctggcaattcaaatttttcttcctcgtcattatctatcggaagttttgatacatcaacgttagaatttttttcttcctcactgggaagcattactctatagcccctgccgacaaatgatcccaattttgaggcatgcgaaacatcgagagtgcttctaagactgaacaaatcacttggtgtcgtcgttggaagtggcattggattgaatatttgagatcttagaaatatgtcgctgtcagatggtatttcacccgccaggggattatcaaagttttgtaaatttcttgtaatattgtcttctttgcgttttcttaatatgtttaacaactgttttttttcaaattctgatcctggctgtgaggtagcattttcggtatgaaagttttccatctcgcgtatattgtccatgtgatgaatgtaattatgagagacagtagggcagagctcgattagttgtgatggcctcacggctggaggattttcagacttgtcaaatatgcctgcgaacacgtcgtcaaatagatcattatagttttcgttaacaatacgctcattttcttgaagccaacgatcgccaggaactgcctgtcgtatgatctttcttatgatggcatgagcttcgcgccaggaagttttttgtggggtttcactttcgctgtcagtggacatcagatacaaatcgttgtcgattaggcgatctatgagatcactcgttaaagtacatcctatatcaaacggatctagttcattccacacctttgggaaaatcacatcctccaatacgtactgggcgatcagggaattctcgtagcgctgcagaatattgttcatattcggtgaaatcatgtcattcaacattattcgtagtggcacataggtaagggggttttggatcaacttaaagctctctagccatcgcaatatatccgcatcgatctttttggccaattcactcactgtctcgccagcaaggccatcggccatgccgtacatatcagagctcagaatgttggcaaaatacttattggagatctcattgttgaccacattgcaatgttggaaaagctcctcgtacaacaatctcaattcgttctccttctgtcgcagaccggcttcggcggcctcgcgtctccagcgttccttttgggccataatcgagaagaagtgaagccttcgcagctccgaaagtcgggtcatctcctccgagaggaactgcatcacccaacccacgtaggtgccctcataaatgttcaacatgtgctccatttcttcgcgcttcctgtcgttcttcaaatgcgatagtgtggtctctgagactttgttcgtccccggctttgcgtgtggtgaaaaggatccgtaagctcgcgatttacgatattcctcatcagaatcgctcctttcgtacaagtcagttagataggccagggttatttgggatgccgctctacccaattcgggttttcttcgccgtactagacattttggttcttctctctccgcattggcctgtgttcttaggcctttcagagattcgaagagcttttgtagattgtcttccttgcagaagttccgctcatattccttgtcatactttttgggcttggaccaatccttaagctttctaaacggacatttgaagtcggtattgttgattcgcttctctaagtcatcgattctcatatcgaaggctttttgtgctgttttggacacaaagttgcgacgcgccggatccacgccgtatcttaaaagcggagcgtagaactccgagctgggtgatcccaacgcgtacatgggactttgcttctcccaccttcgcggattcttcgtaagttggaactccattcggcgcattccccgttggaactcgatctcgttttttcgcaaacccgcctgacgtcgcttctcgattcgctcgcaggctgtttcgattcgagtctttgaagcggtgtgcatctccttctcccgcttatcaaacattttaatcacgatctggagacgcatcatctggcactcttgaatgtcctcctcacgctgtatccactgctcccattcaatggcctccaaaatctccttgagctctgtttttatcgccactttcctggcgtcttgaagtaggtttttgaagtgaatctttagggcatcactaaaggcccatcgtttcctggcgcgttccagaatctcaacttcatggagtcccggtcgatttgctactgggaatatagatggcagggaaaacagttccaaggtttcaacgctgtttgcttcaaaaatctccggcaaataagccattgtctgcgcagaggattctctaacaaatacgtatagttatattaaattataaattagtatttagttcacttggagtttacctgtaaagcgtctgcgtgatcttattcttaaacggtcgtgcgtccttgttcttagcaaagaaatcacatttgtgccttaaatcctttttcgtcactaccctggggctcatcttgacctcatgggtgttcactgtagtatcttgttcggtaagaaatcggtatcccggagctttgaactgacactcgctgtcggtgcgaggcaattttccaacattgcgctgtgctgggtcattctcacctagaaaaaggatcatcaaattattgaaagtaatacttgtgttataccttttcaatccaatttcaatttcttaacattaaatacctcctgtgatccgcagatctaccgagctgttgatcagacaagatgataggccacgttcagtaagattttcagatttggaagtgctctttttccgtttgatattatcctctttttgtctcggtgattgtaacctgtcctcctgaagaatcctaaacttaacatgcctatcgagtcgtgtattgtgtttggacattgtgtttttttttatatttttatattttgtataagtgtagtttttatgtgggttttgatgagtattgtgtcagcaaatgggtttcatatttaattaattttgaattctaatttcagtgggctactaagttaacttattcatattaagtattagtatgattgtttattaaatacttgtgtattattaaaaaattaacttttcaccaacaggtttggttgtaatgtctcctgctgttgaggccgtttacaagtccgtcctaatagccaaaatacctgcaatgtgggctggaaaatcgtacccaagtctaaagccattgggcagttatgtgaccgattttttgcgccgccttgagtttttgcaggtaagtgatatggaaagtacgcagcaatacaaaataaaaaaacatgtttttaacttttattgtagcactggtttgatcatggagctccttccaccttttggctatctggattttttttcactcaggcctttttaaccggtgcccagcagaactatgcgcgaaagtatgtcatatccatagatcttctggccttcgattacgaagttctcacggtggaagagccgcaaaggcagggattatcgggacccgaggatggcgtctttgtgtatggcattttcctagagggtgcacgatgggatcgcactggaaagtatctagccgagtcccggccaagggaactgtttgatacgatgccattgatttggctaaaaccgctcaagcgcgtcgatctgccggagcgtcataactatctgtgtcccatgtacaagactgccgaacgtcgaggagtattgtccaccactggtcatagtaccaactttgtggtggccatgttgctactctgcaatccgaatactccagtctcacattggattattcgcggcacggctttgttgtgccagctgagtttctagggattgtacattactttcgattgaactaaatatattttttaaggtctgcttgaggctcattaagtaagaaatattttgaagaggtgtcacttgaaaatcacttccccaaaaacatgcgagctaaataaatatattttaccactattattatttggtattattttcaataataatttttttttatgtatgcgtatgaaagtaacgaaaagctccgttgcccaggaaattgaaagatggaatttgaaaatttatctgaatttaaagacctgcgattctttggtggagtaaaccacgacctcttcggccatatcggtatgctcttcctcaaattcttcgccaattatggattctaagtcgtcagattcccttcccgaattttcagatacattctcttgttctggttctgcatcttcaactttttcctggtctacgttgatgaattcattgaaattgtccgatctaacttcttcgtctttactttcaaaggcctcctcttcggctgaaggcgaacgctgaataatcgaggaacctcgcagatcttttagattattgtcgtactcggtaatatcaacagtacttatgatggaacataattcaggctctggcaccggagacacactgttaaggagttccgcattttggagcacttcgtttttgatatagtcgtcaaataattcgtattcatttgcagacatcttcactttctccccagttctctccaactttttggttatcttatcttctttaatttttttaatgagcgataggaattgcattcgtagaatattagcattctccaatgactccgattgggacgactccaacttttccaaaggaactctacttggaatctcgtgagggaggaaggcatacgatttacttgcacaaaggtgcaaaagttcggtgccccgaactggttccggattttcgatgccaaataggatctgggcaaacacatcgtcaaacaggctgctaaaggtttcggtgacaatcctctcgt

SEQ ID NO: 11351 - DNA, 12033 bp, DROSOPHILA
atgcagggcagacagaatccgaatcgggagttcagcatccccagcttcacgtccatatgcggcggtcgccgcctatgcgagaagtcgaagatgctgtacacgcgacccaagccggatgtgctgcagagcatcctgcagtcaaaggccaatccggagtacaagtcgcgtcgcctgtggtacgaactgaacatgccggaatgcgccagctccctgctggacggcaagatgaaatccgacctgccggacaacatactctgcgcgaagaaacagcagaagaaacgccagaagaagcgtgagagcggcgtggccaaggccaactacatgaccatgcgactggagcgggagcacttccgccgcaagctggtggagctcatcctgcacatggacgacgaccaggatcccgagctggccgcccagtgcgccgtaccctttcccgaccaggaggagcgcgagattctgcgatattactattacatcaagcatggcattgacaccattcacgtgtcgccgttgagcaagaagatcctcaagaggataaccgatcttgtgccaccactgctctacaagtggcagacggcactcaatgaaaacatagccgaagtccgggcggactacgtgttcgccatgaagaaggccgttgtggacttcgtcctgcggcacacggtcctcgatcgcctaaccaaggagggcgtgggtggcaaatacgacaccgccgagcggcgggaggtgcaatccatgacgaacttttggcgctatcgctacgacgagaaccgcaatgtcctgatgaagacgctcttttgcatacatcgaagtgtggccagcatcttggagctgtggagcatgaaatataaggataagtccctcatcgacagcaaggagttggccaaagtcgagagtcccttttcattattcacatttgtgtacttgtgcggttcccatatcgataatggaaagactctgctggaggagagctggtatggtgagatacactcctcattgctgaaggctagcaaacgtggacagcttccggacattcggcgttttactctggttaaacgattctttaactgcgtggccgctttgatgactcaacaactggaggacatatgcatcaggagtctgaaggagtacgccgactttatatgcgattatgggcactcgaatcccggatttgagatttctgtgatgctggccgacgaagacaccatacaattcaatcccagcttctcgaaagtccagagtgaattgcttcgtgtcatcgattcgatcatgctgagcatacaaatgctgccccgcatcgagagcaaactatataccgatctaatcgtctcgaagaagatcttcctcacacccacagtgcccgaaagtattgttcaggagacgaagaatcggatatgcgccatgttggaggagcagcgcatcggtccagagctgcgactgcaggactttgatccattcattgatctaatcaatggaagcgatgctgagcgggtgggaaacttcatggaaagtgatgccaccttcgaacagtatgcggatatggtgtacgagtacaaggagaaggaggatcgcattgccaaggaggtgtgggctgtcatccggatgggtttctacgagtttcacagggataagttcatcacacatctggagagcttgtgcaggcagttgcagttggatttgctggctagaatggccctaactgtgcccaaggacacggccgaattgatgcaactgaaggcctatgtggttcatgccgaagagaatctagtgccagagatggaggcgagattgaaagtgaatatgagcgaaattctctggcttatggatcatactttgtactccccgctggagatcaagaacaacagtaactcctttcagtggtatctgaagcttccgtccattttcgagcaacatcgtgcgattattgccgagaaggtgatcgagtaccaggaactgctcaaaaaacgcatcgagctcttccgacgcgaactgcaaaattactacgaacaggtgcaaacgtacgacacgtggggcgacattaagcagctttctaggtacaagaagcgggctggggtgctggatcagagattagtgcaggccatggaaacgattgatcaaattaatgaagaggaaacgtcctatggctgggatctatcccagtatcccatgagaaagaaagcccatgaccagcttaagccgtataaaacacttttcgatgcaggacaggacttcatggacaagtgggacctgtggatgcattctcaagtgggctccttcgatcccgacgagatcgatggcgatgtgtccaacttctatcgcatcatccagaaactagataaacagatgggcgatcatcccattacgatgcagctaattcaggatgtcaaggcgcaaatcgaagccttccgcgagcacatgcccattataaatacgctgggcaatccaggcatgaaggcacgtcattgggagctggtatccgagattattggcttccccattaaggtgtcgcccgaactgacgctggagaagattatcgagtaccagctggacgagtatgtgcccaagttcgaggccatctcggagagcgccaccaaggagaacaatttggagagggcaatggccaagatggtcaacgagtgggaaggtgtagagttctccatttcgccatacagggattccggcacattcaaactggctgccgtggatgacatccaaatactgctggacgatcaaatcatcaagacgcagacgatgaagagttcaccctacatcaaaccgttcgaggcggacattatcaagtgggaggccaagctcatgctgctccaggagatcctggacgagtggctgcgcgtgcaggccacctggatgtatctggagcccatcttcagcagtcctgacatacagcagcagatgccagaggagggccggcgtttcagtgccgtggataagatttggaaagagctaatgaagcaagtgtcgcaggatcccaaagttatggttgtggtgcaaatcgacaagatgaatgacaagctgaagaaggcgtacagtctgctggaggtaattcagaagggtctgaacgcctacctggagaagaaacgtctctacttcccaagattcttcttcctctccaacgacgaactactggagatcctgtcggagacaaaggatccgactcgtgtgcaaatacacttgaagaagtgtttcgaaggcattgccacgctaaattttaccgaggagctggacgtgacagcgatgagatcctccgagcgtgaggaagtcactttggtggacgttatctcgacctccaaggcacgcggacaggtggagaagtggctgctggaactagagatcgatatgaagaagagcgttcaccacaaagtgtcagaggcgttctacagttacttgaagatgttgcgtcatgtttgggtgctaacctggccgggccagtgcgttcagtccatctcgctcacgtactggactctggaaatcaccgagtgtttcgagagcgaggagcctaaggagaatctggccaagtatctgcagaaatgcgtcttgcagatcaacaagattgtggatttggtgcgtggcgaccttaatacccagaatcgtatcacattgggcgccctggtagtgttggatgtccatgcccgtgacgtcctggccgaaattgtggctaatcaagttgaagatctgcaagatttccagtggctatgtcaattgcgctactattgggaggataataatctggatacgaggatgataaactgctcgttgccgtatggctatgaatatttgggaaacaccccacgactggtggttactccactcacagatcgttgctatcgtaccctgttcgctgccttgaatctgcatttgggtggtgcgcctgaaggtcctgccggcactggcaaaacggagaccaccaaggatctggccaaggctgttgccaaacaatgtgtggtatttaattgttcggatggtttggattacctcgctttgggtaagttctttaaggggctggcatcttgcggtgcatggtcctgcttcgatgagttcaaccgaatcgatctggaggtgctctctgtggtggcacagcagatcttgaccattcagcgtggcatcaactcgggcagccccacgttggtcttcgaaggcaccactttgacactggatcctacttgtgctgtgttcattaccatgaatcctggttacgccggacgttctgagttgcccgataacctcaaggctctcttccgttcggtggccatgatggtgccggattatgccctgatctcggagattgagctgtactcttatggtttcctgaccgccaaaccgctgtccgttaagattgtggccacatatcgcctgtgttccgagcagttgagtacacagtgccactacgattatggcatgagagccgtaaagtcggtgctgaaagcagccggtgctttgaaacttcgctatcgggatgagaacgaggatatcctggtgttgcgctccattaaggatgtaaatttgcccaagtttcttaaccaggatattcccctgttccagggcatcacctctgatctgtttcctggaacagttttgccggaagcggactacgtactattcaataaatgtacacagatggcttgtgaaagacaaaataagcagtgcactccatttgtgctggagaaggtgcaacagttgtatgagatgatagtggtgcggcatggtcttatgttggtgggttatccatttgggggcaagacaaccacatatcgcgtcctagcggaggccttggagtgtatggagaaaacggatggttccgaaaacaaagctatttacacggtgataaacccaaaggccattacaatgggtcagctgtatgggcaatttgatgcagtgtcccacgagtggagtgatggaatcctggcggtgaactatcgtatctttgctatatcagattcaccagatcggaagtggctcattttcgatggtccagttgatgcgatttggatcgaaaacatgaataccgtgctggatgacaataagaaattgtgtctgatgtccggtgagattatccagctatcaaataccacaaacttggtgtttgaacccatggacttggaggtggcctcgccagctacggtctcgcgctgtggaatgatctatctggagcccagttcgttgggttgggagcccttagtggcctcttggaagaatactcttcccgcggccttccatacggtcagcaagcaactgatatcgatgctcatctctcggttttgtcctattctcttgtttattctgcgcaaaagtctaaaggaaattgcacccacctcggatgcgaatctgatggtcagcctaatgaacttctttgagtgttttatagatgactttcgggatgagaagtatgtggctaatgtttccgacttggattttcgagcccaaacggagggaatattcctattctcgtgtatttggtcgcttggcggttcattggatgcggacagcagggagaagttcaatataatatttagagcattgatggagaagacattcccacagagtctatatgatacgtatggcgtgcccgaggatctttatgtggagtccttggccaagccattcatattcccaattcccaaacaaggatccgtgttcgattataggtatataaaggagggaaaaggcaaatggaaaccctggcaggatgatgttaactccgctccaccgattccacgagatatacctgtcaatcagataatcatccagaccaacgaaagtgtccgcatcggagctgttttagacttgcttaatcgtcacggaaagcccattatgttggtgggtccaaccggaactggcaaaagtgtctatgtgatcgattatatgctcaagaagatggacttatccttttacaaacccttgctgatcagcttttctgcgcagacatccgctaatcaaacgcaggacattatcatgtccaagctggacaagcgtcgcaaaggagtctttggtccacctctcaacagccgttttgtgatcttcgtggatgatgtctcgatgccgctgaaggagaactacggagcccagccaccaattgaactcttgcgaatgatgctcgatcacatgatgtggtacgatcgcaagaacatcgtgcccatgaagctaatcgacttgcagatgatcgtggcgatgggacctccatcgaccggcaacacggtgactcctcgtttccaacgcttcttcaacgtgatatccattgatgattttaacaatgatatattgaataccatcttcagtaagattgtgctgtggcatctggacacgaggggcttttccaaggagttcgatccttgtattgacgagatcgtaggcgccaccctgaccatatacaatgacgccaaattgaatctgctccccacaccggctaaatcccactatctcttcaatctgcgcgatttctcgagggttatacagggtgtcctgctgtccgttcccgaagcaactgaagatgtcaactccatgaggcgactgtgggtgcacgaggtgttgagagtgtatggggatcgattggttgaagatgccgatcgcagctggctgtttgagaatatctgcagcacggtgaaatcgtgcttcaatacggacccctctcgcctcttcggtcgccttgtggagaaggacaaatccctgcaggagtccgatttccgtcagttgatctactgtgactttaccaatcccaaggcggataccaagaactatgtggaggtgcaggacctggaggagttgcgccgtgtggtggaggcatatctggtggagtacaacaacatgtcgaagaaacccatgaatctggtgcttttccgtttcgccatcgagcatttgtcgcgcatatgccgcatcataaagcagccgaggagtcatgctctactcatcggggttggtggctccggacgccagagcttgactcgattggcttcgcatatatgcgactatgagctgttccaggtggaaatcacgcgattgtatgggccgtacgagtaccacgaggacatcaaggcgatcctacgcaaaattggggcatccgagatgcacggcgttttcctctttacggacgttcagatcaaagatgaatccttcctggaggacattagcaatttactgaactccggtgaggtgcccaatctcttcaccaacgaggagaagatcgaggtgcaggagaagatggcccaaatcgacaagcagagagataaggccgtacagacggatggcagtccagtggcgctgtttaacttttttgtcacgacttgtaaggatcagctacatattgtattggccatgtcccctattggagatgcgttgcgaaaccgcatacgaaaattcccctcgatcgtcaattgctgcactattgattggttccagtcctggccagaggatgcactactggccgtctcgacacgcttcctggccagcgaggatctcaccgccctggagcgtcgcacagccattgacatgtgcatggaattccacacgtcaactcaagagctttccgcaaagtttttctcaagactgcatcggtacaactatgtgacccccacttcgtatctggagttgatccagacctttaaggcactgctcagtcaaaagagaaacaacattacaaataatcggaatcgctacttgaccggcatttcccagctagacattgctgcccagcaagtcgctgtgatgcaggagcaactgatcgccttggagcccaaattgaaggaagcctcagagatcgtggctgaacaggtggccaaggtgacggccgatagcaaactggcggaggagcagcgtgaaattgtgaagctcgatgagagcgcggccaaggagcaggctgctgtagcccaagagatcaaggacgaatgcgacgccaagctgggagaagcgctgcccattctggaatctgctttggccgctttaaatactctaaccacagcggatattgcggtggtcaagaccatgaagagtccaccaattggtgtaaggattgtcatggaggcggtttgcatcctcaaggacgtgaagcccgataaggtgccgaatccaagtggcttgggcaccgtggaggactactggggtccctcgaagcgtgttctcagcgatatgaagttcctggacagtctgctcaatttcgacaaggataacattccggtcgaggtgatgaagaagttggcgcaacgcatactcagcaacgaagcctttgatcccgataagattaagagcgcgtccacggcttgcgaaggtctgtgccgttgggttattgcgctgaccaagtacgatgtggtggccaagattgtggcgcccaagaaattggctttggccgaggccgaggccacctataatgcggccatgaagacgctcaacgaaaaactggccatgttggccaaagtggaggccaacctggccgccatccagaagattctcgacgagcagctgcggcaatatggcattttgctggcggagcacgaggcttgcaccaaaaagctccagcgagcacaggagctcatctctggcttgggtggcgaaaggacccgttggtctgagacggccaaaatgctgcaggccagctttaagagtgtaaccggcgacgttctcatctcatctggcgtggtttcctatctgggccccttcaccatcgactttcgggtggatcagattcgcaagtgggtgaccaagtgccttaatttcggcgtaacatgcacagctgatttccaattggccgtcgtcctcggcgaacctgtcgaaatacgattctggaacatatgcggtctgccaacggatgcgttctccattgagattcgtatgataagcaagctgattgaaatgatttgcagaaacgctcgtcgttggcccctgatgattgacccacaaggacaggcgaacaaatggatcaagaactatgagaagaacaacaaactctgcgtgattcggctcaatcaagcggattacacacgtgtcatggagaatgccatacagtttggtctgccggtgttattggaaaacattggcgaggaattggatcccgtcttggagtcggtgctccaaaagacgcttttcaagcagggcggagcgctctgcataaaactgggcgactctgttattgagtataatcatagcttcagattctatatgacaactaaactgagaaatccacactatctgcccgaggtggcggttaaggttaccttgctgaactttatgatcaccactcagggattacaggatcaattgttgggcattacggtggctagggaacgacctgatttggaggcggagaagaataacctgatagtccagggtgccgataacaaacggatgttgaaggagactgaagaccagattctggaagtactctcatcggctgagaatattctggaggacgagactgccgttcagattctgagctcagccaaggcattggcgaatgatattagtgagaagcaggtcatcacagaggccaccgaaaagcagatcgatatcgcacgattaagttacgtgcctatagccgagcactcaactatattgttctttactatagtggaactggccaacatcgatcccatgtaccagtacagtctggtttggttcgtcaacctgtacatgtcatccattgataatacggagaaagtggacgacatagcggcgcgtttgttggatctgcgaaatcacttcacctacagcctctatgtcaacatttgtcgcagtctcttcgagcgtgataagctgctgttttcgctcatattgaacatcaacatgatgaagcacgacaatcggattgacaatgccgaatggatgtttctgctgactggaggcgttggcttggagaatccgtataagaatccaaccacctggctgggcgtccagaattgggatgagctctgtcgcctgaccaatttgaccaattttaagggcctacgcgaggacttcaatgaaaattcggctcaatggaaaccattctttgattcgaagtcgccgcaggataataaggacataccaaagtcctgggacaaccgagtgagcgtatttcagaaacttttgctactccgcgtctttcggccggataaactggttccggctgtgttaaattttgtaagcggagaactgggtgaacgatttgtggacccgcctcaattcgatttgatggcttcgtttgctgactcccattgctgtgtgcccttgatatttatattgacccctggctcggatccgacggccacactcctaaagtttgccgaggatcagggcttcggcacgaatcgattgttctcgctgtccttgggtcagggtcagggccccattgccatgaagatgatagatgaaggcgtcaaaatgggtaattgggtggtgttgcaaaattgccatctggcagctagtttcatgcccttgctggagaagatctgcgagaacctcttgccagatgcaacgcatccagacttcaggctgtggctcacctcatatccggcggatcactttccggttgtggtcctgcagaatggcattaagatgaccaatgaaccgccaaagggcttgcgatccaacattctgcgctcgatgatcagtgatccgatcagcgatccggagtggtatgagtcctgcacacagccaaggatcttcaagcagctgatatactcgctgtgcttcttccatgcggttattcaggagagaagatactttggaccgatcggctggaatattccctacgagttcaacgaaactgatctcaggatatccctgatgcaactgaggatgttcctcaaccaatacgagactgttaactatgatgcgttgcgatatttgacgggcgagtgcaattacggaggacgagttacggatgactgggatcgtcgcacgctgaaaaccattctagataagttttattgtcccgctgttatagatttagagaccccatactatctagatgaaacgggtctgtactatgtgccggtgttcaaggaggtggatttgtatctaaacttcacgagagatctgccacagatctcggctcctgccattttcggattccatgccaacgcggacatcatgaaggaccaaaaggagacagacatgttactatcacacactctgctcacgcaggatactagtgcctcctcagatgacagtggtggttccaaggcactaactcccgaagaggttgtcacaaatgtggcaaccgatattctggacaagttgccaaagctattcgaccgcgatgcggccctgctaaagtatcccactctctaccaccaaagcatgaacacggtgctcgttcaggagatggtgcgctttaatgtcctgctgaacacgatccgaactagccttatcacgctgcgaaagggaatcaagggtttggttgtaatgtctcctgctgttgaggccgtttacaagtccgtcctaatagccaaaatacctgcaatgtgggctggaaaatcgtacccaagtctaaagccattgggcagttatgtgaccgattttttgcgccgccttgagtttttgcagcactggtttgatcatggagctccttccaccttttggctatctggattttttttcactcaggcctttttaaccggtgcccagcagaactatgcgcgaaagtatgtcatatccatagatcttctggccttcgattacgaagttctcacggtggaagagccgcaaaggcagggattatcgggacccgaggatggcgtctttgtgtatggcattttcctagagggtgcacgatgggatcgcactggaaagtatctagccgagtcccggccaagggaactgtttgatacgatgccattgatttggctaaaaccgctcaagcgcgtcgatctgccggagcgtcataactatctgtgtcccatgtacaagactgccgaacgtcgaggagtattgtccaccactggtcatagtaccaactttgtggtggccatgttgctactctgcaatccgaatactccagtctcacattggattattcgcggcacggctttgttgtgccagctgagtttctag

SEQ ID NO: 11352 - protein, 4010 aa, DROSOPHILA
MQGRQNPNREFSIPSFTSICGGRRLCEKSKMLYTRPKPDVLQSILQSKANPEYKSRRLWYELNMPECASSLLDGKMKSDLPDNILCAKKQQKKRQKKRESGVAKANYMTMRLEREHFRRKLVELILHMDDDQDPELAAQCAVPFPDQEEREILRYYYYIKHGIDTIHVSPLSKKILKRITDLVPPLLYKWQTALNENIAEVRADYVFAMKKAVVDFVLRHTVLDRLTKEGVGGKYDTAERREVQSMTNFWRYRYDENRNVLMKTLFCIHRSVASILELWSMKYKDKSLIDSKELAKVESPFSLFTFVYLCGSHIDNGKTLLEESWYGEIHSSLLKASKRGQLPDIRRFTLVKRFFNCVAALMTQQLEDICIRSLKEYADFICDYGHSNPGFEISVMLADEDTIQFNPSFSKVQSELLRVIDSIMLSIQMLPRIESKLYTDLIVSKKIFLTPTVPESIVQETKNRICAMLEEQRIGPELRLQDFDPFIDLINGSDAERVGNFMESDATFEQYADMVYEYKEKEDRIAKEVWAVIRMGFYEFHRDKFITHLESLCRQLQLDLLARMALTVPKDTAELMQLKAYVVHAEENLVPEMEARLKVNMSEILWLMDHTLYSPLEIKNNSNSFQWYLKLPSIFEQHRAIIAEKVIEYQELLKKRIELFRRELQNYYEQVQTYDTWGDIKQLSRYKKRAGVLDQRLVQAMETIDQINEEETSYGWDLSQYPMRKKAHDQLKPYKTLFDAGQDFMDKWDLWMHSQVGSFDPDEIDGDVSNFYRIIQKLDKQMGDHPITMQLIQDVKAQIEAFREHMPIINTLGNPGMKARHWELVSEIIGFPIKVSPELTLEKIIEYQLDEYVPKFEAISESATKENNLERAMAKMVNEWEGVEFSISPYRDSGTFKLAAVDDIQILLDDQIIKTQTMKSSPYIKPFEADIIKWEAKLMLLQEILDEWLRVQATWMYLEPIFSSPDIQQQMPEEGRRFSAVDKIWKELMKQVSQDPKVMVVVQIDKMNDKLKKAYSLLEVIQKGLNAYLEKKRLYFPRFFFLSNDELLEILSETKDPTRVQIHLKKCFEGIATLNFTEELDVTAMRSSEREEVTLVDVISTSKARGQVEKWLLELEIDMKKSVHHKVSEAFYSYLKMLRHVWVLTWPGQCVQSISLTYWTLEITECFESEEPKENLAKYLQKCVLQINKIVDLVRGDLNTQNRITLGALVVLDVHARDVLAEIVANQVEDLQDFQWLCQLRYYWEDNNLDTRMINCSLPYGYEYLGNTPRLVVTPLTDRCYRTLFAALNLHLGGAPEGPAGTGKTETTKDLAKAVAKQCVVFNCSDGLDYLALGKFFKGLASCGAWSCFDEFNRIDLEVLSVVAQQILTIQRGINSGSPTLVFEGTTLTLDPTCAVFITMNPGYAGRSELPDNLKALFRSVAMMVPDYALISEIELYSYGFLTAKPLSVKIVATYRLCSEQLSTQCHYDYGMRAVKSVLKAAGALKLRYRDENEDILVLRSIKDVNLPKFLNQDIPLFQGITSDLFPGTVLPEADYVLFNKCTQMACERQNKQCTPFVLEKVQQLYEMIVVRHGLMLVGYPFGGKTTTYRVLAEALECMEKTDGSENKAIYTVINPKAITMGQLYGQFDAVSHEWSDGILAVNYRIFAISDSPDRKWLIFDGPVDAIWIENMNTVLDDNKKLCLMSGEIIQLSNTTNLVFEPMDLEVASPATVSRCGMIYLEPSSLGWEPLVASWKNTLPAAFHTVSKQLISMLISRFCPILLFILRKSLKEIAPTSDANLMVSLMNFFECFIDDFRDEKYVANVSDLDFRAQTEGIFLFSCIWSLGGSLDADSREKFNIIFRALMEKTFPQSLYDTYGVPEDLYVESLAKPFIFPIPKQGSVFDYRYIKEGKGKWKPWQDDVNSAPPIPRDIPVNQIIIQTNESVRIGAVLDLLNRHGKPIMLVGPTGTGKSVYVIDYMLKKMDLSFYKPLLISFSAQTSANQTQDIIMSKLDKRRKGVFGPPLNSRFVIFVDDVSMPLKENYGAQPPIELLRMMLDHMMWYDRKNIVPMKLIDLQMIVAMGPPSTGNTVTPRFQRFFNVISIDDFNNDILNTIFSKIVLWHLDTRGFSKEFDPCIDEIVGATLTIYNDAKLNLLPTPAKSHYLFNLRDFSRVIQGVLLSVPEATEDVNSMRRLWVHEVLRVYGDRLVEDADRSWLFENICSTVKSCFNTDPSRLFGRLVEKDKSLQESDFRQLIYCDFTNPKADTKNYVEVQDLEELRRVVEAYLVEYNNMSKKPMNLVLFRFAIEHLSRICRIIKQPRSHALLIGVGGSGRQSLTRLASHICDYELFQVEITRLYGPYEYHEDIKAILRKIGASEMHGVFLFTDVQIKDESFLEDISNLLNSGEVPNLFTNEEKIEVQEKMAQIDKQRDKAVQTDGSPVALFNFFVTTCKDQLHIVLAMSPIGDALRNRIRKFPSIVNCCTIDWFQSWPEDALLAVSTRFLASEDLTALERRTAIDMCMEFHTSTQELSAKFFSRLHRYNYVTPTSYLELIQTFKALLSQKRNNITNNRNRYLTGISQLDIAAQQVAVMQEQLIALEPKLKEASEIVAEQVAKVTADSKLAEEQREIVKLDESAAKEQAAVAQEIKDECDAKLGEALPILESALAALNTLTTADIAVVKTMKSPPIGVRIVMEAVCILKDVKPDKVPNPSGLGTVEDYWGPSKRVLSDMKFLDSLLNFDKDNIPVEVMKKLAQRILSNEAFDPDKIKSASTACEGLCRWVIALTKYDVVAKIVAPKKLALAEAEATYNAAMKTLNEKLAMLAKVEANLAAIQKILDEQLRQYGILLAEHEACTKKLQRAQELISGLGGERTRWSETAKMLQASFKSVTGDVLISSGVVSYLGPFTIDFRVDQIRKWVTKCLNFGVTCTADFQLAVVLGEPVEIRFWNICGLPTDAFSIEIRMISKLIEMICRNARRWPLMIDPQGQANKWIKNYEKNNKLCVIRLNQADYTRVMENAIQFGLPVLLENIGEELDPVLESVLQKTLFKQGGALCIKLGDSVIEYNHSFRFYMTTKLRNPHYLPEVAVKVTLLNFMITTQGLQDQLLGITVARERPDLEAEKNNLIVQGADNKRMLKETEDQILEVLSSAENILEDETAVQILSSAKALANDISEKQVITEATEKQIDIARLSYVPIAEHSTILFFTIVELANIDPMYQYSLVWFVNLYMSSIDNTEKVDDIAARLLDLRNHFTYSLYVNICRSLFERDKLLFSLILNINMMKHDNRIDNAEWMFLLTGGVGLENPYKNPTTWLGVQNWDELCRLTNLTNFKGLREDFNENSAQWKPFFDSKSPQDNKDIPKSWDNRVSVFQKLLLLRVFRPDKLVPAVLNFVSGELGERFVDPPQFDLMASFADSHCCVPLIFILTPGSDPTATLLKFAEDQGFGTNRLFSLSLGQGQGPIAMKMIDEGVKMGNWVVLQNCHLAASFMPLLEKICENLLPDATHPDFRLWLTSYPADHFPVVVLQNGIKMTNEPPKGLRSNILRSMISDPISDPEWYESCTQPRIFKQLIYSLCFFHAVIQERRYFGPIGWNIPYEFNETDLRISLMQLRMFLNQYETVNYDALRYLTGECNYGGRVTDDWDRRTLKTILDKFYCPAVIDLETPYYLDETGLYYVPVFKEVDLYLNFTRDLPQISAPAIFGFHANADIMKDQKETDMLLSHTLLTQDTSASSDDSGGSKALTPEEVVTNVATDILDKLPKLFDRDAALLKYPTLYHQSMNTVLVQEMVRFNVLLNTIRTSLITLRKGIKGLVVMSPAVEAVYKSVLIAKIPAMWAGKSYPSLKPLGSYVTDFLRRLEFLQHWFDHGAPSTFWLSGFFFTQAFLTGAQQNYARKYVISIDLLAFDYEVLTVEEPQRQGLSGPEDGVFVYGIFLEGARWDRTGKYLAESRPRELFDTMPLIWLKPLKRVDLPERHNYLCPMYKTAERRGVLSTTGHSTNFVVAMLLLCNPNTPVSHWIIRGTALLCQLSF

SEQ ID NO: 11353 - DNA, 3755 bp, DROSOPHILA
cacactcaccgcgggcgcaaatgcagcacaaagcagactagaaataacaatcgttatcgaaaaggtcgtcgaaatgggcataaatatttttataaacagtaaatatataatttcttgtggagatcacgttaaatgtgatgagctttacagtcggattgcggagaaaacagtgagtatgttatgtataattttcataagattttgcaatgtggcccttttttttacagaacctgcaaccaggggaatactacttagtcagcaatggcaagcgcttggagggagaaatttcatctggagatgttcactgcgttctccgccagctcggtggcaaaggaggatttggttccatgcttcgagccattggtgcgcaaattgaaaagacaaccaatcgcgaggcttgccgcgatctaagtggtcgccgtttgcgggatatcaacgaggagaagcgggtgcgcgcctggctggagaagcagggcgaacgggaacgggaggccgaggagcgtaaaaagcgaaaaatcgagaaactgctggccgtgcccaagcacgactttaaggacgataagtacgaggaagccagggctaatctgaccgagaaggtaaacgacgccttcgaggagggactcaagcaggccgaggagaacaaggagaaaggcgtcgaggaagcaacttccagtggcacaaagaggaaatcccccgccgtagacaagaccaaggcaaaaaagaagaaaaagggcacactctggatagacgatgacatctctggatccgactctgactctgacgacagcgaggaggagccaaaaacacagaaaaaagctatacaaaactagataaataacttttgaattaagtatgtaccaaagacgttcttatttcaaaatttacctgaaataaacataacaatataaatacttctcatttaaaatttgaaagatttagatttaatactatggggataattaagtaatttataaatatacatttaaaagagaaagaaaaatcacggtgacacaaactgtgaagaaacccaggccaatccccatttcaggttggttagcatgaatttcagtgccttggtccactgctcctccgagttaaactggattctgtaaggaaaccatcattattataggtaaaatctttaccatttctaaacctacttaatagaataggaatttcccgtggagggatcgatgatcttgcccttctccatcttgtagggcagcaggaactcggtgtcgcgcttctcgacctccttctggaactgggtaagacagtcgagaaaagctaccatggcagcatcaaacttggtgtcccagaaaaacttaaatccgccgctgccataaagcgggagctctcgattctcgccgagcacctcaacatacgaatgatttccaaagggtactacacgataccgctcgaaggtgagccctatcttacgagcaagcgcagagagcagaagcaccgtctggccccaagcggcgttgatctctgaccagtccacggatacagagggcaatcgacccagcctaaagttattaatggtaccgaaatgcccggcatgccagatgtgaaaggtgatgttgaatatgttggtgtcgcgcagtttgtccagctgctgtttcgagtaggcgatctgacactccagacttcgtttgtcatcctcggtgagcattagctcacgcctgtgcttggtatactcgcgccagtagctttcctcctgctcgtgcagctcctctcgctcctgttcctcctcggcaatggcatcatttagcgattgttcctcctttttgagctcttttagctccgacagaagctgttgctcgctgcgctttagttcgtcgagctccttgtccagggcctcaacgttgggtgctacacgctgttgctctagttcatccaaataagccttgtacacatcccactcgtcctcagcgatgcgcagttccctgtccatgatttccagcatggagtcggcacactcttcgcacagcggatggtcaatctcagagttggaggagaggcagtcaaacagctccgctttcagcttaaaagcagcactcattttcttgttgtccctgccatcggaaaccagcataaaaccagtgccatttatagagtccgtaagcctgtagggcggcacaaagtggtcgaagctgctggcgtcctgcgggtccaatgtattgccattgtctccgtagatgggcactgaaaaagtgatttattagactaatttccagagtgtatcacccatcatcacctacaagataactccgccattgcgtgcacgctaatcttctccagctgctcgtccaggacgatgggctgcaggcagcgctgacaggcgaaggacaccgcctgcttttccgcctcactcattgtcgttcctgtttgttgtccttcgatttttgcatacaattaaatctttcaccgagtgtaaaaacacaaataatccatcagctgtttgcaactgctaccagagttgccaccccctccgaaaaagagtgtggaaaaatggcgcagttaatcggacagtaaatcgtcaaccaacaacaacctgagacagtaaaaaagagagaaataacagaaaaccagttttaaacaataacattgcctaattgtgtccgccggagatgcttaagcgtgccgcgaagctgcaggccttgaccacaattcccgctgataagagagaactcaaggggttggcttttggtttgttttggtaagcgacagaacattagacggagtgccgtcgccagtgctgccaacctattttagctatagcaaatatttcatagtagcaaagaggtagaacccaaatacaatttttataaataatagtttatagttagcgaacggactaaaagagaaacctgatatcgaacgacttattatattttttgttaactcaattttaaacttactccagcgtaaaccatactttataaatagtttaccaaaaatgatagcacaagtgccagaaagctattcacttcatttttaatttgattaggtaaattgtgcgaaggaagtatttaaaaaaatgtgaaatgacgtactaagcaccccacatatagactaagaattaaaggttaaggacattgactttcgcaatctttgtattgtagttaagccacaagcattgataagcaaagaaattgtaagagtgaaataaaatcataataagatgaattaattaaagtagagaaactgataaagacttgcacttgaagctgacacatgtgtttaataactatataattgctaagggaaattttgtttttgaaaagtttccgttatcaagctcgaaatttctagcaatggggcagcacgaaatttgccgctgtaaatctagctttcaaaacctggcagcactgtcggtggtcacattgtagcctcttcgcatttgacgacccatggaaaactttcagtctcttgcaggcagcacagcgatacggaagcaacaattgaaacgtccagaactcctcctcccacgagtatttaaattctgacacaagagtgcctgaaccaaaatcccactcaccgaatgctggtgctttgatttgcaactgttcctaggttccggctgaatccctagatttgcggatctacgcaactcattcactcaaaagccagccgaatttatcgcgccagattaaacaaacagaaacaaaaaacagaagccgagaccagttccacatcgtgccatttttatctgggcatataggcagacgtgattacgtgattagtgcggc

SEQ ID NO: 11354 - DNA, 1645 bp, DROSOPHILA
cgacggcactccgtctaatgttctgtcgcttaccaaaacaaaccaaaagccaaccccttgagttctctcttatcagcgggaattgtggtcaaggcctgcagcttcgcggcacgcttaagcatctccggcggacacaattaggcaatgttattgtttaaaactggttttctgttatttctctcttttttactgtctcaggttgttgttggttgacgatttactgtccgattaactgcgccatttttccacactctttttcggagggggtggcaactctggtagcagttgcaaacagctgatggattatttgtgtttttacactcggtgaaagatttaattgtatgcaaaaatcgaaggacaacaaacaggaacgacaatgagtgaggcggaaaagcaggcggtgtccttcgcctgtcagcgctgcctgcagcccatcgtcctggacgagcagctggagaagattagcgtgcacgcaatggcggagttatctttgcccatctacggagacaatggcaatacattggacccgcaggacgccagcagcttcgaccactttgtgccgccctacaggcttacggactctataaatggcactggttttatgctggtttccgatggcagggacaacaagaaaatgagtgctgcttttaagctgaaagcggagctgtttgactgcctctcctccaactctgagattgaccatccgctgtgcgaagagtgtgccgactccatgctggaaatcatggacagggaactgcgcatcgctgaggacgagtgggatgtgtacaaggcttatttggatgaactagagcaacagcgtgtagcacccaacgttgaggccctggacaaggagctcgacgaactaaagcgcagcgagcaacagcttctgtcggagctaaaagagctcaaaaaggaggaacaatcgctaaatgatgccattgccgaggaggaacaggagcgagaggagctgcacgagcaggaggaaagctactggcgcgagtataccaagcacaggcgtgagctaatgctcaccgaggatgacaaacgaagtctggagtgtcagatcgcctactcgaaacagcagctggacaaactgcgcgacaccaacatattcaacatcacctttcacatctggcatgccgggcatttcggtaccattaataactttaggctgggtcgattgccctctgtatccgtggactggtcagagatcaacgccgcttggggccagacggtgcttctgctctctgcgcttgctcgtaagatagggctcaccttcgagcggtatcgtgtagtaccctttggaaatcattcgtatgttgaggtgctcggcgagaatcgagagctcccgctttatggcagcggcggatttaagtttttctgggacaccaagtttgatgctgccatggtagcttttctcgactgtcttacccagttccagaaggaggtcgagaagcgcgacaccgagttcctgctgccctacaagatggagaagggcaagatcatcgatccctccacgggaaattcctattctattaaaatccagtttaactcggaggagcagtggaccaaggcactgaaattcatgctaaccaacctgaaatggggattggcctgggtttcttcacagtttgtgtcaccgtga

SEQ ID NO: 11355 - protein, 422 aa, DROSOPHILA
MSEAEKQAVSFACQRCLQPIVLDEQLEKISVHAMAELSLPIYGDNGNTLDPQDASSFDHFVPPYRLTDSINGTGFMLVSDGRDNKKMSAAFKLKAELFDCLSSNSEIDHPLCEECADSMLEIMDRELRIAEDEWDVYKAYLDELEQQRVAPNVEALDKELDELKRSEQQLLSELKELKKEEQSLNDAIAEEEQEREELHEQEESYWREYTKHRRELMLTEDDKRSLECQIAYSKQQLDKLRDTNIFNITFHIWHAGHFGTINNFRLGRLPSVSVDWSEINAAWGQTVLLLSALARKIGLTFERYRVVPFGNHSYVEVLGENRELPLYGSGGFKFFWDTKFDAAMVAFLDCLTQFQKEVEKRDTEFLLPYKMEKGKIIDPSTGNSYSIKIQFNSEEQWTKALKFMLTNLKWGLAWVSSQFVSP

SEQ ID NO: 11356 - DNA, 2744 bp, DROSOPHILA
tgtgattttcattgatcacttacagggtgtagtttgattaccttttagtcagatttactatcatgtttcgaaagtattctcgccgtgcagctaaccgactctgcgctggcgggttattgtttccattttgatttatgtctggcatccttggtctcctcttggcctcgtctactattttaacgttgttaaccaaattgcataaattaagtgcgttcgtctgcttgagtgggtctggttcaggctctagtcctgcgctcctgtggctcctccgcatcctggtctccaatctgtggatccatctactatttctggctcgaaggctcccacatccgtcgtccttcgtcctgcatttgtgttgctaatgtgcgcacattagacgcacatgttgccaactgaattgtgtttgctttttcctttcccggcattttttctgctcagcatggggaaatcatgtaaagcagctggaatattttataattggcatgtaaatgcaccagcttatgtaatccgttgcagccataatgaaatattttataatttttcagcttttccttggattttgcagaattaagtcatgtgtgcaaggctaaaagtcattaagattaagtttgaactaattgttttaccatgaatgaactcattaaattgtgtattttaatcaggaaaacgggcgtatttatgcaccagtactaaatttaaatatacaaaaatacgaaaattttgaagatactgcaaatgttgaataaaacttaacccatatgcaatccgaagagttttgtacactgcgtgactataatttccgctagttatcgaaatgaatgaatatcaattgcactgcaccaattttagtttagccaatcaacagaaatatattgtaaatatttgcctagctgttgttcaaacgttttagagctccatagaaaattgccataattaccgctcaatttttgtaataatatttgctatcgactatataagtgcggtgtagaccaaacttttcagtttcatagcttcacaatgaaattgcctgcattgcatttgttattcctgggctttatttgcctggctcgcagccaggataacgacgagaatgtcagaaggataatgaaggaaatggaggtgatcccagaaattttggatgagcctccgagggagttacttagggtaagctgaaaagtctttttatctctgcgacttaaatggatcaaattgaatcactagatcaagtacgacaacaccattgacatagaggagggcaagacctatactccgacggagctcaagttccagccgagactcgactggaacgcggatcctgagtccttctacaccgtgctcatgatctgtcccgatgctccgaaccgagagaatcccatgtaccgttcctggctccattggctggtggtcaatgttcccggattggatattatgaaggggcaaccgatatcggagtacttcggtcctctgcctccaaaggatagtggtattcagcggtatcttattcttgtgtatcagcaatctgataagctggactttgacgagaagaaaatggagcttagcaatgccgatggtcatagtaattttgacgtgatgaagttcacccagaaatacgagatgggctcaccagtggcgggtaatatattccagtccaggtgggatgaatatgtgcccgagttgatgaagacactgtatggtgtcagtgagtagtgaatggaaggattgctaatgcaatgggtacggactttgagcggctgatttgtttcttggttgagtgtttagttaaatcttaccatatctgtgtattaaagatatttagctagctacgagcattccaaattataattgttttctaattatgtagatttgccttatagcaaaactgggccacttgagggatcaaccaagtgcaatgatatactctacctgatttccctcaaacgctttgattgactggctacattttccaaatccctcaagctctgaaacaacaagaaaccagtaatctcgagcagctttgcactcgacacaaactcacttcaactttgcaatcatgataggacgtaatgttagatttccatttatataaactcgggcaagtgtgaaaggtgcaactttcatggcgggctggaaaaaggaaaccccgagggtggggagtcccgcattttccacctctcctcatccagtttccactcaaatagtaactaaacgcagtcgagcacaaagcgctttttgtaggcaatggcaaataaccttaaggttaagattacaaggtaatttgattcaattcgagtgataggcgtgccaaggcaacaacaaacggcccaagatggaagcgaagatgaagacggttttccacggggcgagcgggcggtggaaaaacccggtgtcgggccaatttccccagtttcagtcggatagatgacagtgtcaagataggaattgttgcagctttgcctttgcacccctccagccaaaaactcgtgccctccttcgcttttttctttccttcaatgaatttcctttttcctttccggctttccttttgttggtatttctgtttatcagtttgtgtataaatttgcctttattctgacatatttagtggcggttccaagacaattgtctcgccgataaaaagctcagagatctagctccgatttgcttgttactccattaaaacggcatataaaaaggcaaaaaagaccacaacatcagccgaataattggatttagttggaaatggt

SEQ ID NO: 11357 - DNA, 687 bp, DROSOPHILA
agtttcatagcttcacaatgaaattgcctgcattgcatttgttattcctgggctttatttgcctggctcgcagccaggataacgacgagaatgtcagaaggataatgaaggaaatggaggtgatcccagaaattttggatgagcctccgagggagttacttaggatcaagtacgacaacaccattgacatagaggagggcaagacctatactccgacggagctcaagttccagccgagactcgactggaacgcggatcctgagtccttctacaccgtgctcatgatctgtcccgatgctccgaaccgagagaatcccatgtaccgttcctggctccattggctggtggtcaatgttcccggattggatattatgaaggggcaaccgatatcggagtacttcggtcctctgcctccaaaggatagtggtattcagcggtatcttattcttgtgtatcagcaatctgataagctggactttgacgagaagaaaatggagcttagcaatgccgatggtcatagtaattttgacgtgatgaagttcacccagaaatacgagatgggctcaccagtggcgggtaatatattccagtccaggtgggatgaatatgtgcccgagttgatgaagacactgtatggtgtcagtgagtagtgaatggaaggattgctaatgcaatgggtacggactt

SEQ ID NO: 11358 - protein, 210 aa, DROSOPHILA
MKLPALHLLFLGFICLARSQDNDENVRRIMKEMEVIPEILDEPPRELLRIKYDNTIDIEEGKTYTPTELKFQPRLDWNADPESFYTVLMICPDAPNRENPMYRSWLHWLVVNVPGLDIMKGQPISEYFGPLPPKDSGIQRYLILVYQQSDKLDFDEKKMELSNADGHSNFDVMKFTQKYEMGSPVAGNIFQSRWDEYVPELMKTLYGVSE

SEQ ID NO: 11359 - DNA, 2466 bp, DROSOPHILA
acacagtacaaatagttggacctaattataattttaaagaatgttggttaactagaaaacaaaatgggtgtgaaacaattgattttgagaaagtttgctttataatacatttttaaactgattactttccgaacttcaagcaacgaagctatattttcttcaagtgcatttagccaaacttatagaccaacaatcgatcgatcgatcggccagcgtgtggcccgtattccgtgtctattagagagcaattttcaagcgaggaggccttggctcatatggtgcaatagttggagtggccagcagaacactttcacaaatccgctttccacctgattgcgcaatcgaatccgaatgcccgactcaaagcgcgtcaaacggcaaaactctttcaatgtcattgcaatagcaattgcaagttcgctgccgccgcacaagcccacacacaagagtatgttggtcgtcaggctcaaggccacgtcagcaataaagtaagccaggttgaccaacatacaacgtgcatgcatatgtacatatggccaatacgttgggcggtgacggggggagcggcgcagcgcctgcgcccagagaaaacgcatagccaacaacagccggttgcacaacaacaagccgaaaagtgggtgtgcgccgacgagcccaccaccgctcactggcccaaacggagccacccgatcccctcctgcctaaaaatgccaccttctccaccggcgttcgggtgcagcaatgtctgaccaaaagagcggaaaatcaagtctagcttggtgaggccaccaacactgaataccctataaaggtaaaactcaggaattttgccaataatgttgtaacattttcaaaagtcagatgatgcaatcaacgatttagcaatccaatgatttaactcgatttttttcaatttgaaagtatgccgtctggattttctttgtctttctgtttgtatttgaaatcgtcccagtaggatctgaaaaatatatctattttcgaatttcgctattttcgaattctataagcataacttagccaacaaaatgtcccgatactccatgaaaggcatcaatttcgatgttaaacgcgatatacaaaaggtggatgctcgcacctacggattcctgaagaccaagggatcagatacgccgatgcccacggctgcgaagagaattaatcaatcgacgttgatcgaaagattgaaatccataacattggctgaagtggtggacgaggaagatcagtcgtctacgggttcagtggaatcgggtagcatgtccttcgaaatgaaacggaagctatttgacgcagccgagttcaccatcacccgaggtcagaaactgagtgacctcacgcatgccgctgatgaggggattaactttagtccgtacgataccggcaacaagacactcgaagaaatcgaggaatactgccgcgccgtcaacattaagtttgccaaatgaaaggataaactcttccagagattttacacgatatatatacgatggaattcggtggataaaagatgaaacggagcagggatcacctgtaaaggaatcaggtctagattcaatataatcaaagcaaatcaaagaaactattttataaagctaagttcactatagaacaaaggcaaaaatggactggatatattttatatttcgcatacctaaagattacaataataaaaaatattctcacattaatattgcaattttgtttaaatatgtaatgaaattaggtactagggcaagcgtcaagcaaacatcgatatacccagtgcaaggaaatttcaaacaaaactcgtttcacatttttagagtttttctcgagtcgttgtgccagtttttttttttttgcctaataaatagcaaaaagcaatgtgacgatcgacttaataagttattcagcgcattctcctgcaattccgcgtacgcattgtactttctttattgcacttcgactttcttttgggccatgtttgctcaaaacttgacccaattctcggttttatgtccgtcgatttgataatgaggagatcattaacaaattttcattgataaggaatagctgcacttgaaactcgagatttcttatcaacaacaacgatcgcttatgctaccctacaacagtgcgccataaacattagttttttttcatacattagaaataaccaaatagattaaccactttccatagaaagatttactaaacacttcctgaactcccagggtcacaaaacgttttcattggcaaatcagttccgcttctcgactgcagacacttaagttcttgactttcacttgctcattaatggctatatttcaatggggcacttctaaaacattatcagcgggtgcaacctctcgagttgaacttcaaaatgggcacgaggaccggaccagatttgcagcgccacttaattgatgcaaatagaaatcagaatcagagtttttcgctcag

SEQ ID NO: 11360 - DNA, 466 bp, DROSOPHILA
gaatttcgctattttcgaattctataagcataacttagccaacaaaatgtcccgatactccatgaaaggcatcaatttcgatgttaaacgcgatatacaaaaggtggatgctcgcacctacggattcctgaagaccaagggatcagatacgccgatgcccacggctgcgaagagaattaatcaatcgacgttgatcgaaagattgaaatccataacattggctgaagtggtggacgaggaagatcagtcgtctacgggttcagtggaatcgggtagcatgtccttcgaaatgaaacggaagctatttgacgcagccgagttcaccatcacccgaggtcagaaactgagtgacctcacgcatgccgctgatgaggggattaactttagtccgtacgataccggcaacaagacactcgaagaaatcgaggaatactgccgcgccgtcaacattaagtttgccaaatga

SEQ ID NO: 11361 - protein, 139 aa, DROSOPHILA
MSRYSMKGINFDVKRDIQKVDARTYGFLKTKGSDTPMPTAAKRINQSTLIERLKSITLAEVVDEEDQSSTGSVESGSMSFEMKRKLFDAAEFTITRGQKLSDLTHAADEGINFSPYDTGNKTLEEIEEYCRAVNIKFAK

SEQ ID NO: 11362 - DNA, 3704 bp, DROSOPHILA
cgttcagcgttgagaactttgtgctgatctccgtgttttcctgggcggccatcgttgcagtgcgtccgtaatcctccgcagtggtttcctccgatgaaaatctctctctcgcttttttcacgcgacgacacactttcgccctccttctacaaactgcttcagctgcttcttcttgctgctcccgcactcacacagaacacacgcggtcgttcggaattcttgggattgcctatggtaatggaaattgggaatggcaaaagcaatgccaccaacacacgcacgccttgatggttgttggccgggggggtggcttgtggggggtttaggccagactttcggctcaatgtggtctacacttttgttgtgactcggtgttgtgtttgttgtttgtgctttgctagcctggccaactcgggttgaactcgaattccctttaatttgatcgactatcgcctgtttggggcagtggtgaccacctggtgatctgcaggtatgattcgactacctgaacactaaatgcagtgctcggaactagcaatcttctattattttacacgttttaagccacgcatcaagtcagggttgccacttgtatgcggtgttatcggtgcatcgatatgtgctggctgtcacagtggcctataattgatttggggcaaagtattaagatatttttaaatttttttagtaagatttttaatacttttaaaattattcaacataaataattatattgcttttgtactttgttctgattaatataattttttaaggctaaatataacgtagtccacatgtacatatataaatacaaactgtatttgttttatgtgtgactagacattaataattttttattcactttcagtgagtttttataattattaatttagttattttgtataatagaagtgtaatgcgagttttgtaaatattgataagtgtgtagtgagccttggggtttcaatacatttctaagctcatcatcaatggtatcgaattacaatcgatgttgttccagctctaacgtcgtgccagacgccattttaacagtagtgaaaaaatcgtctggagtttggctcgttttcagcattcgcattagcattttagcggtaaaacaaatatccaaatagacaatgagcaacggtggtggtgccgggggattgggcgcagcgcgtccacctccacggatcgatggaatggtctcgcttaaggcaagtatctgctaagtaaaatgcgactaaatcgcccacaaaatggcggccggctggcaacgttgtgtggttaggtaacctctccaaaagcatgtaaattaatccgcgtgtaattatgcctacaggtcgacaatctcacatatcgcaccacgccggaggatctgcgtcgggtcttcgagcggtgcggcgaggtgggggacatctacatacccagggatcgctacacacgtgagagccgcggattcgcatttgttcggtaagcattcacttctcttccgggaaaattgtgaaagtcttaggtcttttttgttttgttactttcacttgccggcggtggattttaattatcatgggacctaaaatgtatccatacatactaggagtaaaatatatgtatttcccgaaagtatactgcgaaaatcatgctatacaatcactcgtcatatccgctttcactatctactttataatgtttcattgaaaactagcacattgaggaaaaatgttatgtattccctgaattaatcagggtatgcaagcaaattacaaaagtctcagagtaatcatttaaatatcatttgaatatagctgctataataagtacgccccttgtctaaactcaaatattcctctcatttcattagaactatttgcattatttgctatcatcgattgtgtatcagttgctaatctgtacactttcagtagcaaaatggtgccagaacaaatgtgttcacttgcaaccgttgcctactcaacatttactagccaacgtacagagaatactacatctaaataataagttctaaagttatagtttcataacatatggcttcaatgatacattaagttgatacaaggtcacttattctatttatttgttgtatctacctgcattatttgccccttttgaatgtgtaacagctttcagtctgtacatcttctttagcaaaaggatgctagattgaatgtgtacacttgcaacagttgcctaccaaacccctgctagccaacttaccgtaagccctacaattaaatatagacttaaatataaataaacgtatgtgcaaagtacacacgaatctagttgatcatgtccttaattttttagcttctatgacaaacgtgatgccgaggacgcactggaggccatggatggtcgcatgctagacggcagggagctccgcgtacagatggcccgctacggacgcccctcttcgcccactcgcagctccagtggtcgtcgtggcggaggaggaggcggtggttccggcgggcgtcgtcggtcacgttctcgctccccaatgcgccgtcgttcgcgcagtccgcgtcgccgatcatactcccgttcccgctcgcctggtagccactcgccggaacgccgatccaaattttcacgcagtccagtacgcggcgacagccgcaatggaatcggaagcggatctggaggactggccccagccgcgtctcgtagtcgcagtcgctcctagatatcgacgtcacgttccatttagtgggagtgcgaggtgagttcatatcgtgtaacgcttcagaaaaagctttatataaggttaaacataccttacgttaaatagggattattttaaaactagttgttctttgctttcagatatgactcgctgactagggccaatgctgtatcctgttccggatctatggctccatctgtgtcatgctgtacccgaacagcaggtatagaaaccattatacaatcttacacttaacacaactatttatagcgaactattttaagtttcggcagagtaaataagtagagatcaggcatgattatgttccgagtgagatccccgcaacctgggcgatccctcgatgtcggttcttgcacataggctttcatatactagagcgtagtagaaatccttgaacgtaatcagaaacagaacaaaataaactcaaattaacacggcttcaattcaatacctaaatatcaaatgacagacaggacaggaggagaatgagaggtggatgagtgataggaatactctaggattctgtttgtttcgttgcgattcgattcgattgcgtttgtgttgctcgtttccgttctttgtaccttttaacgacaaacttattaacaagcttctcccacacgtttattatatatatgcaggcgaatggtgtgtggcagttgttgcggttcagataagattgtggttaaatcgctcgcgattaaggatcagcagcagcgcatcatctaagctacaactccttcctcacgtaggcggacaccgcgtggctcctgattgttgctactgctgctgctgctgcagatgctgatgctgatgctgctgctgtcgcatgatgctgttgctggtgccgctgatgctgcagttgcagttgccgtagccgtagcagcttcctgtttcctgttagacgctggcgctgccaaagctgctccagattcactcatagtttcccgtttcccgtcacttcttctctcgcctcgtc

SEQ ID NO: 11363 - DNA, 724 bp, DROSOPHILA
ttacaatcgatgttgttccagctctaacgtcgtgccagacgccattttaacagtagtgaaaaaatcgtctggagtttggctcgttttcagcattcgcattagcattttagcggtaaaacaaatatccaaatagacaatgagcaacggtggtggtgccgggggattgggcgcagcgcgtccacctccacggatcgatggaatggtctcgcttaaggtcgacaatctcacatatcgcaccacgccggaggatctgcgtcgggtcttcgagcggtgcggcgaggtgggggacatctacatacccagggatcgctacacacgtgagagccgcggattcgcatttgttcgcttctatgacaaacgtgatgccgaggacgcactggaggccatggatggtcgcatgctagacggcagggagctccgcgtacagatggcccgctacggacgcccctcttcgcccactcgcagctccagtggtcgtcgtggcggaggaggaggcggtggttccggcgggcgtcgtcggtcacgttctcgctccccaatgcgccgtcgttcgcgcagtccgcgtcgccgatcatactcccgttcccgctcgcctggtagccactcgccggaacgccgatccaaattttcacgcagtccagtacgcggcgacagccgcaatggaatcggaagcggatctggaggactggccccagccgcgtctcgtagtcgcagtcgctcctag

SEQ ID NO: 11364 - protein, 195 aa, DROSOPHILA
MSNGGGAGGLGAARPPPRIDGMVSLKVDNLTYRTTPEDLRRVFERCGEVGDIYIPRDRYTRESRGFAFVRFYDKRDAEDALEAMDGRMLDGRELRVQMARYGRPSSPTRSSSGRRGGGGGGGSGGRRRSRSRSPMRRRSRSPRRRSYSRSRSPGSHSPERRSKFSRSPVRGDSRNGIGSGSGGLAPAASRSRSRS

SEQ ID NO: 11365 - DNA, 3574 bp, DROSOPHILA
ctttgcgattaggctcgtcggacttgccgatccggcgtcttgcctctggcctaattgggggatctaaacttgaatattgatgacggtgtcggatcggatcggatcggatcggttcggaggagaaaaaaacacaacaatccaaaatgcgatgcaattgtggctgtgctggccgtgttgtttgatatttatcgtacttaatttttcgatgtgtttgctgtcttggctatttttggagaatttcacgtacgagactcataattcgtgcgataatttacacaaaattaggcaactgtctagccagcgaaccttttaaagctattggagcactccgatgcgtttcccacgccaattagaattagtcgtcggatcgagccgagctcaattgaatttcgaatggacctcgaagtctgtcagataattgcaagagaaaattggaaaattcaattcacgctccgcaaatgggccgcaaaatgaaacatcaccttttattccactttgtattgcctcttttatgacacagcagagcttccgcttataatttgtgttaacaaaactttagccataaaacgtccgaagtgaaactcataaaacgaaatgtgtcggtgcggtcagatataattaatgtgaggcaagtttattcttttctggcgcttaatcttccccaaatctctgcctctggaagtttttgactcccactctttgccaaagcaattaaaagtctaattagaatgtcattagacggaggcaagtgctaaatggtcaggtagtaggcaagtatcgcaataaatctaaactcagcatcttgattagaaaatatcaaaataagtggtcaattataaatgctttgcgtaatatctaatgattttgggctaaatctcgtttcataacaaattttcaatctaaaatttagcttccatgatttttctctcatttttttaatcattcaaaatttctttctggtttctcactttcgtgaagtcaaaattcaaagtaaaccgcaatgactacgcatttctactacccgaacaaggagctgcaggaagaactcatctgcatatcgaaggcgttggtggctcctggtaagggaatcctggcggccgacgagtccagtgcagtgatgggcaagcgatttcagttgatcggtgtggagaacacggaggagaatcgccggctataccgccaaatgctattcacgaccgatccgaagatagcggagaatatatccggcgtgatattctaccatgaaacactgcatcagcgtacggatgacggactgccattcgtagaggccctcagaaagaagggcatcctgacgggaataaaggtagacaagcacttttcaccactcttcggctccgaggatgagttcaccacccagggtctggatgatctagccaatcgatgtgcacagtacaagaaggagggctgcagctttgccaagtggaggtgcatcctgaagatcactaagaatactccttcgccgcaggccattttggaaaacgctaatgtcatggcccggtatgcagccatctgtcaatcgcagcgactagtacccatcattagtcccgaggtcctggccaccggagatcatgacttggatcggtgtcagaaggtcaacgaaattctcctggctggagtatacaaggctcttagtgatcaccacgtttttctcgagggaactcttttgcaacccagcatggtgatgcctggattgcagagcaacaaaaatcatccgccagcggatattggagtggctacagttctcgccattaggcgaagtgttcctccggccgtaatgggtatggatgtctgtaactaatatatggggcttctctaatctatgcatccttttctgcaggagtacttttttgtggtggcgctcaatcagaagaggaggccacggtccatttgaatgcaattaacaatgttccgctttgtaagccttgggccatgacctttgcctttgatcgggctcttcaaacatcgattttgcgaacttggggtggcaagaaggagcagattagccatgctcaaaatgaacttatcaagcggtgcagggtcagtataaataactaagaatataacctcaaaactcaagtattcttttaaaaaatattttaggccaatggtcttgcaagcattggaaaatatgtaattggctctgtggaaagttcagcggccactgaaagactcattcaagaagccgtcgaattctaaggaattctaatcagttaaataatcaaaatcttaaatttaatggaaccaccttcgatctttgtagagtaacagttaattggtctgaacaattttaatttttgtgttcgtcacaacgtgggactagtattctggaattcctagcgagtaaagtgctccttggtgacttctggccaccacttgaccgcaggccgtttatgtgatgccagccagtcggggcgaacaagtcgaaatatggttaacaagcctgcaaagagcaacatgactcttggagcgaagtgtcggcttaatccgcggagattaccagacgaccgcgcgacacgcagctgcgttcagagttccagctacgcagcagcttaattaacgcaggcgcatgccaaaaaccaaaccgttggccatgtgcaacagcaacggcaacaagagcaacaacagcagcggcatcaggggcaacaacagctacagcagcaacatcaacaacaacagcagcagcaacaacataggcaagcccgggttgagtgtttcgacttaatcaggcggttccgagccgctcaagtcggtgtcatgttgttggcaaattagtcagactgccaccaggaatcatggtaaggtgaggagagggttgcacgcaaatagcaataattaaaattaaagcagccactaacttatagcctcgcctttcgctgcaaagtcagctcctcccagttgtcacgcgcagtattttaaaacaagcaaccagccacatttgcttccgagtgcaaggactcaaatgtacttggggaaaataagagttaatatagttaatatagaaattcaatagaattaaataaaatattttaacttaacttacaatatattttgatttggtttatacatttaaatatttttgaacacatagtaaatcaagatctgatataatcctggatacgcagttcctctttaagtttgtgtcgcttcacctgcagattgtagcgaaggtttgtcgttaatgcaatcgtcgtgtatcacagagccgcgggattgaatccccgtgatccaacacctcccctcgcccgcactcgaatttaattctgagtcccaatcaggccaacgcgtacgacatgtcatgttaattgggccccgcatatacgtatacagctgcgagtgtattcgccggttgtgcatgtgtgtaaattgccattatgctcatgtttgcttaatatgtggcacacaacacccaccgagttccgctcgattccaggctataaagcggcggctatatagccatagccactcgactatagcaacggcagcacgcgacgcgtcaagccaattaaagccaaattatggcagcgcttttttaatcacatgcatcgctcttcgc

SEQ ID NO: 11366 - DNA, 1288 bp, DROSOPHILA
atgactacgcatttctactacccgaacaaggagctgcaggaagaactcatctgcatatcgaaggcgttggtggctcctggtaagggaatcctggcggccgacgagtccagtgcagtgatgggcaagcgatttcagttgatcggtgtggagaacacggaggagaatcgccggctataccgccaaatgctattcacgaccgatccgaagatagcggagaatatatccggcgtgatattctaccatgaaacactgcatcagcgtacggatgacggactgccattcgtagaggccctcagaaagaagggcatcctgacgggaataaaggtagacaagcacttttcaccactcttcggctccgaggatgagttcaccacccagggtctggatgatctagccaatcgatgtgcacagtacaagaaggagggctgcagctttgccaagtggaggtgcatcctgaagatcactaagaatactccttcgccgcaggccattttggaaaacgctaatgtcatggcccggtatgcagccatctgtcaatcgcagcgactagtacccatcattagtcccgaggtcctggccaccggagatcatgacttggatcggtgtcagaaggtcaacgaaattctcctggctggagtatacaaggctcttagtgatcaccacgtttttctcgagggaactcttttgcaacccagcatggtgatgcctggattgcagagcaacaaaaatcatccgccagcggatattggagtggctacagttctcgccattaggcgaagtgttcctccggccgtaatgggagtacttttttgtggtggcgctcaatcagaagaggaggccacggtccatttgaatgcaattaacaatgttccgctttgtaagccttgggccatgacctttgcctttgatcgggctcttcaaacatcgattttgcgaacttggggtggcaagaaggagcagattagccatgctcaaaatgaacttatcaagcggtgcagggccaatggtcttgcaagcattggaaaatatgtaattggctctgtggaaagttcagcggccactgaaagactcacgagtaaagtgctccttggtgacttctggccaccacttgaccgcaggccgtttatgtgatgccagccagtcggggcgaacaagtcgaaatatggttaacaagcctgcaaagagcaacatgactcttggagcgaagtgtcggcttaatccgcggagattaccagacgaccgcgcgacacgcagctgcgttcagagttccagctacgcagcagcttaa

SEQ ID NO: 11367 - protein, 376 aa, DROSOPHILA
MTTHFYYPNKELQEELICISKALVAPGKGILAADESSAVMGKRFQLIGVENTEENRRLYRQMLFTTDPKIAENISGVIFYHETLHQRTDDGLPFVEALRKKGILTGIKVDKHFSPLFGSEDEFTTQGLDDLANRCAQYKKEGCSFAKWRCILKITKNTPSPQAILENANVMARYAAICQSQRLVPIISPEVLATGDHDLDRCQKVNEILLAGVYKALSDHHVFLEGTLLQPSMVMPGLQSNKNHPPADIGVATVLAIRRSVPPAVMGVLFCGGAQSEEEATVHLNAINNVPLCKPWAMTFAFDRALQTSILRTWGGKKEQISHAQNELIKRCRANGLASIGKYVIGSVESSAATERLTSKVLLGDFWPPLDRRPFM

SEQ ID NO: 11368 - DNA, 3119 bp, DROSOPHILA
gcagctgcgccacgagcccaacatcttcttcaccagctacgagcggatgaagggccagctgggccaggttatctcggaggtggcccagttcctggagcgcagtgtcagccaggagcagatgcagcagatgcagcgacacctctccttcgagagcatgcgcgacaatcccgcctgcaaccacgtcaaggagttcgagagcatgaaggcggctgccggcagggaggtggaggagttcaggtaagtctttggatcatgtgctctccaggagcaggctaatcagaccaatcttcctcgcaggttcgttcgacgcggagtcgtgggcagccacaaggatgagctcaccgccgacatcatacgggaattcgatctctggtccgatagtaatctgcgggacttcaaattgaacatggatgactttgccaactacagcaagtttgcgtccacgtaattctctctaattgtcttcgctaaagtgtttcttgggtaatcttcgttaatagtctttaagctgtgatgatatatgtacatatatgtttaataaataattgcttcccgtatactgtatgtaacttaattattttatgagcgaattgtttacgttcccgtggttggcactccattatctactatgaccgcattatgtggcatattatcattaccagcagttacagtctaataaacaagtaacattataaataccatatatatgtttatatctagtttttaagctactttctttgataaaaaaatacaaagctttccgctcatctgacctactttattaaaaagaagtgcatctacatatatcttggctgggcttgttttcattgctattatcaaccgaaatgaaagatgcgtcccattaactacagtgcaatcttatcatcgtagtgcgaagagagaactgagagaggcgaaactgagaaatttctcttaaatagttacccaaccagtaatatactccacttcattccccacaaaagctcagtacgctgtcgctatgaatcgggttcaggtcacgccgcggagctatcccacgaaccttatcgataaggactggggaaatcgaaagcttttttatacgaaagattcggagaactttcttcgcttagtccacgatatgaagctcagggatgacgatgtctggatcgtaactctaccgaaatgcggaaccacttggatgcaggaactgctctggttgctcctcaacaactgcgatttcgagggggcgttggccaaggatcaggagctgcgaactccgtttctcgagtgagtgtatccgtatacgtgggcatacatatgtatatacttaaacctccatgtcttcgtcaggttcggttactccgtttttcacgacccgaaccgctcattcgggcctatcgaggacctgaagtccccgcgactgataaaatcccacctttcgcttgccctcctcccatcaaaactttgggagggaaaaaacaaagtgatctatgtgtcccgtaaccccctggactcctatgtctcccgatattatcacggagtatcttttggtttcaattacgggaagtcactgcaccagtacttcgatgaggtgctggcctctgatgatttccccacggagttcattgaacacgcccacgagttctaccaactgaggaacgagccttgggtattctacaccagctttgaaatgatgaagaaagatctgcgaggagtgatcaacgatgtctccagatttctgaataaacccatcaacgatcagcaaatggagaaactgctaaagcatttgtccttcgcggaaatgaagagtatgcaagaagcctatgccgaaacaatgatcttattgagctaaacgaattttcttttcagaaaatcccaccacgaatcatctgtgggagttggcccaagttcaacacgaaaatgctgggaaagaaatgcacccgtaagagaaagtcccatagttttccgaacaaccattcacttgtaatcctctagattcgtgagacgtggggatgtcaatggctacaaggacgaattgaagcccgaacaaattgagaaggccaatgtccggatacaagaggttcttgcgaagaacggtgtgactttggacgaactactgctcctgaaagatcagtaagatacatattgagaataatcaagataatgttgtatcttttggtttagctcggaagtaaataacagcgagagaggagagcaaataaagcaaggtcaagctgtttgacctaccaaacaccttgttcttcaaatgtttatctaaagattcgttttaattgatataaaatatgtagagtccaatatataaggcacacgtagacataaactaactaacactgaaggcggtacaaaaggattgagtcctaggcggtggaggtctccaccttcttggcgttgtcctccttggaggagggaccagtctgtgtgatctgcacaaggcgttcagtctgcggaggaggcagcgccttcattggcgccttgatggtcagcaggccatcggaggagagggacgatgtgaccgtgtcggggttgacatcacctagtggaaggatcatacacgtttagcatacttcctattttgttgatggaattcggactcacttggcagctggtagcgtctggagaactggcgggagacatatccgtgctcgtcctgcttctcctcatgctttccctccacgatgacgaacttgtcggccaccttgacggtgatctcggatggcgagaactgctgcacatccagaatgacctcgaacttctcgctgtcgatgttgagggtggaaccggactcctgcttctgcaggctgttcgtgtgccaggggcgcaggtatcccgatcgcagcactgtggggcgggagttccacacggaggacatgaggtcatccctcttcagtccctgaccgaagtgctggtccaagaggcgcgaggtgcgcattggaaagtcgagctcatcccaccagtcacggaacatcagtggcactacggacatctgctttgatcaagaaacgagacgatagtgagctaatcacttcacttcttcactgttcaataaattccgcgttggcttggtccttcctcgtacctttttagattcaattcacttggataaacgcgtctgcttc

SEQ ID NO: 11369 - DNA, 942 bp, DROSOPHILA
atgaatcgggttcaggtcacgccgcggagctatcccacgaaccttatcgataaggactggggaaatcgaaagcttttttatacgaaagattcggagaactttcttcgcttagtccacgatatgaagctcagggatgacgatgtctggatcgtaactctaccgaaatgcggaaccacttggatgcaggaactgctctggttgctcctcaacaactgcgatttcgagggggcgttggccaaggatcaggagctgcgaactccgtttctcgagttcggttactccgtttttcacgacccgaaccgctcattcgggcctatcgaggacctgaagtccccgcgactgataaaatcccacctttcgcttgccctcctcccatcaaaactttgggagggaaaaaacaaagtgatctatgtgtcccgtaaccccctggactcctatgtctcccgatattatcacggagtatcttttggtttcaattacgggaagtcactgcaccagtacttcgatgaggtgctggcctctgatgatttccccacggagttcattgaacacgcccacgagttctaccaactgaggaacgagccttgggtattctacaccagctttgaaatgatgaagaaagatctgcgaggagtgatcaacgatgtctccagatttctgaataaacccatcaacgatcagcaaatggagaaactgctaaagcatttgtccttcgcggaaatgaagaaaaatcccaccacgaatcatctgtgggagttggcccaagttcaacacgaaaatgctgggaaagaaatgcacccattcgtgagacgtggggatgtcaatggctacaaggacgaattgaagcccgaacaaattgagaaggccaatgtccggatacaagaggttcttgcgaagaacggtgtgactttggacgaactactgctcctgaaagatcagtaa

SEQ ID NO: 11370 - protein, 313 aa, DROSOPHILA
MNRVQVTPRSYPTNLIDKDWGNRKLFYTKDSENFLRLVHDMKLRDDDVWIVTLPKCGTTWMQELLWLLLNNCDFEGALAKDQELRTPFLEFGYSVFHDPNRSFGPIEDLKSPRLIKSHLSLALLPSKLWEGKNKVIYVSRNPLDSYVSRYYHGVSFGFNYGKSLHQYFDEVLASDDFPTEFIEHAHEFYQLRNEPWVFYTSFEMMKKDLRGVINDVSRFLNKPINDQQMEKLLKHLSFAEMKKNPTTNHLWELAQVQHENAGKEMHPFVRRGDVNGYKDELKPEQIEKANVRIQEVLAKNGVTLDELLLLKDQ

SEQ ID NO: 11371 - DNA, 2815 bp, DROSOPHILA
cttcaattcaatacctaaatatcaaatgacagacaggacaggaggagaatgagaggtggatgagtgataggaatactctaggattctgtttgtttcgttgcgattcgattcgattgcgtttgtgttgctcgtttccgttctttgtaccttttaacgacaaacttattaacaagcttctcccacacgtttattatatatatgcaggcgaatggtgtgtggcagttgttgcggttcagataagattgtggttaaatcgctcgcgattaaggatcagcagcagcgcatcatctaagctacaactccttcctcacgtaggcggacaccgcgtggctcctgattgttgctactgctgctgctgctgcagatgctgatgctgatgctgctgctgtcgcatgatgctgttgctggtgccgctgatgctgcagttgcagttgccgtagccgtagcagcttcctgtttcctgttagacgctggcgctgccaaagctgctccagattcactcatagtttcccgtttcccgtcacttcttctctcgcctcgtctcgtctcgtctcaactcgcgatttgttgctggttggcgttgttggtgttttcctgtatcttggtgggcgtcccttttgagtttaggcgaaaagtcatcatttgcagcagaggccacatcgacgatgcgatggatgctagagtctggattgcatactgactcgaccgaaatgtgggattccctaacgatctggtacattcggtaagtgagagagctaaccctttgaatttgcagcctaattaaacgcttcaataaagttttacttgattataacttaaccatctacatatgttattaattggttgaaatggggttttaaaacatatatgtatcttggaatattgtaaagaaagatctagtatcttcggatgcccagaacatccatccattatgtttcggtttctattgactcccgagaaacatggtagtcggggggtatattgacaaagcagttgccgggaaaccgaaggcaaaatcacatatacccaagtccttctgaatacgattcagaaacccttttacactttcatctaaattatattggtttctcctgcaaagatgattcagtacgatactgtgcagatcaagaatgtatcatggtaagctttagttatgcccgacttggctcaagatgactattgtgtgctctcaggcagccggaactgcatacggagggcacctatgtgtgctcttttccagagcccccgctgccggaggcccatctgaaaccgggcacctggcatggccatctggagccgtatcagcggctcttctatcatcaaacgatgaactcggtgcgctcgagcaagcggtaccgtgccaatccgaacatcccgaaggatacgctggacttttcgctgcagtcgcgctacgatcacacccgcgaagcatttccggacaaggtggactacgtgatgcagagggagacgtgccgcgccataagtagctggtcagctcctggggcggccaaggaaattggttcccaactcaaatcatttcgggtgttgcgcaacacgcgcttcattcggcgcaagcaggaggacgtattgggtcatccacttcgcataggtaagatcacaaaattggtacaaacctaaagttctcgacgcattttaagtaacacccacttcgaatctaatcatattgttgcaggcggttgtaaagaaaagattcatccgcacagcgtaaagctcatttgcagcggtgtccacaaccagctggtgaacaatggattctcgcgccagacctccgacggcaacttcttccgctattagttccacaaatctgtgtttgctttcccagaaagaataccattttgcgttttgggttttacaaacattattggaaataaatttgggacacagaagcagtcgtcacgcagtcgcctccagcttgggctgcttgggcaggtgctccacatctccatcatactcatccactgcttgtggagtgtcctgttggtcatcctccgcctgttgctccgacgctttgtgacgctgtttcttgttctggttacgatagctcttgggtagtttgttgtcaccaatcctgaaattggatgggaatttagtatgcgaaagtgggtggctcgattacttagcttacataatagtggctctggttccaggtccccaatgtggagtcggattctcttggaagcgcgataatgccgatttgcgactcttcgggttcgcctccggatggagttcatcgaactcgtagacagcagtgcattctttcgaaagtatggccgccagtggagatccaggaatcatcctttcgggatttaccggatgtcgcttgctccagctgcgcagaatgtcccatagcaccgctggtggagcattggttttcaacgaattcttcgaggcatgcgagtatgagactcgatagccagcgtggagaatagcagaccggaactttagcatgggcacgatttctagcttgagcacacagcacagtttgtccggcgtgtagtaaaggggaacatcctgcagctcctcttggaccatggaaagaactccaacgattcgtctctgggttcccagcgattgcaaggtggtctcctggaccgccgttaaaagatcctgcacaaattcggggttatgaatcggtgccgaccagatgggtccacccagatgatgcctgtgaccgcaatgttcgcactgcgagttgaccgccggaccagtgggaattccgaacttcagctgctggggattaccagccgtgggatttggcttggttatgcccaagggctgcagcgtgaaggtctca

SEQ ID NO: 11372 - DNA, 678 bp, DROSOPHILA
gaaaccgaaggcaaaatcacatatacccaagtccttctgaatacgattcagaaacccttttacactttcatctaaattatattggtttctcctgcaaagatgattcagtacgatactgtgcagatcaagaatgtatcatggcagccggaactgcatacggagggcacctatgtgtgctcttttccagagcccccgctgccggaggcccatctgaaaccgggcacctggcatggccatctggagccgtatcagcggctcttctatcatcaaacgatgaactcggtgcgctcgagcaagcggtaccgtgccaatccgaacatcccgaaggatacgctggacttttcgctgcagtcgcgctacgatcacacccgcgaagcatttccggacaaggtggactacgtgatgcagagggagacgtgccgcgccataagtagctggtcagctcctggggcggccaaggaaattggttcccaactcaaatcatttcgggtgttgcgcaacacgcgcttcattcggcgcaagcaggaggacgtattgggtcatccacttcgcataggcggttgtaaagaaaagattcatccgcacagcgtaaagctcatttgcagcggtgtccacaaccagctggtgaacaatggattctcgcgccagacctccgacggcaacttcttccgctattag

SEQ ID NO: 11373 - protein, 134 aa, DROSOPHILA
MNSVRSSKRYRANPNIPKDTLDFSLQSRYDHTREAFPDKVDYVMQRETCRAISSWSAPGAAKEIGSQLKSFRVLRNTRFIRRKQEDVLGHPLRIGGCKEKIHPHSVKLICSGVHNQLVNNGFSRQTSDGNFFRY

SEQ ID NO: 11374 - DNA, 9525 bp, DROSOPHILA
caccaattattcattaattgcaggtttttaatctatgttacctataaatactgggcacgtagtccttgaggcgcaggatctctgctattatagaattacccaccgacactatattcagcagattctgcccacaggcattattgtcatccagaaaactcattatgcatttccttgatttctgtgattctaacaaatgcctctctggagaaagcttaatttgtataatcacattattaattaaagctgtacatactttttatcagtccacgaattatgttattgtttgtttatattgtctattcatttagtcatatcaattcttttttgcactagtgtattatctgcagtaatcttacataagtccggtcacactattttgttgttatagagttaccatgaacttcgaaatgttggcgcataaatttgaagtgagaaactgatgataacaacctatgaggtacataatttaataacaattattaaatttattaaaatgagatatgaaactactattgtattgaataataaaattataatattggcttaataactctattcgatgcattaaagtgcaataatgatggaagatctaatggtttccgactttagattcacgatttcaattttaaaatttaaaaaagaaagcaagttgtaatacgacattaagaaaattgccaattcgttatgtgtttctggttgaatccaaacgtgaatttggttctatttattttgtgttagattttcattctatgggagctacacaaagtttcagtaggattaattaacataataaatgaatataaaaatattaataaaattaattaattcaactacataaattgtaatgatttaactagctaattaactgagataccgttacatattccatacgacataaaataataatatgcataagcaaacactgcgcactaaaataaattctgcatattcccagctaataattctccgtgctcagttgaagttttctcaattttttcttttatttttttgcttaatgttaaaacataataataataatatatatatattcagttatatgcctaccaaactatgcgctgtttacggttgcatctgcattttgtttatcatattaatttttacacacaaagaatttgcttagaatggtttcactttttgcttaggtttactgaattacatcaattgttgtcaatttatttgttataatttttttacgggactctattttacaagatttatcgagctaattgtataaaatttgtctattttgtgtgtagttcagattggattaggggatttatggatctatggagcctaatgaatcgccattcttaatggatgaacgagcgccactaataaaaacatattttttcggtgtgccaagttgtctgcgctcgcatcgctccttgccatcgataatttgttaattacgtttgcgtttttacctagttatctattagaaaaaccgtagcctagaatgtatttacaatttgttgggtttgttgtggtcttgcctaacgattgatttccgtttatacattatgggtaattaaaaattacatcttttttaaacaactaaacctaattcaatggatgtttaaatggatatttttcggttctttttttgatgtgttcttttgttttgctgttgctgaacttgtttcgatctagttggttttaaaaacctttatctgtaattcggtttcgatttctcttcacgcgcccttgctttttacttaaaatctaggaattatggttcgttttcgtttaacaaactaagctaaataattaaatattaataattatgtttatatcgtttagataaggccgtcaatgcagttgatgcaaacattattatgttacaaattacaaatcaaacgcccgctgactgcgcgctctcttttaccttcttttactttcctctctattattttattctcttcgtttactctggttttgttttgtttttggattggtttggtttaagttttacagagaatttattggaaaaataaacgagctttaaattaggcttaaaatcaaatacgattagaatttaggatttatgtaaataaatgtaaaaatagaaattaaatagagccgcctaactaaaaagaaacaacaacaggggacacgcgacgcatttaaagttgaggctaaaatatattgcaagtggatgaaatcgtaaagctgtataaaacaacaacacgacagtccacggagtaggaggatcggcgaggagaagacggtgcgattgatgggcaacagcagcgatcacttgaggtatgtcttgaacagcatggaactgcgacagaactcccgctcttgctccatgtagaagagcatgtcgcgcaggttcacacgttttatgcgaggccgtaacgtcgtcggcgcagatcccgagctgcttagcactccgccgccacttgaaccctttttggataaacacagcttaattaataaccgttctggtagtcaactatcctaaattttagacactatctttttgtataattgcaccatacataccgctcccgaactgactgtttcgccgtctagcttcagctttttccgaggtccaatcgcctgcagcgccgtcagattggcatctcgttgacgcaactcctccatttcggcgcgttgcatctccttggcctaaacaacaagagaaagacttaagtaaacggctacagagaaagacgattgcgaacacaccctcgccttcatcttggcctgctcgggatcttccaccctcgaccgtgacttggctgcccgcagcagcatctcacgctccagttcctcgtgtcgcttctgctcggccttgtccagctcctcgagaaacttgatctgaccgcgcacatccttggcgggctcatagcgtggatccaactgtaagaaataggaaatcaatattttcatttgaatataaaaccatttccaacaaaccttgatgacatcaatgcggtgctccgctatcacagccaacttctcaacgatgttcttcaggcgctcctgacaggcgtgcgatatcagaacggccacatcctgcgacggctcatccagtcccgcctccgaagtaattgcccgtattctagcttgcagcgaggggagattgagaaatacctcatctttgcaggatcgaatctgcgtgccgatgttttcggtacagccgagaattcgctgcgactcctccgccaagttaacacctcccatggcggcaacatcgttgatatcatcgtcaccgtacatcgaggacatggagctctgctggaaaaacgagttcgcagcggacgccgctcctccgctcgatgtgttcaatttggcgtccatttccatggcgtcgcgtttctttttgcctatcgccttgttgatcgcaggcggcggccttgccatcgtcttggctccaatcggtgtgagagatgcgttgatccgctccatgtgcggcggatgcagcgacggcgccttgatctccaccagttttgcatcgaagtgattgctgttgtggttcagcgaattttgcatctgctcacgggctcgaagagcttcggggggaaggtggaccgtgggtaacgatggtatgggcagcgttgtggtcgaggcggagttcaacgtagacaaaacagacagcgtgggtgtcggcggtggtccacctgagattgccgccagcgagggtggatgcaggctgggcgtaatcgctttgatttgcgtctgtcccaccttgacggcagtgagtttgttcgcggtgggcacactgtttggcggacgagtggtggcccggatctggaccgatccagtacgctgcagctgagcatgctgcggtccacgtatttgcacaatgttctgcaaatcaatattgaaacgatatgtttattttatattgataaatcaaagttttcataaaataaaaatttaatatataaaataaataaatgataagttaaacttaccgcctgaccaggcacctgcaacgagggtatctgggtgcgaattcctccagtgttgacgagacgcggggccgtaggcaaccgaatattcggtggctgcttcgatatcgtggtgtggccaatggtgggtcgcggcgtgcccaaggcattcggcgttatcatacgcacctgcgtctgtccaatggtcgttgtctggctaggaccgatcggacggatttgcgcttggattttctaaaacaaatggaaaacaaatgaaaccaattcacaaatagttgaatggcttggtcgacttacaggcaactgttgagagagtccggccaggccgagaacgtgctgcggcggaggtttaatgccttcgatgaccagctcctttgtgtagagggcttgtcgtagcagaggcaaactcttcttaaggaatccaatcaaacacggctgcgggctggcgttgagcaagcgctccaggcggtcacaaaactcctccggctcgacattcgcattgaccagctcctggatgagggtgcgcacgttcttctccaccggcttcggttcccgtgtcgacaattcaattaaattggctagaaacttgcgacacttttctttggtattgccctgctgcgtcgtcgtcgctgccgtcgtactgctgaccgccgttgccgttcctcccgcggagcttacattgttcacctgctgctgctgagactgctgggccggtattgtttgaatctgcgtaatctgcggcagttgtggcgcctgcgcatttagttgcgtcagatgcggcggctgcgaagagtttgcatatccactgcttgccaccgaattgacaatgatgttgctggtggcggtcgtgttggtcatagactgcggcagaaaaatggataattagttatcagcttgtttggataaatgaaaatcatatatagaagtgcaaaattaagaccaaaaagcgttagaataattattaaaaatatttcatagcggaataaagatgatgatggttcttttttatcaggatgggggagttcaaggtcctggtctccaggtatgtgtgcaaggggcagggctatggctggggcatggataatgaggtgaactggttacaatacagtaaaatgccccaaggagcaaggttaattttgttcgaagcacaaagatatttatttgtgaaaatcaagtgggttattaacatactcaacgtttgataaatgaaaaaatctttgaaaaagaaaataaattgattatattgaatactaagaagaaagaatcgcgttgtgaaggagtttttgttattacacgaatgataattttctgagatcttactaggcattggcataaggcattatacaccagtggatttcggttagaaaatataaatcaaagaaggagtttttgagaattagacaacagcccagcacacatcgttggtaaagccggtgcagcccgatagccaggcctctagcatgatgtttggtctggaacagcaactcgtgtacagcgcatttaactaaatcaaatcgaaataaggagtatcgaaaatacagacagttacacaacgcagcatgcagtacatttacagtatattatatatgccatcatattcttgataaatcaaaatgaagtgttcgattgtgacgaaccaaaacggaactgaagcgtaggcatagttatatataagttatataaataagaagatcaaatccaagtgcataacagacaaaggagaacagaggagagaagagcaaaaaatatgttcgaataggagtatatcctgctggcttctctttacgttttgcttgatctttatggtggctgccacattggcggcagctgctgcagcagcagcggcagcggatgcctgttgctgtttctgttgctgctgggccttcagatgttgctgctgttggagcttctgctgctgctgttgctggttagtagcgggtttgttgttgttgttggtagtggtggtggtggtggtgttggtggtggcattgatactattattgttattattgctggatgggactgtggatgatgtacggacaatcgttttgcgcagtgcaatactagtgctggcggttgtgctggttgcatgttgctgctgttgcgattgttgctgctgttgcgattgctgctgatgttgttgttgttgttggtatctacttacagctgcagccggcacagtttgcagacggatctgtgtggttgtgggatggtttgtggtgcttgtcgtgttgctgttattgctggtgttggttatagtctgtgtcaccgtcggcggacccgtcgtcgtgcccacgcgcaacagctggaatccgttatccgtcttgaccagcaatgccggggtctgacccgtattaagtgtgcttaaagttatctaaaagtagagagagaagacagagagactcggttttcatctgctggagcatggtgtgtatggtgtatggtgtgagtgaatggtgggctgtgcacatgcgtgtttgtgaggagcgtggctgggttagggagctctgtgagttagtagggaagaacccaccacaacaaccatagtaatagcaatattatccttcatactcaccgatggactctgcggtctcacgcccgccatgtgggagttgatcaccacgcgactgagcgggttggtgggcacattcttctgctgctgctgtgacggcgcctgttggcgcatgcccaccaccacgccagccggcagcattgaattgagcagcggttgaccggcctggcaaatacgcaacattatcattagtctatcaattcatctcatcacattttcaaagtctatttggaccaaaggatgcattaagaggttttgcgggattctaaattagcctacatcatgcagcagttggctcggcaaaggaccccaattagtgcggaaataagttgtttaactgattctctctgtgctaaccaaatttgaaggcgtataatctactatatcttgttctatttaaagcgagcattgaaagcaatagttctacaaatgtaatggtttggatattggtgtagaataaggtttctgttgaacaagtgcgtgtttttgaacagttgttagggatttgatctttgggaaacttttcggcattgggataaagtatttcaaattaaagatatgtcttttatggtgattaaactgctttaagttctaatgaagtgaattgatatgacattcgtaaaaaaagaaattaattttaaataaaagtacaaaaatgagtgcaacaaactcagatataagtttcagatttcaactcagatataagtttcagatttcacattaatgaattaaggatattttttaagcgtaaaatacgttatcaagcctgggactaaccccatttggataaggatatgggaatttcgggcagcgaggtagacagatgaaagcataataaaagtatacaaccaaagtgtgtgcggccactactatccgattcgagcgaggaattgagggggttttgattggggatcagatttggacgaagtgatacgcccgagttgcgatcgcctagcgcccgaagagtgggtttagctttaatatggatacctgattgatggtcttggtcatggttacgattcctgctggtgcacttgagactagacccgccggcagggtgacagcatggtggttggatttaataactagggtttgtgtttgggtggcacctacggattgcgtctgctgttgctgctgttgttgctgttgcgactgctgctgctgttggacatgatgcacctgctgaagtccctgatgctgaccaccgatccccgcctggatcgtcttgatggtggtggtattcggtagctgggccgtggagatgaccgcgccgggattgccggctatgctgatggtgccattgggcagcggctggctggtgaaggtgatgcgattgccggcagctgtctggctggtgttcatcgtgctgtgtggtgtttatgttattggcgagtgtgtttctcctattccactgacttctgtgtgttggtgtgggcgagcgatcctgttccgatcaactagttgcgcacatcctgtgttggtgttggcggagttgttgcatgctgtgcgctccagaagcgaactgcaatgcaaggggaggcgcttttagtatttatacaagattcggctcgaggcggtggagaaacaggtaggcggtggaggtgctacctgaccgccggctacctggcggccgtgcgccataaaccagatgctgcgtacacctggatgccgcgcacaggtaatcgcattcaccttggccaaaaaagcgggtgctccgctgaattggtgctgcgctggctcactcgcactcgcctttgccgtcactgtcgtcggcctttctcctggcgcatccgttgcagtcgttgtcgcgtgtgtgttatctcgctaattcgctgccttttgtttgcgccgctaagcctttctacacttttcccgatcggcgggttttcctgcgcacacacacactcgcgcgtgctcgcacggactgattgttgagcactggaagaatgctttattttgattattttgatgtacaaaaaatttggcagcgacggtgccagaacgccgccattttcacgaatgcgcgtgcaaagcgaaaatcgaggctggtggacgttgccagatagcgtgcgaaaaacacgtaaccaacgatctggcaatgccgctcgtttatgcgggtggcgagtgcgcaatattcgtgaatgcactaaatttaaaaaaaagttcaactcgaaagtggagcacttaataattgatgatttctattaggaaaaattcatatttttcgaaaatccgcataaaaatatttaaaacaaaaagaaaacaaatgcatcttgtacatgtctccagtggcaatatggagcatcgtgccagccgtagtattagtaatttctactttagtggccagcgggtggtggcataaacccacgtccgtgtctgtgcgactgtgtgcgtgtgtttcagtataggttttgtacagcctgcaatgtcgggggaaattttctgggccctgtggcagatgcactcacttcaattcattttgcgttcaaactcggtgcactggggcgcattttaaacgatttcccgttgcgtttctctggcgatttagccgaaaaccgagtaaatattgtttacggaccgccgaggtacggacgagttgtgcagtgtgaccgttggcgacaatatcgtcgtgttaaacgcgataccgaattaaaatactagaaaagaagtagtgacttggatatcatgtcgattttttatagccttgttgcgtacattttcaaaaccaaaaacgtttgctggcattttgatgccatcggattttagccgcataccaaattaattatatgctcattagtttttatatgggtaataagccacaatttttaaggatcaaaataatttattttaatacattcgaatacgatacattttaaatcctttgaactattattagagtactgtttaaagctgaatgttaggtaattgaataaatgaagaatacgctcaaaaattagaaactactaaaactattattagagtactgtttaaagctgaatgttaggtaattac

SEQ ID NO: 11375 - DNA, 4520 bp, DROSOPHILA
aatggcggcgttctggcaccgtcgctgccaaattttttgtacatcaaaataatcaaaataaagcattcttccagtgctcaacaatcagtccgtgcgagcacgcgcgagtgtgtgtgtgcgcaggaaaacccgccgatcgggaaaagtgtagaaaggcttagcggcgcaaacaaaaggcagcgaattagcgagataacacacacgcgacaacgactgcaacggatgcgccaggagaaaggccgacgacagtgacggcaaaggcgagtgcgagtgagccagcgcagcaccaattcagcggagcacccgcttttttggccaagttcgcttctggagcgcacagcatgcaacaactccgccaacaccaacacaggatgtgcgcaactagttgatcggaacaggatcgctcgcccacaccaacacacagaagtcagtggaataggagaaacacactcgccaataacataaacaccacacagcacgatgaacaccagccagacagctgccggcaatcgcatcaccttcaccagccagccgctgcccaatggcaccatcagcatagccggcaatcccggcgcggtcatctccacggcccagctaccgaataccaccaccatcaagacgatccaggcggggatcggtggtcagcatcagggacttcagcaggtgcatcatgtccaacagcagcagcagtcgcaacagcaacaacagcagcaacagcagacgcaatccgccggtcaaccgctgctcaattcaatgctgccggctggcgtggtggtgggcatgcgccaacaggcgccgtcacagcagcagcagaagaatgtgcccaccaacccgctcagtcgcgtggtgatcaactcccacatggcgggcgtgagaccgcagagtccatcgataactttaagcacacttaatacgggtcagaccccggcattgctggtcaagacggataacggattccagctgttgcgcgtgggcacgacgacgggtccgccgacggtgacacagactataaccaacaccagcaataacagcaacacgacaagcaccacaaaccatcccacaaccacacagatccgtctgcaaactgtgccggctgcagcttctatgaccaacacgaccgccaccagcaacatcattgtcaattcggtggcaagcagtggatatgcaaactcttcgcagccgccgcatctgacgcaactaaatgcgcaggcgccacaactgccgcagattacgcagattcaaacaataccggcccagcagtctcagcagcagcaggtgaacaatgtaagctccgcgggaggaacggcaacggcggtcagcagtacgacggcagcgacgacgacgcagcagggcaataccaaagaaaagtgtcgcaagtttctagccaatttaattgaattgtcgacacgggaaccgaagccggtggagaagaacgtgcgcaccctcatccaggagctggtcaatgcgaatgtcgagccggaggagttttgtgaccgcctggagcgcttgctcaacgccagcccgcagccgtgtttgattggattccttaagaagagtttgcctctgctacgacaagccctctacacaaaggagctggtcatcgaaggcattaaacctccgccgcagcacgttctcggcctggccggactctctcaacagttgcctaaaatccaagcgcaaatccgtccgatcggtcctagccagacaacgaccattggacagacgcaggtgcgtatgataacgccgaatgccttgggcacgccgcgacccaccattggccacaccacgatatcgaagcagccaccgaatattcggttgcctacggccccgcgtctcgtcaacactggaggaattcgcacccagataccctcgttgcaggtgcctggtcaggcgaacattgtgcaaatacgtggaccgcagcatgctcagctgcagcgtactggatcggtccagatccgggccaccactcgtccgccaaacagtgtgcccaccgcgaacaaactcactgccgtcaaggtgggacagacgcaaatcaaagcgattacgcccagcctgcatccaccctcgctggcggcaatctcaggtggaccaccgccgacacccacgctgtctgttttgtctacgttgaactccgcctcgaccacaacgctgcccataccatcgttacccacggtccaccttccccccgaagctcttcgagcccgtgagcagatgcaaaattcgctgaaccacaacagcaatcacttcgatgcaaaactggtggagatcaaggcgccgtcgctgcatccgccgcacatggagcggatcaacgcatctctcacaccgattggagccaagacgatggcaaggccgccgcctgcgatcaacaaggcgataggcaaaaagaaacgcgacgccatggaaatggacgccaaattgaacacatcgagcggaggagcggcgtccgctgcgaactcgtttttccagcagagctccatgtcctcgatgtacggtgacgatgatatcaacgatgttgccgccatgggaggtgttaacttggcggaggagtcgcagcgaattctcggctgtaccgaaaacatcggcacgcagattcgatcctgcaaagatgaggtatttctcaatctcccctcgctgcaagctagaatacgggcaattacttcggaggcgggactggatgagccgtcgcaggatgtggccgttctgatatcgcacgcctgtcaggagcgcctgaagaacatcgttgagaagttggctgtgatagcggagcaccgcattgatgtcatcaagttggatccacgctatgagcccgccaaggatgtgcgcggtcagatcaagtttctcgaggagctggacaaggccgagcagaagcgacacgaggaactggagcgtgagatgctgctgcgggcagccaagtcacggtcgagggtggaagatcccgagcaggccaagatgaaggcgagggccaaggagatgcaacgcgccgaaatggaggagttgcgtcaacgagatgccaatctgacggcgctgcaggcgattggacctcggaaaaagctgaagctagacggcgaaacagtcagttcgggagcgggttcaagtggcggcggagtgctaagcagctcgggatctgcgccgacgacgttacggcctcgcataaaacgtgtgaacctgcgcgacatgctcttctacatggagcaagagcgggagttctgtcgcagttccatgctgttcaagacatacctcaagtgatcgctgctgttgcccatcaatcgcaccgtcttctcctcgccgatcctcctactccgtggactgtcgtgttgttgttttatacagctttacgatttcatccacttgcaatatattttagcctcaactttaaatgcgtcgcgtgtcccctgttgttgtttctttttagttaggcggctctatttaatttctatttttacatttatttacataaatcctaaattctaatcgtatttgattttaagcctaatttaaagctcgtttatttttccaataaattctctgtaaaacttaaaccaaaccaatccaaaaacaaaacaaaaccagagtaaacgaagagaataaaataatagagaggaaagtaaaagaaggtaaaagagagcgcgcagtcagcgggcgtttgatttgtaatttgtaacataataatgtttgcatcaactgcattgacggccttatctaaacgatataaacataattattaatatttaattatttagcttagtttgttaaacgaaaacgaaccataattcctagattttaagtaaaaagcaagggcgcgtgaagagaaatcgaaaccgaattacagataaaggtttttaaaaccaactagatcgaaacaagttcagcaacagcaaaacaaaagaacacatcaaaaaaagaaccgaaaaatatccatttaaacatccattgaattaggtttagttgtttaaaaaagatgtaatttttaattacccataatgtataaacggaaatcaatcgttaggcaagaccacaacaaacccaacaaattgtaaatacattctaggctacggtttttctaatagataactaggtaaaaacgcaaacgtaattaacaaattatcgatggcaaggagcgatgcgagcgcagacaacttggcacaccgaaaaaatatgtttttattagtggcgctcgttcatccattaagaatggcgattcattaggctccatagatccataaatcccctaatccaatctgaactacacacaaaatagacaaattttatacaattagctcgataaatcttgtaaaatagagtcccgtaaaaaaattataacaaataaattgacaacaattgatgtaattcagtaaacctaagcaaaaagtgaaaccattctaagcaaattctttgtgtgtaaaaattaatatgataaacaaaatgcagatgcaaccgtaaacagcgcatagtttggtaggcatataactgaatatatatatattattattattatgttttaacattaagcaaaaaaataa

SEQ ID NO: 11376 - protein, 921 aa, DROSOPHILA
MNTSQTAAGNRITFTSQPLPNGTISIAGNPGAVISTAQLPNTTTIKTIQAGIGGQHQGLQQVHHVQQQQQSQQQQQQQQQTQSAGQPLLNSMLPAGVVVGMRQQAPSQQQQKNVPTNPLSRVVINSHMAGVRPQSPSITLSTLNTGQTPALLVKTDNGFQLLRVGTTTGPPTVTQTITNTSNNSNTTSTTNHPTTTQIRLQTVPAAASMTNTTATSNIIVNSVASSGYANSSQPPHLTQLNAQAPQLPQITQIQTIPAQQSQQQQVNNVSSAGGTATAVSSTTAATTTQQGNTKEKCRKFLANLIELSTREPKPVEKNVRTLIQELVNANVEPEEFCDRLERLLNASPQPCLIGFLKKSLPLLRQALYTKELVIEGIKPPPQHVLGLAGLSQQLPKIQAQIRPIGPSQTTTIGQTQVRMITPNALGTPRPTIGHTTISKQPPNIRLPTAPRLVNTGGIRTQIPSLQVPGQANIVQIRGPQHAQLQRTGSVQIRATTRPPNSVPTANKLTAVKVGQTQIKAITPSLHPPSLAAISGGPPPTPTLSVLSTLNSASTTTLPIPSLPTVHLPPEALRAREQMQNSLNHNSNHFDAKLVEIKAPSLHPPHMERINASLTPIGAKTMARPPPAINKAIGKKKRDAMEMDAKLNTSSGGAASAANSFFQQSSMSSMYGDDDINDVAAMGGVNLAEESQRILGCTENIGTQIRSCKDEVFLNLPSLQARIRAITSEAGLDEPSQDVAVLISHACQERLKNIVEKLAVIAEHRIDVIKLDPRYEPAKDVRGQIKFLEELDKAEQKRHEELEREMLLRAAKSRSRVEDPEQAKMKARAKEMQRAEMEELRQRDANLTALQAIGPRKKLKLDGETVSSGAGSSGGGVLSSSGSAPTTLRPRIKRVNLRDMLFYMEQEREFCRSSMLFKTYLK

SEQ ID NO: 11377 - DNA, 4060 bp, DROSOPHILA
aaataaaagtataagtcgtggaattgccactctttaaagctattcgttgtgaaaaaaaaacataaggaacttttattttggcatatcacgccatattcttatcaaataattttttttcggtttaattttaaaaattcgcgccaactcgataaatgaacgttcagttaaattcacctcattgtacaaacgaggtgaactgtgttaaacagctgacagccggcattcatttgttgttctctgtgattttacgtaatattggtatttattctgaatataattgtttataaagcacattaaaatgatgatgcgacactgtatgatggccttgagggtcgctagatcccagatcccgttcagcactgccaggaatactcagagcaatctcctccaacgtttttacagccaggctcctcaaattggaatcgtggactacgacgtggtcaagaaactacccagcgaaccacagaaactgctcatcgatgtccgggagccggaagagctgaaggaaaccggacaaatccccgccagcatcaacatccctctgggcgtggttagtcaggaattggcggccagtgagcagctttttaaatccaaatatggccgggaaaaaccgaagccagaaacggagattatattccactgcaagattggcaaaagaagccttaaggctgcagaagctgccgccgcattgggattcaagaatgtaaagaactaccagggatcttggctggattgggccgaacgagagggcctgcccaagtaaataacattgctatgcgaataatgacattatccatctggttaatccattattttgcaacaataattccatttcgcccaaacaacccgattactcatttttaaaaataaacacattttatgtgctttggcaagttatatataatatttattaatactatttaatagcatattggaactatatttttagatatttgagtatttttggttatgagatcaatatagggggacttcgtttgaattagtccacctcctcgacggtgggacccttataaccgccagcttgctgtccaaagtttggagcctgctggccatctccacctcccttgtgcatcttggtcatgatggggctgcagaactgttccagttccttcagtttgtactcgtactcctccttctcggcggtggtgttgctgtccaaccacttcatcgcctcgctgcaacgctccacaatactgctcttgtcggctgcactgatgcgatcgccaccattctcggccgcctcctttacaccaaacaaataggtctccagttgattgcgggcggcgatccgctggcgatggcgctcgtcctcctcggcgtacttctccgcctcactgagcatgcggtcgatgtccgcctgcgacagacgacccttgtcgttcttgatggtaatgttcttggcgttgccagtgccctgctccttggcggtcacattcaggataccgtttgcgtccaaatcgaaagtaacgtcgatcttgggcactccacggggtgcgggtggaacgccagtgagatcgaatgtgcccaatacattgttgtccttggtcagagccctctcgccctcaaacacttgaatggtcaccgccggctggttgtcggcataggtggtgaaggtcttggactgcttgcatggaatgcggctgttgcgctcaatcagcttggtcatcaccccgccggcggtttctatgcccaacgagagtggggcaacatcgaccagtaggacatccttgatctcgctgctcttgtcgcccgacagaatggctgcctggatggctgctccgtaggccaccgcctcgtccggattgattgacaagttcagggtctttccgccgaagaagttctgcagcaggttctgaaccttgggaatacgagtggagcctccaaccaggactatgtcatggatctggctcttgtccattttagcgtccttgagtgccttctcaactggctccagtgtgttgcggaagaggtcaccgcaaagttcctcgaatctggcgcggctcaccttcgagtagaagtcgtgtccctcgtacagggcgtcaatctccaaagaagcctccgtgctggaggaaagggtgcgctttgcgcgctcggctgccgtgcgaagacgacgcagtgcgcgtgggttggagcgcagatcctttttgtacttgcgcttaaactcctcggcaaagtggttaaccaatcggttgtcgaagtcctcgccacccagatgtgtgtctcccgcagtcgagcgcacctcaaacagggatccctcgtcaatggtcaagatggagacgtcaaaagtaccaccgcccaaatcgaaaatcagcacattgcgctctcccttcagattcttgtccaggccgtaggccagagccgccgctgttggctcgttgatgatgcggagcacattgatgccagcgatggcaccagcatcctttgttgcctggcgctgggagtcgttgaagtaggccggcactgtgatgacagcgtccttcactgtagtgcccaggtaggcttctgcagtctccttcattttggtgagtaccatcgagctaatctcctcgggagagaagcacttattcgcgcccttgaactccacgcttatctttggtttgccgttgtcgttgatcactttgaacggccagtgcttaatgtcctcctggatcttggaatcgtcgaaacgacgcccaatcaggcgtttggcatcgaacacagagttcttggggttcatggccacctggttcttggcggcatctccaataaggcgttccgagtcggtgaaggccacgtacgatggtgtggtacggttaccctggtcgttggcaatgatctccacttttccgtactggaagactcccacgcaggagtatgtggtgcccaaatcgattccaatggctggcatcttggctatttctgttgctttttagtttgaacttgggtgcgttttcttgtggatagttttcaataatttgtatgcttctttgcgttttgcttttctattttttcacttggtaaagacgtttcagttttcaactgtcactctgaactgctttttatttttcgtttgctgaagtgttttcactttggctgtttgatttcaaatgtagcgtctgggaaatttgcgcccgtatttatactcagtcgccgggaggggaaaattcgagatttccctgcgagaaagggtcagaacattccagtcagttcgtgtgtgtgcgagcgagtcaactagtgtgcacttcgcaggggaaattgtcagttgaaaggactgaaagttcaggaaatttcgagaaatatattttttttattgacataggtcatcattccaagtggtcattaaactaaattcgtatgcaagctatttttggctgatttgcggattgatacgttaagccattcatatttttagattctgtttttggtttatatctcttttattatatgtgcaatacatatgtgtgtatttttcttctgattggaatatttcctctgcagaatatgacatacaattaccttaaaagttgaacacacttttcaaaacttaattattccaattaattatttccaaaaatttaaagaatcgtactgctctatatccaggatacataaatatatagatacatatataggatgtacatagataggatgtatatagaatacttcgtagatcgatacaatctttaatgtgtttataaatagggaattttaagatgcaagagcaaatgaaaaaaatctcagcttgcattatgaatatacatatgaaaatgtatagataattgtacatattaatatatatatagttctgatttccatgaccttttgaagggtattatgaaaagatcctgaaatgaagaacaagccattggaaaatctacagtgatgattgttttaaaccgaaaatgccttcggttcgcataagcccaagattataaattattcattagttttaaaatgtttttgtttacaaattgtattttgtaaacaaagacgaccgatagtaatcgatagtggttaatttgaaatgaaaattgtactatcgctgatgtatcccatcgat

SEQ ID NO: 11378 - DNA, 2060 bp, DROSOPHILA
aaaagcagttcagagtgacagttgaaaactgaaacgtctttaccaagtgaaaaaatagaaaagcaaaacgcaaagaagcatacaaattattgaaaactatccacaagaaaacgcacccaagttcaaactaaaaagcaacagaaatagccaagatgccagccattggaatcgatttgggcaccacatactcctgcgtgggagtcttccagtacggaaaagtggagatcattgccaacgaccagggtaaccgtaccacaccatcgtacgtggccttcaccgactcggaacgccttattggagatgccgccaagaaccaggtggccatgaaccccaagaactctgtgttcgatgccaaacgcctgattgggcgtcgtttcgacgattccaagatccaggaggacattaagcactggccgttcaaagtgatcaacgacaacggcaaaccaaagataagcgtggagttcaagggcgcgaataagtgcttctctcccgaggagattagctcgatggtactcaccaaaatgaaggagactgcagaagcctacctgggcactacagtgaaggacgctgtcatcacagtgccggcctacttcaacgactcccagcgccaggcaacaaaggatgctggtgccatcgctggcatcaatgtgctccgcatcatcaacgagccaacagcggcggctctggcctacggcctggacaagaatctgaagggagagcgcaatgtgctgattttcgatttgggcggtggtacttttgacgtctccatcttgaccattgacgagggatccctgtttgaggtgcgctcgactgcgggagacacacatctgggtggcgaggacttcgacaaccgattggttaaccactttgccgaggagtttaagcgcaagtacaaaaaggatctgcgctccaacccacgcgcactgcgtcgtcttcgcacggcagccgagcgcgcaaagcgcaccctttcctccagcacggaggcttctttggagattgacgccctgtacgagggacacgacttctactcgaaggtgagccgcgccagattcgaggaactttgcggtgacctcttccgcaacacactggagccagttgagaaggcactcaaggacgctaaaatggacaagagccagatccatgacatagtcctggttggaggctccactcgtattcccaaggttcagaacctgctgcagaacttcttcggcggaaagaccctgaacttgtcaatcaatccggacgaggcggtggcctacggagcagccatccaggcagccattctgtcgggcgacaagagcagcgagatcaaggatgtcctactggtcgatgttgccccactctcgttgggcatagaaaccgccggcggggtgatgaccaagctgattgagcgcaacagccgcattccatgcaagcagtccaagaccttcaccacctatgccgacaaccagccggcggtgaccattcaagtgtttgagggcgagagggctctgaccaaggacaacaatgtattgggcacattcgatctcactggcgttccacccgcaccccgtggagtgcccaagatcgacgttactttcgatttggacgcaaacggtatcctgaatgtgaccgccaaggagcagggcactggcaacgccaagaacattaccatcaagaacgacaagggtcgtctgtcgcaggcggacatcgaccgcatgctcagtgaggcggagaagtacgccgaggaggacgagcgccatcgccagcggatcgccgcccgcaatcaactggagacctatttgtttggtgtaaaggaggcggccgagaatggtggcgatcgcatcagtgcagccgacaagagcagtattgtggagcgttgcagcgaggcgatgaagtggttggacagcaacaccaccgccgagaaggaggagtacgagtacaaactgaaggaactggaacagttctgcagccccatcatgaccaagatgcacaagggaggtggagatggccagcaggctccaaactttggacagcaagctggcggttataagggtcccaccgtcgaggaggtggactaa

SEQ ID NO: 11379 - protein, 635 aa, DROSOPHILA
MPAIGIDLGTTYSCVGVFQYGKVEIIANDQGNRTTPSYVAFTDSERLIGDAAKNQVAMNPKNSVFDAKRLIGRRFDDSKIQEDIKHWPFKVINDNGKPKISVEFKGANKCFSPEEISSMVLTKMKETAEAYLGTTVKDAVITVPAYFNDSQRQATKDAGAIAGINVLRIINEPTAAALAYGLDKNLKGERNVLIFDLGGGTFDVSILTIDEGSLFEVRSTAGDTHLGGEDFDNRLVNHFAEEFKRKYKKDLRSNPRALRRLRTAAERAKRTLSSSTEASLEIDALYEGHDFYSKVSRARFEELCGDLFRNTLEPVEKALKDAKMDKSQIHDIVLVGGSTRIPKVQNLLQNFFGGKTLNLSINPDEAVAYGAAIQAAILSGDKSSEIKDVLLVDVAPLSLGIETAGGVMTKLIERNSRIPCKQSKTFTTYADNQPAVTIQVFEGERALTKDNNVLGTFDLTGVPPAPRGVPKIDVTFDLDANGILNVTAKEQGTGNAKNITIKNDKGRLSQADIDRMLSEAEKYAEEDERHRQRIAARNQLETYLFGVKEAAENGGDRISAADKSSIVERCSEAMKWLDSNTTAEKEEYEYKLKELEQFCSPIMTKMHKGGGDGQQAPNFGQQAGGYKGPTVEEVD

SEQ ID NO: 11380 - DNA, 2495 bp, DROSOPHILA
caacaaaggcacaatggagcagagtccacgcccaccgcccaccgctggggtgtcccacttggccggctgcattgttggtttttatttacggggacgggtggaggaagagcggagtgcaggaaaagcgcggaacaggaaagcggggaggggaaacagcgcctgcggcatctggggcattgatgccaggtgacagacggcaaaatggtggcgcgtccttctgtgatgcaatgtgtgtacaattttcagcctgcatatgccgcccgttttacagctaattgatggctatttacattttaaatcgcaagaaactttaaaaccaagttggccacaaatgcaacttggttgtaattttagttgcggcggatgaatagttaacatagttaaaacctttataatagcttgtgtattcggggtaataccccttttgtaaaatatttgaatcattcattttatgcaaaattaaaacactaattatttccataaagttgacacttcttaagagctgtaaagagctgtgtcgtttctcatactattttttaaagcgttccacttttttaacactgattgaataaaaaactacaaactagattccctaacaagttgagtcttgaagattgcgagctcgtgaatacgaaatgtggtttcgtcatattcgattttcgacacttgaaatatgtcaatccttggtcgtttcagtggctgaaagagacaagtggagtaggatacagcaaatattttgcctctagtcaacctggttcaatattcaggaagtgcaaaaaagcttctgattttattacagggtacttgaaagtaccacgggtacattggtacagaaaattttcatactttttagacaacagaaacactcatcaaatgttcaaggagtaacatgtcaatttagcacagttgtcaaataaatcggtcgagttatccacatatacaataatacggcacgataaagaaaagggttttatttttaagaacttaagccaattaaaatatggaagggctattttctgccgaggatggcacaccttcgtgcagctggacatgcagcaacagcgcggttaagagaatccagaaggagctggacgagattacgagggatccgccgcaatactgcagtgctggtccgaaggaggacaacctgtacgagtggacctcgacgatcatcggacccgcggactccgtctacgagaacggaatattcaagctggacatattctttccggttgagtatccttttgctccaccggtagttatatttcgcacgcccatatatcactgcaacatccaccgcctgggcttcatttgtctggatatcctgaaggagaaatggtcaccggcactgaccatctcgaagattctgctatcaatttgctccctactcaccgactgcaatcccaaggatccgctgatggccaaaattggcacggaatatctgaagaatagagcagaacatgacaagaaagcgcgcctctggaccaaacggtagtaatttggaacttgttttcttaaaactatgtaataatccttatcaatttatttagttatgccaaagacgaatagatggcagcttcgcttcgaatcgatgactgacgtcagacgtctttgttgttcactactgtgctatatgaaatatacatatgctgctccataatattgaagggaaatctattaatcactcggtacctctttgtcttttcattgacaactttgaaaattgctcatgccgcaattggggaacgttgccacgaccagacacctacgcccattgtggtaatactttcgagtggccgaccgatggcgttgccaacaaacttccgccaggcgaaaacgaaaattcgttggggattgaaaatgtttttttgacatctacttcgtgcttttcatgcgaaaatatatactttgcgaaacaaaggcagcaagcaaagaggcaaggtggcaaagtaggtgagctccactctgttgcttatcgatttgaagttggggccaaggaaacacgaaattagcacaggccacgtcgctgccaggaactgtcaagtgttgcatactttttcgggcaatttgatggccaagcgggggcgactcgtcggaaaaacaacaccgaagtggggcacatttgcatgaaaccggagttggaggaggacaaacattagcagaagtcagctggagttcgcagctaaatcgaaaagcatattctttcgatgggtaaccctttttggcaaccaacccctcggcggaccaaaaaccgggtaggaagtcaaatatgctgccaaagttattgatggcatccgcagcagaacaaatttgcttaaatctgtttaatgttttcccattttttgtgccgtccttaactggattcatccccagctaccgctttgattttctcttattttttaatatttataaatatgcttgctcttcaaacaatttgttaaaatgttggtacttctttcagctgtgtttctgattggccgcatagatcattgtga

SEQ ID NO: 11381 - DNA, 495 bp, DROSOPHILA
atggaagggctattttctgccgaggatggcacaccttcgtgcagctggacatgcagcaacagcgcggttaagagaatccagaaggagctggacgagattacgagggatccgccgcaatactgcagtgctggtccgaaggaggacaacctgtacgagtggacctcgacgatcatcggacccgcggactccgtctacgagaacggaatattcaagctggacatattctttccggttgagtatccttttgctccaccggtagttatatttcgcacgcccatatatcactgcaacatccaccgcctgggcttcatttgtctggatatcctgaaggagaaatggtcaccggcactgaccatctcgaagattctgctatcaatttgctccctactcaccgactgcaatcccaaggatccgctgatggccaaaattggcacggaatatctgaagaatagagcagaacatgacaagaaagcgcgcctctggaccaaacggtag

SEQ ID NO: 11382 - protein, 164 aa, DROSOPHILA
MEGLFSAEDGTPSCSWTCSNSAVKRIQKELDEITRDPPQYCSAGPKEDNLYEWTSTIIGPADSVYENGIFKLDIFFPVEYPFAPPVVIFRTPIYHCNIHRLGFICLDILKEKWSPALTISKILLSICSLLTDCNPKDPLMAKIGTEYLKNRAEHDKKARLWTKR

SEQ ID NO: 11383 - DNA, 11131 bp, DROSOPHILA
aaaagccaaagccaaagctgaaactcagaacatttgcataagcaattgagcgacatggcaggtggagcaggggcattattcacgctcaaattagattaaaagtaatgacaattaacgccataaaattctagtacttaagtagcaattagttaaacttatataaattcagtctttacaagcatgcattatggcaattattagtgtaaaagtgcgagaaattatttaaaactgattattttttaaaatgtatatattttattaccacgttttcagccccttttggccatgcccatatatttttggacttggtcacaaaacaaacattcaaaagtgacgtttgtttttttaattatggctcgcttattcatgttcttgtctttgggagtcgtcgtcgttcggcagattaagctgtcagcaaagaaacacaacattttggccactttgtatgtatttttaaatacgctcagttaatcaaaaatattcgtacatatataatttgattttcagctcccttcgcacgcaaatcaaattaatgttgcatgcgttacttttccactctcctaaaatgtgtgacgaccttgtgccatgaaaaatgtatgctttctgggcatgaaaaaaaaaagaatcataatcaaatttaactgttgtcatcatgatttatttactcaagaacaaaacacgacaaacgatgacgaactcgccttcagacagaagacagaagcacaaagataaattaatcgccagtcagtcacagagtcgatcggtctattgcccgaagtcatttattcacaaatgctcgtatatgagtatatcggggcaaactcgagatttaagccgggtatgtcgtcatagctacaataatgagaaaacaacttgttttgcctgcaggagcaaatccattttgcaattatttgcctgtttcagttaattataattatttgcgaagcaacaaaatgcaagcaaaaacaaactatacaaacatgactctaaacaatattctttgttgaaaaataaaaaaaaatcgggttccaacaactgaattgtgactttgaaatcagcttagcactttgaaattagacgctatgtgaaaacaacttgagaagtgcacacacccaatacatctgaactgaaactgatcgaaacgaattagaataaattataaaatccaaatatatggacaggagtcaaaagcgtcggctatcagatacccatcaaaaatattttaattacaatttaaattgctgaaaattactgaacaccacgtttcgaagaattgttattatatatatttatattatcttacaggaaatactttaaatacttgtcatgaattaaagttaaaacaacaaaattccaccatccattcttaaaacacttaaatgacaaacaaatgaggagatttccttgaactttacttcgacgtgcctcataattcgccacgaaatccaagttgatccaaataaataccaagaatgagtatcatttatggtctggcaaccaaagttcaaccttaaaaatggagatccgacacaagtcaagctttggtagctgataccatctcaatcaaaggcgaataaacatttttaactattttcaagtgagctcaagcaatgtctgacttgtacaaatgaatgtcaagcgctgctgcagcagcaaataaaattagcaataaatttaaataaataactgcctggcgatattagatcatacgaaatctcagggggccgtctacgcgtactcgtggtagcactcaaaacactcgaaacgaaaccgaaaatccatccgaatcggaaatcactcaagagagtgcgccaaagaccaactgggaccgtactatgcgatacagtacgatacgatacgatccgatacgatacgatcccatccgatccggccaacgcaaaaagcacccacacatcgggtggatgtggatatttggggaaagagagaactggtttctcttcaatgactttgtgctgagctgtgctgtgttgtgttgtgttgtgcgctgggctgttttgtgttggcgttggcgagcgccagtgggtttctcggtttattggtcgtcgctgagaaaacgagactgtgctgccttttaatgcggcatttcattcattgatcgttccaatagcgcgccgcacgctcagcgcagcggacaagtgagccaaaagtccgacttccactgccatcgccgcccacctgagccgctaacctggctaacggagtcaaagccaactgggggcagtagtcagctgatttagctgccaccgcatcccaagccaaaccaagtcagaccatcccagcgatccgcgagatatatctattcagtgcacagccgacaagcgcagcaggcggacgcagcgcagcattttctccgtgtattttcgtatgccatctcgggatattggatacagatacagattccgagatacagatacacagaacgcgagcgacgcgcactcatagatatttttagcaaccggcctcacgcacaccgccgcacacattagtaccgccgcactgacacacgcggcttgcacgttttcacggaaaatccattcttcgaggcttttccagcaggcccaagataaacacaactcaagaatgcgcgaaaaccgtaccgaagttattatcaatagttaaaccagcggcgcaatcacaaccgcaacaaccacaaccaccgcaatattaattcaaaccaaaacaagttccagaagtttttgaggaaataaaaactgaaaacaaaccttttttgttgtgttaacatgccaaatttatgcatgagctaataactttaaatccgaaaagaataaaaaaaagtccaaacaaaacaaaattcaaacaaagatcgcatatcaaaattagttgggtgactaattagacagcgcgttgtcggaatttcaatttgcatactttggcgcaactttaatgaaccaaaaattaaaataaaaacatcaacaaatcttaatcagagtgcacaactgaattcaaatcatcctgaaagaccaatcccgcagccatacattgttggatttatgaaatcaaaaaggtaaatataccgccgccatttatcagacataagcgttcagatatagaaaagatatagaagatctgcccgatctcttgttgccgccccaataaaaatagacaaaaggcattcctctgtccaatcacgttagtggctggcagatggggcagggcgggcttttaagaaacttctgaaacatttatttgtccaaggtgttgaaaagccagatgtgtgcaggggaaaatgttttcgagctgctcagcagggaaaacggcgacgacagccagttgtcaactgattttcaaaggttaccgaagggaagcagcaacttggctgcgtttgtttgcgaccaaagtagggggaacagtttaattaatgtgcaaacaaaagctgtgaattctcatcatcaatgagagtcccgcttaacctgccactcactttaaatctgtgatgtgctaatcaacgccggcatttatttatttactttcattttcgccataccattcggcaacaagcactatgtttgcccaaataatcgagtaaaattggtttctggcagccagtcaatcgccgattttaatttggcatttatttatttaatatattaatatattattcattttgtcgaaagctaaaataaactagcatctcatgggctgactcaatacatgattaaaaaatgttattcgtcataaatattttatgatttacaaaaaaaaaattcgccaaaaatacacgcattaatcgagtcaaattttaatgatttttctgccatggaaaggtgcatctaaaattaaattagtttatggacacatgagtctattgctaccctatatatacttgcctacctcattgtttgctgtccccctgacccaaatctcgatcgtatgtgggaaaagccagcgcccctccttgcaaagagacttaaacaataacaatagcaggaataaatcaagaaaaataaaagttagtcgtaggcaaatgccagagacctgtcaaaaaatcaagcaaatcaaaagccgatgggtaatacaaaaccacacagaaagctatcaaaatataactcatacgtattcgtatttatccacacggtggtggaagggagacggtgaatgtaaacacggccacatcacacatacgcagtgtgtgccaattttaataaacaaactcaacgtaaatggaaaatcaaacaaaatcatttggccaaagcaatggcaacaaatcaacagaagaaaaaacaaaacgaaataaaaggaaagaagcgtaaaaaaatcaaaagacggcaaaaaaagagatgggtaaaataacaaataagaacttgccgcaggccggctaaaaataatagctgccaacggtagcacacacgagactagcatcagggggacgtgcaacgtgcaactggcaacagccaacagcacgagacaacagcaaccacacacacacacacacgcgcaactagctaggcgagcaacaacaaaggttatagactataggtgactatgtatatagtatcggcaacaaagtcgaagccgaatgaaagattttgacgctttccacaaaaagcaaattaagaatcacaaatcgaggcagataaaaaatagatagagcgctacgaaaataagaaaacgaaaatagtgaaggaagaaaattcaagttgcatacaatgaaaactaattttagagctgtggaaaagacaacaacaacaaaacgaatcaaaaacacggcaggcacagagacaatctgaatcagtcggagattccatagcgaatcggtccagagggcagctcttgaagttacgaaagacaaagcaactttggatttcattcaaaagcaataattaaagttgaaagtttagttcttgatgatgattttactactttagttactttttcaattgaaggattactaatatttataaatcaaagtttagatccgtttaccatgctaactttatcttgtcaagagaaaacattgttcaaactaagtcatctaccctcgttatagcaatgcctcatgtggttcagttgcttttttttccgtgcccaagcagcagacgcttcattttccatttaaccgcacccgactgccgaaatccttgaattcaacaattcctcctgccccgattttccccccggaaaacccatgggcgcgcagacaagcgtgcagaaaaagttctaaatttaatggctacacctaaaaatgcagcgactgcaaccgaaccaaaagtgaagggcagactgcagagggaggaggagccactcgccggtagtttcaagtgcacttcggctaggcctggctaacttccccgtccccattcccattccatctgattttccccaaaaaaaaaaaagtattttatatatctgtggaacgggccgacccacccacacgcccctgccccgcccctcgaccccttcacgcctcgtcgcacgcacggctcgccttttgtctaccaaactgttggtaaaagagaatgggatcaggaaaaggggtgcactgaaacaaaattcttcaactgcaaataattgtaaggaaaaaaactttaagaattttttgttgtcaaaaagctcaacattttatttgaatatgagatcttataaatatatcatataacaaaaacacaacttagtttgataagctgaaatgttataagcagtaatcaaacataacagctttattgtatttgattgaacgtatttctttcacattcctccgatttttctcagtgtcaaaatgaaatgttgggcttttgtgtaagaggaactgttctatgtttgttgtctgtgcatttcaattgggcgctttctgcattgtgccggcgtgtaattgaaaacttaagcagaggcaccaccccgccctccttcccccccccccaccgctcactttgtccacgaaaagcgcgcaacaaattttccaatcaacagagaacgaaacaggccctatgcactataaactgcgccccgctaacttcctgctccacttccttgcagcatatcctgtatccctccggttgcgactccgaaaatcaggaggccgcttgttgctgtttgttcaacaaacgtttattagccgcgaatacttttaatcgcatgcaatttgttgattgcggacagtcgttgcactttccacgcttttccacccacccagcgaaaaggcccactttaagcacacggaactaggtaattttcacgtcgttttggaccggagggcgggaaaatgggaaaattgggcggaggggagcgaggggagtgagcaggtgaacaacgtttgccgcccctctttgaagacggtgcacaaatttttctgtgttgcgcgcttaattgcagcttgtttgttgcatgtcgcaaacttttcacgatgcccttacaactcaagtgggttccactgacttgggggcgggtcttttaaagaatgacattcgtttcgtaccatgctttaaaaataatgtattaacgaaatttatatgtatatagatatgtagagtagaggatagatactaagcatattctaaaagcatttaaaactttttgaaagggcatgcaatccatgcggatcttttccaacttaaaaacttctttctgctgggtctttaagcatttcttaggattgcgtggtaaaaattaattatacctcgaaacaggggcgaaacgccaaaagaaaatgccggcacgaagtgaagaacctagccacgtgttgaaagttgaggcagggaaaggtgatttgaatggagatttgctgggatttcaagatgagctgtgctgaatctcttggcatgcattctctctggttttttttttttttttttttattgctgccagacaaacaaacattaacggtaatcgaagaaaagtgctcacttaaggagaaacacctcataactcgtttaggccaagccaagagcgagctctgggaatggtcaaagctatgcaacaagtgtcaagcaggccaacaacgagccaacatgctggcaatccaagccaatgcgagccggattgaatcgggcaaggtggccagaatcgtctagtgccaattttggacaatctgcactaaattgtccatttaagtgggcccggctaaaccgactaactcgacgttagctgctccccttagatcaactgactgcaatcaatctggctgcatttacacctctgcattcagactggcaaactggaaggttggaaggctggttagctgactagctggctagctggcaaaatggcaaactggcgatttatgaggccaaggcacgttacgtgcaagggcgttagcatcgatgcagaaacatttctatctccatacacattcgcacagaccatgtgtatctgcaactgtttgggaggtggaaatgacggcgttgcattgcgttgcgttggcttcatgttacattttcatgtaacttaattcttgcattaaaatgcattcattaaccgttgcctttgttgtttgttttgcgctgctttgttgcatttccaaccgccgaacagtcaccgcaaaatgtatccgccccgcattcaactctcgatagaggggaaaatatttcatatagctgacctaccgcaccacacaaaagaaaataataaacatttcatttaccgcacaaaactttccccatttgaaatgaagtagacagcgcccttggcaatgacgggaatttaaaactcaccattttcctttcacgaaaaatattttataacaatcaacatttctgggaaattttatctggctagtgaacacaatctactcatgtttcataaacaatcttgtgtgacaaataggaaaacacctaaaatctgaggttctcttaaaatagaccactcttaagcaaattattaaactggttatgaaaattcctaaaactgttgcgataaagcatttaattacagaaataaaaaactgttcatcaaggcaaataaaatttaaattagtcgctagtttatgaacaattccattcatgcggcatttacgaaacataatttatttttctttctcatccgtatacttgtttgtatatttttaaagcagccaatttaacgaggtcttaaaatatttttatgaactttcgtgttaaaagttttatataggctaattaaagttttattggaattttgtatgtattttcaaaggctataacaaaaactaacttatttaacagcttaggaaatcttttgaaatttatggataagtacttttagttcttaacaagattaatgacaatttttttaaatatttgtagcctactcattaaaacaaatgcacttgtttgcgtttacattactcatacgatgtgaaatacgtaaaactaatatgggcttaccagaattcaacaacttgaataaaccatttttaggagttgagaagccagctcatagagttttttgctggcaaatatgactcagaggccgatcgagaagatactgggaattttgtagattacgcaacgcaatgagcaatgagaaatttcatttggcagaccaatttgttcttgcccccgctgctaaattgtatttattagttttttggtttgatgcgtttcgtttcgtttcgtctcggtttttcggcttcagtgggttttatgacggaagcactactcaagaatcgacttcagttcattgaagccaattcgagagccgtttacggaagtttttggcggggtgggtccgaaaataaccgattcgcttcattgcacaagccccatatgctctccgatgtctttcgaaaaatagtacaaaattgttaattgccccgggatgggatgggatgggttcgaaatatatataacctagaagaccctcgactaaagtctgcctctgcactccactttcagatgaagtccaatacgtacgaactgcacaactacgccgatctgaatgacatggccagagcgacggactccaaggattcgcgcaaaaggaagacggccagtgctcggggcgagaagtattccctgcgacagaagcgacaaaagaggggctccaacgaggatggggagtcagccaacctggctgactttcaactagaattagatcccatagcggagccggctagtaaatcgaggaaaaatgcacccaccaagtccaagacgaaagcaccgccactgagtaaataccgtcggaaaacagcgaatgccagggagcgaaccagaatgcgtgagatcaacacggcctttgagacactgaggcattgtgttcccgaagcgatcaagggcgaggatgcggccaataccaacgagaagctgaccaaaatcaccaccctgagactggccatgaagtacatcaccatgctgaccgactcgattcgagatcccagctatgaaagcgaatttataggggagtgtctggaggagagtgccaatcgggaggcgagagtggacttggaagcgaacgaggaagccgaggtggagctacccgttccagttgccaagaagccagccaagacaaagggcagtggtaagaagagttccgccgcgagcaaaagacagagccaaaagcaggccaagatagtgccccagataccaccgataagttccggtgagtcgtgctacgccacctcttcgattggatcgcctgcctcctccgcctacgcatcgctctcctcgtcatcgaacagccacagcagcagtagcagtccgggactggagctggacagtctggtgggattgaacggaatcagcgccctggactctctgcttctggatacctccgatggggattccctctcctgtctaagtcccggctatggaagtctactcactggcagcggggaatccctgttgcccggttgccgaggtgatctgcccatgtcgggtctggagaagtcggatgtggagctcagtctgcgattactggaccagagttccaaggattccttcgactttgccagcgatcagcagccgtcggcctgtattagttcgttctccgctctggatgggtatccattcgacctgctgcacagcgattttccggatatgtttctcacgtgacgcgtatttcttagcaaccctaactactctccttttaagcctaaccctcgtcttaagttagagtgcgagttttaacccgactttcactattagccattacatgcgatgcgccattgaggcggaattcattgtgtcatagcaagcagctgacaggataagtatattcacatcctgcgaaggcaaaagctgctcaccgccacatccacatgatagctcaactcaactagtgatttaagcatttctttgtgacgcatttctcgttatcctgtaaataaagcacccagtgttgattcaaacaatctattctgtgatgggattttggatccttcaactttcagagatatgaaacagagtagactcttagattattagttttaaatggagcgattctgaaattgatattaggtagccgcaatataaatcataccttatatttgagatcaatagacacacatcgaaatggcaaacacttttaatcctgaggaggactttccggaagtctacaaggtctgcaagttgttcaatccgagcatagacgatcttgagaagattaaaaacgcaatggatcgtgagattacgatgggtctgagtcgcgatcatcacgatcgttcgaccgttccgtgccacttgagctatgtacaggatttgccaacgggcagggagcgtggtcagttcttggccctggagatgatgcccactaactgcaggataatgctggtgaagttcagcagcgagagagatatctacaccagttccaagtgcgtgattatgccgcatactgtggcagcgggtcgaggaaccgaggtcttcacctttctggccaccagcatagcaaattttgtgaaggagaaaaaggtggacaaggacaatctgccgctgggcatagcctttgcctttaccctaaagaagttggctttggatgtgggtatccttgtgtcgtggaccaaggagtttggagcccaaggcgccatcggcaaggatgtggtccaactgctgcgcgatgctctggccaagtttcccgaaatctccgtcgatgtcatgggtatcatcaatgtcggagccggttcgctgctggctctgtgctgggcccaaccggatacccgaattggcttgatcatgggcagtat

SEQ ID NO: 11384 - DNA, 1684 bp, DROSOPHILA
ttgttgaaaaataaaaaaaaataaccacaaccaccgcaatattaattcaaaccaaaacaagttccagaagtttttgaggaaataaaaactgaaaacaaaccttttttgttgtgttaacatgccaaatttatgcatgagctaataactttaaatccgaaaagaataaaaaaaagtccaaacaaaacaaaattcaaacaaagatcgcatatcaaaattagttgggtgactaattagacagcgcgttgtcggaatttcaatttgcatactttggcgcaactttaatgaaccaaaaattaaaataaaaacatcaacaaatcttaatcagagtgcacaactgaattcaaatcatcctgaaagaccaatcccgcagccatacattgttggatttatgaaatcaaaaagatgaagtccaatacgtacgaactgcacaactacgccgatctgaatgacatggccagagcgacggactccaaggattcgcgcaaaaggaagacggccagtgctcggggcgagaagtattccctgcgacagaagcgacaaaagaggggctccaacgaggatggggagtcagccaacctggctgactttcaactagaattagatcccatagcggagccggctagtaaatcgaggaaaaatgcacccaccaagtccaagacgaaagcaccgccactgagtaaataccgtcggaaaacagcgaatgccagggagcgaaccagaatgcgtgagatcaacacggcctttgagacactgaggcattgtgttcccgaagcgatcaagggcgaggatgcggccaataccaacgagaagctgaccaaaatcaccaccctgagactggccatgaagtacatcaccatgctgaccgactcgattcgagatcccagctatgaaagcgaatttataggggagtgtctggaggagagtgccaatcgggaggcgagagtggacttggaagcgaacgaggaagccgaggtggagctacccgttccagttgccaagaagccagccaagacaaagggcagtggtaagaagagttccgccgcgagcaaaagacagagccaaaagcaggccaagatagtgccccagataccaccgataagttccggtgagtcgtgctacgccacctcttcgattggatcgcctgcctcctccgcctacgcatcgctctcctcgtcatcgaacagccacagcagcagtagcagtccgggactggagctggacagtctggtgggattgaacggaatcagcgccctggactctctgcttctggatacctccgatggggattccctctcctgtctaagtcccggctatggaagtctactcactggcagcggggaatccctgttgcccggttgccgaggtgatctgcccatgtcgggtctggagaagtcggatgtggagctcagtctgcgattactggaccagagttccaaggattccttcgactttgccagcgatcagcagccgtcggcctgtattagttcgttctccgctctggatgggtatccattcgacctgctgcacagcgattttccggatatgtttctcacgtgacgcgtatttcttagcaaccctaactactctccttttaagcctaaccctcgtcttaagttagagtgcgagttttaacccgactttcactattagccattacatgcgatgcgccattgaggcggaattc

SEQ ID NO: 11385 - protein, 384 aa, DROSOPHILA
MKSNTYELHNYADLNDMARATDSKDSRKRKTASARGEKYSLRQKRQKRGSNEDGESANLADFQLELDPIAEPASKSRKNAPTKSKTKAPPLSKYRRKTANARERTRMREINTAFETLRHCVPEAIKGEDAANTNEKLTKITTLRLAMKYITMLTDSIRDPSYESEFIGECLEESANREARVDLEANEEAEVELPVPVAKKPAKTKGSGKKSSAASKRQSQKQAKIVPQIPPISSGESCYATSSIGSPASSAYASLSSSSNSHSSSSSPGLELDSLVGLNGISALDSLLLDTSDGDSLSCLSPGYGSLLTGSGESLLPGCRGDLPMSGLEKSDVELSLRLLDQSSKDSFDFASDQQPSACISSFSALDGYPFDLLHSDFPDMFLT

SEQ ID NO: 11386 - DNA, 3199 bp, DROSOPHILA
ccatttataaggtttccaaacagcgagatggtagcacactgcatgagttgcagaaggagggcgaagcaccataccaaatgcttcgcataaatcccgtggagaccacttcgctgacctcaaccgttgctcctgtgatgcaggcgaggacggagaagctgaacattatcctggacgaatgcggcacggcgtcgttgtgcaaagcggaacaggagggcgacgcagggaatagcgagactccaccatccgagtccagttgtgagtccaacagcttggccgccagttgcggcgatgtctgccaggtcagcagtaagctggcaaatgacgcctcattaccatctactccccccaagcctgaccatgccagcacctagagatttttttaaattaaacattagtaacgaagatataaactgtatagaagtacgtaaatcaaacacgcatctgcaaatgaagttaatgttaatggttacgctacaatggtagggcggacaacaataattaaacttagagttaattagcaaaacgcagaaattcaagtgctgaacattagaaaatatatatgtatatcggaacaagtcatacgattacaccgaccgatgagctgatcaaaaaccaagcttaatgaatttaaaattgagatctattcacagctggattctatcgctgaggtatcatcacgtcaataaaacttgaaaagagagccccccatttgtgatttcattacttaacgagtttaaagcatcaaaactgtaaagtgcaaggcgtattttaaaatgaaactgacaaattttaattgaactgtatgaaaataaaagcgtatataacaaataaaccataacttatatcaattgccgaattccttattccaagataaaatcattctacggccaccgacttaatatatgtttttttgtttttcagatatactgatatattctttcatttgcaggcaacataaaataacaataacaaatgcatgtggaatagcgcagctacattcctaaggatctggacactctggttgcttgaggatctcaatgcagcatggattggcgtcgattttgcacacctcgctctccgtctccacctcgctgacatcggtgagatcgcactcgcatgggaagcactccatctcgccgccctcctcgccctcggcctcttcaccctctccataccaactgatcttctcctcgctgcgcatgctcggctcagtggagagcgagcagacggacagctcggaatcggaaatggccagaggcactggctcctgcggcagcagcgaaaagtcatacacggccatctcctgggcgaaccatagtgttggttccattggctccgcttcacccatctcgtcctccaagcgctcctcggcgtcctccatctcgtcttcgttgctgatcgccttcatgttgtaactggcgggcaggaaatagcccagcagaaggtatcgattgttgaagctaaacacggccggtccactcgggtacaggttatcccaaattccgtgaagtattgtgcacttgtcctcattgccgatatacagctcgaagggacccgttcgcatgttgctgttccaggtggccttcattctgacggacaggcagcagccatcctttccgctgttaaagtgatagatgcccaccccatgacgttgtcccttgaaccagtcacccgaatagttgtccccattcacatacttgtaccggcccttgccgtgcttcaagttctttcgccagttgccctcgtacacggatccgtccggatagatgaagatgccgcgcccacaacgcttcccgcagcgatactgtccgtagtatcgtgaaccatccttgaacacgtacaccccgatgccgtgacggcgacccttcctgtagttcccatcatactgatctccgttgggcaggatggcccaacctctaccttgtctctgtccggcagcatttcgaccgcctatgtagagctgggattgaggattattatagatatttgttttaattgagctccttgcttactaaaaactgttactactagagaatgttcgtattaaagttactccactaaaaatttatttcttttgaggaaggaagatgcactactaagaaactcatccattttggaacttacgcctatattgggtcccaaatcctcctcttcctcgggcgccgacagatcctcctcggacatttcggtcatggccatggtgatgattttgagttaactaactcctttcggttctttttattgccgagtgaagtagatttttacttacgaattacgttcgggaaatattttgtgtaggcattaaataaatgtattctgtttgtatagttaacttagcaaaggcttactacaataaatatcagaatcgaagaatgatgaaatcgagggctacgttttcgcatagaagtagttggccagtggatatcgtatggtcagggcaatcagtgtacacagcacctggaatcccatcagcatctgggtgaccactcgctcgtggacaggtccgaaaacgactaggacaaagttaatgagcgtaaagttgttggtcctaacaactccgtccgctttggtatgccagcttattagtcgcaagttccgcagtactgtgaccatcaggcgacccggagcgttgagatcctccaggcgaaactccgtggtgctgatgtggagcagatccgtcttgctgtcgtacttgggcagccggtgacgcggacatggcacaaagtggaacagctgcggcgtggagtacaggaaattcaggatctgcggcaggaagaagagcagcagcgtcttgctgaagtggcccaggattccaaccacggcgaaagtcatgccggcaaagtagcagtaggtgtccccaacaaacacctgcgatggatatctgcgaaataagtaagatagaaaatatattacaaacgaaaagttagttagaagtaaaaaaaatattaggaattaacaacaaaattacgcatgacagaaaaattaacattattatccgaactttattacataaaagttttattttttgtgaatatgataattattaaatttaagctgacgaaaagagattataacgtatttttaagtttcaaataacatccttaataattcgataacagtaacaaccagtgttgtaaggcccatcgatgcgaaacagccagatttacaactgcagcggcgaacagctgactgaggacat

SEQ ID NO: 11387 - DNA, 1035 bp, DROSOPHILA
atggccatgaccgaaatgtccgaggaggatctgtcggcgcccgaggaagaggaggatttgggacccaatataggcctctacataggcggtcgaaatgctgccggacagagacaaggtagaggttgggccatcctgcccaacggagatcagtatgatgggaactacaggaagggtcgccgtcacggcatcggggtgtacgtgttcaaggatggttcacgatactacggacagtatcgctgcgggaagcgttgtgggcgcggcatcttcatctatccggacggatccgtgtacgagggcaactggcgaaagaacttgaagcacggcaagggccggtacaagtatgtgaatggggacaactattcgggtgactggttcaagggacaacgtcatggggtgggcatctatcactttaacagcggaaaggatggctgctgcctgtccgtcagaatgaaggccacctggaacagcaacatgcgaacgggtcccttcgagctgtatatcggcaatgaggacaagtgcacaatacttcacggaatttgggataacctgtacccgagtggaccggccgtgtttagcttcaacaatcgataccttctgctgggctatttcctgcccgccagttacaacatgaaggcgatcagcaacgaagacgagatggaggacgccgaggagcgcttggaggacgagatgggtgaagcggagccaatggaaccaacactatggttcgcccaggagatggccgtgtatgacttttcgctgctgccgcaggagccagtgcctctggccatttccgattccgagctgtccgtctgctcgctctccactgagccgagcatgcgcagcgaggagaagatcagttggtatggagagggtgaagaggccgagggcgaggagggcggcgagatggagtgcttcccatgcgagtgcgatctcaccgatgtcagcgaggtggagacggagagcgaggtgtgcaaaatcgacgccaatccatgctgcattgagatcctcaagcaaccagagtgtccagatccttag

SEQ ID NO: 11388 - protein, 344 aa, DROSOPHILA
MAMTEMSEEDLSAPEEEEDLGPNIGLYIGGRNAAGQRQGRGWAILPNGDQYDGNYRKGRRHGIGVYVFKDGSRYYGQYRCGKRCGRGIFIYPDGSVYEGNWRKNLKHGKGRYKYVNGDNYSGDWFKGQRHGVGIYHFNSGKDGCCLSVRMKATWNSNMRTGPFELYIGNEDKCTILHGIWDNLYPSGPAVFSFNNRYLLLGYFLPASYNMKAISNEDEMEDAEERLEDEMGEAEPMEPTLWFAQEMAVYDFSLLPQEPVPLAISDSELSVCSLSTEPSMRSEEKISWYGEGEEAEGEEGGEMECFPCECDLTDVSEVETESEVCKIDANPCCIEILKQPECPDP

SEQ ID NO: 11389 - DNA, 4481 bp, DROSOPHILA
tgacgccgctgattggtaattattttaaataaattatccgtttataatcaatttcactttgtcgccgttttcgcagtcggcgattttcttctttttgctcctcttcttttttgttttaccgcgcgctccttttcctatacgtatctatgtatttgtgcgtttctgtgctaatattcttaaacttcttttacttttttcttaacttttcacccatacacactcgttgctggttttgtttgttgctggtttttaccaaaaaaaaaaagatgaagccagatttaaagcctccgtgttgttatttacaacgtcaaccgagcaaattttgttttcaaacgttatttagcacgtctgaattcggaatcgaccggtttgctgtgcgtgcgaagcgcttttgttagatgtttaacaacaaacagaaaactaaattgcaggttgtattgtgagaaatgaaagaagacaacggagcgaaaacagtgtgcccgttttggaatttgaaaaacctacaaaaatacggtggtacttaccgcgatatttccaaaactgagcacagtattccatttgaacttaaattttcgatagaattgaaatacctcttaatgtcataatagacagcacattgtttttcttcaagtttaaatatagttaatttaagcttggaagagaatttaaaaaaagcttaaagctgcttatgctaagttatgtgcgcaaatttattttttttacattttacatgtgcgtagaatttccgttgttgagttagcagcaattgaagaacgttggaatttgaattatggggacgttttttattcagttatttttctttattaggaggtgaattcgaaaaagatatttctttatctctttctttgacgcacatcatattacaatgttaacaaacataaacgtttagtatttttccgctatcgggtagtatttcgcggtcggctcgccacggttcctcttcttttgtctaaaagaatagaatcgcctggtcacaccgcagggtccagtattgttgcctttttattttattcccgcatttcttcgctttgaagcgatcgcttttcggctttctttgaggtcacaggtcacgccagcggacgctggaagccgaaacgccccccgcctcgcccccttggccatggtgaccgtcgctgttgttgtttttgtcgccctttaaaaccagctgctgcatctgtgtgtgcgcgcgtgcttgcgagtatttccaaccaagcgtgcgtcggtgtgcgtgcgtgtacaagtgctgaaacaacaacaaaagcgtaaaacgcattttcatttgattgcgattttgatttgatatattaattacagaaagaaagggggagaaagcaaacaaaggagacaaactgtgagagaaagacagagcgagatcaagacagtgagcgagatggatgtggaggagaactacgaaaacgccgccgagatgcagaacatgaacatgaatctgaatctaaatccgaatccgaatccaaattcggacagccagcagcagcagcaacaacagatgcaatgtgaaccgttattcgggctcacaaccaatacaacaacaaccacaaatcccatgatggccattcccctgcccgcgcccccagggccgcactccgctccgaacaacagtccaaattcgaatgcgaatcccaactcaaatctgagtcccagtccatccgcaacaaccgctaacgcatccgcatccacgatcaagtgtctaccgacgaacgacttcgatatcgactccctgttgctgcaacagttcagctgtatgggcaccacggaccacgaagacctcatcagccagtttcagagcctaatgaacaaccagatgaaccgggaatcggccaggttttacctagagatgagtaactggtaaggatatagctataagtaaaatatctcaaatccattgtggtttaatattccaaatggagttagaacacagaatgtttcataatccattgaatttaagcttcttccctgcgttctggacatattatagtctttataaactatattttacttaaagatgtgttactagtaatgatatacatatgtactcagaaatccccatggtacgatcatcatgggcgatgttatcgaggcctttttcttttattttaacatactttcttatattttaacatacacaatttagaacaatgcataattattgaattatgaataattttacattgttgtgtttcattgcctccagcttgatgaatacacatttatagattacaaacgtagatttttgagtttgtcatggtgataaataacactttataaactataaacaggaaaattaaagcgctatcttaaattccctctagggccttatctcaaaagaacttaaagagacgctataaaattaaagatatatctttgtaaattagagctagctctcaagtagttctgatttctgtaatatgttataaagttcagttctctttaatatatgatatgaataggccaactatgtacatctagaaacatattgctaataacccagttgaatttcgtcatattaatcaaattttttcacatttataggagcctgcagacggcggtgggctgctatctggacttctgcagcttacagtcgctgccttcgatgaagatcgtccaggagaagcaagtgaatgctcagcagcaagcgtttcagctgcagaacgatggcaccgagcgctggccgaacaactgctatctgacctcgcccatccagacgcagcgcatcaatgtgcccgccctacgtccgggcgaaacttgtgatatcctggccgatatgatgcccacgcagccgccgacaatgtggcggctgtgcacttcaaatggctggtactttggcggtgagcaagagacagcactcgatcttagaactagaatcaaacgctgagctagcaaaccagaattgttgcacgtaatttagtatactcaatcctcgaagtaaaaaactaagcttatgagcatgggtatcaagtacataaattggcatgaacaaagcaaaagaaaaacaacaatctagtcacactgataggatttttgttttccttaaaaatgtatttattctgtaaataattcttaacgaccatctttatagtcgcagactgtatgtagtatattaagtttaagaacccacttctaatgtcccatttcaatgcatttcgttcaaacagatgccatttggatgataccgcccggtacgcaggccagccaggacgaactgcagcagcggatggtgcagctgattacgtcggaggtgaagccggatatctatccgcaaatcaacatcgtgataaccgcgcacacccaatgagcgcggcgtccagcatctagcattcggcatcctcctccgctttcgagcggggtcttcggtcccaaaactcatcgatagcattttaaaaaaaacctgcgcgatatgactagaatttcccttttccctcttttttcaaatgagcatactgttgttctcagtagttgatttgtatacaggaaaaaaaattttttttatgtagtagccaacgccatacatatactacacaaccccatgtttaactagagtttgagttcgattgcaggacccccctttcgttactcctcccactattcccactccttaatttcggtgtcagacagatcagctttatatatatatatcgatatgtcgcgaagggagcgaagggtgtgtgcggcaatagggagaaataaattgaaataaattaagtgaaagtgagaataggaatcgtgtggccacattaagttcttctgttagttttaggcggtactgttgcgtgtgcgtgcgattgtttaaatcataattgaaattttttttttccaataatttaaattcctatgttttgagtaatcgagaagcatgaaagctaagaaacgtgtaacaaaattagatctaagtgttttattgagaaaaaataagaatgaagcagaaggattaagaaagttggttgtcttttatttctgggcggtgaagaaaaagtgtatgttatttttgtgttataaaggtgagtaaggtgatggcttgcttgttgaataattttaactttttttatccaaatgaccaccattgcgtttagcatatattcgaaatttgttaattgttcatgttttccgttataactaattaaatatacgatattgactgaaatgatgggtagcattgttctgctttgctatcatgctttggcagcactgcgtttatatatttgcatggatctggcaacactctccaaaaaagaccattcacacaaaagcaatagtttcgtaacttcccgcccaatttgtaaaaacgtaatcaaattggaatatttgaaaagtaagaaaatcaaggaaataatccaaatttgaattcaaatcagaaaatttgagaatttcaaagaaataaaagaaaatagagcttcttgtttgatgtcttattctgatcacattatgtaatccgattaccggga

SEQ ID NO: 11390 - DNA, 1418 bp, DROSOPHILA
cagggtccagtattgttgcctttttattttattcccgcatttcttcgctttgaagcgatcgcttttcggctttctttgaggtcacaggtcacgccagcggacgctggaagccgaaacgccccccgcctcgcccccttggccatggtgaccgtcgctgttgttgtttttgtcgccctttaaaaccagctgctgcatctgtgtgtgcgcgcgtgcttgcgagtatttccaaccaagcgtgcgtcggtgtgcgtgcgtgtacaagtgctgaaacaacaacaaaagcaaagaaagggggagaaagcaaacaaaggagacaaactgtgagagaaagacagagcgagatcaagacagtgagcgagatggatgtggaggagaactacgaaaacgccgccgagatgcagaacatgaacatgaatctgaatctaaatccgaatccgaatccaaattcggacagccagcagcagcagcaacaacagatgcaatgtgaaccgttattcgggctcacaaccaatacaacaacaaccacaaatcccatgatggccattcccctgcccgcgcccccagggccgcactccgctccgaacaacagtccaaattcgaatgcgaatcccaactcaaatctgagtcccagtccatccgcaacaaccgctaacgcatccgcatccacgatcaagtgtctaccgacgaacgacttcgatatcgactccctgttgctgcaacagttcagctgtatgggcaccacggaccacgaagacctcatcagccagtttcagagcctaatgaacaaccagatgaaccgggaatcggccaggttttacctagagatgagtaactggagcctgcagacggcggtgggctgctatctggacttctgcagcttacagtcgctgccttcgatgaagatcgtccaggagaagcaagtgaatgctcagcagcaagcgtttcagctgcagaacgatggcaccgagcgctggccgaacaactgctatctgacctcgcccatccagacgcagcgcatcaatgtgcccgccctacgtccgggcgaaacttgtgatatcctggccgatatgatgcccacgcagccgccgacaatgtggcggctgtgcacttcaaatggctggtactttggcgatgccatttggatgataccgcccggtacgcaggccagccaggacgaactgcagcagcggatggtgcagctgattacgtcggaggtgaagccggatatctatccgcaaatcaacatcgtgataaccgcgcacacccaatgagcgcggcgtccagcatctagcattcggcatcctcctccgctttcgagcggggtcttcggtcccaaaactcatcgatagcattttaaaaaaaacctgcgcgatatgactagaatttcccttttccctcttttttcaaatgagcatact

SEQ ID NO: 11391 - protein, 303 aa, DROSOPHILA
MDVEENYENAAEMQNMNMNLNLNPNPNPNSDSQQQQQQQMQCEPLFGLTTNTTTTTNPMMAIPLPAPPGPHSAPNNSPNSNANPNSNLSPSPSATTANASASTIKCLPTNDFDIDSLLLQQFSCMGTTDHEDLISQFQSLMNNQMNRESARFYLEMSNWSLQTAVGCYLDFCSLQSLPSMKIVQEKQVNAQQQAFQLQNDGTERWPNNCYLTSPIQTQRINVPALRPGETCDILADMMPTQPPTMWRLCTSNGWYFGDAIWMIPPGTQASQDELQQRMVQLITSEVKPDIYPQINIVITAHTQ

SEQ ID NO: 11392 - DNA, 4486 bp, DROSOPHILA
ataactgacgccgctgattggtaattattttaaataaattatccgtttataatcaatttcactttgtcgccgttttcgcagtcggcgattttcttctttttgctcctcttcttttttgttttaccgcgcgctccttttcctatacgtatctatgtatttgtgcgtttctgtgctaatattcttaaacttcttttacttttttcttaacttttcacccatacacactcgttgctggttttgtttgttgctggtttttaccaaaaaaaaaaagatgaagccagatttaaagcctccgtgttgttatttacaacgtcaaccgagcaaattttgttttcaaacgttatttagcacgtctgaattcggaatcgaccggtttgctgtgcgtgcgaagcgcttttgttagatgtttaacaacaaacagaaaactaaattgcaggttgtattgtgagaaatgaaagaagacaacggagcgaaaacagtgtgcccgttttggaatttgaaaaacctacaaaaatacggtggtacttaccgcgatatttccaaaactgagcacagtattccatttgaacttaaattttcgatagaattgaaatacctcttaatgtcataatagacagcacattgtttttcttcaagtttaaatatagttaatttaagcttggaagagaatttaaaaaaagcttaaagctgcttatgctaagttatgtgcgcaaatttattttttttacattttacatgtgcgtagaatttccgttgttgagttagcagcaattgaagaacgttggaatttgaattatggggacgttttttattcagttatttttctttattaggaggtgaattcgaaaaagatatttctttatctctttctttgacgcacatcatattacaatgttaacaaacataaacgtttagtatttttccgctatcgggtagtatttcgcggtcggctcgccacggttcctcttcttttgtctaaaagaatagaatcgcctggtcacaccgcagggtccagtattgttgcctttttattttattcccgcatttcttcgctttgaagcgatcgcttttcggctttctttgaggtcacaggtcacgccagcggacgctggaagccgaaacgccccccgcctcgcccccttggccatggtgaccgtcgctgttgttgtttttgtcgccctttaaaaccagctgctgcatctgtgtgtgcgcgcgtgcttgcgagtatttccaaccaagcgtgcgtcggtgtgcgtgcgtgtacaagtgctgaaacaacaacaaaagcgtaaaacgcattttcatttgattgcgattttgatttgatatattaattacagaaagaaagggggagaaagcaaacaaaggagacaaactgtgagagaaagacagagcgagatcaagacagtgagcgagatggatgtggaggagaactacgaaaacgccgccgagatgcagaacatgaacatgaatctgaatctaaatccgaatccgaatccaaattcggacagccagcagcagcagcaacaacagatgcaatgtgaaccgttattcgggctcacaaccaatacaacaacaaccacaaatcccatgatggccattcccctgcccgcgcccccagggccgcactccgctccgaacaacagtccaaattcgaatgcgaatcccaactcaaatctgagtcccagtccatccgcaacaaccgctaacgcatccgcatccacgatcaagtgtctaccgacgaacgacttcgatatcgactccctgttgctgcaacagttcagctgtatgggcaccacggaccacgaagacctcatcagccagtttcagagcctaatgaacaaccagatgaaccgggaatcggccaggttttacctagagatgagtaactggtaaggatatagctataagtaaaatatctcaaatccattgtggtttaatattccaaatggagttagaacacagaatgtttcataatccattgaatttaagcttcttccctgcgttctggacatattatagtctttataaactatattttacttaaagatgtgttactagtaatgatatacatatgtactcagaaatccccatggtacgatcatcatgggcgatgttatcgaggcctttttcttttattttaacatactttcttatattttaacatacacaatttagaacaatgcataattattgaattatgaataattttacattgttgtgtttcattgcctccagcttgatgaatacacatttatagattacaaacgtagatttttgagtttgtcatggtgataaataacactttataaactataaacaggaaaattaaagcgctatcttaaattccctctagggccttatctcaaaagaacttaaagagacgctataaaattaaagatatatctttgtaaattagagctagctctcaagtagttctgatttctgtaatatgttataaagttcagttctctttaatatatgatatgaataggccaactatgtacatctagaaacatattgctaataacccagttgaatttcgtcatattaatcaaattttttcacatttataggagcctgcagacggcggtgggctgctatctggacttctgcagcttacagtcgctgccttcgatgaagatcgtccaggagaagcaagtgaatgctcagcagcaagcgtttcagctgcagaacgatggcaccgagcgctggccgaacaactgctatctgacctcgcccatccagacgcagcgcatcaatgtgcccgccctacgtccgggcgaaacttgtgatatcctggccgatatgatgcccacgcagccgccgacaatgtggcggctgtgcacttcaaatggctggtactttggcggtgagcaagagacagcactcgatcttagaactagaatcaaacgctgagctagcaaaccagaattgttgcacgtaatttagtatactcaatcctcgaagtaaaaaactaagcttatgagcatgggtatcaagtacataaattggcatgaacaaagcaaaagaaaaacaacaatctagtcacactgataggatttttgttttccttaaaaatgtatttattctgtaaataattcttaacgaccatctttatagtcgcagactgtatgtagtatattaagtttaagaacccacttctaatgtcccatttcaatgcatttcgttcaaacagatgccatttggatgataccgcccggtacgcaggccagccaggacgaactgcagcagcggatggtgcagctgattacgtcggaggtgaagccggatatctatccgcaaatcaacatcgtgataaccgcgcacacccaatgagcgcggcgtccagcatctagcattcggcatcctcctccgctttcgagcggggtcttcggtcccaaaactcatcgatagcattttaaaaaaaacctgcgcgatatgactagaatttcccttttccctcttttttcaaatgagcatactgttgttctcagtagttgatttgtatacaggaaaaaaaattttttttatgtagtagccaacgccatacatatactacacaaccccatgtttaactagagtttgagttcgattgcaggacccccctttcgttactcctcccactattcccactccttaatttcggtgtcagacagatcagctttatatatatatatcgatatgtcgcgaagggagcgaagggtgtgtgcggcaatagggagaaataaattgaaataaattaagtgaaagtgagaataggaatcgtgtggccacattaagttcttctgttagttttaggcggtactgttgcgtgtgcgtgcgattgtttaaatcataattgaaattttttttttccaataatttaaattcctatgttttgagtaatcgagaagcatgaaagctaagaaacgtgtaacaaaattagatctaagtgttttattgagaaaaaataagaatgaagcagaaggattaagaaagttggttgtcttttatttctgggcggtgaagaaaaagtgtatgttatttttgtgttataaaggtgagtaaggtgatggcttgcttgttgaataattttaactttttttatccaaatgaccaccattgcgtttagcatatattcgaaatttgttaattgttcatgttttccgttataactaattaaatatacgatattgactgaaatgatgggtagcattgttctgctttgctatcatgctttggcagcactgcgtttatatatttgcatggatctggcaacactctccaaaaaagaccattcacacaaaagcaatagtttcgtaacttcccgcccaatttgtaaaaacgtaatcaaattggaatatttgaaaagtaagaaaatcaaggaaataatccaaatttgaattcaaatcagaaaatttgagaatttcaaagaaataaaagaaaatagagcttcttgtttgatgtcttattctgatcacattatgtaatccgattaccggga

SEQ ID NO: 11393 - DNA, 1475 bp, DROSOPHILA
caccgcagggtccagtattgttgcctttttattttattcccgcatttcttcgctttgaagcgatcgcttttcggctttctttgaggtcacaggtcacgccagcggacgctggaagccgaaacgccccccgcctcgcccccttggccatggtgaccgtcgctgttgttgtttttgtcgccctttaaaaccagctgctgcatctgtgtgtgcgcgcgtgcttgcgagtatttccaaccaagcgtgcgtcggtgtgcgtgcgtgtacaagtgctgaaacaacaacaaaagcgtaaaacgcattttcatttgattgcgattttgatttgatatattaattacagaaagaaagggggagaaagcaaacaaaggagacaaactgtgagagaaagacagagcgagatcaagacagtgagcgagatggatgtggaggagaactacgaaaacgccgccgagatgcagaacatgaacatgaatctgaatctaaatccgaatccgaatccaaattcggacagccagcagcagcagcaacaacagatgcaatgtgaaccgttattcgggctcacaaccaatacaacaacaaccacaaatcccatgatggccattcccctgcccgcgcccccagggccgcactccgctccgaacaacagtccaaattcgaatgcgaatcccaactcaaatctgagtcccagtccatccgcaacaaccgctaacgcatccgcatccacgatcaagtgtctaccgacgaacgacttcgatatcgactccctgttgctgcaacagttcagctgtatgggcaccacggaccacgaagacctcatcagccagtttcagagcctaatgaacaaccagatgaaccgggaatcggccaggttttacctagagatgagtaactggagcctgcagacggcggtgggctgctatctggacttctgcagcttacagtcgctgccttcgatgaagatcgtccaggagaagcaagtgaatgctcagcagcaagcgtttcagctgcagaacgatggcaccgagcgctggccgaacaactgctatctgacctcgcccatccagacgcagcgcatcaatgtgcccgccctacgtccgggcgaaacttgtgatatcctggccgatatgatgcccacgcagccgccgacaatgtggcggctgtgcacttcaaatggctggtactttggcgatgccatttggatgataccgcccggtacgcaggccagccaggacgaactgcagcagcggatggtgcagctgattacgtcggaggtgaagccggatatctatccgcaaatcaacatcgtgataaccgcgcacacccaatgagcgcggcgtccagcatctagcattcggcatcctcctccgctttcgagcggggtcttcggtcccaaaactcatcgatagcattttaaaaaaaacctgcgcgatatgactagaatttcccttttccctcttttttcaaatgagcatact

SEQ ID NO: 11394 - protein, 303 aa, DROSOPHILA; identical to SEQ ID NO: 11391

SEQ ID NO: 11395 - DNA, 4568 bp, DROSOPHILA
cagcaggctgactcccaacctattgggtcacgtccagcagctggagtaccgcgaatcgctgcggctggacctttgcgaggtgcccgctgaaagcgagggtccggccacgtcgcccgtatggagtcacgttgtccagagccagaataccaagtacaactgcaacctgcatcttggctggcgacgcgaagaggcctgtgtgctgaatccggagctgacctatgagctgcagatccgctgggacagcagtgcttacggcgccgagtatccgtgcagcctgcagtcctgccaggcggacggaattcggttcactgacgaggacagcttcagcggaagtctcgtcaagggactgcgctatgccaacctggtgtagccacttcagccgcgatatcataattagttagtccgtaagacgtgtatgtatttattgccctaagttaatgtacgctgcctcagagttcaataaactgtgagtaatatcgcttcaaacacaagacgtctgctgataaatataaaaagccggtttgcagccgtttttgtttggcgaacgaatcgaactcgatcggggaacggcgtcctggctgcgaatacggaaacttatctcacctgttgttgcggccactaaaaaaaaaaaatcggtaaaacaataaactataatataatcaccagatgtaaacaaagcgaaattgaacgagggacagtgtggccaactggtcataataattcttgcttaaattggggcgaccgtaaaataattaacagtgagaaactggctattatttaataacttaatttttgtttaaatgattaatgatttaaagctgctgcgctgtaaaagctttatttgctgttcagaattaaaatattaatgagcactatcttaaatctaaacataaaaaccaaacattttacagtaacaatggaatcaaaaatgcagtggaaaagcgctaaacacccgcgaaacagtgctgtaaagttcttcacagagtagtgttggcagacgccgggtgcaaaacaataatagtccgctttggtttttgtttacgctgcaaaaatgacgattttgtacaaagtggagggcaaggagttcagcaaggacagcgtttttccgcacaagaaggtcctctgctcagtctccgcacggaacatcgttgcgtttagcgccctccagagcgccatatttccggcttcccacggaggagatgccggcgatggatccttgccgggagcgggtttggccgtaggcgcgagcaacagccatgtgtacgtgtgcgacatcgtgacgccgtgggaatactataaggtgtgctcctccaaatcgcttatcagcgtcctccagtggagtcccaatggggagcaactgctgcttggatacgtcggcggtcgcgtcgagatctggcagccgaggaaccagtcaattaacctatgggtgctgcagtattacgccaccgtgcccagcgaggacattatagaagcacagttctttcagaatggcaaaggagtgatcttcaatgcgctgaagaaggatcacacctactatgcggagaagttcgagcgggtggagcagcagaggcccactctcagcggatttggcggagtggccagcgagggatgcgtgctactcacttcctcaggcctgctggccgccttcagtctccccgcaatccaaaagacatccgccgcaggagctgatggtcctgcccacgaggtcgtcgagttgacacccgcgctccacagcatcggcatatcgcgcagcttcatcgaacactgcagcatgacgccaagtccatcgggagcccttaatatcgctttcagctgtggctggcagcaacagttggtgcaatgctttaaggtctcgctttcattggagggcgaactgggtctggagcagcacttggccatcaaatccgagtcccagaccagcatatttctgggtcctcttgacgggaggcggatcagtcacctaaaatggacgcgaatagccaacgaggatgtgatttttatagcctacgcttgtccagatggtgctggcagccaactggagcaatggacattgacacgccgtcaccaaagtgtccacgcccttctccagggtggaggaggtgccaacaacaagccaaatgagttcgtgcaatcggaaagctgggagcaggtgggcaaagtgcaactaaatgcatccttggcggatatcagcgttacacgactatcggtatcaacgccggactcttgccaagtgtacgccattctgcaggacaacagcgtccaggtgctggagcccaactcgatgaagcagcttaatcacacccagtttgataggttatctgacgccagtggagcagtaaagttcgttagcggcgacttgacacctagcagccaaattctcctaatctttgatagccatgcacaactttacgccatgcaggcacctctgccgaagcaaggaggatctggtttgctacttctggaatattgcatcgttacaggttgcgatgccagcgatgtgctactccttaatctaggcaacctggaggctctggtggagaagctaaccgacaactttacgcggcaaccttcctttgtgcggcacttttattatgctaattttttggccctcaagtccaacatatgccgcatgcagcagcaggagtttgacaatctcattatcctacacgcaatatccaccacattcaagagcctcctgcgaccgtctgatctgggtttccaggataaaggacctgccgataacttggccatcaagctggccgaatccattccggatgtggacaccgtgatgctgaacctggacgccaaggactttacagtggagccggtgatgctgcaaagtctacagcaactgattcagtgggtcaccgacctggcactcaacatgctgcatcgtctgcccgaggaggtaatgaagaccaagctctccggaaagcggcctagctacgatatcagccgagacatcgtggccatcagcagtctgcgcgagctgctggttatgatccgcatttggggcctgttaaacacccagtgcctgcccgtctacaccaagacgatggacaacatcgatgtgctagtgatcttgtttcgtttgcttactcgcctggcccagaatcctgcagaaccggacgaaatgctgctggacgagtgcagcctgctttccaagcagctcctaattccccagcccaccaagttcaaccccaccacgctgctgagtgcccaaggattcgcggccgtaaagtcgggacagctgcagttcacctccatggaggagccaacttgcttgcaggacatggagacggaggaggtggtcttcgccagctctgtgaaggatggcgtgagcaatctccaactgggcgcccgacccagccacattcggagatgcgcccgctgcggattcgtgttcgtgaataacgccagcaaagtggccaagacgtcggccctcaaggcgtggtttagtaagtggctgcactgccactgtgggggcttttggaagcaggttcactagtaaatctatgtgagcaatgaccttagttattaagtatgatttaagcttcaaataaaagtacatgattgccagcaattttagtgaaatcaagaaatttaatatactaaatatatttcttctttgcacgacgtgctcgttcaaaaaacttaagccacagagaagtcaccaccatacttcactatttcaaaactaaatttatttgaataaaatatattttttaactctatctatgaattgtggttggtgtatttgctaacggtttgatattaacaacaacaacatatcgaagaacttgcatcactagcatgtcaatcgatatcaggacgtccaatgtgtctgtcggctgtcggcaatcgatatctcctctgcaaatagatattttcagaataattggcttatttcacttcgccctaacgctgcagtaatggtaagtgcatcgaggtgcaacctgtagtcgccagaagtcgaaattcctagagaaccgagtgccccaggtccaggcttaaccgagtgctgagtgcccaccctgtcgacgtcaaaagagggctgcctgtggtgagaagcaacgcccccccggtccaaatcccacgtccatgtatccctggagctcctcctcgtacggcggccagattcccagtgccgccaacgtccgggtaaatactccgccaatcccagattacgaatcttggatatgtgtaatcgttaatccacttatcttcaatttggtcaatccttcgtctcaacttccggacttcttccgggaatgagtaaagtgggcttatctcgagtttattttatttttatatgtatatcttagccaataatattgcttaccatctgtcctttcagaccatgccgaatggtttggatgaccaggagaagctgctcgctgaagccattggactagcgaggaagcaggcctttcaaatgaaccactttctggataaggagcgtatgctggactcgctcaagtgcgccagcaccatgctgggcgagctgcggacctccgtcctttcccccaaaagttactacgagctgtgtgagtaaaaccaaagcgtct

SEQ ID NO: 11396 - DNA, 2469 bp, DROSOPHILA
ccgggtgcaaaacaataatagtccgctttggtttttgtttacgctgcaaaaatgacgattttgtacaaagtggagggcaaggagttcagcaaggacagcgtttttccgcacaagaaggtcctctgctcagtctccgcacggaacatcgttgcgtttagcgccctccagagcgccatatttccggcttcccacggaggagatgccggcgatggatccttgccgggagcgggtttggccgtaggcgcgagcaacagccatgtgtacgtgtgcgacatcgtgacgccgtgggaatactataaggtgtgctcctccaaatcgcttatcagcgtcctccagtggagtcccaatggggagcaactgctgcttggatacgtcggcggtcgcgtcgagatctggcagccgaggaaccagtcaattaacctatgggtgctgcagtattacgccaccgtgcccagcgaggacattatagaagcacagttctttcagaatggcaaaggagtgatcttcaatgcgctgaagaaggatcacacctactatgcggagaagttcgagcgggtggagcagcagaggcccactctcagcggatttggcggagtggccagcgagggatgcgtgctactcacttcctcaggcctgctggccgccttcagtctccccgcaatccaaaagacatccgccgcaggagctgatggtcctgcccacgaggtcgtcgagttgacacccgcgctccacagcatcggcatatcgcgcagcttcatcgaacactgcagcatgacgccaagtccatcgggagcccttaatatcgctttcagctgtggctggcagcaacagttggtgcaatgctttaaggtctcgctttcattggagggcgaactgggtctggagcagcacttggccatcaaatccgagtcccagaccagcatatttctgggtcctcttgacgggaggcggatcagtcacctaaaatggacgcgaatagccaacgaggatggtggaggaggtgccaacaacaagccaaatgagttcgtgcaatcggaaagctgggagcaggtgggcaaagtgcaactaaatgcatccttggcggatatcagcgttacacgactatcggtatcaacgccggactcttgccaagtgtacgccattctgcaggacaacagcgtccaggtgctggagcccaactcgatgaagcagcttaatcacacccagtttgataggttatctgacgccagtggagcagtaaagttcgttagcggcgacttgacacctagcagccaaattctcctaatctttgatagccatgcacaactttacgccatgcaggcacctctgccgaagcaaggaggatctggtttgctacttctggaatattgcatcgttacaggttgcgatgccagcgatgtgctactccttaatctaggcaacctggaggctctggtggagaagctaaccgacaactttacgcggcaaccttcctttgtgcggcacttttattatgctaattttttggccctcaagtccaacatatgccgcatgcagcagcaggagtttgacaatctcattatcctacacgcaatatccaccacattcaagagcctcctgcgaccgtctgatctgggtttccaggataaaggacctgccgataacttggccatcaagctggccgaatccattccggatgtggacaccgtgatgctgaacctggacgccaaggactttacagtggagccggtgatgctgcaaagtctacagcaactgattcagtgggtcaccgacctggcactcaacatgctgcatcgtctgcccgaggaggtaatgaagaccaagctctccggaaagcggcctagctacgatatcagccgagacatcgtggccatcagcagtctgcgcgagctgctggttatgatccgcatttggggcctgttaaacacccagtgcctgcccgtctacaccaagacgatggacaacatcgatgtgctagtgatcttgtttcgtttgcttactcgcctggcccagaatcctgcagaaccggacgaaatgctgctggacgagtgcagcctgctttccaagcagctcctaattccccagcccaccaagttcaaccccaccacgctgctgagtgcccaaggattcgcggccgtaaagtcgggacagctgcagttcacctccatggaggagccaacttgcttgcaggacatggagacggaggaggtggtcttcgccagctctgtgaaggatggcgtgagcaatctccaactgggcgcccgacccagccacattcggagatgcgcccgctgcggattcgtgttcgtgaataacgccagcaaagtggccaagacgtcggccctcaaggcgtggtttagtaagtggctgcactgccactgtgggggcttttggaagcaggttcactagtaaatctatgtgagcaatgaccttagttattaagtatgatttaagcttcaaataaaagta

SEQ ID NO: 11397 - protein, 785 aa, DROSOPHILA
MTILYKVEGKEFSKDSVFPHKKVLCSVSARNIVAFSALQSAIFPASHGGDAGDGSLPGAGLAVGASNSHVYVCDIVTPWEYYKVCSSKSLISVLQWSPNGEQLLLGYVGGRVEIWQPRNQSINLWVLQYYATVPSEDIIEAQFFQNGKGVIFNALKKDHTYYAEKFERVEQQRPTLSGFGGVASEGCVLLTSSGLLAAFSLPAIQKTSAAGADGPAHEVVELTPALHSIGISRSFIEHCSMTPSPSGALNIAFSCGWQQQLVQCFKVSLSLEGELGLEQHLAIKSESQTSIFLGPLDGRRISHLKWTRIANEDGGGGANNKPNEFVQSESWEQVGKVQLNASLADISVTRLSVSTPDSCQVYAILQDNSVQVLEPNSMKQLNHTQFDRLSDASGAVKFVSGDLTPSSQILLIFDSHAQLYAMQAPLPKQGGSGLLLLEYCIVTGCDASDVLLLNLGNLEALVEKLTDNFTRQPSFVRHFYYANFLALKSNICRMQQQEFDNLIILHAISTTFKSLLRPSDLGFQDKGPADNLAIKLAESIPDVDTVMLNLDAKDFTVEPVMLQSLQQLIQWVTDLALNMLHRLPEEVMKTKLSGKRPSYDISRDIVAISSLRELLVMIRIWGLLNTQCLPVYTKTMDNIDVLVILFRLLTRLAQNPAEPDEMLLDECSLLSKQLLIPQPTKFNPTTLLSAQGFAAVKSGQLQFTSMEEPTCLQDMETEEVVFASSVKDGVSNLQLGARPSHIRRCARCGFVFVNNASKVAKTSALKAWFSKWLHCHCGGFWKQVH

SEQ ID NO: 11398 - DNA, 5661 bp, DROSOPHILA
ggggaaaactaaatgaaatgaaatgatacatgataaacgggccatattaaatgaaactttcacagatggataatgccttcaaattaaacacgcaactggcacgatatcgtgctctttctagggtcatcgtttataaataagccaaacaaaagatgcacgaatgcggactactaaaatactatatagttttgggatgtagaaaaattaataggttcttactttaaaatgagctttaaaaacatacacaaaactgggctttcaacccaaaaaaaaaaaaaaaaaagcaacaaatgactcgataaatgctgtatgagatcatcaacgccaagatgcttttgttataagtaacaaataaaagcgaaaagtgagaaaataagtgccataacttggtttgaattcatttgtatgactaggctgcaaaaaatattcgagtgagacatttgatacaagttttctatagcattcataatcgatgccacaaccagtgcattcactcgattttacgttcaactatgtagttgtttaatagtctcacaatataattaacgagaaagagaactttttatacaattattgcgctataaatattcactatctcgtcaattgtccatatcccatttagttaaagagactgtctattaattagatagtattttttttaatgacagcaagatgaaaagagccgagtgacaaatagaaatgaaagcgacgatgattagaacaaatggagcacaacatatgtagaaagactagcaaataggcctgactacaagatactttatatagagtagtttctatggaagcttataaagttataaaacaaaaatgttcacttggagctgcggcagcccaatatgccccacgtaccctagcgataacaaattagtttcttttttgttttgcttctttcgtttgccacgatcttgtttggctgagtctttatcgctccctctgtttcgcactcttcaaaactcgaaatgtcgcaacaaacaaagggcacgaattcattaatagaaaatgggcggaacttcaagggggcgggtgggtgtttcaaaaaggggcggagggtggcgatggggactttaaaggacatggaaacgcgaccttcggcgatttttcaatggtcgccgcgagggaaaacgtaaacgtagagagagtaattgcgggaattgccgataaaaagaatgctaaatgttgaataattatagcgtattactcacctcagcgtgtgggaatggagcaatgcagctgtttttcgcgctggaagctgcgggtcaggagcgctggaacactggaacccggactggaacttccaatgaacgtaagggcgtggcagggcggagtcgcgtttttcgtttatttttaatcatttttcgaatttgtcgggcctttagattgcatttttatgtggttaaaattaaatcgcagtttgattgattgacataatacgaagtagtaatatttcttttgattttcttttcactgaacgcgttcggttaacttgggtgttttttttttttttttgcagttgttgttgctcttgtttttgtggtgaaaacgtgctgatttgcgctattgctgttgtagttgcagttttgggttttcattttcccatttattcgttgctcgttcaaaagatcaaaaggtgaattaacgaattgaataagaaataaacgtgcatgtaatgcaggtctgacatttgcagttggtaatttcgtgtgatcaaaacagaaatcgaccaattcgcgtgaccagttcgtttggtgcattaacaaatttgcatttcctacttagaagcgaaagcatttcttcgtgtatcttaatcacaataattgtcaaaaactcatacacattgcgtttattgttattagtaactataatgattttgcattttccgaattgtactacaaaacgtgtgtagataatgcagattataggccttgatgagcatgctacttggatgcttggattctatatgatttgttcgtttttcattgtgagtgcagaaaaagttgagttgattggtttgattttatttgttaaattggattttacagccgcatgccagatgttatgtatgagtagtatagttttgaatttgcattccgattgttagtttttcagatgtggatcggtgggaggaaagaaaggaaaaataaattaggttaattagaaagaaaaagtattacaaactgtgtgtgtgcggtgcggtgtgagtgtgagaaatgaaatcatagctgaaaccgaaatccattaatttctgttaacttttctggcgattacaaaaaacggaaatcaacaaaaggaaactagtttttccggtagattaaacaacaaacgcaaaaacttgttcaattgtttgcgcaacaaaacaaagaaaaaaactgaataatcaactttaaatttaactgtttgccgattaatttgaagctgtctatatatgtgagtgtgattgaattgtttacccctttaaaatcggcattccatcatcaacttcctcaacttctcatgttttcgtttcgcattatcatctccattgagaatgtccgagttagctatttatctaggtttatatttgtatatatatatatgcgctgtgtttgtataatttatatatttcatatgcattcaataaatatgaacatgttaagtaaatagcattatagtaaatagtcaatatagttattatatcgcataataaacaatctttttatcataaatattcaaaagtgaactagagatttgttgcatctttctcttcttcatcggtgttgtgagtgtgtgagtgatgaggctacttttgtgtgagttttcaacaggagaactaaactagctaaacgaacaaaaactaaatgcattttcaaagtcggaaaaacgacgaggaaatcaacaagattttctttcacttttccctgcaaagcatttgcaatgagtgtgttttgtgtgtgttttgagtggagtagtgttgttcctttctttttattacaattctcgttttttttttttgcttcgcattataacaataatcaataaaatttcatgttttctttgtttgcaattacgtgtcttgtagtttttgtgtttcaactctcttcgtattggttttataaattttcaattagcaatttgtttacaagtactaaagattctggtagctataacttgagtttcatgtgtttttgggatagactctggggacttgagactcttgcttactaaccatacatgatttctctatatattataatagctataattggtgtaatcgagccctaatttcgtgtgcatttcttttttttttttgtatcgggggttcactggttgcggtctcttacagtttaagtttcgattttgtcttctgcaatttctctgggtgggttgcgcaacatcctatgtatatagatcgggtctggatgagatatataatgtgtgtgtgtgtggagaggtgtgtgtgtggagtgaatgtggcgtgtaagtaattgcattcgagatttacatgaaataactgctaacatatgaggccgctaagatgcccagcacagtgaggcagatcagtatcatgatcttctttcgtcgggctttactctggtacttgagcgccttcttggtgtcctgagttgccgtctgcacatagtccatagcgtgctccacatggtactcaatgcgatcgatcatctcgccctgcgactccaccagcatggccatgtccatgaacatgtcgtgcagctccttgatcgatgtctccagcttcatgatgtcctggtggcgggcctcaatgtccgccagcgtctgtttggcctgctgcgtctccatgatgatgccctgcgtgaacacagacgagttgccctcctccagcatcttctccagctcatcgtcgttggtcggtcgtccggtaatctccagttgacgctgtatccttcccttgcagcgctctcggtagtcggtctgcgtgcgattgtactcggtcatcacttcgacgaatttccgtgacaacgtcgagtgctgcgtcttccgaattctcagatccgccgacgacttattctgctgctcttcctgctcgatgttctgctcgatgcccttgagcttgccgcgaacgcgattggcattcttcttgatgtcggccatcagatcctccagctcttgcttggtcttctcgtccgtttgtggggcggacaggatggccgagtgcttcttctttacctcctcgacgttatcctgcaccttgtcgatcatcccgcggatctcctccacctgggcgaagaagtcgtccatgtaggaatcatggccatccacattgacggccacctccgtctcctcctcgtcatcggattgggcggcatggagagcggctaatctgtctttagtcatctttgtgtcggggtattatcctggtttttgaagggtgtgcgagaagattattctcgatttgataattggggagtttcgaatttctgggactatccttgtttacggtgcagttttcaaaatttgttggatttttttaaatattgttttttatgcttcgttgttatttggctctttcccttggccaagctttacgtaagcctttgttacgcggtcttcgcagattgcgtttttgcgattagcagttaaacgttaaacacgcacacacacataaaccacacgtgtaaacgcgcgcggagtttttcctttttctttttttgcagccttgcttttaacttgtttgcacgtttttccacttttgcgagagaccttttattgattttccgcttttggctggcagctctctctttgctcggtttacttttagtgtataattataacttaactggcactttggctggcgttttggttaatattattatgcttttttcgtgtgtgtgtcgtttggtgtggtgttatttcgctcacaagagagacggagagagaggcaaagagagctcgtgttgcgggcggcggcagagacgtcgactgcggcagagcacctcttcaatgccagcagctaaaaagctaaagctgctgctgaattaatttttcttttttctgtttttttctctcttgttatttgtgactcacactggtaccatataatattaatcttttactcggcgaatttgtttgtttcactttcgcactggcacacgcacacacatacacaaacacgcacgcagcagtggcaataaacgattttcggcagtgggagaggctaccgaaaatctcttaaaatgggcaaaaaatcgatttctgcgcaaagctccaattctgccgtctgcttttgctgctgcttcttcgtctttctctgctttatctactttgcttcttcttattcgcggggggtgttacggtgggcgttatttgttctttctctctccttttcgcttgcgttttattttcgtttgttgcgtacgcgtcgtcggcgccgattcagggtgtgtgtttgagagggacgcacgaccacctatcacgctctcgcacactggttgtctgggttccacgatttgttgttgtcaccaatcgtttcacatgcacatttctttgtatttatctgaggcaaatgtgttgacaatatttttttgatttttttcacaaaaaaccaaatattgtttcgcgattttcccggcggccaagagtttttttttgtgtgatttcgatgcgagccgaaacgaaacacagcacctc

SEQ ID NO: 11399 - DNA, 3661 bp, DROSOPHILA
cgcgcgcgtttacacgtgtggtttatgtgtgtgtgcgtgtttaacgtttaactgctaatcgcaaaaacgcaatctgcgaagaccgcgtaacaaaggcttacgtaaagcttggccaagggaaagagccaaataacaacgaagcataaaaaacaatatttaaaaaaatccaacaaattttgaaaactgcaccgtaaacaaggatagtcccagaaattcgaaactccccaattatcaaatcgagaataatcttctcgcacacccttcaaaaaccaggataataccccgacacaaagatgactaaagacagattagccgctctccatgccgcccaatccgatgacgaggaggagacggaggtggccgtcaatgtggatggccatgattcctacatggacgacttcttcgcccaggtggaggagatccgcgggatgatcgacaaggtgcaggataacgtcgaggaggtaaagaagaagcactcggccatcctgtccgccccacaaacggacgagaagaccaagcaagagctggaggatctgatggccgacatcaagaagaatgccaatcgcgttcgcggcaagctcaagggcatcgagcagaacatcgagcaggaagagcagcagaataagtcgtcggcggatctgagaattcggaagacgcagcactcgacgttgtcacggaaattcgtcgaagtgatgaccgagtacaatcgcacgcagaccgactaccgagagcgctgcaagggaaggatacagcgtcaactggagattaccggacgaccgaccaacgacgatgagctggagaagatgctggaggagggcaactcgtctgtgttcacgcagggcatcatcatggagacgcagcaggccaaacagacgctggcggacattgaggcccgccaccaggacatcatgaagctggagacatcgatcaaggagctgcacgacatgttcatggacatggccatgctggtggagtcgcagggcgagatgatcgatcgcattgagtaccatgtggagcacgctatggactatgtgcagacggcaactcaggacaccaagaaggcgctcaagtaccagagtaaagcccgacgaaagaagatcatgatactgatctgcctcactgtgctgggcatcttagcggcctcatatgttagcagttatttcatgtaaatctcgaatgcaattacttacacgccacattcactccacacacacacctctccacacacacacacattatatatctcatccagacccgatctatatacataggatgttgcgcaacccacccagagaaattgcagaagacaaaatcgaaacttaaactgtaagagaccgcaaccagtgaacccccgatacaaaaaaaaaaaagaaatgcacacgaaattagggctcgattacaccaattatagctattataatatatagagaaatcatgtatggttagtaagcaagagtctcaagtccccagagtctatcccaaaaacacatgaaactcaagttatagctaccagaatctttagtacttgtaaacaaattgctaattgaaaatttataaaaccaatacgaagagagttgaaacacaaaaactacaagacacgtaattgcaaacaaagaaaacatgaaattttattgattattgttataatgcgaagcaaaaaaaaaaaacgagaattgtaataaaaagaaaggaacaacactactccactcaaaacacacacaaaacacactcattgcaaatgctttgcagggaaaagtgaaagaaaatcttgttgatttcctcgtcgtttttccgactttgaaaatgcatttagtttttgttcgtttagctagtttagttctcctgttgaaaactcacacaaaagtagcctcatcactcacacactcacaacaccgatgaagaagagaaagatgcaacaaatctctagttcacttttgaatatttatgataaaaagattgtttattatgcgatataataactatattgactatttactataatgctatttacttaacatgttcatatttattgaatgcatatgaaatatataaattatacaaacacagcgcatatatatatatacaaatataaacctagataaatagctaactcggacattctcaatggagatgataatgcgaaacgaaaacatgagaagttgaggaagttgatgatggaatgccgattttaaaggggtaaacaattcaatcacactcacatatatagacagcttcaaattaatcggcaaacagttaaatttaaagttgattattcagtttttttctttgttttgttgcgcaaacaattgaacaagtttttgcgtttgttgtttaatctaccggaaaaactagtttccttttgttgatttccgttttttgtaatcgccagaaaagttaacagaaattaatggatttcggtttcagctatgatttcatttctcacactcacaccgcaccgcacacacacagtttgtaatactttttctttctaattaacctaatttatttttcctttctttcctcccaccgatccacatctgaaaaactaacaatcggaatgcaaattcaaaactatactactcatacataacatctggcatgcggctgtaaaatccaatttaacaaataaaatcaaaccaatcaactcaactttttctgcactcacaatgaaaaacgaacaaatcatatagaatccaagcatccaagtagcatgctcatcaaggcctataatctgcattatctacacacgttttgtagtacaattcggaaaatgcaaaatcattatagttactaataacaataaacgcaatgtgtatgagtttttgacaattattgtgattaagatacacgaagaaatgctttcgcttctaagtaggaaatgcaaatttgttaatgcaccaaacgaactggtcacgcgaattggtcgatttctgttttgatcacacgaaattaccaactgcaaatgtcagacctgcattacatgcacgtttatttcttattcaattcgttaattcaccttttgatcttttgaacgagcaacgaataaatgggaaaatgaaaacccaaaactgcaactacaacagcaatagcgcaaatcagcacgttttcaccacaaaaacaagagcaacaacaactgcaaaaaaaaaaaaaaaacacccaagttaaccgaacgcgttcagtgaaaagaaaatcaaaagaaatattactacttcgtattatgtcaatcaatcaaactgcgatttaattttaaccacataaaaatgcaatctaaaggcccgacaaattcgaaaaatgattaaaaataaacgaaaaacgcgactccgccctgccacgcccttacgttcattggaagttccagtccgggttccagtgttccagcgctcctgacccgcagcttccagcgcgaaaaacagctgcattgctccattcccacacgctgaggtgagtaatacgctataattattcaacatttagcattctttttatcggcaattcccgcaattactctctctacgtttacgttttccctcgcggcgaccattgaaaaatcgccgaaggtcgcgtttccatgtcctttaaagtccccatcgccaccctccgcccctttttgaaacacccacccgcccccttgaagttccgcccattttctattaatgaattc

SEQ ID NO: 11400 - protein, 291 aa, DROSOPHILA
MTKDRLAALHAAQSDDEEETEVAVNVDGHDSYMDDFFAQVEEIRGMIDKVQDNVEEVKKKHSAILSAPQTDEKTKQELEDLMADIKKNANRVRGKLKGIEQNIEQEEQQNKSSADLRIRKTQHSTLSRKFVEVMTEYNRTQTDYRERCKGRIQRQLEITGRPTNDDELEKMLEEGNSSVFTQGIIMETQQAKQTLADIEARHQDIMKLETSIKELHDMFMDMAMLVESQGEMIDRIEYHVEHAMDYVQTATQDTKKALKYQSKARRKKIMILICLTVLGILAASYVSSYFM

SEQ ID NO: 11401 - DNA, 5080 bp, DROSOPHILA
gggcagtggtaagaagagttccgccgcgagcaaaagacagagccaaaagcaggccaagatagtgccccagataccaccgataagttccggtgagtcgtgctacgccacctcttcgattggatcgcctgcctcctccgcctacgcatcgctctcctcgtcatcgaacagccacagcagcagtagcagtccgggactggagctggacagtctggtgggattgaacggaatcagcgccctggactctctgcttctggatacctccgatggggattccctctcctgtctaagtcccggctatggaagtctactcactggcagcggggaatccctgttgcccggttgccgaggtgatctgcccatgtcgggtctggagaagtcggatgtggagctcagtctgcgattactggaccagagttccaaggattccttcgactttgccagcgatcagcagccgtcggcctgtattagttcgttctccgctctggatgggtatccattcgacctgctgcacagcgattttccggatatgtttctcacgtgacgcgtatttcttagcaaccctaactactctccttttaagcctaaccctcgtcttaagttagagtgcgagttttaacccgactttcactattagccattacatgcgatgcgccattgaggcggaattcattgtgtcatagcaagcagctgacaggataagtatattcacatcctgcgaaggcaaaagctgctcaccgccacatccacatgatagctcaactcaactagtgatttaagcatttctttgtgacgcatttctcgttatcctgtaaataaagcacccagtgttgattcaaacaatctattctgtgatgggattttggatccttcaactttcagagatatgaaacagagtagactcttagattattagttttaaatggagcgattctgaaattgatattaggtagccgcaatataaatcataccttatatttgagatcaatagacacacatcgaaatggcaaacacttttaatcctgaggaggactttccggaagtctacaaggtctgcaagttgttcaatccgagcatagacgatcttgagaagattaaaaacgcaatggatcgtgagattacgatgggtctgagtcgcgatcatcacgatcgttcgaccgttccgtgccacttgagctatgtacaggatttgccaacgggcagggagcgtggtcagttcttggccctggagatgatgcccactaactgcaggataatgctggtgaagttcagcagcgagagagatatctacaccagttccaagtgcgtgattatgccgcatactgtggcagcgggtcgaggaaccgaggtcttcacctttctggccaccagcatagcaaattttgtgaaggagaaaaaggtggacaaggacaatctgccgctgggcatagcctttgcctttaccctaaagaagttggctttggatgtgggtatccttgtgtcgtggaccaaggagtttggagcccaaggcgccatcggcaaggatgtggtccaactgctgcgcgatgctctggccaagtttcccgaaatctccgtcgatgtcatgggtatcatcaatgtcggagccggttcgctgctggctctgtgctgggcccaaccggatacccgaattggcttgatcatgggcagtattgccaatagctgttatgtggaaagggtcgaaaggtgcgaaacgtacgagggtgatgagtacagaaagctgatgatcattaactcggattgggcccatttcggggatactgggcagttggatttcatacgtaacgaatacgatcgccagctggacaccgagtccataaatccgggcactcggatctatgagaagtttagtggagctctttgcatgggagaattggttcgcattatagtgcttcgcctgatgaaatcgggcgccatctttgccgaggacaggcgtgattacatagggatccagtggaagttggacatggtgtcgctgatcgaaatcgtctcggatccgccgggtgtctatacgaaggcacaggaggtgatggacaagtttcgcatacgtcactgcaaggaacgggatctggctgccttgaaatacatctgcgacacggtcacaaatcgtgctgccatgctggtggccagtggagtttcctgcctcattgaccgcatgcgcttgccacagatctcgatcgccgtggatggcggcatctaccgccttcatccgaccttttccaccgttcttaataagtacacccgtttgctagccgatcccaattacaacttcgagtttgtcatcacccaggacagctgcggagtgggagcggccataatggcgggaatggcacatgccaacaagtacaaaacggacgcgaaattgtttactatggactactagatatgcataaataaaatttttattatgtctgcttaaatacaatgacaacatatacgtttgaattttccatgttgttaaattttccatgttattcaaccagaacgtccaaagcaagaattgaaatttacctcatgagaaagtcaactagacttttaactcattctctattcggccctgtatttaaaattttgtttcataacaaaacagtttgtggaggctgtaataggaaaatgccgagcctggtgaacacggaaattgaagccgcggtcaagggcttcctgatcgaccaggagaagatgaccgaggtggtggagcgcatgaccaaggagataaagatgggcctggccaaggacacgcatgcacgagcggtgatcaagtgcttcgtcagccatgtgcaagatctgcccactggcaaggagcggggaaagtatttggccctggatctgggtggctctaatttcagggtgcttctggtgaacctgattagcaactcggacgtggaaaccatgtcgaagggctataattttcctcaaactctgatgtccggatcgggaaaggcgcttttcgacttccttgccgaatgcctgtcggagttttgtcactcccatggcctggagaatgaatcactggctctgggcttcaccttctcgtttccgctccagcagcagggactctccaagggtatccttgtggcctggaccaaaggattcagctgcgaaggcgtggtgggcaagaatgtggtgagtttcatggcgttcaaactatttacgtgtggttctattaacatttatatttaacaaatgaatttcttttaatatgcattcctaggtgagtcttctccaggaggcaatcgatcgaaggggcgatctaaagatcaataccgtcgccattctcaacgatacggtgggcactctgatgtcctgcgccttctatcatcccaactgccggattggattgatcgtgggaaccggctccaatgcgtgctatgtggagaaaacagtaaatgccgaatgcttcgaaggataccagaccagtcccaagccatcaatgataatcaactgcgagtggggcgcctttggggacaatggtgttctggagttcgttcgaacttcctacgacaaggcagtcgacaaggtaacacccaatcccggcaagcagacgttcgaaaagtgcatatcgggcatgtatatgggtgaacttgtacgtttggtcatcaccgatatgattgccaagggttttatgttccacggcatcatttccgagaagatccaggagcgatggagcttcaaaaccgcctatatttccgatgttgaaagtgatgcacctggcgagtatcgcaattgcaataaggtccttagcgaattgggcatattgggctgccaggaacccgacaaagaggccctgcgatacatctgcgaggcggtgtcctccaggtctgccaagctatgtgcctgcggcctggtcaccattatcaacaagatgaacatcaacgaggtggccatcggcatagacggtagcgtgtatcgcttccatcccaagtaccacgacatgctccagtaccacatgaagaagctcctcaagccgggcgtcaagtttgagctggttgtttcggaggacggatccggaagaggagcggctctcgtggcggccaccgcagtccaggccaaaagcaagctctaaattcgaagttgatattcttcaaatgcatgggaaacgttacggacaatgatatatgagcacaaaattatggaagaagaaataaagatttaaggatataatgggaacttttaatattatcctttcaaacttaaaattgtgtccagaaatccgatttgaattatggcgccaaagatataataattttctgccttagtggcaacactgcacatccatagtattttttagtacatgcagtatttttagaatatttatggaacgatagggatggggtaacactattttggtataaaagccaactcgccatctggtaacacttggagtttgcaaacatttatctctcgaccaatttaaggaatttgaggcaattagggcattcctgtgagcttttccaggccaactgcgattacttcaagccaagacaaacaggtgggtaaccaagcaggccgtgccccaccgaccagaccagcaaaacacccccatttcgggcggtgctggaaaaagcaaggccagctgtccatttgggatttggacactccactctgagcatcaagatgattgcccttaaccaaatgcatcgggcgctgcagagcgaggccattaatgccattatccgccttttcagcgacaacatgtcccaaggcggtggcactactccagcgggcggtaatcccacagcgctccaggcgaccggagggggcgtggtcttcagcaaggtcttcatccagcgcgattacagcgagggcacctccgtcaagttccatacacggctgcccgctgagctggagggcatggtgactatataatactctatattatctgtgggattatcatccgaactcatatcgattctcgtgcagattgaaagacacgtcttcgaggccaccatcaataggctaaacgagttctacgccgaggcggaggagggatcctgcggcacctattgcgagggctgcattggctgcatcacggcctacttgatctatatgtgctccgaaacgcact

SEQ ID NO: 11402 - DNA, 2726 bp, DROSOPHILA
atggcaaacacttttaatcctgaggaggactttccggaagtctacaaggtctgcaagttgttcaatccgagcatagacgatcttgagaagattaaaaacgcaatggatcgtgagattacgatgggtctgagtcgcgatcatcacgatcgttcgaccgttccgtgccacttgagctatgtacaggatttgccaacgggcagggagcgtggtcagttcttggccctggagatgatgcccactaactgcaggataatgctggtgaagttcagcagcgagagagatatctacaccagttccaagtgcgtgattatgccgcatactgtggcagcgggtcgaggaaccgaggtcttcacctttctggccaccagcatagcaaattttgtgaaggagaaaaaggtggacaaggacaatctgccgctgggcatagcctttgcctttaccctaaagaagttggctttggatgtgggtatccttgtgtcgtggaccaaggagtttggagcccaaggcgccatcggcaaggatgtggtccaactgctgcgcgatgctctggccaagtttcccgaaatctccgtcgatgtcatgggtatcatcaatgtcggagccggttcgctgctggctctgtgctgggcccaaccggatacccgaattggcttgatcatgggcagtattgccaatagctgttatgtggaaagggtcgaaaggtgcgaaacgtacgagggtgatgagtacagaaagctgatgatcattaactcggattgggcccatttcggggatactgggcagttggatttcatacgtaacgaatacgatcgccagctggacaccgagtccataaatccgggcactcggatctatgagaagtttagtggagctctttgcatgggagaattggttcgcattatagtgcttcgcctgatgaaatcgggcgccatctttgccgaggacaggcgtgattacatagggatccagtggaagttggacatggtgtcgctgatcgaaatcgtctcggatccgccgggtgtctatacgaaggcacaggaggtgatggacaagtttcgcatacgtcactgcaaggaacgggatctggctgccttgaaatacatctgcgacacggtcacaaatcgtgctgccatgctggtggccagtggagtttcctgcctcattgaccgcatgcgcttgccacagatctcgatcgccgtggatggcggcatctaccgccttcatccgaccttttccaccgttcttaataagtacacccgtttgctagccgatcccaattacaacttcgagtttgtcatcacccaggacagctgcggagtgggagcggccataatggcgggaatggcacatgccaacaagaaaatgccgagcctggtgaacacggaaattgaagccgcggtcaagggcttcctgatcgaccaggagaagatgaccgaggtggtggagcgcatgaccaaggagataaagatgggcctggccaaggacacgcatgcacgagcggtgatcaagtgcttcgtcagccatgtgcaagatctgcccactggcaaggagcggggaaagtatttggccctggatctgggtggctctaatttcagggtgcttctggtgaacctgattagcaactcggacgtggaaaccatgtcgaagggctataattttcctcaaactctgatgtccggatcgggaaaggcgcttttcgacttccttgccgaatgcctgtcggagttttgtcactcccatggcctggagaatgaatcactggctctgggcttcaccttctcgtttccgctccagcagcagggactctccaagggtatccttgtggcctggaccaaaggattcagctgcgaaggcgtggtgggcaagaatgtggtgagtcttctccaggaggcaatcgatcgaaggggcgatctaaagatcaataccgtcgccattctcaacgatacggtgggcactctgatgtcctgcgccttctatcatcccaactgccggattggattgatcgtgggaaccggctccaatgcgtgctatgtggagaaaacagtaaatgccgaatgcttcgaaggataccagaccagtcccaagccatcaatgataatcaactgcgagtggggcgcctttggggacaatggtgttctggagttcgttcgaacttcctacgacaaggcagtcgacaaggtaacacccaatcccggcaagcagacgttcgaaaagtgcatatcgggcatgtatatgggtgaacttgtacgtttggtcatcaccgatatgattgccaagggttttatgttccacggcatcatttccgagaagatccaggagcgatggagcttcaaaaccgcctatatttccgatgttgaaagtgatgcacctggcgagtatcgcaattgcaataaggtccttagcgaattgggcatattgggctgccaggaacccgacaaagaggccctgcgatacatctgcgaggcggtgtcctccaggtctgccaagctatgtgcctgcggcctggtcaccattatcaacaagatgaacatcaacgaggtggccatcggcatagacggtagcgtgtatcgcttccatcccaagtaccacgacatgctccagtaccacatgaagaagctcctcaagccgggcgtcaagtttgagctggttgtttcggaggacggatccggaagaggagcggctctcgtggcggccaccgcagtccaggccaaaagcaagctctaaat

SEQ ID NO: 11403 - protein, 907 aa, DROSOPHILA
MANTFNPEEDFPEVYKVCKLFNPSIDDLEKIKNAMDREITMGLSRDHHDRSTVPCHLSYVQDLPTGRERGQFLALEMMPTNCRIMLVKFSSERDIYTSSKCVIMPHTVAAGRGTEVFTFLATSIANFVKEKKVDKDNLPLGIAFAFTLKKLALDVGILVSWTKEFGAQGAIGKDVVQLLRDALAKFPEISVDVMGIINVGAGSLLALCWAQPDTRIGLIMGSIANSCYVERVERCETYEGDEYRKLMIINSDWAHFGDTGQLDFIRNEYDRQLDTESINPGTRIYEKFSGALCMGELVRIIVLRLMKSGAIFAEDRRDYIGIQWKLDMVSLIEIVSDPPGVYTKAQEVMDKFRIRHCKERDLAALKYICDTVTNRAAMLVASGVSCLIDRMRLPQISIAVDGGIYRLHPTFSTVLNKYTRLLADPNYNFEFVITQDSCGVGAAIMAGMAHANKKMPSLVNTEIEAAVKGFLIDQEKMTEVVERMTKEIKMGLAKDTHARAVIKCFVSHVQDLPTGKERGKYLALDLGGSNFRVLLVNLISNSDVETMSKGYNFPQTLMSGSGKALFDFLAECLSEFCHSHGLENESLALGFTFSFPLQQQGLSKGILVAWTKGFSCEGVVGKNVVSLLQEAIDRRGDLKINTVAILNDTVGTLMSCAFYHPNCRIGLIVGTGSNACYVEKTVNAECFEGYQTSPKPSMIINCEWGAFGDNGVLEFVRTSYDKAVDKVTPNPGKQTFEKCISGMYMGELVRLVITDMIAKGFMFHGIISEKIQERWSFKTAYISDVESDAPGEYRNCNKVLSELGILGCQEPDKEALRYICEAVSSRSAKLCACGLVTIINKMNINEVAIGIDGSVYRFHPKYHDMLQYHMKKLLKPGVKFELVVSEDGSGRGAALVAATAVQAKSKL

SEQ ID NO: 11404 - DNA, 2626 bp, DROSOPHILA
tcctccaccttgttgtgccggatgtttgtgttgatcgaggccactgcctggcgggaaagatcgttggccacgatctggcgtacaccggcgatttcctgcgcgtaacggatgctacgcaaaccggtggctgccagtgcctccaggatccgaagtccatcctcatatcgagtaccggcctcataaacaggtggatcctcgggaacgggagtggtcttctcatcctcctgttccttgaccttcttccgctgctttttgagcgccttttcgctccgctccttggtcaatctctgtcgataaacattcagagcagcaatgctcagatctcgattgaattcctggacaggattgtagaacacattgccgccggaaacgatctccgcattacgttcgcgtatcacgttttcgttgggattttcagcaataatctgcaatcgtaatgcttagcttaatgtggtttatttataatgtgtttttctttaagaacctgcggcttttcctcgtccacttccatttggatgagttaaaagaatacacgtggggcagtgttgaaaaacgtaagctactagctattaagctttaaaactaaaaatatacacaaatttgttgttttttatatgaaatacgaaataaacattacagaattatatttaagtttaatttagtttcaaaatttacaatttgggtatattctctgtaataatacatcccataaaatgatgttgaataaaaatggttcttaatatttatttgaattatttaaagattaaaataaattaaaataataaattgacattaaatatgactggaaaataaaacttgaagctagctactttgccaccaccaggattatcgaaaggactatcgaaccaaagtccgcccctatgcttgataaagaaattaatttgcagaagtgaaacagccgcagccgcaaacagaagcaaaagagctagaagtgatagcatttttgtacttttatacagtgccacaaagaagccacagaatgaccgatctgcgcaacgagatggacagcgatctggaccagaactactccctgaacagcaatgcggaccccaaaaacatgcaggagctgaccatatacgtgagtaatgcccgaaccgggaaccacccagtaaatagagacaccaaatgagcacccagtaaacctgcctcctgttatcaggtacaaaatctgttgcagaacgttcaggacaagttccagacgatgtcggaccagataataacgcgcatcgatgacatgggcaaccgcatcgacgatctggagaagagcattgcggatctgatgaaccaggccgggatcgagggtcagggaccggagaaatgagatccgtagcgctggcacggccacgcccattcggaaagtgcatcccaataccattagatacatacatcgaacacctggcacccagtcacccgtatcaagtttacaattccaggttctcacattcatttaatctcctccgcacccagctgctccccaagaaatgaagaaaagaacacatttgctcatccatttattgcttagttttaagtttcgcccggtcggggcacatcataatttaagtaaagtaattcttttgtgagcaatggccaataattttgaattattgccgtttagtttctatttataaattaaaaattcaagaattgtaaattccctgctatttgggtgttcaggacttcgatttaacaacggttaccaggcgaccagttcccgatttgtgtttcctcacctgaaagtttattgcgaaaaggggaagagaagcgcgtcatttccgcttgattagttatgatatgcatatatttagtattgtttatctgggacaaataatgcaaatcgtgacccgtgtccattaataaaaagtgtatggaaatcagcgctgaatggcaaggagtgctatataacaatccctacttttaaaaggaaaatcaacattgatttgtggaccagaatgattttcgaatattaattgcaatttgtgttgcttctacatatcatgttttttaaggcaatgagatagagagtggtaatacattctgattaaattatgaaaggaagctctgagactgcggggttacaaaaaccaattaagataaacccttagaagtatgttcctaattcaattttatttaagctcttgctacgattccagaatgtgcctgcaatactgatgtgagctctaggaactctactactggtcataatttgagtgctagtgctggggcacgtggaactgcttctgcagccttacatgggtggaggccaccgccttgaatggatgtttgaccgtttgtctgctgggcttcgaaggagcagaagtggcactggcactggtcgatggcgtggctatatccttgctggcagatcggatcttggccccaaaaacattctcccgcggaggaacctggttgcccggctgcgtgggttccctctcgtcatccgttgccgttccagattcctcgtcctcttcgccactttgctcggtttccttgggaggaatggagttattctatcattccataatcatgccaaatcatacctcatcttcatcatcttcctcttcatcctgctcgtcggtttcatcttcgggttctgttttacttccat

SEQ ID NO: 11405 - DNA, 545 bp, DROSOPHILA
atgaccgatctgcgcaacgagatggacagcgatctggaccagaactactccctgaacagcaatgcggaccccaaaaacatgcaggagctgaccatatacgtacaaaatctgttgcagaacgttcaggacaagttccagacgatgtcggaccagataataacgcgcatcgatgacatgggcaaccgcatcgacgatctggagaagagcattgcggatctgatgaaccaggccgggatcgagggtcagggaccggagaaatgagatccgtagcgctggcacggccacgcccattcggaaagtgcatcccaataccattagatacatacatcgaacacctggcacccagtcacccgtatcaagtttacaattccaggttctcacattcatttaatctcctccgcacccagctgctccccaagaaatgaagaaaagaacacatttgctcatccatttattgcttagttttaagtttcgcccggtcggggcacatcataatttaagtaaagtaattcttttgtgagcaatggccaataattttgaattat

SEQ ID NO: 11406 - protein, 86 aa, DROSOPHILA
MTDLRNEMDSDLDQNYSLNSNADPKNMQELTIYVQNLLQNVQDKFQTMSDQIITRIDDMGNRIDDLEKSIADLMNQAGIEGQGPEK

SEQ ID NO: 11407 - DNA, 8676 bp, DROSOPHILA
cttaataataaataaatattttattctacgacaaagaagaacttttcaatgtaacattattaactgctttaagtcatatccttaaactttcgccttgaaaatctttaaaaccctacaggtattccaaattaataatctcaggtgctagaaatttaattaatatattttggaaacagcataaattagtgaaaatacaacattgttttaatcaaacatttttaaaagcatgttttcggttgcaaagttttccaatttcaatcctgaaattaaagttgagttgaacaattgctataaaaagcgaccatttattacgttttataaactgtcccgattgtgattttagttgtttattttatttcatatttaaaaccgttactattttaaaaatcgttcgctaaagattgtgcttttaagcattgataactatcgctaattgccagaattcgtaatcttatttgacttgaattgtaaaaatataggatttaggatttttaccaaatagatgtagttcaaagaacacaattctttttattattaagcattttattttgggagttccttgcactagctttttgcagcgacctgtgtgtaagcttacattgagataacattaatgtgaacgtgcagcgaatgcagcactataacattggccagtggaaacatgatatttgctagcatgctgactggcgccgtggattttgacgttcttagttgacggtcacacagcgcaccgagctgcgtttttcgttgataatttttaaatttatttattagtttattggttggaaatagagctgcccccaactgcccgctgaccacggaattatcggtccggtccaccgacctccgctttcacacactattcggcaatcgatatatacgctgacggtaattggagaacgttttttccattttatctccaccttgtccgcacttcgttttgtgctctctttgtgcgctgcctccgcttaacatttgggcctgtaagaaacacatataagcagaacggcccgccgtgtgtgcctgtgaaattggttaaataacgtacagtggaatgggccaatggccaaaatgcaataagaatatgtgtgtgcaataaaaatagggaacggtaccgtgccccaaaacatgaaaatggtgctagacgctcctaacgccgtgccgagctggcatattttgcttagcgacgccgtcggctccgtttttcccggccgcgaactttgcgcgaggaatttacaacaaaaacaatgaattaaatggtatttaaattgtccatataatgcggtttggaaatgcgaaattgtgcctaacttgcccaatgcaaacgaatgtttctctttgaaggccctgcttaatgacgtcacaagcgtagcagagtgcaacagacagacaacaatgaccgatgagcataaaagtaacattaacagtaacagcagtcactccagcaacaacaacaacaacggcagcagcagcaataacgacaacaacagcaacgacgacgcagcaagtagcagcaacagcaaaaacaacaacaccagcaacgagagcagccacagcaacaacaatactagtagcataattgcagaggcggccgccaagtttctactgaaaaatggcctaaacggcagtagcagcaccagctacccccctctgccaccgcctctgcccgccaacttaagcaggacgaccacgcccacgacaacgacaacgccctcatcctccagctccaccgcctcaaatggctttttgccgcatgccaagacgcccaaaagtagtagcattatggctgcgtccgccgcagtggcagccagcgtcgttggagctactgcgtccaagcccaccatcgatgtcctggggggcgtcctggactacagttccttgggcggagctgcaacaggctcactgcccaccactgcagtagtagcggcggcagcgggaacagcgaagatcggcaagggaagcaactccggcggaagctttgatatgggcaggacaccaatatcgacgcacggcaacaacagctggggcggctacggtggtcgtttgcagttctttaaaggtaagtatcttggtttatttataccgaatcagagcagtgtaaagaaaaccattttttaactattctgcgtagatggcaaattcatattggaactggcgcggtccaaggatggcgataaaagcggctgggtttcggtcacgcgcaagaccttccgccctccatcggcggccacctccgcaactgtgaccccaacgtcggcggtgaccacagcgtatccaaagaacgagaattccacatcgctgagctgtacgtaacacatggcatagtagttcccaacggattaccccttccatttaattacttgacccgattggaatcagatttgagtaaaaggaattggattttgaaacatgtgtagatagctagcttaatccgagcggtcaaagcttacaaacacttgcagttataaaaaacatgtgcctatttgacttaaattgttctaatggcacgtagaggataaagtccaatttcgaaaacaaaaaatctgtaaaaaacgaccgcacctatgttcaaatctctgatctattttaaaactgtatatatcggccatctctaatattatatttaaaatctacgaaaatgtcaaacgttttaatgaaatagtaagaaaaaaccaaactgttcagaatcggtcatgttctttgtatgacagttttccaattcgatcctataaaatataatgtcctcccatccttgtatacatttaaatcctatttcataaattgttaacaatctgaatcaaacaaaagcaaatatttatttatgccaaactataattaactactacaatttgtctatgtataccttgcgttaatattcctcttcattgcagtttcggacgacaacagctcgatacaatcctctccttggcagcgagaccagccctggaaacagtcccgacccaggcgcggcatatctaaggagctgtcgctcttcttccaccgccccaggaacagtacgcttggccgagctgctctccggacagccgctcgcaaacgacggcgcccccacgagccgcttaccaccagcgaggatcagcagcccatttttgcgacggcaatcaaggcggaaaatggagacgatactcttaaagcagaagctgcagaggccgttgaaattgaaaatgttgctgtggcggacacaaccacaaatgagattaaaattgaaaaaccggacacgatcaaaggcgaggatgatgctgaacggctcgaaaaggagccgaagaaggcggttagcgatgatagcgagtcaaaagaagcatcgcccggtcagcaagtggaaccacaaccaaaagatgagactgttgatgttgagatgaagatgaatacgagcgaggatgaggaacccatgacagagctgcccagaatcacgaatgccgtaaatggtgatctaaacggcgatctaaaggcgagcattgggaaaccaaaatccaagccgaagccaaaagccaagctcagcagcatcattcagaaactcatcgatagcgtaccagcacggcttgagcaaatgtcgaagacatcagctgtgatcgcatcgacaacgacgtcttcagatcgcattggtggcggtctaagtcacgccttgacgcacaaagtaagttttacttggcacaacctgcataagctgcggtttcaaatgttaatcatgtactgcaacatttttattatgttaaagttgtaaatctagttagggactttcataaagaaaaaactttgaattgaccacttaaatatcttcttttaggtttctccaccctcttctgcgacagcagccggacgactagtcgagtaccacacccagcacgtgtcgcccaggaaaagaatcctgcgcgagttcgaaaaggtgtcgctagaggacaacggatgcgtaaacaacggcagcggtggagctagtagcggtggtgctggaggaaaacggagtcgagcaaagggaacttcgacatcgtctccggctggcaaggcgtcaccaatgaacttggcgccaccccaaggaaagccaagccccagtcccggctccagctcatccagcacttcgccagcgaccttgtcaacgcagccaacgcggctcaacagctcttacagtatccactccctgctaggtgggagcagtggcagcggtagctcatccttctcctcctctggcaagaagtgcggcgatcacccggcagctattatcagcaatgtgcaccatccacagcactcaatgtaccaacccagttcctcgagctatccacgcgccctgctcacctcgccaaagtcgcccgatgtgagtggcagcaatggcgggggcggaaaatcgccctcgcatacaggaaccaagaagcgttcgccaccgtactcggcgggatcacccgtagactatggccactccttctacagggatccctatgcgggagcaggtcgtccttccacatcgggctcagcatcgcaggacctgtcgccaccgcgctcttccccagcatcgccagccacgacgccgcgtactgtgcccaaaaagactgcatcgatccgacgcgagttcgcttcaccgtcggccagcagcagtagctgtccctcgcccggcgaccggagtgcatcgcccccggaacggcggcacatgcagcagcagccgcacctacagcgtagctcgccgctgcactactatatgtacccgccaccgccccaggtgaacgggaacggctcggccggaagtccgacctcggcgccgcccacgtcgaacagcagtgcagctgcagtagcggcggcagcagcggccgcagccgcatacattccctcgccttcgatatacaacccgtacatatccacactggcggcgttgaggcacaatccgctgtggatgcaccactatcagacaggagcgtcgcccctgctgtcgccacatccacaacccggtggctcagcggccgccgctgctgcagctgctgctgcgagattatcgccccaatcggcctatcacgcgttcgcgtataacggagtgggagcggctgttgccgctgcagcagctgcggcagcctttggacaaccggcgcccagtccccacacgcatccgcacttggcccatccgcaccagcatccgcacccggctgcactgaccacccaccactctcccgctcacctggccacgccaaaactgactgatagtagtaccgaccaaatgtctgcaacgtccagtcatcgcacagcctccacttcgccgagcagctcgagcgcatcggcctcctcctcggcggccacttcgggcgccagctcctccgcaatgtttcatactagtagtctaaggaatgaacaaagttcaggtaagcattcaatcagtgcaccaataatggcaagcagtttgatgattcaattttcattcctctgggaatgtctgaagaaaatatattacagatccatttattatgttgtcaatttaatgcacgtaaaacacaatttaataacgtttcttatttatttcttccttagacttaccactgaatctgtcaaagcactgagacatacacacgccccagctgccccagtttctgggccaaccattcgagttaagaacattttcgcactagtagcgcttaagacgacattcaatacacgtaatataatttgataagttcgctgatagtttagttgtaacccgattgtttaatcctaagcctaatcctaggttctcaattagggccgaacatttagaaatcgcatacaaaaagagatgaaaaactcaactttgtttttaaacccgttccagaactctttatacaatcagttgagaaattttattttcgacaaactgaataaaatatgcaaaggaattttattctatgccgactaatggaaagaaatactaataaaaacattttctataggatgtataaaatgcaagtcttaaagaatctcaaaaaagagttacgtttttttcatcaaaacatttccttgaaacagactgaacctgaatttttttagaaaaaaaaaatgaaaaacttagttacgaatcgcaaaatataacattttaaagtatatttaacaaaactacaagaacagatttttataaaatgcttgtgcctttaaaaatggaaacagaactagggatacaaaaattaatattaaaaagaaaaagaagtttactataaaaacatttatgtgcaagcatgtgcaggtattctatggtgaaaactttagaatttcttgatatcgtggtccaaaatgcagttgacaggaatttgcactaagcagattgtatacgacaccaactttttaagtacttttaaaaatgtatcttttaattatttcggaataattattctaaaatagttaaaagataaaagcaatccaaaactatacaactcgtctgtacttcaaaacgaaagagattactctttggtcttacattttttggtagactgtaaaaactaaaattcgaaaaaattgttgaagtttgaatttaaatcctcggcggatctaaatttaacctccacgattgttgtcaccatcaaaaatattatataactgtgcctagtgcacattcgctgtcagtggctgtccaatcaaaaacaaataaaatgtacaaaaaatccacatatacgacaaatttacaagaaacggaaagcaaaaagatcctaagcagacaatttcaaaccggaactcgtacaactgaaactgatacaaataaaaaacatattcctaacgcaaaaagacaaaaacaaaacgcggtttctcatattttctaaattatttatataaatcaaatgtctatttatatttactgatatgataatgtgtaagtaaataggtgtaattgtaaatacagtatttttacacaacaaaaagttaatcaatacgcgagaaataaccaatatatttaatataactatttttataacggattttaacaagtaactgtatattttgtatctgattacgcagaataaaaaacaaaacgaattccatatgaggtcaagaacagtttgcacaaggcggcctgaaacttgcttaaaacttaatgcactgaacaaaatccgaactaaacacatctgttccaggcagatacaaaatattttccaatggaaaaatggagtagattcatttattttttactaatcaatacataaatctttcagttcgaaatttttaagcaagttgcagtcggctaaactttttagtaggctttaatgaaaattaaaaagaaatataaatacaattttcatacaaattccatatggtttctactacctactgattagttagttagataggcgtctagggactattaatttacatttgtaacggtactgtgtacgacgtttttgtttaactgaacggtagtgtttttaatttgaaattcgatgtttttagtgagtggctattgttgaacgaacacatgtactatgtgcattgtcgaacaatgtgcgcaaacccaaaaaaataattttggcaaaaagtgaaatatatgaagtaagcaaatggtttcaagatactgcatctcgtgatgttggagtgtgtgtgtaaagtaaaggaaacaaaattaattttaaagaaatatattttatataggtatatatactgcaactgaatacttgatgtcaataaaaacttatactaaatgtatgaaaacgtatctacgaaagctttgcgttgggcatgattaatccgatgatccgatttccccattaaaacgacgttagttattgagacgaatgcggtctatcgtaaacgtagaagcacataatatatctatatttttctggtttcgctttaattgtatacattcgttcgtttctatatttgatttctttcgttttattgtatttatccagcgatttacaaaatacgttacaattattagagaacattataaaatgaaaccgggaaacacgataatgttgattggttgctggtacaaaagcacacacaaattatagtacacaattaatcgtaatgtagggatagaaaatcgttaattttaacttatagagttaatgtctcttaaattaatatagcataataggatacaatttttgcacgttcatgcgccaatgtgcatgtgcgggggggtgttcaaacaacaaatgaataatagacaacaaaacaatttttaggatcaaaaatcactgtataagagggggcggggcgataaatgattacagttacaagaatgggtgaacgtgaaatgtacaaattaagagtaaggtgtatatattggagcacttgtgggagcgacactatcagctatggatcgaggggttgtcgattgggtagttctcggcctaacatagtgaacacatagttttgaactttatgaattggatacaaaattgtactacgcctgttgcagaggctcggaagggcaggcagaaacttagacttggtgagtgggtttgcttgattgtgagatgtcgctgacttcgaagcaatcgtgttgttgttgtcagcttgttgatgtagatgtagttgtctgttgtttactgtttgttgtttttggagaagttgtgcgaggcccagttaagggaagtcttccaggagttggccaaagcttcgctgaatttcgctcggaaatgttcgcgtgctttttcctccgtgtagtccagcacctaaaaacagaatacaacgtatagttactcaggcctaaat

SEQ ID NO: 11408 - DNA, 5617 bp, DROSOPHILA
gcagaacggcccgccgtgtgtgcctgtgaaattggttaaataacgtacagtggaatgggccaatggccaaaatgcaataagaatatgtgtgtgcaataaaaatagggaacggtaccgtgccccaaaacatgaaaatggtgctagacgctcctaacgccgtgccgagctggcatattttgcttagcgacgccgtcggctccgtttttcccggccgcgaactttgcgcgaggaatttacaacaaaaacaatgaattaaatggccctgcttaatgacgtcacaagcgtagcagagtgcaacagacagacaacaatgaccgatgagcataaaagtaacattaacagtaacagcagtcactccagcaacaacaacaacaacggcagcagcagcaataacgacaacaacagcaacgacgacgcagcaagtagcagcaacagcaaaaacaacaacaccagcaacgagagcagccacagcaacaacaatactagtagcataattgcagaggcggccgccaagtttctactgaaaaatggcctaaacggcagtagcagcaccagctacccccctctgccaccgcctctgcccgccaacttaagcaggacgaccacgcccacgacaacgacaacgccctcatcctccagctccaccgcctcaaatggctttttgccgcatgccaagacgcccaaaagtagtagcattatggctgcgtccgccgcagtggcagccagcgtcgttggagctactgcgtccaagcccaccatcgatgtcctggggggcgtcctggactacagttccttgggcggagctgcaacaggctcactgcccaccactgcagtagtagcggcggcagcgggaacagcgaagatcggcaagggaagcaactccggcggaagctttgatatgggcaggacaccaatatcgacgcacggcaacaacagctggggcggctacggtggtcgtttgcagttctttaaagatggcaaattcatattggaactggcgcggtccaaggatggcgataaaagcggctgggtttcggtcacgcgcaagaccttccgccctccatcggcggccacctccgcaactgtgaccccaacgtcggcggtgaccacagcgtatccaaagaacgagaattccacatcgctgagcttttcggacgacaacagctcgatacaatcctctccttggcagcgagaccagccctggaaacagtcccgacccaggcgcggcatatctaaggagctgtcgctcttcttccaccgccccaggaacagtacgcttggccgagctgctctccggacagccgctcgcaaacgacggcgcccccacgagccgcttaccaccagcgaggatcagcagcccatttttgcgacggcaatcaaggcggaaaatggagacgatactcttaaagcagaagctgcagaggccgttgaaattgaaaatgttgctgtggcggacacaaccacaaatgagattaaaattgaaaaaccggacacgatcaaaggcgaggatgatgctgaacggctcgaaaaggagccgaagaaggcggttagcgatgatagcgagtcaaaagaagcatcgcccggtcagcaagtggaaccacaaccaaaagatgagactgttgatgttgagatgaagatgaatacgagcgaggatgaggaacccatgacagagctgcccagaatcacgaatgccgtaaatggtgatctaaacggcgatctaaaggcgagcattgggaaaccaaaatccaagccgaagccaaaagccaagctcagcagcatcattcagaaactcatcgatagcgtaccagcacggcttgagcaaatgtcgaagacatcagctgtgatcgcatcgacaacgacgtcttcagatcgcattggtggcggtctaagtcacgccttgacgcacaaagtttctccaccctcttctgcgacagcagccggacgactagtcgagtaccacacccagcacgtgtcgcccaggaaaagaatcctgcgcgagttcgaaaaggtgtcgctagaggacaacggatgcgtaaacaacggcagcggtggagctagtagcggtggtgctggaggaaaacggagtcgagcaaagggaacttcgacatcgtctccggctggcaaggcgtcaccaatgaacttggcgccaccccaaggaaagccaagccccagtcccggctccagctcatccagcacttcgccagcgaccttgtcaacgcagccaacgcggctcaacagctcttacagtatccactccctgctaggtgggagcagtggcagcggtagctcatccttctcctcctctggcaagaagtgcggcgatcacccggcagctattatcagcaatgtgcaccatccacagcactcaatgtaccaacccagttcctcgagctatccacgcgccctgctcacctcgccaaagtcgcccgatgtgagtggcagcaatggcgggggcggaaaatcgccctcgcatacaggaaccaagaagcgttcgccaccgtactcggcgggatcacccgtagactatggccactccttctacagggatccctatgcgggagcaggtcgtccttccacatcgggctcagcatcgcaggacctgtcgccaccgcgctcttccccagcatcgccagccacgacgccgcgtactgtgcccaaaaagactgcatcgatccgacgcgagttcgcttcaccgtcggccagcagcagtagctgtccctcgcccggcgaccggagtgcatcgcccccggaacggcggcacatgcagcagcagccgcacctacagcgtagctcgccgctgcactactatatgtacccgccaccgccccaggtgaacgggaacggctcggccggaagtccgacctcggcgccgcccacgtcgaacagcagtgcagctgcagtagcggcggcagcagcggccgcagccgcatacattccctcgccttcgatatacaacccgtacatatccacactggcggcgttgaggcacaatccgctgtggatgcaccactatcagacaggagcgtcgcccctgctgtcgccacatccacaacccggtggctcagcggccgccgctgctgcagctgctgctgcgagattatcgccccaatcggcctatcacgcgttcgcgtataacggagtgggagcggctgttgccgctgcagcagctgcggcagcctttggacaaccggcgcccagtccccacacgcatccgcacttggcccatccgcaccagcatccgcacccggctgcactgaccacccaccactctcccgctcacctggccacgccaaaactgactgatagtagtaccgaccaaatgtctgcaacgtccagtcatcgcacagcctccacttcgccgagcagctcgagcgcatcggcctcctcctcggcggccacttcgggcgccagctcctccgcaatgtttcatactagtagtctaaggaatgaacaaagttcagacttaccactgaatctgtcaaagcactgagacatacacacgccccagctgccccagtttctgggccaaccattcgagttaagaacattttcgcactagtagcgcttaagacgacattcaatacacgtaatataatttgataagttcgctgatagtttagttgtaacccgattgtttaatcctaagcctaatcctaggttctcaattagggccgaacatttagaaatcgcatacaaaaagagatgaaaaactcaactttgtttttaaacccgttccagaactctttatacaatcagttgagaaattttattttcgacaaactgaataaaatatgcaaaggaattttattctatgccgactaatggaaagaaatactaataaaaacattttctataggatgtataaaatgcaagtcttaaagaatctcaaaaaagagttacgtttttttcatcaaaacatttccttgaaacagactgaacctgaatttttttagaaaaaaaaaatgaaaaacttagttacgaatcgcaaaatataacattttaaagtatatttaacaaaactacaagaacagatttttataaaatgcttgtgcctttaaaaatggaaacagaactagggatacaaaaattaatattaaaaagaaaaagaagtttactataaaaacatttatgtgcaagcatgtgcaggtattctatggtgaaaactttagaatttcttgatatcgtggtccaaaatgcagttgacaggaatttgcactaagcagattgtatacgacaccaactttttaagtacttttaaaaatgtatcttttaattatttcggaataattattctaaaatagttaaaagataaaagcaatccaaaactatacaactcgtctgtacttcaaaacgaaagagattactctttggtcttacattttttggtagactgtaaaaactaaaattcgaaaaaattgttgaagtttgaatttaaatcctcggcggatctaaatttaacctccacgattgttgtcaccatcaaaaatattatataactgtgcctagtgcacattcgctgtcagtggctgtccaatcaaaaacaaataaaatgtacaaaaaatccacatatacgacaaatttacaagaaacggaaagcaaaaagatcctaagcagacaatttcaaaccggaactcgtacaactgaaactgatacaaataaaaaacatattcctaacgcaaaaagacaaaaacaaaacgcggtttctcatattttctaaattatttatataaatcaaatgtctatttatatttactgatatgataatgtgtaagtaaataggtgtaattgtaaatacagtatttttacacaacaaaaagttaatcaatacgcgagaaataaccaatatatttaatataactatttttataacggattttaacaagtaactgtatattttgtatctgattacgcagaataaaaaacaaaacgaattccatatgaggtcaagaacagtttgcacaaggcggcctgaaacttgcttaaaacttaatgcactgaacaaaatccgaactaaacacatctgttccaggcagatacaaaatattttccaatggaaaaatggagtagattcatttattttttactaatcaatacataaatctttcagttcgaaatttttaagcaagttgcagtcggctaaactttttagtaggctttaatgaaaattaaaaagaaatataaatacaattttcatacaaattccatatggtttctactacctactgattagttagttagataggcgtctagggactattaatttacatttgtaacggtactgtgtacgacgtttttgtttaactgaacggtagtgtttttaatttgaaattcgatgtttttagtgagtggctattgttgaacgaacacatgtactatgtgcattgtcgaacaatgtgcgcaaacccaaaaaaataattttggcaaaaagtgaaatatatgaagtaagcaaatggtttcaagatactgcatctcgtgatgttggagtgtgtgtgtaaagtaaaggaaacaaaattaattttaaagaaatatattttatataggtatatatactgcaactgaatacttgatgtcaataaaaacttatactaaatgtatgaaaacgtatctacgaaagctt

SEQ ID NO: 11409 - protein, 1077 aa, DROSOPHILA
MALLNDVTSVAECNRQTTMTDEHKSNINSNSSHSSNNNNNGSSSNNDNNSNDDAASSSNSKNNNTSNESSHSNNNTSSIIAEAAAKFLLKNGLNGSSSTSYPPLPPPLPANLSRTTTPTTTTTPSSSSSTASNGFLPHAKTPKSSSIMAASAAVAASVVGATASKPTIDVLGGVLDYSSLGGAATGSLPTTAVVAAAAGTAKIGKGSNSGGSFDMGRTPISTHGNNSWGGYGGRLQFFKDGKFILELARSKDGDKSGWVSVTRKTFRPPSAATSATVTPTSAVTTAYPKNENSTSLSFSDDNSSIQSSPWQRDQPWKQSRPRRGISKELSLFFHRPRNSTLGRAALRTAARKRRRPHEPLTTSEDQQPIFATAIKAENGDDTLKAEAAEAVEIENVAVADTTTNEIKIEKPDTIKGEDDAERLEKEPKKAVSDDSESKEASPGQQVEPQPKDETVDVEMKMNTSEDEEPMTELPRITNAVNGDLNGDLKASIGKPKSKPKPKAKLSSIIQKLIDSVPARLEQMSKTSAVIASTTTSSDRIGGGLSHALTHKVSPPSSATAAGRLVEYHTQHVSPRKRILREFEKVSLEDNGCVNNGSGGASSGGAGGKRSRAKGTSTSSPAGKASPMNLAPPQGKPSPSPGSSSSSTSPATLSTQPTRLNSSYSIHSLLGGSSGSGSSSFSSSGKKCGDHPAAIISNVHHPQHSMYQPSSSSYPRALLTSPKSPDVSGSNGGGGKSPSHTGTKKRSPPYSAGSPVDYGHSFYRDPYAGAGRPSTSGSASQDLSPPRSSPASPATTPRTVPKKTASIRREFASPSASSSSCPSPGDRSASPPERRHMQQQPHLQRSSPLHYYMYPPPPQVNGNGSAGSPTSAPPTSNSSAAAVAAAAAAAAAYIPSPSIYNPYISTLAALRHNPLWMHHYQTGASPLLSPHPQPGGSAAAAAAAAAARLSPQSAYHAFAYNGVGAAVAAAAAAAAFGQPAPSPHTHPHLAHPHQHPHPAALTTHHSPAHLATPKLTDSSTDQMSATSSHRTASTSPSSSSASASSSAATSGASSSAMFHTSSLRNEQSSDLPLNLSKH

SEQ ID NO: 11410 - DNA, 5813 bp, DROSOPHILA
tcattggcagcaaggcgttcttcgtaactcccagcgactcgctggcggtaattgcccactacctggaggccataccgtacttccaaaagaatggtgttcaaggattcgcccgcagtatgccaactgcatccgctgtggatttggtgggcagaaagttgggcaaggaagtgtttgaggttcccactggatggaagtacttcggtaatctcatggacgccggaaggttgtgtctgtgcggagaggagagcttcggaactggctccaatcacatccgcgaaaaggatggcatctgggcggttctcgcttggatctccgtgatgcagcacacgggtaaaggcatcgaagacatcctgaagcagcactggtctgtgtatggacgcaactatttcacccgctacgattatgaggagtgcgcttccgatccttgcaacgagatggtggccaccatggagaagaccataactgctccggagttcgtcggcaagagctattccagcggcggaaaaacctacaaggtcaaggaggccgacaacttcagctacacagatcctgtcgacaagtcggtggccacgaaacagggtctgcgcattgtgttcgaggatggcagccgcattgtggtgcgcctcagtggaactggaagctcgggagcaaccgttcggtgagtcacgatgagatttaatatcaaacaattcttttcaataatagatgaattgttccttttcagcttgtacattgattcctatgagaaggagaatgttttgggccaggccagcgtgatgctgaaacccttgatcgacatcgccctggagatctctcagctgcccaagttcactggacgcaacgctccaacggttatcacgtaaagagttcctgtcagcgaaggaacactgagattaccaacccatccaactacaatctcctcttgtacctcagcgaggcatttccttgttatgtttcggatttattaaagtttgtgtagcccaaacctgttggttagttttcattttagcagtgtggataaatactcgtactcgctaagtattatgttgggaatgcgctgctccagaactccgagtggcaaacgagcaatgcgtataaaggctagaagaaagtgcagggcggtgaccacctcgggacccaggatttctttatccctaataaagaaaagtgtatgtcatctgatattcgtggattatcttgtaactaaagtacttacagtaactgagcctccgatacagtcaccacgtactgactcatgtaggatatatacagcatcttgacattcttgtggaactgctgcaagatcgttactagacccacaataaaaggcacattatcaatgttatctttggctgattttggcaacagacaatcggtaatcgtggaatgctgcatacgacccaaatgggcaatggtgaaaagaaacataaagagggccatgttatgggtgttctttgtgataaggaagacttgctctaggggctcaaagtttcccgtatagagcagggtttcctgcagttctgtcaacatgaccacacccttttcatcacagagatccttgctgagagacagttctagtaaaagggctctgtttgcggaagagattgcaaatatataaatatttttaggatgttatagtttgacttacttgttcagggtgtccgccgtgttctccagcaacttggcatcacatttactgctaaagcttagctctcctgcaatttctctgcggagcagctgcttctgtccaatgcacaaaacccaatccaacagcgtgggccacactttcagccatcgttgggtgtaagcttgataatacttcaaaggctgcttggacacctccggagttgggaagtcccgggcctccaattcccgagtcagtgccgctaacgtatccacccacatacgatccgaggtcaggttacgctgtaaccgttccaagttgcgctttaactcatcagccaacatgtgagcgtagaggcgctccaatcccaccattcctgccggagccaaggcttctctaagtatctcaaagaatccagagccggcaagaacttcctggtgaggagccttcttctcataccaagtgctttttagatccagaaaaatagtttgcttgggatctgtgcaccgcagaatttcgtgggccagacggccaatgaagttgttagacggatctcccaacagcggtggaaagttgggaatgggtatgatctggctctggtgctccgattgaaattcctgcactttgttgcggaggaaggcattgcattccttctccacattgtagttaataatgcgttgcgattcctccagcaggattcgaagtccctgaactcttaagtagtcctctatatattcgaaggatcttcgatatccctctattgttttcgccagagcttgcagtttttgttgaagaagctgcacaggagtcttgcctttctcgggcgtaaatattaggcccagattgtaggcatttgccagatgatttacaagctccttgcgtatcccatcctccaatagttgtttaggatccagctcgattactcccactagagttgttttcatcataagaattcccttcgtaaaaacagcaatggagtttgtaagctgagccaccttggcccgctcctcaaactgggcatagtcctttagacgctccttctccactttagtgggaaactccttgataacattcgtaaggagatagatgatcttagccagaatactgaacatggtctctggaacaatttgcagaacgcggcgcaggaagtttgctagctcggtgctgtaatagtttgacacagagaccagatcctcgcttctggcctgattgatccgcatcagcggcacctccagggtgctggccaacttgagaaagaccgctcgtatacctattaccgcctgtggctgtcttttgatgtgttcctgcatgggaggagtgaagtcaaactgcagtagatgccaagcatagctgaagtcagtgatcatctggatgtgaatctcaatgtcttccttcaggtttattagctgtgccatttgattgagcatgtctcgcgtctcctgtagttgctgcttcaccagcatgttggaatgaaggttgtgatactcctgcacatcgtccagtgcttgcatcacctgaataatcagccttccggacttttggggcctgctcaattccagtttctggagacgtccagcaacttcgccaaaccattgctgcaactgaggattctgttcaatcttggacaaaggcctggagccggcaaaggcttcgctcaactcattgagcctttgcatggcctcctctctgcttttcgtccagcgctcctccttagtctgctgaatctctgccaggaactccctcacgctcagctccatttggctgcagttaagcagtaagttatacagcgtattccgattgaattgtagttcgtggagcacacatttttgcacttgacccgtcaaagtagctgtgtgagcaaagatgaaaacttcccttgaggtgtgcaggcaaaaccagcggagcaggacattggattgcctcatcaggtgtatgattttgttggcgtgctccaaaacaaagttgtcatttagaactccttcacgaacaatctcctgggttttttgagtgatcttgcccaattgctccttttgctgctgacagagtgctttgattgccggtggacttatcacattttcaatagcagatcgagcggctttgaaatccaaccaggcatccaccagattcactgtcatgcccatgtacacggatatggtccagttgtcgcaaaagaacttgtccacaatttcgcgcatctgtgagccttgggaatgaagaacttgcgggcagaaatacaagcacacatacagcatggccgcctgagtagacagagccgtggagcgatgggcaggatgtggatacaggttcagttggttgtatatatcatcgcaccgcagacgagccaccactagatccacgaaattctcatcgaaacggaagcgagagaagtaggcctccgggtatcggggaaccacaaggctagcagctctagcgcctgcctgtttgccacccaaaccgagcactttagcggcaatcgacggatgaacatagcccgtagatcggagcaggagacaaacatcatggatattactctcgtctccgctaggcgttgcatctcctccactataccgatagtaggcgatcagcagacgttctctcacatcccccggaatgtgaaaatcgaccatgaggagaatcacaccaaagagatacagggattcgcagagcagttggcggccctcctcctcctgaagtaccgtctccagcgtctgctggatatagtagccagtgttcaattcctcgatatattgctggagatcggaggcatagtgatggatgctctggaaggccaggtaaaatcgtgtgattagcggaagctgggcacgtgcctcatcatcgagttcggtcagttcctgaaggaaatcagggtgtttaatacggtgtggtctcgggtatattaacatcaaattaccggactttgttcgatcctcctctcgtgatcttcggctatcttgaagtagctgaaatccagaataagctcgccatatttcgccttatcagctttgttgtccaatctggggaggagtggtcaccaattattcattaattgcaggtttttaatctatgttacctataaatactgggcacgtagtccttgaggcgcaggatctctgctattatagaattacccaccgacactatattcagcagattctgcccacaggcattattgtcatccagaaaactcattatgcatttccttgatttctgtgattctaacaaatgcctctctggagaaagcttaatttgtataatcacattattaattaaagctgtacatactttttatcagtccacgaattatgttattgtttgtttatattgtctattcatttagtcatatcaattcttttttgcactagtgtattatctgcagtaatcttacataagtccggtcacactattttgttgttatagagttaccatgaacttcgaaatgttggcgcataaatttgaagtgagaaactgatgataacaacctatgaggtacataatttaataacaattattaaatttattaaaatgagatatgaaactactattgtattgaataataaaattataatattggcttaataactctattcgatgcattaaagtgcaataatgatggaagatctaatggtttccgactttagattcacgatttcaattttaaaatttaaaaaagaaagcaagttgtaatacgacattaagaaaattgccaattcgttatgtgtttctggttgaatccaaacgtgaatttggttctatttattttgtgttagattttcattctatgggagctacacaaagtttcagtaggattaattaacataataaatgaatataaaaatattaataaaattaattaattcaactacataaattgtaatgatttaactagctaattaactgagataccgttacatattccatacgacataaaataataatatgcataagcaaacactgcgcactaaaataaattctgcatattcccagctaataattctccgtgctcagttgaagttttctcaattttttcttttatttttttgcttaatgttaaaacataataataataatatatatatattcagttatatgcctaccaaactatgcgctgtttacggttgcatctgcattttgtttatcatattaatttttacacacaaagaatttgcttagaatggtttcactttttgct

SEQ ID NO: 11411 - DNA, 3576 bp, DROSOPHILA
atgagttttctggatgacaataatgcctgtgggcagaatctgctgaatatagtgtcggtgggtaattctataatagcagagatcctgcgcctcaaggactacgtgcccagtatttatagattggacaacaaagctgataaggcgaaatatggcgagcttattctggatttcagctacttcaagatagccgaagatcacgagaggaggatcgaacaaagtccggaactgaccgaactcgatgatgaggcacgtgcccagcttccgctaatcacacgattttacctggccttccagagcatccatcactatgcctccgatctccagcaatatatcgaggaattgaacactggctactatatccagcagacgctggagacggtacttcaggaggaggagggccgccaactgctctgcgaatccctgtatctctttggtgtgattctcctcatggtcgattttcacattccgggggatgtgagagaacgtctgctgatcgcctactatcggtatagtggaggagatgcaacgcctagcggagacgagagtaatatccatgatgtttgtctcctgctccgatctacgggctatgttcatccgtcgattgccgctaaagtgctcggtttgggtggcaaacaggcaggcgctagagctgctagccttgtggttccccgatacccggaggcctacttctctcgcttccgtttcgatgagaatttcgtggatctagtggtggctcgtctgcggtgcgatgatatatacaaccaactgaacctgtatccacatcctgcccatcgctccacggctctgtctactcaggcggccatgctgtatgtgtgcttgtatttctgcccgcaagttcttcattcccaaggctcacagatgcgcgaaattgtggacaagttcttttgcgacaactggaccatatccgtgtacatgggcatgacagtgaatctggtggatgcctggttggatttcaaagccgctcgatctgctattgaaaatgtgataagtccaccggcaatcaaagcactctgtcagcagcaaaaggagcaattgggcaagatcactcaaaaaacccaggagattgttcgtgaaggagttctaaatgacaactttgttttggagcacgccaacaaaatcatacacctgatgaggcaatccaatgtcctgctccgctggttttgcctgcacacctcaagggaagttttcatctttgctcacacagctactttgacgggtcaagtgcaaaaatgtgtgctccacgaactacaattcaatcggaatacgctgtataacttactgcttaactgcagccaaatggagctgagcgtgagggagttcctggcagagattcagcagactaaggaggagcgctggacgaaaagcagagaggaggccatgcaaaggctcaatgagttgagcgaagcctttgccggctccaggcctttgtccaagattgaacagaatcctcagttgcagcaatggtttggcgaagttgctggacgtctccagaaactggaattgagcaggccccaaaagtccggaaggctgattattcaggtgatgcaagcactggacgatgtgcaggagtatcacaaccttcattccaacatgctggtgaagcagcaactacaggagacgcgagacatgctcaatcaaatggcacagctaataaacctgaaggaagacattgagattcacatccagatgatcactgacttcagctatgcttggcatctactgcagtttgacttcactcctcccatgcaggaacacatcaaaagacagccacaggcggtaataggtatacgagcggtctttctcaagttggccagcaccctggaggtgccgctgatgcggatcaatcaggccagaagcgaggatctggtctctgtgtcaaactattacagcaccgagctagcaaacttcctgcgccgcgttctgcaaattgttccagagaccatgttcagtattctggctaagatcatctatctccttacgaatgttatcaaggagtttcccactaaagtggagaaggagcgtctaaaggactatgcccagtttgaggagcgggccaaggtggctcagcttacaaactccattgctgtttttacgaagggaattcttatgatgaaaacaactctagtgggagtaatcgagctggatcctaaacaactattggaggatgggatacgcaaggagcttgtaaatcatctggcaaatgcctacaatctgggcctaatatttacgcccgagaaaggcaagactcctgtgcagcttcttcaacaaaaactgcaagctctggcgaaaacaatagagggatatcgaagatccttcgaatatatagaggactacttaagagttcagggacttcgaatcctgctggaggaatcgcaacgcattattaactacaatgtggagaaggaatgcaatgccttcctccgcaacaaagtgcaggaatttcaatcggagcaccagagccagatcatacccattcccaactttccaccgctgttgggagatccgtctaacaacttcattggccgtctggcccacgaaattctgcggtgcacagatcccaagcaaactatttttctggatctaaaaagcacttggtatgagaagaaggctcctcaccaggaagttcttgccggctctggattctttgagatacttagagaagccttggctccggcaggaatggtgggattggagcgcctctacgctcacatgttggctgatgagttaaagcgcaacttggaacggttacagcgtaacctgacctcggatcgtatgtgggtggatacgttagcggcactgactcgggaattggaggcccgggacttcccaactccggaggtgtccaagcagcctttgaagtattatcaagcttacacccaacgatggctgaaagtgtggcccacgctgttggattgggttttgtgcattggacagaagcagctgctccgcagagaaattgcaggagagctaagctttagcagtaaatgtgatgccaagttgctggagaacacggcggacaccctgaacaaagcccttttactagaactgtctctcagcaaggatctctgtgatgaaaagggtgtggtcatgttgacagaactgcaggaaaccctgctctatacgggaaactttgagcccctagagcaagtcttccttatcacaaagaacacccataacatggccctctttatgtttcttttcaccattgcccatttgggtcgtatgcagcattccacgattaccgattgtctgttgccaaaatcagccaaagataacattgataatgtgccttttattgtgggtctagtaacgatcttgcagcagttccacaagaatgtcaagatgctgtatatatcctacatgagtcagtacgtggtgactgtatcggaggctcagttactggataaagaaatcctgggtcccgaggtggtcaccgccctgcactttcttctagcctttatacgcattgctcgtttgccactcggagttctggagcagcgcattcccaacataatacttagcgagtacgagtatttatccacactgctaaaatga

SEQ ID NO: 11412 - protein, 1191 aa, DROSOPHILA
MSFLDDNNACGQNLLNIVSVGNSIIAEILRLKDYVPSIYRLDNKADKAKYGELILDFSYFKIAEDHERRIEQSPELTELDDEARAQLPLITRFYLAFQSIHHYASDLQQYIEELNTGYYIQQTLETVLQEEEGRQLLCESLYLFGVILLMVDFHIPGDVRERLLIAYYRYSGGDATPSGDESNIHDVCLLLRSTGYVHPSIAAKVLGLGGKQAGARAASLVVPRYPEAYFSRFRFDENFVDLVVARLRCDDIYNQLNLYPHPAHRSTALSTQAAMLYVCLYFCPQVLHSQGSQMREIVDKFFCDNWTISVYMGMTVNLVDAWLDFKAARSAIENVISPPAIKALCQQQKEQLGKITQKTQEIVREGVLNDNFVLEHANKIIHLMRQSNVLLRWFCLHTSREVFIFAHTATLTGQVQKCVLHELQFNRNTLYNLLLNCSQMELSVREFLAEIQQTKEERWTKSREEAMQRLNELSEAFAGSRPLSKIEQNPQLQQWFGEVAGRLQKLELSRPQKSGRLIIQVMQALDDVQEYHNLHSNMLVKQQLQETRDMLNQMAQLINLKEDIEIHIQMITDFSYAWHLLQFDFTPPMQEHIKRQPQAVIGIRAVFLKLASTLEVPLMRINQARSEDLVSVSNYYSTELANFLRRVLQIVPETMFSILAKIIYLLTNVIKEFPTKVEKERLKDYAQFEERAKVAQLTNSIAVFTKGILMMKTTLVGVIELDPKQLLEDGIRKELVNHLANAYNLGLIFTPEKGKTPVQLLQQKLQALAKTIEGYRRSFEYIEDYLRVQGLRILLEESQRIINYNVEKECNAFLRNKVQEFQSEHQSQIIPIPNFPPLLGDPSNNFIGRLAHEILRCTDPKQTIFLDLKSTWYEKKAPHQEVLAGSGFFEILREALAPAGMVGLERLYAHMLADELKRNLERLQRNLTSDRMWVDTLAALTRELEARDFPTPEVSKQPLKYYQAYTQRWLKVWPTLLDWVLCIGQKQLLRREIAGELSFSSKCDAKLLENTADTLNKALLLELSLSKDLCDEKGVVMLTELQETLLYTGNFEPLEQVFLITKNTHNMALFMFLFTIAHLGRMQHSTITDCLLPKSAKDNIDNVPFIVGLVTILQQFHKNVKMLYISYMSQYVVTVSEAQLLDKEILGPEVVTALHFLLAFIRIARLPLGVLEQRIPNIILSEYEYLSTLLK

SEQ ID NO: 11413 - DNA, 2649 bp, DROSOPHILA
tgtaagcataccagtccgctcggtataagtagttcccatggggaactggaagaacgttagttacttgcgtattagcatgacttattgaaaccttatccagaatgatatcgtgctgcaaaaggaatggtgttcgtaagaggccaccataatgcttattattattcagactcacgtcgtagggacaggaatgatttatattggagtagtctttgaaaaaattgaaaaagtaagagaaaactggattcgatctttggtgtttataaaacctgcagccatctacggttacgttatacagaaagggcttataaccatttaatctctggaatgttgctatgttgatctgatacggaaacataagtacaatcatatattaaatatatatatgataaaaattctttatatgctacatatacgaacttttacattgctgacgggtgtctttagcaacttcacttttagggaatagtacttgtatgtacgattaactgattttaaaaaacaatagtgaaagacggcaaactctggatcgagggtaacgcacttaatgttggtaaactccagtttgcatataaccttaaaaagtgtttcagtacgttaatagtgcgttggatattgaaaatgtacttactagatgaatcgtaaacaaaaaaatactcagttgaactaagcgagcaggtgaaatcatttttgtttcgctggcaacggcaatatgaattcttaaaatatttaccacaccgctttaaatcaaaaaattgaaataacatttatttttttataattgttatatttatactccaattaaacattttaagcgagatgaaagctacttaaatttaacagttcgatagagagagagagagagggaatcgattatcgaatcgaatcgatttgaagggaaatgctggtttgactatccaaaaacgaaaatcatagcaagcatctgtttgacatatccctcgaaatcgaaagcgacagctcagaaaaaattagcatccaacagagcaagagccggatagacagagccccaaagtgagtcggcaaaatcaaataatacaaatactgaatacacaggtagccccaaagcctttgcgcagataaacagcaagagtgataatcgaatcgagacaagatgtcggatcgcaaggcggtgatcaagaacgctgacatgagcgaggagatgcagcaggacgctgttgactgcgccacccaggccctggagaagtacaacatcgagaaggacatcgccgccttcatcaagaaggagttcgacaagaagtacaaccccacctggcactgcatcgtgggccgcaacttcggatcctatgtgacccacgagacgcgccacttcatctatttctacctgggccaggtggccattctgctcttcaagagcggttaaacgcatctcgacgcctgatagccgctctaccatggcgcccaccaaagttttccggaggagtcgccaaacactattgttccttgaattgtaaactcatgcacacttacgaatccacactcacacatacgcactgcactgcattgacacacgcacacttgacctcgcgttgattcgttttttcccaaattccaaaaacttcgctgtgctgacttagccactctgctgccaaataaatcaaatactggtcctgacttcactacttatgaatgcagggaaaggggtttaggccttaaagtgccctattgccgactctataccacatttcatacggcatacgctcaacctgaaacattggataatgctttttgggttaattcctgcattcatagtgtccttcggttcatcagaaggcaaacaatgggacccacgacgaagtgcgggaaatgggaaattcggtctgctggtgccggtcaggtgcagatgcagatgcggccccacctggctgtgggcaaataaaaattgcttaattaagttaattaaaatattgtcgctgtccgccgagcttccatgtgctggcggcggtggcatttatgcgtttttattatcacggcgattggccaatttcggacaggacgtcgttcgggtaattatgccaactcacgtccagggcgcaataataatcataaaaataatattaataaagttcgcagcgggtcggcatatgagtgtgtattttgcgaaatacttttacacttggccggcaggctcggcggcatatgaaaatgttttctgccgagtgggtgtttatagttggtttgagccgctttcacagttcgacgacttttggccttgtctgcccgactttccgccatctggcccggtgttctcggtgttccgaaccattgcatccgcatttcgatggggatcggtgggtcagacagattctcatgcatatttcatggcccgctcaaatacggcaagtgccgcacttgaaggctaaagctgctcgtcaaatcgaagtgcctcgcaatcaggtttaaaacttacgccttccgaataaaaaccttattcatatttttacgaatactcatatttttatgcacattatgcgccattaaaggcagagctcccacaaatatcttgcttccccagaatgtggcttccacctttgggctcctacatcctgcgaccacctatttcatcttcgaagtgaagttccaactctgtccagctgcttctctgttttcctg

SEQ ID NO: 11414 - DNA, 649 bp, DROSOPHILA
agcaagagccggatagacagagccccaaagtgagtcggcaaaatcaaataatacaaatactgaatacacaggtagccccaaagcctttgcgcagataaacagcaagagtgataatcgaatcgagacaagatgtcggatcgcaaggcggtgatcaagaacgctgacatgagcgaggagatgcagcaggacgctgttgactgcgccacccaggccctggagaagtacaacatcgagaaggacatcgccgccttcatcaagaaggagttcgacaagaagtacaaccccacctggcactgcatcgtgggccgcaacttcggatcctatgtgacccacgagacgcgccacttcatctatttctacctgggccaggtggccattctgctcttcaagagcggttaaacgcatctcgacgcctgatagccgctctaccatggcgcccaccaaagttttccggaggagtcgccaaacactattgttccttgaattgtaaactcatgcacacttacgaatccacactcacacatacgcactgcactgcattgacacacgcacacttgacctcgcgttgattcgttttttcccaaattccaaaaacttcgctgtgctgacttagccactctgctgccaaataaatcaaatactggtcctg

SEQ ID NO: 11415 - protein, 89 aa, DROSOPHILA
MSDRKAVIKNADMSEEMQQDAVDCATQALEKYNIEKDIAAFIKKEFDKKYNPTWHCIVGRNFGSYVTHETRHFIYFYLGQVAILLFKSG

SEQ ID NO: 11416 - DNA, 3281 bp, DROSOPHILA
atgcttcgaaggataccagaccagtcccaagccatcaatgataatcaactgcgagtggggcgcctttggggacaatggtgttctggagttcgttcgaacttcctacgacaaggcagtcgacaaggtaacacccaatcccggcaagcagacgttcgaaaagtgcatatcgggcatgtatatgggtgaacttgtacgtttggtcatcaccgatatgattgccaagggttttatgttccacggcatcatttccgagaagatccaggagcgatggagcttcaaaaccgcctatatttccgatgttgaaagtgatgcacctggcgagtatcgcaattgcaataaggtccttagcgaattgggcatattgggctgccaggaacccgacaaagaggccctgcgatacatctgcgaggcggtgtcctccaggtctgccaagctatgtgcctgcggcctggtcaccattatcaacaagatgaacatcaacgaggtggccatcggcatagacggtagcgtgtatcgcttccatcccaagtaccacgacatgctccagtaccacatgaagaagctcctcaagccgggcgtcaagtttgagctggttgtttcggaggacggatccggaagaggagcggctctcgtggcggccaccgcagtccaggccaaaagcaagctctaaattcgaagttgatattcttcaaatgcatgggaaacgttacggacaatgatatatgagcacaaaattatggaagaagaaataaagatttaaggatataatgggaacttttaatattatcctttcaaacttaaaattgtgtccagaaatccgatttgaattatggcgccaaagatataataattttctgccttagtggcaacactgcacatccatagtattttttagtacatgcagtatttttagaatatttatggaacgatagggatggggtaacactattttggtataaaagccaactcgccatctggtaacacttggagtttgcaaacatttatctctcgaccaatttaaggaatttgaggcaattagggcattcctgtgagcttttccaggccaactgcgattacttcaagccaagacaaacaggtgggtaaccaagcaggccgtgccccaccgaccagaccagcaaaacacccccatttcgggcggtgctggaaaaagcaaggccagctgtccatttgggatttggacactccactctgagcatcaagatgattgcccttaaccaaatgcatcgggcgctgcagagcgaggccattaatgccattatccgccttttcagcgacaacatgtcccaaggcggtggcactactccagcgggcggtaatcccacagcgctccaggcgaccggagggggcgtggtcttcagcaaggtcttcatccagcgcgattacagcgagggcacctccgtcaagttccatacacggctgcccgctgagctggagggcatggtgactatataatactctatattatctgtgggattatcatccgaactcatatcgattctcgtgcagattgaaagacacgtcttcgaggccaccatcaataggctaaacgagttctacgccgaggcggaggagggatcctgcggcacctattgcgagggctgcattggctgcatcacggcctacttgatctatatgtgctccgaaacgcactatgaaaaggtgcgtcatttgggtttggattacacacatgtgggtcaatgcaatagagtctagttccactagggaactattaatagggattagagtcaacaatttcacaaatgtcgatatgcgatcgtataagttatcaaagttattctcgttaatgtccttgtactcaaggttttcatatctgtttaaggtataaaggtcagagaacttgataaatcaagtagtagtattacttgctaattagtgatcgtgctatctgttatacgagtttaaaataaggcagtggcacttccagctctattgcctgcacatactaatgctctttcgcccccacagacccttcgcaagatatccaaatttgtggcttcccaaaatgaacgcatttacaacaccaagggactgcagctgatcgatcccacttatcggggacttcgcgtcatagagattacaatattcgatcgtccggggcgaacgtgacttccgctttcccattcagccaacgagtttttcatgtgagatcgagcagctacagtcgcatcaacaggcatgtgaaggagaagagtccgtttcagcaattatcaagcaaaagtcagcgccatcagagtgcgtttccaaaaatataaatcaataaaaagctgtggaagcagctaaagctttataacctataaccatatgtgtgagtatctcagatattccgcactcaattgcaaactgaactaactaacatttactttcgcatcctttcagcttggcaaaagcagtggccagagcgttttcggggcatgcgacttagtcacgggtgtgctggtagatgtgcctccgctgcagccacatactgtatgctagattagccgttaatgattagccaaggcagtgtacggccagttagttagtatttatgcaatagcaggcatagtcatgtaagtgaaaagctaccgaaactgcattttgagccgaagcaagaagcatcaacatatacacacattcgcatatgttacaattgttttattaatcggaccgaaaggccagcgagaattgattgttttgtaatttgaaaatgaatagaattgtatacatcatgtttgtagtagttgccaacaattcgattgtctaatgttgtaatttcaatatggcattaacatttgcataaatacacacacacatagttcaagcttaatcagacataatgcatacgcataactttttctatacaatacttaccgatttcaaacagcgccaaatgaacttacacataaatcgaatcgagaatcgttcgatatttaatataaatcagcaacattgattaacatagttatatatcttataagaaaaatatatatattgccgtcatttaaacgcgcctacaactgttttcctgcggcgggtaaacatcgaattggaagcaaacaagttaagcaaaatgtggcgtgcaaaatttgtttttgctgattttcaattgtatttcgctatttacttatcatctgcggatatttgttattgtctggcgtagaaaactttcgtatatataaaggcctctaaagcctcgtcttatacattcacgattcttgcaaagccgcacaatgaagctaagcacttatctattggcgctc

SEQ ID NO: 11417 - DNA, 685 bp, DROSOPHILA
tttatctctcgaccaatttaaggaatttgaggcaattagggcattcctgtgagcttttccaggccaactgcgattacttcaagccaagacaaacagatgtcccaaggcggtggcactactccagcgggcggtaatcccacagcgctccaggcgaccggagggggcgtggtcttcagcaaggtcttcatccagcgcgattacagcgagggcacctccgtcaagttccatacacggctgcccgctgagctggagggcatgattgaaagacacgtcttcgaggccaccatcaataggctaaacgagttctacgccgaggcggaggagggatcctgcggcacctattgcgagggctgcattggctgcatcacggcctacttgatctatatgtgctccgaaacgcactatgaaaagacccttcgcaagatatccaaatttgtggcttcccaaaatgaacgcatttacaacaccaagggactgcagctgatcgatcccacttatcggggacttcgcgtcatagagattacaatattcgatcgtccggggcgaacgtgacttccgctttcccattcagccaacgagtttttcatgtgagatcgagcagctacagtcgcatcaacaggcatgtgaaggagaagagtccgtttcagcaattatcaagcaaaagtcagcgccatcagagtgcgtt

SEQ ID NO: 11418 - protein, 151 aa, DROSOPHILA
MSQGGGTTPAGGNPTALQATGGGVVFSKVFIQRDYSEGTSVKFHTRLPAELEGMIERHVFEATINRLNEFYAEAEEGSCGTYCEGCIGCITAYLIYMCSETHYEKTLRKISKFVASQNERIYNTKGLQLIDPTYRGLRVIEITIFDRPGRT

SEQ ID NO: 11419 - DNA, 4798 bp, DROSOPHILA
tgggacttaaggggctacgcggggggatggtgacattttttttttcagaagaaaaaacccaaacatattgcggacatcgtcgtgtatatttctcataaatcggcttaaaaagcgaatgtaaaaagggagccgcaaaagtgcatttgttttgtgcacccctgaatcagacatcatatcatgcatacccccatgaacccttggggtcacatacgttcgccttctgcgtaagcaatttcacgcagcacataaagcttttcatatttcacattttcacatttcactccaactggaggcgaaacgagttgccccgagatgagtcgagcagagtcaactgggcttgacttatttttaatgtcgttattttggctcaaagtgtccgatgcgccggggtatgcaggaatcgcaaagtggctgctttaaataagctcaaataatttgaaaaaatcaatattaaatataatgtaatatattttttagtaatgcatatatattttcgtgctaacagattttggtggtactgagtaccgtcctggtcatcatcccatcttcactcctgatttgtgttattcgtgctacccctggacacttgttgtatgattgtatgactgtatgttgtgtgttgcgttgttttgcctgttgtcgctgtcagtgtcagctgttgagatttatgaagtgcaacatgccaggactaaagattgaggggtaaaaagattgagcgttggcggcaaggaggatgggtgaatttatctgcgcctgcaacctgactgcactgcgctaactgcgaaatcctggcgaaggactcgttatttaggggctctcagataatgccttggcccagtttttgaagtagcgagcaccgggtttgaagtcacgctgaagagctgatgtcttaaattttccaaagaataaataaaattccagtaatcaggaagggtcgagtgtaaaaaggacttgcataatcagtgagagaccttcaagcaaaggatagatggaaaaaattatgcaaagcaaagattgcgtaatcagcgttaatgaggcacgcaaaagggttcttttaaccgctgatttggctaattcaatccaattttcgacggccaatttggctcttaatgatgactaacagtgcttaatttctactgaaataactttttctgtctttgcatttcagcgcgcaacgatccacaggacgatgcggaagtgattaaagtaccatcacgccctcagcccgaatcggatttccataacttccgcggcgtcatcgataccggctctggttatcccttccttcagccgaatccttcgagcttcaatgtgggcatcttcgactccttcgatggtgagtacagtgcagcacacgtggcgtatgcgtgatgaggcgcttaatcggcttgagcatttataatgatattttaattaaacattattttaatgtggccttaaaaactgcatgcaacatgcaattacaattgcctcgcatgcatttaatgtcgtcattattattctgcttaacgatgagcgaacgtttgacatattacgtatacgtattattgtcgcgggtgagcagagcatttcggttttgaggaaaactttgtaacaacaacaataccacgatttaatactatttctaacttaattattcatcatgctgccaaaaaatcgtgtttttaattctattttgtgtaggtaaacagagtagaagagcggttgacttaaatgtttattattgttggccatggcttaaaagcacatccccagggccaagccaattagccaatgttctttggagactttctaacttagccatctcgttttctgcctatttcccactccatgtcatggaagtgaaatgaaaaacaatttatcaaaatattatgtcaagttcttgtagccagacaaagtttatttatgctcttgtatttatttctatatttatggtggacccaagagagtggcgtcgagtaggtcaaacaagtctgttgaccattaaaagtgaaaagttttgcgcctcttcttgccagtttgtgcttaactgagaccgtaagacgtcgcagatgacgacgatgaagctgaaacttcataaatcttctcctaatacgctcgaggtcgaggggtaggataaaaacttccaaaagccttgggcattgtacatgcataaaagttgttatgttctttgttgtcttattttttggtttgggaaattgaagattgcaggtcaatgataacgaagcgtagaaaatggcatatagacaaatggaaagttgaacgttgcggtggccagcaaagtttcttgtcagcgaattatttttgaaacaccaggatcgatttcttagaactgaaaaacgaaaaatgtgcgaaagttataagatataagctttaaagtgtgtcttgtaatctttcaagtagtccagaatctcgaatttttgaggcgaagagcttattcagtgccgtaaactatttcacgcagctatttaaacgcattaaaatgcagcaagcaaatgaatttgtcgacaaacggcaatcagcaaccgggccaaaacaaagtcgtgcaaacaatgcggtcaagaatttatggcaaggttgaagacgacaaaaaaaaagctactgaaaaaggccaaagagccgaggagaagatagacttatagaccagaacagggaggggttgcagccaggggttgagaattacaaaagtgcagacaagaaaatgacagagacgccggcgacacagaaaacgctttttagtgcgtttacggattagggattttcaaactgaaaaatacattagcagcaggctgggacgacaacggaatgtctctccctgctcaaggattgaaatatagatagagactcaagggaaattccatgagccagtctagaccagaaacacctgctctgtttcccaccggatgtttgaatttctttagttttagcagtgcgttgcgttgcttcttagattaaatcaattgaaaataatctttaaaaatgttagacaaaatatgcaattttttttaaggatgagatattatgataatttaatgtttaattaaatattttctaaagatctcttccgccgtctgcgcacccgtttgtggcctgtaattggcagggattccggtgaggagggcgcttctccgactggcgactctgatgattctagtgatggcagcggagcaggctttccatttggagtgcgtcctctgattccgctggactcgaagaacgccaacaccacttccaccattaaggtaggaaactatcaaactgcaatgcgaatgaaatagtctaacggatttgtctaagagtcataactaatacaattcaccaacaggttgtcaatggccataaggttgagatcaacgagactgtgtatggtgatagcaacagcgtctttaaggtccgcttggtgaatgtgcgtcctttggagagcggcgaggaggtggcccagggagtgcacaccagtggaggtgacttccagccggcgttggagcccagcacctccgccccgcccaagaagttcgaggagttcgacgaggaggacgacgatgatcgccgcgagccgctggagaagcagccacaggataacgaggtgcgcgacattgatgagcccaaggtataaacttatttacgacaaagaaaaaacatatatcctttgaaagacatttaacctggaaatgcttggcaagcgctctactaaccaataaaaaaaaaaaaacgaattgtatattgagatctttctataacttgtaatatacctatatacatatttctattctttttttaaataaagttttccataaaactaagcagtacacattgtatatatctactattgaaattgcctgcgtttattttattgtactaaatattatatctccaaataaggcaactgaaataacacattattgaggatttggtttggttgtggtatgcttttatattttattcacttctgtttgtttaaagctttcatttgttttctatgctatttatttgtaatgcagtgttttttttttagttccgtttactctataattaagttttgctaatttgtcaggccaataatctgttcaaaccgcaatcgtaaatattttattaacccgacaaaatgtttaattgtacaattagatggttttttcttcctatctgataacgattttgcagttatgtaatatgcatattggttcattggacttgtgagtaattcgagaccttttttatgacatgcatccaaattaataatgcaaacaaattatagtttgtggccacattattaaaaaaaaaaatagatgtaacaaaatattatgcaaatttgtagacaagtaaaaaggttaatgtgatgagagggaaatatatatctttattttgtaactgacagctggaattgaatcatgacaatgttaatgcacaataagttaggctttagctgtgattttttaagagtttatatacattctgtaatagaataaaggcttttttatgaagatagttttactagtgcagtgaaaagttagttcgcgtagaaacggacggacggacaggcggaaattcggacaacgctatatccatttggctattgaacctttgctgcgttgcaaactttggacataaatcgttataccctcttccagggtatacataaccgtaaccgattctttagcggtccatgcatcacatgcgaccatttttcttaacatttttgttgcaagtccattaattacttttagtccataataaaaattaatttttattaaaagtcatgctctccgctcgcataaatccttgtcttgggcggtgggcaact

SEQ ID NO: 11420 - DNA, 818 bp, DROSOPHILA
atgcaaagcaaagattgcgtaatcagcgttaatgaggcacgcaaaaggcccgaatcggatttccataacttccgcggcgtcatcgataccggctctggttatcccttccttcagccgaatccttcgagcttcaatgtgggcatcttcgactccttcgatgatctcttccgccgtctgcgcacccgtttgtggcctgtaattggcagggattccggtgaggagggcgcttctccgactggcgactctgatgattctagtgatggcagcggagcaggctttccatttggagtgcgtcctctgattccgctggactcgaagaacgccaacaccacttccaccattaaggttgtcaatggccataaggttgagatcaacgagactgtgtatggtgatagcaacagcgtctttaaggtccgcttggtgaatgtgcgtcctttggagagcggcgaggaggtggcccagggagtgcacaccagtggaggtgacttccagccggcgttggagcccagcacctccgccccgcccaagaagttcgaggagttcgacgaggaggacgacgatgatcgccgcgagccgctggagaagcagccacaggataacgaggtgcgcgacattgatgagcccaaggtataaacttatttacgacaaagaaaaaacatatatcctttgaaagacatttaacctggaaatgcttggcaagcgctctactaaccaataaaaaaaaaaaaacgaattgtatattgagatctttctataacttgtaatatacctatatacatatttctattctttttttaaataaagttttccataaaact

SEQ ID NO: 11421 - protein, 210 aa, DROSOPHILA
MQSKDCVISVNEARKRPESDFHNFRGVIDTGSGYPFLQPNPSSFNVGIFDSFDDLFRRLRTRLWPVIGRDSGEEGASPTGDSDDSSDGSGAGFPFGVRPLIPLDSKNANTTSTIKVVNGHKVEINETVYGDSNSVFKVRLVNVRPLESGEEVAQGVHTSGGDFQPALEPSTSAPPKKFEEFDEEDDDDRREPLEKQPQDNEVRDIDEPKV

SEQ ID NO: 11422 - DNA, 9857 bp, DROSOPHILA
ccgcaaaattgaggcagtcgtggaggagtcgagcagctcgagcagcagcagctccgattccagcaactccactctgcccagctacgaggtcatcgacgagaagaaggccaggcgcaggaagcaccgcggaagtagtagcgacaccagttccggggacagcagctcctccagctcctcgtcctccagctcggactcgtcgtgaatgaggcacttttttggcactaacgccagacgttagggaatcgatttttttggcagtcacttgccagcattcaagtggctgcgccgctgctccgggagctcagatttgtaagaccccaaggggcaggtctataatttgattgcaaacacaccgagcgttaatcatgaaaataccacatgcttacgcttttacattaaaatgttgtgagatacaaaagaaactgcagtgagttttaaatacttttgaaacatttatctcttcgcatttctgcattatctcttctgcattttgcacaacatttttattacaaatttgatgtataatttaatagtgctgaaactctgtgctcctttgaatattttatattaattaacatgacatctgcacgaaaatattttaaggctgtttgtaggcttccaaataagctagcatttgctattttcttgattagtgctcgatatattttgatatatttgtataagctacactatggcatatttgaatggataataaatacgcgggctccacagcgataagttggcagctccgttggcattaaaatggagctctcttgattaaattttcaacgtggggaaattctcttaatgctttctctttgccgcatgaaaagcttagcaacgcgaactgctgctaaacttttgttgacacacagttagctgtgatatttgccgtgagtgtgtgtatgtgtgtgtggggtttggggggtgggagggctctagttggagatttctcgagagcgtgtatttttgtaatagcacaatagttgctgccgagcgtccaaacgctgcggacgcgattttcgcttcgctcctctcggattcgcaacgcttttcgaaaaaacctcgcgtaacgccagaagctttgttgttgtcgagtgtgtaagttcaagagtgtgtatgcgaatgagtgtgtgtgcgagtgagcgtgctttgtcggatccatcgcatatatacttgatatatagacgcacgataaatgcctattaagaaatgttcttcgaaaagaactcttgaatatatctgcaagtgccgtctctcagtgcccatcaataaatcacggcagctacatagcatataccatatacccctcaaaaaaaaaaaaacaacaacaaaggttccctttggcagactttattaactattaaccggacaaacaaaaaacagttgtcaagccgattaaaatttaaatggctataatgtggcgcaggtgtgaattttctgtcttttttttttgctctgtgaataattcaattaatacttgacaaacctttggcaaatggactcatcacagttacagtgcgaattgccccgacaaattggctcaccccacacacaaattatatatggtatatatagacaaatatatatatgtatgtatatatacatacaagggagtgcactggataatctggaactcgaaacacgttcgcggccttaaagttcacaaattatggctccttttccgattcttttcgttttcgttttcattttcgtttcattacctcttcaagcgcatttttatctgggcacgcgtagtgaaggttaaggcttccgcggcttaaagttacaactcccacgccccctcagcacgcctagccccccttgggcaccaccccccgccccccacacgtgttgttttgttttcggtcgttgttgttttgcgtttaagacaccttagtcgtctatgtatgtatgaagaaatacaaaaccacagcgggcctcagcagcttttgtccgagaataatcccgctctttgggggagtctttgagacaatgatggggctctctgctctcatttgccggttttccactgagagaccgagtgtgagcaaccgcgggaaaagcagcgaagcgagaagctctcttacagagagaaaaacaaggaaaactcgaactcatttgcatacgcgggttttttccttttaaacaatttgtttatttaacgatttagctatgtacagacaggttagctaaaatgaatcttttgaacccacgttttattagggagtatatgatccaaaaatctataaagcataataaaaaatacaaattttttattacattacagggcgctatttctgttgggaaatttcttaaagtaataaataataagatcaacgatttgcttcatttgctcgcttatgtttatacacatttcgttgccatgccacaagaaacttgttcaaaaataaaaaaaatcatttgatgaaggagatacatattttccatatatttcccccgtgtaataatttatgtttcagtccgtttgcctttcatacgatagaccaaagtccacacttggccagcgacagttgcgagggctcaatcaaaccagtccattgaaggatggtaattaatatctggtgcgtttcttgaggtatttggtcgaaacatactaattagcagagagaacggcttgtcatagatacgccaatacacgccaatagccacccactcaaggtcgttgggggtcaaggctgccgccgacggtacagttcctcatcgtcattatcgtcagtagcatcaccagacagaacattttcagtatggcctgatccatgctgtgcagacacagatatacataatctaaatgaattgccgcctctggctttgcataactcgtttgcgagctggttgtcaaacaagtggtatggaaataatacaaatgtatttccaaatgtgaaaatgatgtgcagctgcgggctaaatcttttgtttgacagtggcgggaaatgataatcatttcaattgtttaccgaaataaattgacactcttattagttattacaagcaaaacgctggataatgaaagtgggtgataggggacatttaacgcatttatttcagctctttatcgaagcacgaattaatcatttaactcatgaatgtatatgtattttacttttgcggaaggcagcaggataaactggtgacgattttccattgtcttctgacccagttacgaaacggccttccacagttcattgcttatctgtcagtgacccataaatgggtgagaaattaacaatcacataacgctgtattctgactaccgacattattttgaggggcgacagctgttttccagccagtttattttggacggtttattgcccaagttgaaatgcaagtgcgtatcttatcgctgtgaataattcttgaacctgacaaatgtgacactgattaacctagcaaatcaattgtgaaggttaatttcacggatgaaagtcggatagttatccatgttttaatgtgcgtatttaaatggatcattacgaaacagccttatgtcatcgcgaaccaattcaatgatgtgtattgtgtttgttccagtttattgcacactttacacaataatggatgagacaaacaggtgaactactggactggtccagtcgagcatgcaatctcagtcaccaaattcgcccgttcacgtggctgcaacatgcgacaagttaattagcatgccgaacgccttgcgtgccatgctagacttgctcccaaacccccctaccggccagcaacattggccaccagccaatccagccgattattatgcataataatagccaatttccagctgacaaatgtgcacacgtttaccagcttgttgggcagcaattatgcatcataggtcccgcacatccaaacaataataaacgattatcgcaattttcggtatcgcattacaaaaccctttacttcggctgccttttgttgaccagctcggcatccgtgttcatcgtgtttcgttaaagacaaacaaacaaatggcgctacgactgcatttactgcaccgcgacacgataaaaccggctggccaaagtccacgcggcgaatgagtaacaaactcagcagccagagttcgcattcagcatacgccctgttggcgaaatcaacgatcgagagaagagctgttcggcgcacaagcatgaccaaacctttcgagaaccatatatattgcacaatagcatttgcaattcttatcgattgccattagacaagaagttcgtttcctcactgcaaatgtatttacaccgctttctgcgcctcaaaaaatgcaaagcttactaagttaaagattgccaattgaaaatttgccactttttcaatgattgccacgcagacagaagagcgcatttaaaatgcatttaacatattgattttgagttatcagggtcggaacatctgctgccatgcactgcatactgaacagatactatacgtatcccacaaagtagtgcacctcaacggctcgtataacaaaagccgagcacttgatttagtttatctgggcattagcattttataggcaccataaagcatactaagtgctgtctgtcaaaagagttcgcaaccccctcaattggaaacggcgaaataaataaattcgcccccttgcaccatctagtcgttctaattaatttacgaaatttccataatccaatttggctggctaatccagaggacgatagatagatatcaccgcacctggcacttagataagacaactggcaactgctcttctatttgtttgaggcaaaccaagtaatttcagggaatcgcaagacatcaactcgttcgcaattaatgaaacaatggacgataaggaacgatgtgtgccaaatgaattgaactttttcgctgtctccaatttgtcgtaaggcagacaattgtccattgctggtcggccacttcaggccaaagtatttgcctcaatttcactattgcaagtgccgagtactttaggggcgggtataaccgcaagagcccgggcctcgccaattcgtatcgtcaaggtgccgttccagtcggtctgagatttccacggcgagcggtttgaatttctccggcattattgcgatctccgatcttgcatcaagtgtaagttgagtgggtggtgcggttgtcattgtacgcggcacataactggcattccaactgcttgattttcgtaatacattttcccccgttttttttttttttttgccgttttccatgacgtacagtaaaccacctagtggtcggtttcccttatatattcagtgtgtcaggcgcatgcaacatagcatactgcggcagtttttctctataaatagcagcacagcagaaaaagcgatgagaatttttgccttgttgagtaccgtgctctttacaccacgaccctcaacttgaacctttgctgggctgtcgtaccctgggggcacgtcactctgtcattatgcggcatggcaatataaatatctgacatttgttgctttcgcatctaattggattgcaacggctgggaagcatgcggtacaagtacctttgtttttgcggctgacaggaacgttttgtaagcttaattgagcagagccctgatgtttttgtcgtcaaaaaaccattaaccactaaattaggaatctccattaaaggctgctttatagaataatgttatgtggtgggaacagagtaggattttctttaaattgcacaatttttctatttaatattttttaaaaagtgtttggggcctgcaagcaatctgcggttgttcttcgagctgcaactattattacaccaagttcacgtgtcgtattagtaatttcccccagagcggcgtcaagtgaatgtgttatttttagccagtttgttttccttgaagtgcggcaaacacagagcaggaaaacaaggagggactgcacttgaccggattgtttttagcccagtgaccaccattgacattgatatatggcaggcaggggcttcgtccgagctccactggtggataggcaatgattaacagagtgttctacgatttatatgaaattgcagatagccctgccagcagcatgttggatgcgaattaattggcccacagccagtccatcgaaaatacgggaagagcaacactcgagcagaaagttgggaaatgtttgttagcgattctgagccagctcaagaatcatttgcctgcaatggcaatcccccagtggcaaacgatggcgcagaaatcaagaacctgaagaacaataaccgaagcgaaaacagaagcgcccatcttggaggtggtggagaagaagacaacagctcaccactgcaggaaatcgatgaacattacgtctgcgacattgccatgatgcgaataggtggggaggagagcctaccggtgacacacaatgagccagtggatgaatcaccaccgctggcccacaatgaaagtacaaacaatgagaacgaggtggagatcgatcgccaggaggaggagcaggcggtcagcgatctggtgcgatcgagcagtgccggtgccctcatggaggcgtaagtttttttctacaaatcaaatttaattcagttttaattcatatattattacctttagagacagcaaaaatgggggcagcatgcgagtggtttttggcatcctggtgcgactagttcttccactggccaatggagtagccaggggcatcaagggcatacgcgatgttcgcgtgctgagggttctccagaatctggcctccagccggcaggccctcaccaatctggtggcctttgccgccaacactatatcactgaatctttcttcggttcagggtgagtctaataataaatgaacagaaaaagtaagccaaagttcggtgaactaaacgaaatttcactatatacctatgtaattagcctcgatgctatgcatattatttctgttctgtattcatcaagatattcagaggattatatactttatgtgattaaaaaaagtacataatatttttttatcttttttccactagtttccaatcgcatggggcccctgctgaagctcctgaaaatgcgcaaatcacaggatggccttgagagtcttcccgacacattgagtgcgccctccactccctgcactccctgtccaaccagcaatccaatgcagggtccgcccttttacaccgttcgctcggacgcaccgaactgttgtacaataaacatcctggccgagccgccaccgggtcaaccgatacgagcagatattgtgctcatccatggtctacatggatctttggtgaacacatggaaacaaggactctggcagaacgatcgccagccggtggagtttgaaagaccaccacgtccgccagttcgtccaccaaaacgacctcgtcactcccgtagtgcagcgattcatccagctccgcgggagaagcgagcaaagtttgcttccctcaaccgatgtatggacaccccagatgattctccagtgcggcgaaggacacggctccagaagtctatgccaatgcagccggaagacttccagattaatgcttccgatagcgatgatagcgagtaagttcatgctaagaagtggtatgaccagagttactaaatgatttcctatcattagctatgcttatgtttgcggagagcctgaagaaatccagatttgcgagggcatagagtacagctttcccacttttcggctcaggatgcaggataacagccgtttgctacaggcagagttggagtccatgctgcaggccaatggcaatgaagagggggggaccaatgggaaggataaccgcccacgtcccccctcaccagccacgcctcgtaaggccgcccgcaagagcaagccatctccaaatgatccaaactactccaagtgctggcctggggattggcttccactggattgtcccggcgtgcgggttattgccttaaactacaccactgatcagtacctttggagaccgctgtggaaaagcaaggagccgcgctccagcttaatccaaaggtctcgtgagatggccgagctgctcattcagcatcgcgttggccatggtcgtcctattatctatgtgggccactcgaagggtggactcttcatcaagcaactgatggtagacgcctgggaaagcggtcgtcctgcgatgaccccgctttggcgatctgcccgcggttgcttcttttactcggtgccccatcgaggatcccacttggccagcatcaaggcgccactactctcccgctccgtggagttgctagagattgaaaaaagtaagccttcatcctataagatatatcagctataatattgtgatattgttttcctcagataacaagtacctgctggatttacatcggagatttgcgggactatatcatctgggtcatcttaagatcgaggtgtttagtttcgtggagaccgccttgacgctcatgtcagtgctgtatcttcgcattgtgggagtggactcagcgggttagtccttatcagaataatgcctattcgcattataatagtttgcattatcatctgtataagaaataatagcggaatatttttctttggctcgtattttcttatcagcaatattaagaatacatatcattatcaggaaatttgataacacgccataacgttatcttaaaataaataaagataagcctaatcactttccattataattaaatgaatctgcaatgaactttcactttattagctgtctggttctaaaattgtatatctttttaattcgtagatcctggaattggcgacgtctgcggtattcgtctggatcatcgagagatctgcaaaccacgaggacgggattgtattttgtacaaagaactggtgaaaatgattgagaaggtgtgctaagcacatggcgaaagtagaagacattatatgttaaaaagtatactgtatgtaggacctgatatatttaaaccataatgtgtatagaaccgacaatttgatgataattacgcgtacctatatgagatgccacagcatccagctggggcacactaaatgttagagcgccgcttgttaatttaatagtgcatagcataggtgttcatataattatatacgcctatccatagctcaagttagttatacacatattatgttgcctttagtttaagcttaaaacgagcagatatatatgctcagacatcccatctggtgtcaatgatattttggaatttttgtgatcgattgtgatcatttttcaagcactttattgtgatgatcccctaaatacccgtgaatacgttattgatattgtaccatacttagagtttgctagtttctatgaatctatctacctattaatcgaaacacacaccgctgtaaaatgttaccaacgaagacacaattgatacatatttgaatttccagacaattaaataatcgatgttttatacctatttgttaaggatttaattactaaaaccaataaattatattttataaaaacccaagctcaaaactatttttactggataagtcgaaatacccatatgtaggtcaataaaacacaatatttgtatgttttccatcataacttattttttagtatattttccaatagttaaggttgcgttcattcttctttgccatatctttgtattctctaaacaaacaccgcgcttcttaattattaatcttagactctttagccgtgccaatattcagtgtcctgtttgttggcctggttggttgttagtggccaattaacttgcatcgaaatctttaacacgaatcgttggcagcttagttgcttgaaataattaatttcgcttgcatgtacaatgcatatataaattgcataaaaaatacattagttatttttgttttcgtttgttcaattatg

SEQ ID NO: 11423 - DNA, 2265 bp, DROSOPHILA
ccaaacgctgcggacgcgattttcgcttcgctcctctcggattcgcaacgcttttcgaaaaaacctcgcgtaacgccagaagctttgttgttgtcgagtgtatagccctgccagcagcatgttggatgcgaattaattggcccacagccagtccatcgaaaatacgggaagagcaacactcgagcagaaagttgggaaatgtttgttagcgattctgagccagctcaagaatcatttgcctgcaatggcaatcccccagtggcaaacgatggcgcagaaatcaagaacctgaagaacaataaccgaagcgaaaacagaagcgcccatcttggaggtggtggagaagaagacaacagctcaccactgcaggaaatcgatgaacattacgtctgcgacattgccatgatgcgaataggtggggaggagagcctaccggtgacacacaatgagccagtggatgaatcaccaccgctggcccacaatgaaagtacaaacaatgagaacgaggtggagatcgatcgccaggaggaggagcaggcggtcagcgatctggtgcgatcgagcagtgccggtgccctcatggaggcagacagcaaaaatgggggcagcatgcgagtggtttttggcatcctggtgcgactagttcttccactggccaatggagtagccaggggcatcaagggcatacgcgatgttcgcgtgctgagggttctccagaatctggcctccagccggcaggccctcaccaatctggtggcctttgccgccaacactatatcactgaatctttcttcggttcaggtttccaatcgcatggggcccctgctgaagctcctgaaaatgcgcaaatcacaggatggccttgagagtcttcccgacacattgagtgcgccctccactccctgcactccctgtccaaccagcaatccaatgcagggtccgcccttttacaccgttcgctcggacgcaccgaactgttgtacaataaacatcctggccgagccgccaccgggtcaaccgatacgagcagatattgtgctcatccatggtctacatggatctttggtgaacacatggaaacaaggactctggcagaacgatcgccagccggtggagtttgaaagaccaccacgtccgccagttcgtccaccaaaacgacctcgtcactcccgtagtgcagcgattcatccagctccgcgggagaagcgagcaaagtttgcttccctcaaccgatgtatggacaccccagatgattctccagtgcggcgaaggacacggctccagaagtctatgccaatgcagccggaagacttccagattaatgcttccgatagcgatgatagcgactatgcttatgtttgcggagagcctgaagaaatccagatttgcgagggcatagagtacagctttcccacttttcggctcaggatgcaggataacagccgtttgctacaggcagagttggagtccatgctgcaggccaatggcaatgaagagggggggaccaatgggaaggataaccgcccacgtcccccctcaccagccacgcctcgtaaggccgcccgcaagagcaagccatctccaaatgatccaaactactccaagtgctggcctggggattggcttccactggattgtcccggcgtgcgggttattgccttaaactacaccactgatcagtacctttggagaccgctgtggaaaagcaaggagccgcgctccagcttaatccaaaggtctcgtgagatggccgagctgctcattcagcatcgcgttggccatggtcgtcctattatctatgtgggccactcgaagggtggactcttcatcaagcaactgatggtagacgcctgggaaagcggtcgtcctgcgatgaccccgctttggcgatctgcccgcggttgcttcttttactcggtgccccatcgaggatcccacttggccagcatcaaggcgccactactctcccgctccgtggagttgctagagattgaaaaaaataacaagtacctgctggatttacatcggagatttgcgggactatatcatctgggtcatcttaagatcgaggtgtttagtttcgtggagaccgccttgacgctcatgtcagtgctgtatcttcgcattgtgggagtggactcagcggatcctggaattggcgacgtctgcggtattcgtctggatcatcgagagatctgcaaaccacgaggacgggattgtattttgtacaaagaactggtgaaaatgattgagaaggtgtgctaa

SEQ ID NO: 11424 - protein, 688 aa, DROSOPHILA
MFVSDSEPAQESFACNGNPPVANDGAEIKNLKNNNRSENRSAHLGGGGEEDNSSPLQEIDEHYVCDIAMMRIGGEESLPVTHNEPVDESPPLAHNESTNNENEVEIDRQEEEQAVSDLVRSSSAGALMEADSKNGGSMRVVFGILVRLVLPLANGVARGIKGIRDVRVLRVLQNLASSRQALTNLVAFAANTISLNLSSVQVSNRMGPLLKLLKMRKSQDGLESLPDTLSAPSTPCTPCPTSNPMQGPPFYTVRSDAPNCCTINILAEPPPGQPIRADIVLIHGLHGSLVNTWKQGLWQNDRQPVEFERPPRPPVRPPKRPRHSRSAAIHPAPREKRAKFASLNRCMDTPDDSPVRRRTRLQKSMPMQPEDFQINASDSDDSDYAYVCGEPEEIQICEGIEYSFPTFRLRMQDNSRLLQAELESMLQANGNEEGGTNGKDNRPRPPSPATPRKAARKSKPSPNDPNYSKCWPGDWLPLDCPGVRVIALNYTTDQYLWRPLWKSKEPRSSLIQRSREMAELLIQHRVGHGRPIIYVGHSKGGLFIKQLMVDAWESGRPAMTPLWRSARGCFFYSVPHRGSHLASIKAPLLSRSVELLEIEKNNKYLLDLHRRFAGLYHLGHLKIEVFSFVETALTLMSVLYLRIVGVDSADPGIGDVCGIRLDHREICKPRGRDCILYKELVKMIEKVC

SEQ ID NO: 11425 - DNA, 3974 bp, DROSOPHILA
taagggggcgtggcctggccacaaaacagggttgacagcatcccatccatccatcttgccatccggatatctgtccatcagatacaacagcaaaagcaacattagaagcaaaagcaaaggcggcagctgccctgctgccataatcgtgttgagtttcaagctgccataaaaagtttatgggaagtcgtattgaacagggaaaccttctaaaacagtatgattttgctactgctggaggcatattgcataaatgttctgtcattcctgtacaaactatatttagttggaaagttagataacaagttattagtatattaaagatgcatggctacatattttttaataatactcgctattataataaaagtttaccattaacactgttcaaattttgtttgaaagcagctaaaataatatgaaataaccaactgacccctaagactatatttaaccctcaaagataacgaacacgtttttgttcagatttatagaaatcaaataagtacaaataactttttatataaattgacaagacttaataaaccctatttatttaaggatatgaagttaattgcaatactttttgtgcggttgtagttcgaaacagccaactccaccacgtgccataaaaataaccgttagacgtgcggccattgccggcggaaagtcaccacacccgccaacttgagtcccgctgattgaagcctaatgaatgtcaattgctgccaattacgaccaataagtgcgggcaataaatgtgggcagccgtgggtgcgagcgagaggcagtcgcggggcgacagagagggaaactcaccacaccgccacttggccaggtcaatgagcgaaaaagagacgacgacaggtggcagctgatgggaagcggtggctcaactggtttttgctgccttcttgttgttgctgctgttgccgctgctgctgttgttgctgctgctgctgccagttgctgttgctggcagcaagtttcagtttcggtcgaaagccaaaggcgagcggttgttgctccgctattgaacatcacaaagtgtgcgcacctcagcgacatttgcgttaaaaacccagttgggccaagaaaacattaaccaacgcaagagcaatcgaaagcggagttcaagaacttgtcaagtttaagaaataagtgcgagcagctaccaacaattaactgaagaagtgctaaaaactcgcgtcacccatacatacatacatagctgtttgttttttttcggtgcaaagtgcaggtgcagcagcggagtcgtcggctaaccacacatgaccacaatgccaccggaaatgtccgcaacaacggcagctcccgttggcagtgcaccgagtgccaccgctcatcatcccgctgccgtcggcggcggtatgccgcgtccagcttccccggccgtcggcagcaacacgacgacagccacggccacaacggcgacgcgatcccgctttatgatcaccgatattttggcaggagccgcggccgcatcggcggcggcagcagcagcggcggccgccttggcagccgcctcttccggcggtgggcgtggcagtccgacggactcggagcgggagcaatcgctggtcgcccagcatcaccaccatcaccagcagcagcaacaacaccatcatcaccagcagcagcagcagcagcagcaacatcagcaggctgccctgcaacagtacatcgtgcaacagcagcagttgctgcgctttgaacgggaaagggagagggagcgggagcgggaacactatagggagagacattcgccgcctggcaacaatccctatgcccaccaccccatgccgccccatctgctcgcccactttccgcccgcccactacgccgtgctgcagcagcagcaacagcaacagcagcaacagcaacatccccacccgcatcatctgcagcttgagagggaacgattggaggcactgcatcggcatggccacgggctgaccggtgatcctgcccagcacttgagccacttaagccacctgagccaccagcagcaccatccgcatctgcatcatcccatgcacgatgagcgatcccggtcaccgctgatgctgcaacaattgggcggtaacggtggcaataacaacaacaataacaacaacagcagcagtgccagtaacaacaacaacaacaacaacaacagtgctagtgccaacagcaacatcatcagcggcaacagcagcagcagcaacaacaacaatggcagtggcaacggcaacatgttgctcggaggacccggcagcagcattagcggcgatcaagccagcacaatcgacgacagcgacagcgatgattgcgaaccaaatggaagcgtcagacggcggttggcttggaactgctggccgaggctggaaactatgcggccttccagcggctttacggcggtgccacgccctatttgagcgcctggccatacgcggccgccgctgccgcccaatcgccccacggggccacgccctccgcgatcgatatctattaccgccaggcagccgctgcagcggccatgcaaaagccttcgcttcccgcctcgtaccgcatgtatcaatcaagcataccgccgggcatgtcgctaccgggcatgcccgctcccccgccacccggcgcagcacccatgctcagcggctactatgccgctgctgcggcagcggccgcatccgccggtgcccaacagcagcagcaacagccgccagcagcttcccgctccccagcgaccagccagagcgccaatagcgaagcggactgcgagcggaccagcagcagcagtcgccagcgtctaatcacgcccagtccgcccctgaatccgggtagcccgccgcatcgggagcgcatcaacgaggaggaggacagggagcgggacgaggagcgagacatcgagcgggagcgcgaaagggaacgagagcgggacgaggatgatgaggaggaactggccctggaggtctgagaatctccgagagaattcaaccctcctcatggttcgatctcacaacaatgtctaaagaaataagcaagtgggtggtgtgtatttgagaactatgaaatatggtgaacatcttttcaaaaaaaatttggaacacatttttttttttaaattttaaagtgcaacataaaatttaaatacacataggcatagatacgatttttaagcatatacagctgcgttaaaagtaaaggttttaaaatatatctatgtggtttctcaagaattgcaaacgttttaagatattatgtgaaaacatttttccctcattcaaaatgccagcaagactacaaataaattaacactataaataaatacaactttaacgaccaatcaaaaatccattacttataaaatgttccactatagttaccaatatttttgacacagctgtagataagacgtgcttgctaaaaaaaaacactaaaaatcatgtctgtactgccactgaaaatgtatttgaaaagatgtgtgtggtaaactaaataaaatttgtataaattccacgaaaagattaacatagaataacccaaaatgtaacagtattagacactccccatgttcatctgtttccaagaataacccccaagtaattgtgaacaaaaaacaaatctaaatataaatctttttttttttctatatttaattaaacctagctatagatgcaattttgtaaatttttgtaaatgatttttgtacatacgcagcagaccaacaacataagcaacacgattttttttccaaacaatatagtatttttttttttacaatttttttttgtgcctagtcctaagacgtctattgtgtgtagtaataataaagcgaagaaaaaaaagagcaatccagaattggtctttgtcttgcacaggactgaaggactcgtcgacggctgaaggacctttctgcgatcctgagcctaatgcgagctgacacacgagccgcaaagtcgcagtcgaaatctcaa

SEQ ID NO: 11426 - DNA, 2227 bp, DROSOPHILA
agccaaaggcgagcggttgttgctccgctattgaacatcacaaagtgtgcgcacctcagcgacatttgcgttaaaaacccagttgggccaagaaaacattaaccaacgcaagagcaatcgaaagcggagttcaagaacttgtcaagtttaagaaataagtgcgagcagctaccaacaattaactgaagaagtgctaaaaactcgcgtcacccatacatacatacatagctgtttgttttttttcggtgcaaagtgcaggtgcagcagcggagtcgtcggctaaccacacatgaccacaatgccaccggaaatgtccgcaacaacggcagctcccgttggcagtgcaccgagtgccaccgctcatcatcccgctgccgtcggcggcggtatgccgcgtccagcttccccggccgtcggcagcaacacgacgacagccacggccacaacggcgacgcgatcccgctttatgatcaccgatattttggcaggagccgcggccgcatcggcggcggcagcagcagcggcggccgccttggcagccgcctcttccggcggtgggcgtggcagtccgacggactcggagcgggagcaatcgctggtcgcccagcatcaccaccatcaccagcagcagcaacaacaccatcatcaccagcagcagcagcagcagcagcaacatcagcaggctgccctgcaacagtacatcgtgcaacagcagcagttgctgcgctttgaacgggaaagggagagggagcgggagcgggaacactatagggagagacattcgccgcctggcaacaatccctatgcccaccaccccatgccgccccatctgctcgcccactttccgcccgcccactacgccgtgctgcagcagcagcaacagcaacagcagcaacagcaacatccccacccgcatcatctgcagcttgagagggaacgattggaggcactgcatcggcatggccacgggctgaccggtgatcctgcccagcacttgagccacttaagccacctgagccaccagcagcaccatccgcatctgcatcatcccatgcacgatgagcgatcccggtcaccgctgatgctgcaacaattgggcggtaacggtggcaataacaacaacaataacaacaacagcagcagtgccagtaacaacaacaacaacaacaacaacagtgctagtgccaacagcaacatcatcagcggcaacagcagcagcagcaacaacaacaatggcagtggcaacggcaacatgttgctcggaggacccggcagcagcattagcggcgatcaagccagcacaatcgacgacagcgacagcgatgattgcggtggcaaagacgacgatggagatgacagtatgaaaaacggcagctcggcaaacggcgactcctcgtcgcacttgagcctgagcctcagcaagaagcagcgaaaggcgcgtaccgccttcacggatcaccagctgcagacgctggagaagtccttcgagcggcagaagtacctcagcgtgcaggatcgcatggagctggccaacaagctggagctgagcgactgccaggtgaagacctggtaccagaatcgcagaaccaaatggaagcgtcagacggcggttggcttggaactgctggccgaggctggaaactatgcggccttccagcggctttacggcggtgccacgccctatttgagcgcctggccatacgcggccgccgctgccgcccaatcgccccacggggccacgccctccgcgatcgatatctattaccgccaggcagccgctgcagcggccatgcaaaagccttcgcttcccgcctcgtaccgcatgtatcaatcaagcataccgccgggcatgtcgctaccgggcatgcccgctcccccgccacccggcgcagcacccatgctcagcggctactatgccgctgctgcggcagcggccgcatccgccggtgcccaacagcagcagcaacagccgccagcagcttcccgctccccagcgaccagccagagcgccaatagcgaagcggactgcgagcggaccagcagcagcagtcgccagcgtctaatcacgcccagtccgcccctgaatccgggtagcccgccgcatcgggagcgcatcaacgaggaggaggacagggagcgggacgaggagcgagacatcgagcgggagcgcgaaagggaacgagagcgggacgaggatgatgaggaggaactggccctggaggtctga

SEQ ID NO: 11427 - protein, 645 aa, DROSOPHILA
MTTMPPEMSATTAAPVGSAPSATAHHPAAVGGGMPRPASPAVGSNTTTATATTATRSRFMITDILAGAAAASAAAAAAAAALAAASSGGGRGSPTDSEREQSLVAQHHHHHQQQQQHHHHQQQQQQQQHQQAALQQYIVQQQQLLRFEREREREREREHYRERHSPPGNNPYAHHPMPPHLLAHFPPAHYAVLQQQQQQQQQQQHPHPHHLQLERERLEALHRHGHGLTGDPAQHLSHLSHLSHQQHHPHLHHPMHDERSRSPLMLQQLGGNGGNNNNNNNNSSSASNNNNNNNNSASANSNIISGNSSSSNNNNGSGNGNMLLGGPGSSISGDQASTIDDSDSDDCGGKDDDGDDSMKNGSSANGDSSSHLSLSLSKKQRKARTAFTDHQLQTLEKSFERQKYLSVQDRMELANKLELSDCQVKTWYQNRRTKWKRQTAVGLELLAEAGNYAAFQRLYGGATPYLSAWPYAAAAAAQSPHGATPSAIDIYYRQAAAAAAMQKPSLPASYRMYQSSIPPGMSLPGMPAPPPPGAAPMLSGYYAAAAAAAASAGAQQQQQQPPAASRSPATSQSANSEADCERTSSSSRQRLITPSPPLNPGSPPHRERINEEEDRERDEERDIERERERERERDEDDEEELALEV

SEQ ID NO: 11428 - DNA, 4066 bp, DROSOPHILA
atgccctagaccaaaacatgtgataacagatagcagcaacatatttagattattagatacacgttggtaggcaatttgatgggtttgcaacaattcgattctcattccagatgacgcgctacaagcagaccgaattcacggaggacgactcgagttccatcggcggcattcaattgaacgaagcgaccggccatacgggcatgcagatacgctaccacaccgcccgggtatgtaagaaacctgtcggggtaacaccgtgcatccgtgcaatgcaattcagtcggatagccacttagttgtcgttgggcttcagctttatctttgtggcaatgacccagaaacgagtggcaaatggggccaaagtgagcgcttttctcatttgctcgaaggttgccagttgacagtgaaaagtctgctcttatgagtgggagcgcgttggtgtgagcttttccctctgcgaactgacatgaataccctatctggtgacagggtaacgatggctttgagaggcggttcgttgttcaaataaatttaaacttcatgtgatattattccatagatatacgaaagcacttgaccgtatacaactgtatcaacaaaatgtctaaaagcaagttaaattactatagaatttaaacagtgtggtacaatatttgtctttggagactgcatttcatgagtcgttgcggcttctgaaaagccatttatctatatctcagcgatatatggaaaaattagcaggcaagtgccttacgcttacgaaatgtatcccatgtagataccaccccaatgtgtacaagtttgaactcatttgaaccgccgtcgtcttgtttacaaaacacacaattcgctggaaaagatttatggggcgaatcttttgtgccgccatgtggaggccagaatgattggtggctaatgcggcgttttcatttcacaggctacatggaattggcgctcgagaaacaagacggagaaatggctgctcatcacgacttttgtgatggccatcacgatctttacgctgctcatcgtccttttcacagatggaggcagcagcgatgcgaccaagcacgtccttcacgtccagccgcaccaaaaaggtatggattgggtgaatgtaatctaggaatttccaaggatacacaatcgtctccctttcagattgtccttccggcaatgagcttccttgcttgaacaagcactgcatcttcgcctcgagcgagatccttaaatcgatcgatgtgaccgtggatccgtgcgatgacttctatggatattcctggtgcgttaactaaaaattcaattcaaattgttcaagaggagttccagtaactatttgcttaaaattgcagcaatcaatggatcaagaacaaccccattcccgaggggaaatccacgtggggtacgttcggcaagctggagcagatgaaccagttgataatacgtaacgtactggagaagccggcaaaaagctttaagtcggacgcggagcggaaggctaaggtttactatgaatcatgcctggatgcggatgagcacatggagaagttgggggcaaagcccatgaacgatctactgctgcagatcggaggatggaacgtgaccaagagcggctacaacgtggccaactggacgatgggacacactctaaagattcttcataacaagtgagttaagcagggtttctaatggcgatttatatattgtagctgacatgcattcatctctgcaggtacaacttcaactgcctgtttggctgggcgatcggtgaggatgacaagaactcctcgcgtcacgtcatccagatcgatcagggcggtctgacgctgcccaccgccgactactacaacaacaagacggacaatcaccgcaaggtgctcaacgagtacattgagtacatgaccaaggtgtgcgtcctgctcggggccaacgaatcggatgcccgcgctcagatgatcggcgtcattaatttcgagaagaagctggccaatatcaccattccgctggaggatcgccgcaacgaggaggccatgtatcatccgatgcagctgcgacagctgtccaaactggcgccgttcctcaactggacggatcactttgacaatgctatgcagatggtgggtcgccgggtcaccgacgacgaggtggttgtcgtctacgcacccgacttcctaaagaacctatcggacatcattctcaagatggaacagaccgaggagggaaaaatgtgagtgaaattaaagggaaaatgtatgaccgttggcgctatgaataccatttcctttttgattcaagttattcaagttcttacgagttatctgatctctgatcctttcagcaccttgaacaattatctcgtctggcaggcggtacgcacgctgaccagttgcttgtccaaaccattccgggatgcctataagggcgtgaggaaggccctcatgggatcggatggcggcgaggagatctggcgatactgcgtctcggacacaaacaatgtggttggtttcgccgtgggtgctatctttgtgcgtcaggcatttcatggagagtcgaagccggcggccgagcagatgatcgccgagatccgcgaggccttcaagatgaatctacagaatttgacctgggtggacaagcagacgcgcgagaaggccatcgagaaggccaaccagatttcggacatgatcggattccccgactatattctagatcctgtagaactggacaagaagtacgcggagttgaacattacaccgaatgcctactttgagaacaacatccaggtggccatctacaatctgaagagcaacctgaagcgtctcgaccaaccggtgaataagaccaactggggcatgactccgcagacggtcaacgcctactacacgcccaccaagaaccaaatcgtctttcccgcgggcattctgcagacgccctttttcgacataaacaacccaaagagccttaatttcggggccatgggcgtggtcatgggccacgaactgacccatgccttcgatgatcaggggcgtgagtacgataagtttggcaacatcaatcgctggtgggactccaagagcatcgagcggtttaacgaaaagtccgaatgcattgccaggcagtacagtggatacaagatgaacggacgcacactcaacggcaagcagacgttgggtgagtaatctatagaatttataggaggatctatatagaatctgtatttatttatttaacgcttataggcgaaaatatagccgacaatggcggcttaaaggcggcctaccacgcctaccagcgaaccaagagcgaccgtgatgtggatatcttgaagctaccgggcctgaatctcacgcactcgcagctcttctttgtgtccttcgcccaggtgagtgttattttcatagctacactacggaatactgaatacttttggtcaatattaaaggtctggtgctccagcacaacggatgaaacgaacctgctgcagatggagaaggatccgcactcgccgtcgcagtttcgggtgatcggcacattgtcgaacatgaaggagttcgccgaggtcttccagtgcaagcccggcaaacggatgaatcccactgagaagtgcgaggtgtggtaaggggatagtgcaatttcgatctcagaacgagccaaagatggagccaaagccaaagccgagcaactagacaaccatttcaggtgcggatggtgggacactgatgcagatacagatgcagatgcagactgggagatacagactcaaagtgctgatcctgtaatccggattttattgtttaagatttgtcatttcgttttctatttttttttgtgttgccccatttgtattttgtcgaaagaccgtcagtcattgtgcctatgaaaatgatagaaactgacgataaattcactttcgaactccaaggggtctggagtaccgatctatatataataggtcctggagcaggatcaagggacccttaactacatttgaatgtgaacgcacgagctaccaactttatgggatgggtgtgtgcaattaaacgaaatgcggcacacgcccagcgggtct

SEQ ID NO: 11429 - DNA, 2181 bp, DROSOPHILA
atggccatcacgatctttacgctgctcatcgtccttttcacagatggaggcagcagcgatgcgaccaagcacgtccttcacgtccagccgcaccaaaaagattgtccttccggcaatgagcttccttgcttgaacaagcactgcatcttcgcctcgagcgagatccttaaatcgatcgatgtgaccgtggatccgtgcgatgacttctatggatattcctgcaatcaatggatcaagaacaaccccattcccgaggggaaatccacgtggggtacgttcggcaagctggagcagatgaaccagttgataatacgtaacgtactggagaagccggcaaaaagctttaagtcggacgcggagcggaaggctaaggtttactatgaatcatgcctggatgcggatgagcacatggagaagttgggggcaaagcccatgaacgatctactgctgcagatcggaggatggaacgtgaccaagagcggctacaacgtggccaactggacgatgggacacactctaaagattcttcataacaagtacaacttcaactgcctgtttggctgggcgatcggtgaggatgacaagaactcctcgcgtcacgtcatccagatcgatcagggcggtctgacgctgcccaccgccgactactacaacaacaagacggacaatcaccgcaaggtgctcaacgagtacattgagtacatgaccaaggtgtgcgtcctgctcggggccaacgaatcggatgcccgcgctcagatgatcggcgtcattaatttcgagaagaagctggccaatatcaccattccgctggaggatcgccgcaacgaggaggccatgtatcatccgatgcagctgcgacagctgtccaaactggcgccgttcctcaactggacggatcactttgacaatgctatgcagatggtgggtcgccgggtcaccgacgacgaggtggttgtcgtctacgcacccgacttcctaaagaacctatcggacatcattctcaagatggaacagaccgaggagggaaaaatcaccttgaacaattatctcgtctggcaggcggtacgcacgctgaccagttgcttgtccaaaccattccgggatgcctataagggcgtgaggaaggccctcatgggatcggatggcggcgaggagatctggcgatactgcgtctcggacacaaacaatgtggttggtttcgccgtgggtgctatctttgtgcgtcaggcatttcatggagagtcgaagccggcggccgagcagatgatcgccgagatccgcgaggccttcaagatgaatctacagaatttgacctgggtggacaagcagacgcgcgagaaggccatcgagaaggccaaccagatttcggacatgatcggattccccgactatattctagatcctgtagaactggacaagaagtacgcggagttgaacattacaccgaatgcctactttgagaacaacatccaggtggccatctacaatctgaagagcaacctgaagcgtctcgaccaaccggtgaataagaccaactggggcatgactccgcagacggtcaacgcctactacacgcccaccaagaaccaaatcgtctttcccgcgggcattctgcagacgccctttttcgacataaacaacccaaagagccttaatttcggggccatgggcgtggtcatgggccacgaactgacccatgccttcgatgatcaggggcgtgagtacgataagtttggcaacatcaatcgctggtgggactccaagagcatcgagcggtttaacgaaaagtccgaatgcattgccaggcagtacagtggatacaagatgaacggacgcacactcaacggcaagcagacgttgggcgaaaatatagccgacaatggcggcttaaaggcggcctaccacgcctaccagcgaaccaagagcgaccgtgatgtggatatcttgaagctaccgggcctgaatctcacgcactcgcagctcttctttgtgtccttcgcccaggtctggtgctccagcacaacggatgaaacgaacctgctgcagatggagaaggatccgcactcgccgtcgcagtttcgggtgatcggcacattgtcgaacatgaaggagttcgccgaggtcttccagtgcaagcccggcaaacggatgaatcccactgagaagtgcgaggtgtggtaa

SEQ ID NO: 11430 - protein, 726 aa, DROSOPHILA
MAITIFTLLIVLFTDGGSSDATKHVLHVQPHQKDCPSGNELPCLNKHCIFASSEILKSIDVTVDPCDDFYGYSCNQWIKNNPIPEGKSTWGTFGKLEQMNQLIIRNVLEKPAKSFKSDAERKAKVYYESCLDADEHMEKLGAKPMNDLLLQIGGWNVTKSGYNVANWTMGHTLKILHNKYNFNCLFGWAIGEDDKNSSRHVIQIDQGGLTLPTADYYNNKTDNHRKVLNEYIEYMTKVCVLLGANESDARAQMIGVINFEKKLANITIPLEDRRNEEAMYHPMQLRQLSKLAPFLNWTDHFDNAMQMVGRRVTDDEVVVVYAPDFLKNLSDIILKMEQTEEGKITLNNYLVWQAVRTLTSCLSKPFRDAYKGVRKALMGSDGGEEIWRYCVSDTNNVVGFAVGAIFVRQAFHGESKPAAEQMIAEIREAFKMNLQNLTWVDKQTREKAIEKANQISDMIGFPDYILDPVELDKKYAELNITPNAYFENNIQVAIYNLKSNLKRLDQPVNKTNWGMTPQTVNAYYTPTKNQIVFPAGILQTPFFDINNPKSLNFGAMGVVMGHELTHAFDDQGREYDKFGNINRWWDSKSIERFNEKSECIARQYSGYKMNGRTLNGKQTLGENIADNGGLKAAYHAYQRTKSDRDVDILKLPGLNLTHSQLFFVSFAQVWCSSTTDETNLLQMEKDPHSPSQFRVIGTLSNMKEFAEVFQCKPGKRMNPTEKCEVW

SEQ ID NO: 11431 - DNA, 5556 bp, DROSOPHILA
agttttgaaaccacgtttaagcaacaagcctactttcgaaaacgaatcatccaactgtagaaactgaatcaaatcgaattgattcgattaacagctgtgctgtacacatgcaccggtgtgtgtgagaggctgcgcgcgtgtgcgtatacgtgatagatccgtgttcgtgtgtgtgtgtgtgagtgctgcttatgtgttagtgtgtgtgcgtcggtgttgttggcgaaaattgaaacgcccgctaaacaaagtcaagcgctagatggcgctctcgcctgtgaccagtgctgttgttgttgttgtcggtgtgccacacactgttgtagttgttgttgatgccgctgcagcatcaacaaaccaaacgcggaaagtcaaattataaccgcccaccagccgcccgcaacacaaaaaaaagagaccacctagcccccaataaattgtaatttaacagcctaactaaatcaactcacccaacacaaataacatacacaaattaataaaggaaaaatagtagtaatagtcaagagtttcgcattacccatcgtcggtcggtcggttcaaattgcgtcgcgtcgggtcgcgaacgtcgctagtcctcggatcggatcgtatcgtatcgtatcgtatcggatcggatcggatcggaacagaacggaaccctatagaagggacggttacggattagattggatcagttggcagtcagaggcacctgacaacgcaacggtaaccgctattatgcatcggcgtcgtcggttggccagtgcaacaatcgcattcgaattggcaggcgtgcagcagctaatgcaacaactgacagaacttaattaaacagtctaataactatcatcatagtccgtagtggataactaagaaatcgaaactaaccgcaagttggtatagtttataactttttccgtggccccaaataatccaagaatcgttagcaatcctggattatttgctaaagactttgcgcacgctgaaatccaattcgattatggccgagaatcaaagtgcggccagcaaagattccggtcaccaacagcaacatcagcagcaacagcaacagcaacaccagcaacatcagcaaccactagccaccacatcagtcacggccgcttcaaccacatcggtcttagctaaccaatcgcccactaactcgcaggcctcatcccctgaaaattcccaggaagcactgcccttgctccgacgccagcaatcagccgcagcagccacagtagcagcagcagcagcaacagttgcagccacaaccagcggaacatcgcagcagcagcagcaacagcatcgcaacagcatcagcaacatgttcgatcgcacggtgaatgccaagttcaagccggcttcctcaaatgccggacctggcaacaatccggtccgtcggaactcgatgctgacaccatcccgtggagtcactatcggtggcactggcggtaacatacgcaagctgaccaaggtcagctcactgaccagcaaccatcactttgctgtgtgctatccacccagcaacatctatcagaatagcaacaatgccggcagcaattcggctttgcagcgcaccaccagcgaaagtttgcgtttgaacatgatgagtcgcgtggcagctggagcgacacccacaacggtgtccagggccagtagtaactccagcctggccacatccacctccacatcgctggcacccaagtccagcagcagcagtggtggcagcaattcgacaccgcagcagcaacagcagcagctagtgagcagtaacaacagcagtagcagcagcaacaacagcttcaccaaggccagttcgcccaacaataatggagcacgttcggtgggcggagcagctacgtcagctgctactggcacaaccgctgcagcaggcagtcatcatcatcagccacatcaccaccatcatcatcatcatcaccaccatcagcatcacaaccaccagcagcagcagcagcaacagactagccttagccaaggacacgcttcgttaaccgttgccggtggatcagcttcagctggtggtggtggtggcggcggcagtggaagctcctcggggaccgccgctggtggcaccaatcgcaaaccaaagacgacttcctcattcgagatcacctcggtgacggtgggccatcccaagttgaatgctgccggcgatactggagacgagtcggccgatgatctggacgaatctcacacggatgacaatagtcggataacggacctggagaacgagacgccctccatgtcggaagatacgttctccaaggaggaggtgtactatgccaacaatgccctcagcaccaatgcaccggtgataccgactagctcgcaatacggccttgtcgtggtggatcccatcgccccttcgttgggccagacgatccagaatgtccaggtcaatgtatcggataacattatcaatgtggtgagcggtgccgtcacaccgggcggcaccaagaagaaggacgacatcaaggagacgcagcaccgcagtgagcggttcaaggtggtcaaaattgagtccacggagccgtttaaacgaggccgttggatgtgcatggattacctggatcactcgagtgtgggtaatggcggtaataacaacgaaaagactggctcttctacttccgaggcgcacgccgcaacaacggatggcggcgcagcaggtgttggcgctggatctgaggctccggcccacaagaccacccaaagtatgattctgccacccacccagaagctgaacgagaatcatttggaggccaactcgaccgatgccaactggaactatgccgagcagcagcagcaacagcagcagcagcagcaacaacaacaaacaatagttggcaacgccctgaccaagacattgcccgtggctcttcgcaatggatctggtcaagtcgcatctcatgatagcggtgcgcgaggaggtggaagtgctaaaagagcgcatctccgagctgatggacaagatcaacaagctggagctcgagaacagcattctcaagtcgaacatcccgcaggagacactgcagcagctgcagttgcagctacaactcgccgcaccgccggccacgcccgccattcaagcggcaccggcggtacaaagtgtcgttgctccagctgccgcgggtcaggcagttcagcagcaggccgctggagcggtagcggtaacgggtgtggccaccagtccagcgtccgcggtggtacccacgagcattcccaacggcagcgccgagaacggcagcagtgcagtcgagtcagcagcggtatcggtggagcagcaggtgcagcaggtgacatcagcagcggcagcagcagcatcggtagtcacagccaatggtcccatgtcctaaacagttgctgctgtggcccgaacacacagtgtttgttttttttaaggcgcccacgcaccgtggtgtgtgtggggggaaatgaacgtttttaagaatgaaaaccgtaatgttaactcagccgcagtctctttcttagtcggaggaggcggggccgaggagagcagcgaaagtattaggccaataacaacaagaacagcaatagcagcgcagcggcaggcagactcacccaaacatgttaagttcgtgttaggtagactagcctgctgttaagaattgttatgttgttgctggctgttaatctgctgcagccgccgttttgttaatttctcgattgtgatatttgtttaacacacatacagaccaccacacacacacacactcatacgcatttacacacacatccatacgaaatacacacacaaacacacagatagactgcacgctaacagcggctgcggctggcgctgttaacgtccgctgttaactcgaagcgagtataggagttcttttaaatatcgcgctgctgcgcctccacatttttgtttaataccttttatttttgtttacccgtttgtttccacgttgttaacgctacgaaaataaaaacataagaatcataaacaaacacccagaacaccacaccacaaaaccaactcaccaaaagctggctgcaaaataatacttgacgaaagtaaaatttttggccaacggggaaaaagagcagcagaaaatgcaaaaatacaaatcgataaagtgtactagagtgccagggaaaacacacagaaaatgaatagggacagaagggaaaataaatgaaataatatgtgataatttgcattgtgcagtcagagacataagatgtaaattgtaaaaaaaaaaaacaaaagcaaacccgagaagcaaaggacaggaaagtaggattcaaatttccaaacattcaacattgatcgataaattaaatacaaatacaatttaatgaaacaagaaaaggccagctgctatttttataatttacctttaatcctaacttttattgtaaaaatacaaggggaaatattaactacatcataaatatgaatatgtttcaaattaaacaatggataacaaaaaaaaaaagtagtaaattatagtaattctagcatattctcaagctatatttcaaagattgtatagctattcaaaaaaaaaaagaaagaaaacaacagccaaacagaaaaagaaagcttatcaaaattgtttgttaaactctaaaaactatctgcaaacaaaaaacccaaaaatatctgtaaatattgtgtaaaactaaaaactaaaattgagaacaaacttcgaaagtcgccgacgaggaagatacattgcaacaaaaatttaaatcacacaaaatcaacatgatggaaaagctaaaattgtaagatgaagacaaactcgtcctattttttgttaaaattatttagtcgataattttggattactcttagttggaaaattccttaatgttcatacgaaatctgttataggattttctacacattaactattgcgtttcacaacccgcactcttagaccgacaagaccacaagataaaaccacaaaaagatccagaactgctgcagcagtaaaaaaaacggaccaatctccaaagaggtctcccgcctcccagagttgtccctgtccgaagttggccgccctgtagacgcccagttttgcaatgccaaagtgcactcactcgtttttggggcagggcacacgattctgccccagagaacacaaaatgcagcctgcggagacgcaaattgtctaaggctagcgtggattaaacaagaaaattatcatccaaaatgaaaagggattaaaaccaaatatgatactccaactccaagtgccgaaaactagctgtctacagggcaaacaccaatggacagacaaatcagatagacggacggacaggacagactaatgtcacatcccccgaacacagtaattctgttgaaaagtatttccctttatgatttttgtattcaattcagagaaccatcttcatgcgtttcatgtttagttcttctcctatgagttttacgacttaagcctctttttaagctaactattaatttattaattagtttgtaagcgcaaaaataattaaaatacatctaaacaaaataactgcaaacaacctata

SEQ ID NO: 11432 - DNA, 4920 bp, DROSOPHILA
atggccgagaatcaaagtgcggccagcaaagattccggtcaccaacagcaacatcagcagcaacagcaacagcaacaccagcaacatcagcaaccactagccaccacatcagtcacggccgcttcaaccacatcggtcttagctaaccaatcgcccactaactcgcaggcctcatcccctgaaaattcccaggaagcactgcccttgctccgacgccagcaatcagccgcagcagccacagtagcagcagcagcagcaacagttgcagccacaaccagcggaacatcgcagcagcagcagcaacagcatcgcaacagcatcagcaacatgttcgatcgcacggtgaatgccaagttcaagccggcttcctcaaatgccggacctggcaacaatccggtccgtcggaactcgatgctgacaccatcccgtggagtcactatcggtggcactggcggtaacatacgcaagctgaccaaggtcagctcactgaccagcaaccatcactttgctgtgtgctatccacccagcaacatctatcagaatagcaacaatgccggcagcaattcggctttgcagcgcaccaccagcgaaagtttgcgtttgaacatgatgagtcgcgtggcagctggagcgacacccacaacggtgtccagggccagtagtaactccagcctggccacatccacctccacatcgctggcacccaagtccagcagcagcagtggtggcagcaattcgacaccgcagcagcaacagcagcagctagtgagcagtaacaacagcagtagcagcagcaacaacagcttcaccaaggccagttcgcccaacaataatggagcacgttcggtgggcggagcagctacgtcagctgctactggcacaaccgctgcagcaggcagtcatcatcatcagccacatcaccaccatcatcatcatcatcaccaccatcagcatcacaaccaccagcagcagcagcagcaacagactagccttagccaaggacacgcttcgttaaccgttgccggtggatcagcttcagctggtggtggtggtggcggcggcagtggaagctcctcggggaccgccgctggtggcaccaatcgcaaaccaaagacgacttcctcattcgagatcacctcggtgacggtgggccatcccaagttgaatgctgccggcgatactggagacgagtcggccgatgatctggacgaatctcacacggatgacaatagtcggataacggacctggagaacgagacgccctccatgtcggaagatacgttctccaaggaggaggtgtactatgccaacaatgccctcagcaccaatgcaccggtgataccgactagctcgcaatacggccttgtcgtggtggatcccatcgccccttcgttgggccagacgatccagaatgtccaggtcaatgtatcggataacattatcaatgtggtgagcggtgccgtcacaccgggcggcaccaagaagaaggacgacatcaaggagacgcagcaccgcagtgagcggttcaaggtggtcaaaattgagtccacggagccgtttaaacgaggccgttggatgtgcatggattacctggatcactcgagtgtgggtaatggcggtaataacaacgaaaagactggctcttctacttccgaggcgcacgccgcaacaacggatggcggcgcagcaggtgttggcgctggatctgaggctccggcccacaagaccacccaaagtatgattctgccacccacccagaagctgaacgagaatcatttggaggccaactcgaccgatgccaactggaactatgccgagcagcagcagcaacagcagcagcagcagcaacaacaacaaacaatagttggcaacgccctgaccaagacattgcccgtggctcttcgcaatgtgagtcgcagttcctcggtaacccgaagtcctaatgccacagtcgagttcttatctcccaatttgcttgcccagcagcaacagcagcagcagcagctcttcgatagcgtcaatgccaatgctgccagttcaccaaatcccgccggtgaccccaacaacatggactatgcgcgcacggcggcgatgcaattgcatcaaacgttgcagcagctcaagcagcgcgaggacgctatggacgtgccgccaggggcaggaggttatgccaactatcaaaacggtggtgattcagctgttggagcggctagcaacaacaacagcgctgcagctgcaactggagaatcgcagctgagcaccagctacgttgagcaacagcagcagcagcagcagccattatccccagcaccactaacgccccaggctgcacccacattcgcagctgttgctgccggacagtcgcccaacttccaattggagcaacagcagcagcagcagcaagcaacatcgcagatagatggaatagtcccacagccatttaacccacaacagcagcagcagcagaccccacagcaatcaacagctcagcaagcagcagcagcagcaaatgcaacatctgcagtgactgcaccaccaccacaacagacttcaaacacttccaatgcagcggtaaccactggccagggtcagacaatgccgctgttatcacacatgaccagctacgagcagcagcagcctaatctaggagcagcagcagcagcagcagccgcaggaggcactgcagcaacatcggtggctgcaccgcaagcgattcccacgctgcaattgcagagtgctccctcaacgattgccgatccgcagcaattgatggtgccacagcaacagcagcagcagcagcatcaggaggagcagcaacagcagccgcaacaacaacaacaaccgcttccgccagcaaatatcgcgagtgctagtgccaataatagtaatctaaacctaacgaatacgaatgttgtggccaccggcgaggcaacaacaaacgcgctgaccttgaccgatgaacaggcgaccgcggcacttgcagctgcatttgcgaccggcgcagcagcagcagcaactggagccacatcggcagcggcagcaacgcagcagcaaatccaacagctacaacagcaaccaaatgcagagtccgagactgaaagaaaccaaaaattattgatacacacaaaacccagtgaaaatcaaaaaataaaaaaaaacccaaagccaaatatgatgggcactatgtcgctgcgccagccagagaattggctatacgagatttggcagaagggctacgacagcccctgctatgtgatggtgcctaatgcaaaagatctggtcaagtcgcatctcatgatagcggtgcgcgaggaggtggaagtgctaaaagagcgcatctccgagctgatggacaagatcaacaagctggagctcgagaacagcattctcaagtcgaacatcccgcaggagacactgcagcagctgcagttgcagctacaactcgccgcaccgccggccacgcccgccattcaagcggcaccggcggtacaaagtgtcgttgctccagctgccgcgggtcaggcagttcagcagcaggccgctggagcggtagcggtaacgggtgtggccaccagtccagcgtccgcggtggtacccacgagcattcccaacggcagcgccgagaacggcagcagtgcagtcgagtcagcagcggtatcggtggagcagcaggtgcagcaggtgacatcagcagcggcagcagcagcatcggtagtcacagccaatggtcccatgtcctaaacagttgctgctgtggcccgaacacacagtgtttgttttttttaaggcgcccacgcaccgtggtgtgtgtggggggaaatgaacgtttttaagaatgaaaaccgtaatgttaactcagccgcagtctctttcttagtcggaggaggcggggccgaggagagcagcgaaagtattaggccaataacaacaagaacagcaatagcagcgcagcggcaggcagactcacccaaacatgttaagttcgtgttaggtagactagcctgctgttaagaattgttatgttgttgctggctgttaatctgctgcagccgccgttttgttaatttctcgattgtgatatttgtttaacacacatacagaccaccacacacacacacactcatacgcatttacacacacatccatacgaaatacacacacaaacacacagatagactgcacgctaacagcggctgcggctggcgctgttaacgtccgctgttaactcgaagcgagtataggagttcttttaaatatcgcgctgctgcgcctccacatttttgtttaataccttttatttttgtttacccgtttgtttccacgttgttaacgctacgaaaataaaaacataagaatcataaacaaacacccagaacaccacaccacaaaaccaactcaccaaaagctggctgcaaaataatacttgacgaaagtaaaatttttggccaacggggaaaaagagcagcagaaaatgcaaaaatacaaatcgataaagtgtactagagtgccagggaaaacacacagaaaatgaatagggacagaagggaaaataaatgaaataatatgtgataatttgcattgtgcagtcagagacataagatgtaaattgtaaaaaaaaaaaacaaaagcaaacccgagaagcaaaggacaggaaagtaggattcaaatttccaaacattcaacattgatcgataaattaaatacaaatacaatttaatgaaacaagaaaaggccagctgctatttttataatttacctttaatcctaacttttattgtaaaaatacaaggggaaatattaactacatcataaatatgaatatgtttcaaattaaacaatggataacaaaaaaaaaaagtagtaaattatagtaattctagcatattctcaagctatatttcaaagattgtatagctattc

SEQ ID NO: 11433 - protein, 1246 aa, DROSOPHILA
MAENQSAASKDSGHQQQHQQQQQQQHQQHQQPLATTSVTAASTTSVLANQSPTNSQASSPENSQEALPLLRRQQSAAAATVAAAAATVAATTSGTSQQQQQQHRNSISNMFDRTVNAKFKPASSNAGPGNNPVRRNSMLTPSRGVTIGGTGGNIRKLTKVSSLTSNHHFAVCYPPSNIYQNSNNAGSNSALQRTTSESLRLNMMSRVAAGATPTTVSRASSNSSLATSTSTSLAPKSSSSSGGSNSTPQQQQQQLVSSNNSSSSSNNSFTKASSPNNNGARSVGGAATSAATGTTAAAGSHHHQPHHHHHHHHHHHQHHNHQQQQQQQTSLSQGHASLTVAGGSASAGGGGGGGSGSSSGTAAGGTNRKPKTTSSFEITSVTVGHPKLNAAGDTGDESADDLDESHTDDNSRITDLENETPSMSEDTFSKEEVYYANNALSTNAPVIPTSSQYGLVVVDPIAPSLGQTIQNVQVNVSDNIINVVSGAVTPGGTKKKDDIKETQHRSERFKVVKIESTEPFKRGRWMCMDYLDHSSVGNGGNNNEKTGSSTSEAHAATTDGGAAGVGAGSEAPAHKTTQSMILPPTQKLNENHLEANSTDANWNYAEQQQQQQQQQQQQQTIVGNALTKTLPVALRNVSRSSSVTRSPNATVEFLSPNLLAQQQQQQQQLFDSVNANAASSPNPAGDPNNMDYARTAAMQLHQTLQQLKQREDAMDVPPGAGGYANYQNGGDSAVGAASNNNSAAAATGESQLSTSYVEQQQQQQQPLSPAPLTPQAAPTFAAVAAGQSPNFQLEQQQQQQQATSQIDGIVPQPFNPQQQQQQTPQQSTAQQAAAAANATSAVTAPPPQQTSNTSNAAVTTGQGQTMPLLSHMTSYEQQQPNLGAAAAAAAAGGTAATSVAAPQAIPTLQLQSAPSTIADPQQLMVPQQQQQQQHQEEQQQQPQQQQQPLPPANIASASANNSNLNLTNTNVVATGEATTNALTLTDEQATAALAAAFATGAAAAATGATSAAAATQQQIQQLQQQPNAESETERNQKLLIHTKPSENQKIKKNPKPNMMGTMSLRQPENWLYEIWQKGYDSPCYVMVPNAKDLVKSHLMIAVREEVEVLKERISELMDKINKLELENSILKSNIPQETLQQLQLQLQLAAPPATPAIQAAPAVQSVVAPAAAGQAVQQQAAGAVAVTGVATSPASAVVPTSIPNGSAENGSSAVESAAVSVEQQVQQVTSAAAAAASVVTANGPMS

SEQ ID NO: 11434 - DNA, 3972 bp, DROSOPHILA
gcgaatgaacgacagcgccaagtgccatgatggcttagatggagatcgttatcgcagtgctcagatgcacgcagagaagcttcttgacgccagggagcagtcgcatcggcaacaagtgctgcgcctggagaaccaggttggttatcctatgcaaatttgaaggtataagatctatttcaactccctcactttacagatctcaatgctgcgcgagcagttggcccaggaggccaaacggcgacagcagtacattctacgcagctcgaaggccaatagagaaatgcagcatctgaggagcaccctaggagattccctgcgcaatgtctcccagcacccggtggatccccatctcttggaaagcgagagccggcggtgagttgcatgcccttatttgttcttccaaaactaaattacattatacatttcagtctcgactcggccgtttcaatgagcctgccaccgtcgagctgccgggactatgatcgcgattagagtgatgtgaagttaagatttggttaaatttgatcccgccaagaagacgtaacgctcactgccatttgcatttatttagaaaaaggcttcctggagtcctccagacgcatctgagttaatcatcacgtgcatttcaactcgtttgccttagtacaattctagctgttcattgtctgccctgttagacaatcgaatatagtgcgttccatccagtcgcagcgatgatgccatccttacatctccacataaatatctatgcattaatgggtcacgagttccgattctccctgaacgtgggagaacaccgaactatatatcacacgacaattaacatcatttgcatttacacattggccagaacaccgaactagtcagcacgaaacaaagcaactatatttaatacttagcatatttaatcctatatacagtgcggtttgtcgactgcatttttataaaatatatacaagcgaaacacactcctaatgaacacaactatcgaccagatctcttacttattggtgggttttagcagcttttccagacgctgcactaccagcttcatgttggccttttgggacgacagtttggcaacttcgcctgcgatcgcgaacaaagcttttgccttgcctttctggtactgttcgactgccttggcctggttggcgatagccagctggcacaggttctcgatctcgtccggactgcagatttgctgcaggctgtgcagttcgattagctgtgatgggaagataatgtgtgtaatctcataaatttggaatattaggcgaagcttacctcactgactttcgctttggggttattatgaagcagatcaaccagctgacgtgctgcctggagatttatcagctcggcatgcaagctcattaatatatctttcaaatcatcagccttaatggagctacattaggatgaacacaataaattagtaaaattcattaggtatgttactccctattattaccaatcctccacatctaagttcaatttgttgcaataggtcaacaaatcgtttataagaaaattgcaaatgactttgttgggcaaatcacttaaactacgggtaatgctcaagaaatgatccagcagaataggttcgttctgaaataaaatcgaggagtgttgcaatttcaaattttttgttgactcaaaaaggatcagagcacgcaccactaaaatgatggcagtttccgcattcaggttgtgctgctccaccaaacgttgcctggtgtcctctggtaattctggaatttcctcgcttagagcagccactgaaagtaaatcctctgttgacattgatccaggctttaggtttacatgaaggggtggtagattcggctccggcatgaatctgtagtcctgcagcacctctttgtcacgcatggccactgtgcgccggttctccgcatcccagttgcgagtctcatttgtaattacaccgccattagccacagtttctagctgtctattaatttcatacgtaattgcttgcgaaatgcttcgaaccgagccaatgttttttacttcggtgcggactcccaagggatcgccttcttggtgaatggatatgttggcatccacacgcagggcgccctctacaataaaaaatactcggtttaaaaaaaggcacacaaatcccttttgactcaccttccattttacaactgcatgtctgcagacgccttagtatcagtattaattccttgaccagcgatgccgcttcttcgcccgtttctaaatctggtgcaaaaaccagctccattagaggaagtccagcacgattaaggtcaaccaggctccttttgagataatcatcgtgcagagatttaccactatcctgttccaattgcaactgcagtagtttggcggtcttgtagtaaacttttttgcctggtgttatcacggggaaagtcatttttccatcattggccaaagcggcgcgctgctgcgtgatttggtagccattctggggaggagaagtttattacttataaggcttagcgtggtgtaaactgaaatttgaatcttacaggcaaatctgcatagaagtagtgcttgcggtcaaacatggacacttcgttcacccgacatcccaaagcaagtgatgtcttaatgccggattccacacattttctgttgagaacctaaaagcagaggatacaatgtaatgatggcgtcttaagtgagagtacctattctcactggcaatgttcccggtatggaggcatcaaaatacgccaccgaagagttaagtggtgctccaaaggatgtgccactgccggaaaacagtttggacgcactggcaatctgtgcgtgcacctccaaacccacaacgcttttccatttcctgaaattcagagcgttggaatgaatccttataatattaattcacataattaccttttgggaacgttggctagctttggcgccgttaccagttttcggattattgagtaatgcattattttacatcgattataacattcgcaccggaattggcaaaaagttgcgccaaaacagctgatgttgttttgattgcggccaaagctgccggacattcgccagcggcgttgccagacaaaaccatcgattggctggcgataacagcgcaagaggaatatcacaaaaaaataaccttttcattttcaagacaaacatgtaaaaaaatatgagtttagcagaggtaagcattttaaatgtgcactccacaaccgaaacaatagtgcagtgcatcgaacgcagtgggaatttcaatgccaacccttgttctccagttcacagcgaccaagacgagaaaaagcacacgcagctctgcaaaagacaaccacgacgacgagtgagtggagtagaaggaccaggagcggagtagcaggagcaggaacagtcgaccgagggcgggcggaaaaatcaatcatagcgacaggaaaccaataaagccgccgtcatggtgattgagaagatcattggtgacctggagtccaacatgacgctggagaacgaggaggccaagcgcaagcttgtggagttgctatcccagagtgagtcctcgccagtttcagttaatatgccacctattccaacataccatttccccacagacaaggagcagtgggtggtaaagttcatgctggactacttctttacaactggatctcagcgcattttggaggtactggtcaaagcccaggcacctcacgatgggtacatctttgacaagctggacgactgcctaaagcagtcgcagcaccgagtgcagagcctccaggtgttctgcttcattgtgcgccatcaccctacttggctgtacaagatcgagaaacaccggctgatcaaaagtgtttttaagcttatgacggtgagtttatgggtgtttacaattttgtccgagttcagcatcacttccatttctctgacagcacgagaaggagatagttccgctgatgagcgccctgttgtgcataa

SEQ ID NO: 11435 - DNA, 1404 bp, DROSOPHILA
atgcattactcaataatccgaaaactggtaacggcgccaaagctagccaacgttcccaaaaggaaatggaaaagcgttgtgggtttggaggtgcacgcacagattgccagtgcgtccaaactgttttccggcagtggcacatcctttggagcaccacttaactcttcggtggcgtattttgatgcctccataccgggaacattgccagttctcaacagaaaatgtgtggaatccggcattaagacatcacttgctttgggatgtcgggtgaacgaagtgtccatgtttgaccgcaagcactacttctatgcagatttgcctaatggctaccaaatcacgcagcagcgcgccgctttggccaatgatggaaaaatgactttccccgtgataacaccaggcaaaaaagtttactacaagaccgccaaactactgcagttgcaattggaacaggatagtggtaaatctctgcacgatgattatctcaaaaggagcctggttgaccttaatcgtgctggacttcctctaatggagctggtttttgcaccagatttagaaacgggcgaagaagcggcatcgctggtcaaggaattaatactgatactaaggcgtctgcagacatgcagttgtaaaatggaagagggcgccctgcgtgtggatgccaacatatccattcaccaagaaggcgatcccttgggagtccgcaccgaagtaaaaaacattggctcggttcgaagcatttcgcaagcaattacgtatgaaattaatagacagctagaaactgtggctaatggcggtgtaattacaaatgagactcgcaactgggatgcggagaaccggcgcacagtggccatgcgtgacaaagaggtgctgcaggactacagattcatgccggagccgaatctaccaccccttcatgtaaacctaaagcctggatcaatgtcaacagaggatttactttcagtggctgctctaagcgaggaaattccagaattaccagaggacaccaggcaacgtttggtggagcagcacaacctgaatgcggaaactgccatcattttagtggctgatgatttgaaagatatattaatgagcttgcatgccgagctgataaatctccaggcagcacgtcagctggttgatctgcttcataataaccccaaagcgaaagtcagtgagctaatcgaactgcacagcctgcagcaaatctgcagtccggacgagatcgagaacctgtgccagctggctatcgccaaccaggccaaggcagtcgaacagtaccagaaaggcaaggcaaaagctttgttcgcgatcgcaggcgaagttgccaaactgtcgtcccaaaaggccaacatgaagctggtagtgcagcgtctggaaaagctgctaaaacccaccaataagtaa

SEQ ID NO: 11436 - protein, 467 aa, DROSOPHILA
MHYSIIRKLVTAPKLANVPKRKWKSVVGLEVHAQIASASKLFSGSGTSFGAPLNSSVAYFDASIPGTLPVLNRKCVESGIKTSLALGCRVNEVSMFDRKHYFYADLPNGYQITQQRAALANDGKMTFPVITPGKKVYYKTAKLLQLQLEQDSGKSLHDDYLKRSLVDLNRAGLPLMELVFAPDLETGEEAASLVKELILILRRLQTCSCKMEEGALRVDANISIHQEGDPLGVRTEVKNIGSVRSISQAITYEINRQLETVANGGVITNETRNWDAENRRTVAMRDKEVLQDYRFMPEPNLPPLHVNLKPGSMSTEDLLSVAALSEEIPELPEDTRQRLVEQHNLNAETAIILVADDLKDILMSLHAELINLQAARQLVDLLHNNPKAKVSELIELHSLQQICSPDEIENLCQLAIANQAKAVEQYQKGKAKALFAIAGEVAKLSSQKANMKLVVQRLEKLLKPTNK

SEQ ID NO: 11437 - DNA, 3447 bp, DROSOPHILA
aataatttgtttgtaaatttctatttttactttgtgaagtaatgattttatattaataatataattaccaagactaaacggaataattataaggttgtgtattagtagagaacaaaaacagaatgaaatacatttgtaggaatcacctaatatttaattatattttatattatattaattataattatatttgttctttatacaattttatacattgtattttatagttttattaaatattcccgcttaaaaaataaaatgttgtttctatttaaattaccgcagctgttggtggtaatttagatgacctgattcgatttggtattatgggaacttttccagatttggtcacactgccctttacactgttttggttttcgtgaaaatgtccacatactactttgttattgtgggtcaaaatgataatcccatttacgagaaggaattcagcaccgtgaacaaggaactaagggtatgtagacctgggcaacgtctcatagaactgtgtaaatacattctccttctgcagaaagaggaccacaggcacctcacccagtttattgcccatgccgccttggatttggtggatgagcacaaatggaagacggccaatatgcagctgaaatccattgatagattcaatcagtggtttgtttcggccttcatcacagccagccaaatacgattcatcatcgttcatgacaacaaaaacgacgagggaatcaagaacttctttaacgagatgtatgacacgtatatcaaaaactccatgaatgccttctatcgcatcaacacacccattaaatctccgatgtttgagaagaagtcggagatctttggtcggaagtatttgttatcataaatttgttaaaacctgtagccattaagtaattgtgtaatataaaacttgaaataatttaaaagcataactttaccctttcttatacagttgagaagacccgaaaccaatgaataatctagtttatattttatttaatttatttagaaaagcagcctaggcttaacattgatggacttgttttattcactttttactcaatgcgccctcgaatcaaatctaaaacgatttaacgcccgtctccagacgacagtcccagactggagtaaattagatgtgtgggttgaatagatgaacaacgcatggaatcaatttgaaactaaagcaacaaaatatacggaatttgtaatgggtctttgcaaagaaatctcttggtggtggcgaggaaaccgtccgtcctgcagcttagtgcttcttgttctttccagagcgctcatatttgctcttggactggtgccacagagccagaggaatggccagggaaggcagagtcatcacggcgaaggccacccagtcgaagaaatgggaggagaagcgcttgttgtactcgttcaggttgacaattccaccctcaccgggctcagagctgaccgccagttggagctgcaagaattgttgggtattaagttctttgatcgatctttcaacaggtaacgggcatttttaaaagactgttgtgtataaattcacttagttgagattattaaatttaaaagtgaatgattttggtttgctttggcggtggcttctgtaacactgagattagataagatttttcagggcggacactgagatttgatgcccccacattcagctataacttaccgtctccgactcctcgacagccttgtaggacacctcggcggcggtgaagttgaagtagccgaaggccttgggcctcaccaccaggacatgggtgaagttggtctggggagcgatcctatcgaccacggcggtgggctgtcctccgacaacgtcgaaggcctccgggtggaagccggagtctaccaatcgcaccttggtggcggcaccgctgcccacgttgaagatggtgtagcgtaccaacaggtcgctcttctccaccaggtacttgttcaggatctgcttagagaccaggagacgggcacgggtctcgtcttccgacaggcaggtgctaaacaccgcgcacagggcgaacaaagtcagcaggtgcttgaacattctacaatcacagataatatgaagttttattttcacgtttcacttttttgttgacgtggaagggtcgccgaaaaacgagcggcacataagggcgaccgctttccggtgtgttttctagacattcacgcatcatagctgccccgagcacacgttcagcataaacgtacacattttaattcataatttaactacttacttgtaatttgggtatttccttatcgagtatttcagtacaactaagcagcagtcgtagcaggcagccgctttctcggtggttcgtgacgtggaatggattcgctgtcaaacttcgtgcgtcagtggtgccagggctgcgtcaacatatcgatgtatctgctggctgtcggcagtatattaataccaacaccatagtattttcgtcggttatgaacacaacacaactaaatttttttgtgaaattcataaagcttaatttgtttttttatcaccagtgaatatatttagtaataatgaacgaaatagtttcaaattaaaaccgttagaagccgctatggtgtagctgtgtgcagtgctacataaaaaggaattatgtttataataacaaaaattaaaaaaaaaaacgttttaacgtaaacgtatacacttaaatcttttcgaaattaaattatattaaaatcggtttcaaattgttttctataaagtttaatttagctttaaacaaaaaattaagtcgttatttttaatttgcattcatatattatttaataaaaatttaaattgcatgcaaaagaagtaaggaagcctgaaattttaattatttctgaaattttaattatttctgaatagcgcacaactactcgtggagattcggcaactccgctccccagcgtctgttaagccgctgttaataagcagcagctgttgtttgaaacaccataaacaaatgtaaacaaaactctttttatgccttttatgactttaactaatgttttgctacgcggttttaaaatagttaggcattttatctgcttttgttcgtacatttggcatacatttcaaatagaacagctgttagccggcacccgggaatgcccttgaatgacattgcaccctacatcaaggttctcggcctctcagttcactaatgcatcatgataaaattacctcaaatcacgataaagaaatgaaattcaaggggacaatagtagataactggattaatgggttcttcagcattttaacgacgcacccccaatactagattaggactgactaatagcacgcactaatgatagaggttatcttgatcgccatgaccgaaccgatttggcttatcagtgggaggcaaatttcgctgtgcacactcaattttcatcgcacgcaaccgcggttaagtcgtccagttggaa

SEQ ID NO: 11438 - DNA, 927 bp, DROSOPHILA
atggtgttgaaccaccgagaaagcggctgcctgctacgactgctgcttagttgtactgaaatactcgataaggaaatacccaaattacaaatgttcaagcacctgctgactttgttcgccctgtgcgcggtgtttagcacctgcctgtcggaagacgagacccgtgcccgtctcctggtctctaagcagatcctgaacaagtacctggtggagaagagcgacctgttggtacgctacaccatcttcaacgtgggcagcggtgccgccaccaaggtgcgattggtagactccggcttccacccggaggccttcgacgttgtcggaggacagcccaccgccgtggtcgataggatcgctccccagaccaacttcacccatgtcctggtggtgaggcccaaggccttcggctacttcaacttcaccgccgccgaggtgtcctacaaggctgtcgaggagtcggagacgctccaactggcggtcagctctgagcccggtgagggtggaattgtcaacctgaacgagtacaacaagcgcttctcctcccatttcttcgactgggtggccttcgccgtgatgactctgccttccctggccattcctctggctctgtggcaccagtccaagagcaaatatgagcgctctggaaagaacaagaagcactaagctgcaggacggacggtttcctcgccaccaccaagagatttctttgcaaagacccattacaaattccgtatattttgttgctttagtttcaaattgattccatgcgttgttcatctattcaacccacacatctaatttactccagtctgggactgtcgtctggagacgggcgttaaatcgttttagatttgattcgagggcgcattgagtaaaaagtgaataaaacaagtccatcaatgttaagcctaggctgcttttctaaat

SEQ ID NO: 11439 - protein, 220 aa, DROSOPHILA
MVLNHRESGCLLRLLLSCTEILDKEIPKLQMFKHLLTLFALCAVFSTCLSEDETRARLLVSKQILNKYLVEKSDLLVRYTIFNVGSGAATKVRLVDSGFHPEAFDVVGGQPTAVVDRIAPQTNFTHVLVVRPKAFGYFNFTAAEVSYKAVEESETLQLAVSSEPGEGGIVNLNEYNKRFSSHFFDWVAFAVMTLPSLAIPLALWHQSKSKYERSGKNKKH

SEQ ID NO: 11440 - DNA, 4350 bp, DROSOPHILA
atagaaacagaaaaccaacggaccagagcagaacgaagccgatggaagaaaatcttacactctgctcgaattataagtcgtcgacattttgcctaactaacagtcgccacggaaaaatgagccagcataaataaagccaagcaaggcggagcggaatagaatagactgtttgtgtctgttgttggctgctggcgtaattgaagttgcagaaagccagagacgagccaagcagccacaaaacctaaaacctaagagagaagcaacacaccgagatgggggccatctccgcatccacgtagccagtggagcgcgaggcatggcgcatacggaagccataggctgcaagagatttctcttctttggcctccgctcgactttcggctggctgttgaacccgcagcgcatcgctggagcgtgatctccccgcccccagataggcatccccaatctctcactctgctacctacttggccgaaaaacatactcaaggatgccatcgaaaatcaatcgcaaaatatgcgaaaggaagagagatgcccaggctccaatcgccgaaaattacaggaagcaaaagcacttggcgaaacgatcgaaaatcattcaattacgacagctggccctgcatataaaaaatgggcgtgtgctccacaaaatatcattatgtaagcacacggtgaaaaaagagcggtgggtttcgaaattattttgaaagaatccaaggttgcaaatttggaattaaatatacaaatattttagcaaaattaatagttggtagctactttttgaaattttataatcatttaaatacacaatttaatattttagcctatattaaaaatgtggaaaatattcttaataacaacgccataaatattgttcaattcacttcttcaggaactgaataaggtcaatagcaggtgcacacattaattacaggatgcgggtgcagaaatcaaggcaaatcgaatgaggtcagaaccctcagggaaatccataaataattgttccccccattcgaaaattacaatttaaattcaaaacaggcgccaaaacaaagcatttggaaattaaccagcactggagagcagcgaaatacttttatcgataagtaagctgttgacgcattttcatttggtatttttactagcccgtaggtatttacacacagaccagcaacgggcacaccagcaaagaaaaaagtgttgacgaaattattataatgctgcgaatataaacaaaggattgcgttgaaaacgtattaaatacgatctttggcacttaccaatcaggcaatgagtttcaatttctacgtggaatcgttcaattcaacgttgcagtcgattgcgcgacaagtggagcaatttgctggcgttgcactgacggcagccgtcgatctgcgcggaaatctggaatctttgaccggtgactttcgttgggaaaacggacccattgccttcaccgatctgcaggcgacactgctgaaggtgcttatcgtgctgcttctgggcacctgcgtactagccggctattcgtggtccatttacggcaaagtcattacggagaagtttgtcaggccaagtaggaatatgcttaaaatcaggatgttacgataagtttacttaaacgaaggccacgtcttgcatttcaggcacgctcaaggaaatcgaggagcttaaattgtcggtggccaagttgaagctgcccaaggaacactcgccgcgcatctagaaaccatgtccaagattaagaagttcttttcgcggaagaaggcggaggctgcctttaaggtgggttctttctttagccaagccattggaaatcccttaccaagttcgtttacagctcaatttaactggcagcggcatgggcactggccacaagctgaattcccccaaacaggagactccttcaagtagttcccgccaaaagtatgaggcctatgtgccaccaaagcgaaatgaaataagtaacgaggccagggcagctgccagtgcggcactggcgcgcattgacaagaaaacatccagggaattcaatacctcgctgtcggcagtgaaggcacaggctaaaagagagctggaggcagagcgtcgccagagagaggaagccatgggcacgccatcaacgaccagcacatccacatcggcttccggcggcgacactcgcaacctggcctgcgaaggcgtcttcttccgctgccccctaatcagcgaggagattctacccaagagcgtgtggaaggttcgcatcaaagagttcctctaccagcagctggaggcagatcgcggcctcaccgcctgcctgatcatccacaattgcaatgttaaggagaaggccgacgagtgcattgccacgctaatccgatatctggagaatcttatcaagaatcccgaggaggagaagttctgcaagatacggatgtccaacaaaatcttcagcgaaaaggtgcgctacgtggagggtgccctggatgttctgcaagcagcgggcttcaacgaggtccagatcgatggcgaacccttccttttgtggaccaaggagcagacggagaaggatctcgacttgcccacactagtggaagctctcaagagctcggagattattcccctggagctggatcgcaacattaaggtcctacttccatcgcaggcatgtcgtgtcgccctccccgacgagttttatcgcctgtcgccggaggagatcaagaaagagcaacagctgcgatccgaggccattgcccagtcacagatgctgcggacaaaggcgatgcgggaacgcgaggagcagcgcaatttgcgcatgtatcgatacgctttagtcagggttaaatttcccaatggactctttatacaagtaagccattccgcgatgatgtcatctgaagtaattttatgtaataagccgaatcattttcagggcactttcaatgtgtacgaaaaaatatccgatgtgttcgagtttgtccaatcttgcctggcggacgaaagcctggattttagcttggtgtccaacagcgatggcaaactgggcgatgaggacttggaaaagacactatatgactgcaagtgagtgatgcaataatgttttctttaggtacaacactacatgatttccttcatttcagactcattccgaacactctgctgctgtttagcgccaatgatacacccgctcctttgcaaacggatataaactacttaaaggaagaccttctaatgctggtgcaggctatgtagaagtgctttaacccatatattcagcggtatttgtcccttatattataacagagctgttgttatttattactttcaaatctattattcaaaatcaattataaacgcactttacacaaaagaaaatttctttaaattaatttggttatttggctgttgctacttgttcgcttgaaatttatttatattaaaaacttatttttatatatttgcttaactaaatacatactttcaagccactgtgcgtcaaacagctgtttggtatctttttggctgcggtatttcaggtgggcttttaagcttacctgcaaacggtcttacttattgcaaaaataaacaaaaattgcaacgctagcaagtggaaattgacgaattattatttaactatgagcttaaactgtgagctgtgaggaattgtgaaaagtgcacgaatcgctgaactatttggtgctatgtaaatgttagtgagtacgcaagtctagaatcatatgtttgtaccaaacaataacaaagtgcggccaattgcattttgaccataattccattaacaaatgcctaattgttgcttagtcacattagtttcggggctcaaaaagtcataaataatgccattaataagcggagcaaatgttacgcctgttttggaagtttcccgcactcttttgtgcggtcagcgcatcgcgtggttccgctgaaaacttgtggcccactgtaatttcccaatccacgcgacttttcctggccattatcgaattattaatagcatgtgggtgcaatttgttgatgcggactactaattaagcaggcagcttgatcgtacggctgtcacattttagaaactgcttggaacttagctcaataatcaaccctctttttaacaatacgatatgaacttatatgatcaatttgaattaatagtttaaacacatattatcagactcattaacttacaacaaatgtagcttatcaatatacccaacaaagataccttagaaagataagattatgctatataatagatatatatgaatcccctttgtttccaaaacatttacacgaaatgagaaagtacatatatcgtatatcgtatatcgtgggagcccaaaactggagcatt

SEQ ID NO: 11441 - DNA, 1960 bp, DROSOPHILA
attgttccccccattcgaaaattacaatttaaattcaaaacaggcgccaaaacaaagcatttggaaattaaccagcactggagagcagcgaaatacttttatcgataaaccagcaacgggcacaccagcaaagaaaaaagtgttgacgaaattattataatgctgcgaatataaacaaaggattgcgttgaaaacgtattaaatacgatctttggcacttaccaatcaggcaatgagtttcaatttctacgtggaatcgttcaattcaacgttgcagtcgattgcgcgacaagtggagcaatttgctggcgttgcactgacggcagccgtcgatctgcgcggaaatctggaatctttgaccggtgactttcgttgggaaaacggacccattgccttcaccgatctgcaggcgacactgctgaaggtgcttatcgtgctgcttctgggcacctgcgtactagccggctattcgtggtccatttacggcaaagtcattacggagaagtttgtcaggccaagcacgctcaaggaaatcgaggagcttaaattgtcgaaggcggaggctgcctttaagctcaatttaactggcagcggcatgggcactggccacaagctgaattcccccaaacaggagactccttcaagtagttcccgccaaaagtatgaggcctatgtgccaccaaagcgaaatgaaataagtaacgaggccagggcagctgccagtgcggcactggcgcgcattgacaagaaaacatccagggaattcaatacctcgctgtcggcagtgaaggcacaggctaaaagagagctggaggcagagcgtcgccagagagaggaagccatgggcacgccatcaacgaccagcacatccacatcggcttccggcggcgacactcgcaacctggcctgcgaaggcgtcttcttccgctgccccctaatcagcgaggagattctacccaagagcgtgtggaaggttcgcatcaaagagttcctctaccagcagctggaggcagatcgcggcctcaccgcctgcctgatcatccacaattgcaatgttaaggagaaggccgacgagtgcattgccacgctaatccgatatctggagaatcttatcaagaatcccgaggaggagaagttctgcaagatacggatgtccaacaaaatcttcagcgaaaaggtgcgctacgtggagggtgccctggatgttctgcaagcagcgggcttcaacgaggtccagatcgatggcgaacccttccttttgtggaccaaggagcagacggagaaggatctcgacttgcccacactagtggaagctctcaagagctcggagattattcccctggagctggatcgcaacattaaggtcctacttccatcgcaggcatgtcgtgtcgccctccccgacgagttttatcgcctgtcgccggaggagatcaagaaagagcaacagctgcgatccgaggccattgcccagtcacagatgctgcggacaaaggcgatgcgggaacgcgaggagcagcgcaatttgcgcatgtatcgatacgctttagtcagggttaaatttcccaatggactctttatacaaggcactttcaatgtgtacgaaaaaatatccgatgtgttcgagtttgtccaatcttgcctggcggacgaaagcctggattttagcttggtgtccaacagcgatggcaaactgggcgatgaggacttggaaaagacactatatgactgcaaactcattccgaacactctgctgctgtttagcgccaatgatacacccgctcctttgcaaacggatataaactacttaaaggaagaccttctaatgctggtgcaggctatgtagaagtgctttaacccatatattcagcggtatttgtcccttatattataacagagctgttgttatttattactttcaaatctattattcaaaatcaattataaacgcactttacac

SEQ ID NO: 11442 - protein, 537 aa, DROSOPHILA
MSFNFYVESFNSTLQSIARQVEQFAGVALTAAVDLRGNLESLTGDFRWENGPIAFTDLQATLLKVLIVLLLGTCVLAGYSWSIYGKVITEKFVRPSTLKEIEELKLSKAEAAFKLNLTGSGMGTGHKLNSPKQETPSSSSRQKYEAYVPPKRNEISNEARAAASAALARIDKKTSREFNTSLSAVKAQAKRELEAERRQREEAMGTPSTTSTSTSASGGDTRNLACEGVFFRCPLISEEILPKSVWKVRIKEFLYQQLEADRGLTACLIIHNCNVKEKADECIATLIRYLENLIKNPEEEKFCKIRMSNKIFSEKVRYVEGALDVLQAAGFNEVQIDGEPFLLWTKEQTEKDLDLPTLVEALKSSEIIPLELDRNIKVLLPSQACRVALPDEFYRLSPEEIKKEQQLRSEAIAQSQMLRTKAMREREEQRNLRMYRYALVRVKFPNGLFIQGTFNVYEKISDVFEFVQSCLADESLDFSLVSNSDGKLGDEDLEKTLYDCKLIPNTLLLFSANDTPAPLQTDINYLKEDLLMLVQAM

SEQ ID NO: 11443 - DNA, 2258 bp, DROSOPHILA
gattttcgttgttctgtgtggcccctgtaactacagtaaatactcgtgcaaataacgcgtcaaagcgtgcgaaaaacgcagggagaacgccagctagcgccttctctttcactttttcgctgattcctcgccgccttagactagcattttgttgttgcgcagcctgcgcgtatatgtgtgcgttcgtccgtgtgtgtgcgcttgtcctgcgtgtgcgtgtgtgtgtaaattccaaaacatacgccgctgcacagtggcacaaaaacgagagaaacgtaacgtaacgaaatagctatttggattcccggctttcgggctttccctgtgtgcgtgtgtccgtttgggtgtgtcgcattaatgttaattttccgctgaagtttttcactattccaccattccacgcagcttcgctgtggagaggaagcaacaaatgcgatgcgttgcgttgcgtttcttgtttcttttaactaactacgtgatgcaatgcgttttatggcattccaaccaagtgccaattagaattgattattattcattatttcgcttattacccacacaggcgcgtgtttgtgcgtttgtgtgtaagcggctctcttttggcgctctctcgctcgtcctctctctttcaaacaaactccagtgagccgcaacaacaaaatggcaaggccaggcaaacacaaaaaagaaaaaagtctatcttacgtttttcccttgccgtttcacgtagcgcaacgcctaacgtaatcgcaatgcgagaagcaatcaaataaataaatataaataaaatgtaaaatttaattacagtgaaaaatgtgggcgaaacgtgtgcgataaataagagcccgagatagcgaaagaaagtgtccaactatcggtctgctacaccggcactgtcgatgtccgccagctagccaagtgctgcagagacatcctacgatcgaaacgagctaacgttacaatagaacaccccctccttttcccccctcaaacaatcgaaaagccggcaagacgacgtccaaaaagaagcagtcacagccgacgcggccgaagacgagcatgttcaagtgcattcccatcttcaagggctgcaaccggcaggtggagttcgtggacaagcgccactgctccctgccgcaggtgcccgaggagatcctgcggtactcccgtaccctggaggagctcttcctcgacgccaaccacatccgggacttgcccaaggaatccactcgatgaaattgaagcagtatttagaagttaaactaaactaagctctgacaccctcactacgacttgtgcgaatgtgacacgttcattaaccatagctttaagtgtaacctccatatataatactatgtatgtaaagtgtttatttcgaacgagacttttttcgagactaagctacacctactgaagcgagcagtaaaccaactaatctggaatataaagtcatttttatacagcgacacgaaaactttttatacccgtataccccgtaacatgttaacgctgaaacgtgaagtttatagagtgacaactaccacgaaccccgcccccacaggcacgcccactttcacctgatatggataaaggcatggtgttaatgccacatgctgtctctcccttttgcattttattagcctaattatttctctcttttcaaattgcccaactttccgaacaacaactgctagtctgtctgagttggctacacttgaaatttttcagtacacatcatgcacactcacacacctgcagcacttctaggaccttcacacgcacacacgtacacgcagatatactacaacacacgtatactaaacacccgtacacaaacgaactccagtgccttgtgtgttgcttgcataatatatatgcgttttgcatttttgaaatgtttgttattaaaaataatgatttttagagcaggacaagaagtccaattagttgtctgtgttcttttcgtaatgtcacctttgcccccccgggcacttcgttaattgccatagattaatgtgtgtagataaagtcacgatttcgaagtcagacacgaaggtattgttgggttaatgtcgacttatcgcattagcgattttaaatcctcggattacgatgctacgatgcatttaccacgattgttattcgtcaaacataccagaatcttgaatttaatttatgaatactcaactaattaacagggactcgacgaggtgttctatttgtatgcccatactaagaagttagcgttaatagttcctgaa

SEQ ID NO: 11444 - DNA, 5595 bp, DROSOPHILA
ccggcaagacgacgtccaaaaagaagcagtcacagccgacgcggccgaagacgagcatgttcaagtgcattcccatcttcaagggctgcaaccggcaggtggagttcgtggacaagcgccactgctccctgccgcaggtgcccgaggagatcctgcggtactcccgtaccctggaggagctcttcctcgacgccaaccacatccgggacttgcccaagaatttcttcagattgcatcgcctgagaaagctgggactgagtgacaatgaaattggccgcctgccgccggatatacaaaactttgaaaatctcgttgagctcgacgtttcacgcaatgatatacccgacattcccgacgatatcaagcatctgcagagcctgcaggtggctgattttagttcgaacccgatacccaagttgccttcgggcttctcccagctaaagaacctgaccgtcctgggactcaacgacatgtcgctcaccacattgccagcggattttggcagcctgactcaattggaatccctggagcttcgcgagaatctgctcaagcatctgcccgagacaataagccagctgacgaagctgaagcgtctggatctgggcgacaacgagatcgaggatctgccaccctatttgggttatctgccgggtctgcacgagctttggttggatcacaatcagctgcagcgattgccgccggagctgggactcctgaccaaactgacctacctcgatgtctccgaaaatcgactggaggagctgcccaacgagatcagcggtctggtcagcctgacggacctcgatctggcccagaatctactcgaggcactgcccgatggcattgccaagctgagcagactgactatcctgaagttggatcagaatcgattgcagcggttgaacgatacgctaggaaactgcgaaaacatgcaggagctgattctgaccgagaactttctctccgagctgcccgcctccattggccaaatgaccaagttgaacaatctgaacgtggatcgcaatgccctggagtacctgcccctggagattggccagtgtgccaatctgggcgtgctgagtctgcgggacaacaagctgaagaagctgccgccagagttgggcaactgcaccgtgctgcatgtgctcgatgtgagcggcaatcagttgctgtatctgccctactcgctggtcaatttgcagctgaaggccgtctggctgtcggagaatcagtcgcagccgctgctcacctttcaaccggacacggatgcggaaacgggcgaacaggtgttgtcttgctatctgctgccccagcaggaataccagccaattaccccaggtgagtttggatgaagcccgtgacctggaatccgattctgagccgttcgaggagcgcgaaccgtcgcgcaccgtggtcaagttctcggaggaggccacccaggagaaggagacgcccttcgtgcgccagaacacgccgcatcccaaggatctcaaggccaaggcgcagaagctgaaggtggagcgcagtcgaaacgaggagcatgccaatctggtcacccttccggaggagaatggcaccaagttagctgagaccccaaccgagacccgaaccattgcaaacaatcaccaacagcagccacacccagtgcagcaaccaatcgttggtgtaaattccaagcaaccagtggttgtgggtgtagtcactccaactacgacgacagtcgccccaaccggcgtacagggtggctcagagggagccagctccacggccaacaatgtaaaggcagcaacagcagctgtggtggctgagttagcagccactgttggtggaagtgatgaggtccaggatgatgacgagcaggaggatgagtttgaatccgatcgccgcgtgggctttcaagtggagggcgaagatgatgacttttacaagaggccacccaaattacacagaagggatactccgcatcacctgaagaataagcgtgtccagcatttaaccgacaagcaggccagtgaaatcttggcaaatgccctagcctcacaggagcggaacgataccacaccgcagcactcgctttccggcaaagtgacatcaccaattgaggaggaggagcagctggaggtggaacaggagcagcaacagcaacagcagcagcatcccttcgactcctcgctctcgcccatttcggctggcaaaacagcagaggctagcaccgacccagacaacttggatggcgttacggagctgcgtttggagcagtacgaaatccacatcgagcgcactgcagccggattgggtctgagtattgccggtggcaagggctcaacaccctttaagggtgacgatgatggcatcttcatatcaagggtcaccgaggcgggacccgctgatctggctggtcttaaagtgggcgacaaagttatcaaagtcaacggcattgttgtcgtggatgcggatcactaccaggcggtgcaggtgttaaaagcctgcggtgccgtacttgttttggtggtacagcgtgaggtgactcgcctgattggccaccccgtgtttagcgaggatggtagtgtgtcccaaatctcggtcgagacgcgaccactggtggcggatgcccctccagctgcatccattagccacgagcgttacatcccggcacccattgaaattgtgccccaacagcagcatctacagcaacagcaacagcagcccattcagcaggtggccccaacgcatagctattcgggcaacgtgtttgccacacccactgccgcacaaacggtgcagcctgctgtgtctgctgcgcccaatggattgctactgaatggcagggaggcgccactgagctacatccagctgcacacaacgctcatccgcgatcagattggccaaggactgggcttcagcattgcgggcggaaaggggtcgccgccgttcaaggacgactgcgatggcattttcatatcccgcatcacggagggcggactagcgtaccgcgatgggaaaattatggtgggcgaccgggtgatggcgattaacggcaacgatatgactgaagcccatcatgacgcagccgtcgcctgtttgactgaaccgcagcgatttgtgcgtttggtgttgcagcgcgagtacagaggtccactggaaccaccgacgagtccgcgaagtccggcagtgctcaactctttgagcccctctggatatttggccaaccgaccagctaatttcagtcgatcggtggtggaagttgagcagccgtacaagtacaacaccctggctacgaccacgcccacaccgaagcccactgtgccagctagtattagcaacaataataacactctgcccagcagcaaaaccaatggatttgccactgctgctgctgccacgatagacagttccacgggtcaaccggtgcccgctccccgtcgtaccaactctgttccaatgggagatggagacattggggcgggttccaccaccagtggggattctggcgaggcacagccctcctcgttgcgaccgctgaccagcgatgattttcaggcgatgatcccggcacacttcctcagcggcggcagtcagcatcaggtgcatgtggcccggcccaacgaggtgggcgtgagtgccgtcacggtgaatgtgaataagcctcagccggatctgcccatgttcccggcggcacctaccgaacttggccgcgtcaccgagacgatcaccaagtccacgttcacggagacggtgatgacgcgcatcaccgacaatcagttggcggagccgcttatcagtgaggaggttgtgctgcccaagaaccagggctccctgggattcagcatcatcggcggcacggatcattcctgtgtgcccttcggcactcgagagcctggcatattcatatcgcacattgtgcccggcgggattgcctccaagtgcggcaagctgcgcatgggcgatcgcatattgaaagtcaacgaggcggatgtttccaaggccacacatcaggatgcggttctggagctgttgaagccaggtgatgaaattaagctgaccattcaacacgacccattgccgccaggatttcaggaagtgctactcagcaaggcggagggcgaacgtttgggcatgcacatcaagggcggcttgaatggccagcgtggtaatcccgccgatccctccgacgaaggcgtcttcgtgtccaaaattaactcggtgggcatgcgtctgctcgaggttaatggacactcgctgctgggcgcctcgcaccaggatgcggtcaatgtgctgcgcaacgctgggaacgagattcaattggtcgtctgcaaaggctacgacaagtccaatttaattcattccattggccaggccggcggcatgagcactggcttcaactcgtctgcatcctgcagcggtggcagtcgccaaggctcgcgtgcatcggaaacgggctcggaactgagccagagtcagagtgtatccagcttggaccacgaagaggatgagcgtctgcgacaggacttcgatgtctttgcctcgcagaagccagatgcacaacagccaactggcccatctgtcctggcagctgctgctgccatggtgcatggcgcctcgtcgcccacaccacctgctgccacctccaatataactcccttacccacagccgcggcagtagcatctgctgatttaacagcaccggacacgccagcaacccagaccgtggcgctcattcacgcagaacagcaggcccatcaacaacaacagcagacgcagctggcgcctttgggtcaggagaagagtacccaggagaaggtgctggaaatcgtacgcgcggctgatgccttcaccaccgtgccaccaaagtcgccatcggaacaccacgagcaggataagatacagaagacgacgacggttgtcatatcgaagcatacgctcgacacgaacccaaccacccccacaacgccggcggcgcctctttccatcgctggagcagagtcagcgaactcggctggtgctccttctccagctgttcctgcatccacgcccggctcagcgccagttcttcctgccgtggccgtgcagacacagacgcaaacgacctccacggagaaggatgaagaggaggagtcgcaactacagtcaacacctgccagcagggatggagcagaggagcagcaggaagaggttagagccaaacccactccgactaaagtgcctaaatcggtttccgataaaaaacgcttctttgagtcagccatggaggatcaacacaagcccacacaaaagacagacaaagttttctcattcctgtcaaaggatgaagtggaaaagctgcgacaggaggaggagagaaaaattgcaacattgcgccgtgataagaattccagattactggatgccgccaacgacaacattgacaaggatgccgcacagcagcggaccaagagcaacagcaacagcagcagcggcgacgataatgacgacagcgaccaagaggagggcatcgctcgcggggattccgttgacaacgccgctctggggcatttcgatgatgcggaggacatgaggaatccactcgatgaaattgaagcagtatttagaagttaa

SEQ ID NO: 11445 - protein, 431 aa, DROSOPHILA
MFKCIPIFKGCNRQVEFVDKRHCSLPQVPEEILRYSRTLEELFLDANHIRDLPKNFFRLHRLRKLGLSDNEIGRLPPDIQNFENLVELDVSRNDIPDIPDDIKHLQSLQVADFSSNPIPKLPSGFSQLKNLTVLGLNDMSLTTLPADFGSLTQLESLELRENLLKHLPETISQLTKLKRLDLGDNEIEDLPPYLGYLPGLHELWLDHNQLQRLPPELGLLTKLTYLDVSENRLEELPNEISGLVSLTDLDLAQNLLEALPDGIAKLSRLTILKLDQNRLQRLNDTLGNCENMQELILTENFLSELPASIGQMTKLNNLNVDRNALEYLPLEIGQCANLGVLSLRDNKLKKLPPELGNCTVLHVLDVSGNQLLYLPYSLVNLQLKAVWLSENQSQPLLTFQPDTDAETGEQVLSCYLLPQQEYQPITPGEFG

SEQ ID NO: 11446 - DNA, 8378 bp, DROSOPHILA
acatgtacacatgtaagtcgccagcatcaagtattctgcacacaaaccgcatttgatttgagactcttcttgattccccaaccggaaatgttgtgcccccccccctcgagcaattgttttccacgtggatttgacatctctacctggctgggatttcgccgcttgggcgcttctaacattgtttggcattaacgtacgcatgatttgctcttgtcggtgctcggtgattgacatactttcattattcgccctataacttggcccccgataaaaaagtaaccaataaaccaaccaagctgcctacgcccttttttttgggcgcagtgcgacccccgaaaaataatttgcgattatgcgacccgcattgagcgcagctgatgttcaccaaggacaaaggatatccccttctacgtccgcagagccgttttccttttaccgctcatatccttttattgaatttgggtaattgttgcaatgcaaaaagtgccccgtaacccgccttctgcatttgtcacatgaggctcagagttttggggttggagtcgccttggctaacaaccacgggggttgattcttgtaaaggtatttatacggcttgttggattgcgctggattcgatgcacatgcttcattagatcgggcggggaaattcccaaaaatacaatgcagactgtcgatttcaaatcctgattgacagaaggaataaacattccaaaaagctggtagtgaaagtagtggaagatagcaatcgctaagctataatgacttttggaaagtactatgtcgttagtaccaatataattaatttcaacagaaaaaacttactacaagctattgaatattacaaacctcgattttcttcgattatttcgataaatattgatgacgattacaaagctggatattcttcaatcgtcatccaccgaaaaacagcatacgcattctaaatatcccatatcaaaggagctaatagcatttgaaagaaccctctgtgaaccccttaaaagttgcttaactcaccatcttcaagggtgcgagcgatgcgcgaattcgacggcttgccctcgacggatttgtaaaatggcacgatgaaaaattcatacagcgtgtactggacgagcccggtgatggtgcaggatgaggcgccaccgccattgagaatcgttagcatgcgatacttggtgttcagtggggtcggagctcctcctccactctggtttgtctccccatcacgtttgccggcagctgcaatatttggctttgtcgaaatcaatgccgatgccgaggcggatgcggatgcggatgtggatgtagagcccagcagcggattggtattgctagtaacgggcgccggattgttgactattggatttggcaactgtctcgcatagacatagaagccctcgacgtatttgccattgatgatctgcatgagaaaggaggcagagcgaatgaggtgacgatgtgcaatggaatgaggagcggcaatggagccgtctgtgagtcgattacatacctgccaggtgagtttcatgctagtggagtccaccacactggcgttgctcagctccacaacatctccggacagcagactggcacgagcctcgctcagatccagaccactattgaagtagcgctggggatggaagagggaatcgaaataatgtattaatgatggaaacataagggtaaacgaatgattttcagaactcaccgttcccaccgtaatgggttccgacatcggactgggcagtgataagccatgggagttctcggctcgaattagaaagaagtaattcacacccggcagcagacccgtttgggtaaacgtggtattttgcaccctagtgcccacagccacccagccatccgtttcgtttttgccaaacatctcgattacatagcccaccagactggagccgcccaccttgttgctcctcgtccagctgagagtcaccgaattttcgcccttctccaccatttgcggttttcctggcggccctgggtaggtggaaagttctggggctctgaagaacttgatattcggatttgtcggggtgtccagacgaaggtaaccactccaagaggattttccgttgcgattgctggccacgcaggtgtacaagccttcatcctcgtggcgctgaagatccgaaatggttaaggctccagcgtccgaaagattccgccgctcgtgctcctgcacatcgatgggtatgccatccaggtaccaagagacctgtggcactggagtgcccagagttcggcatggcagaaccacaattgatttaacgggcaacgtttgattcacgggcccctgttcgataatcggcggtggcagctcgaattgcgtatccacactgaccacagtccgactgctgacgctgcccacggcgttcagggcgttgcaagtgaccacctttccggaatcctcacgggcaaatcgagctatcgagagcaccgagcgcccctcgggcgtcagggtcacttccatgcggccatcccgatagccggggagcagcagggagctgttgccctccaccgaccagtagagcgttggtcggggatgtccattcgcttggcactcgaacagcacttcatcaccgatctccaccagctgattcttggggcgtatcacaaatttggggggagctgaaatgatgaagaaaataaggaagttagtacacttaaaacaacgacgctaagcatttattgttgaatatttggcgcccagcgtttagaaaattgaaactgccgcccaatgttttttcaagtgcactacagaagctggccgcagcattcgggcaattaacttaccgtgaacggtgaggatgccagtggccgtgatgccgcccaccgcattgtccgcctcgcaagtgtactcgcccatgtcctccagagtaacgtcgtccagcttcagactgcggtcctcaagtacgtgcacacgacctgtcgaaagaatagagaaattggggaaatgaatatcatgtgtgtgtgaggatgtgtggaatgggtgggcagtggggccggcccagaaccattcgaaagaaaaacaaactttctggctgtctgtctctgcttctacttcgttagtagttcaagtggcggaaaaatggccaagccgtatcctccacagccggagagccaaataaccgcagcaaagtaagccaagacaagatacgacatagactataactaccgcccttccaggagaagagcaccttttgtggtttttccccgtacaataaacagaaagaaaagacaaaggttttgggggcgagctgactctgctttctttttggttggttgactgcgaaataggttttaaatgtggctgctcctgctcaccagctcaccagctcaccttttcgcttttctatttctagccactgtgccaattgtttgcttaacaaaagtttaggacaacaaccgagacagccaggagagctaccgtatcccttctcccacgacagactggaatcttttctgttactattttctttgaggtctttaaagaagcgtaaactagctggagaaaattgccggccagacggaggatgggcggatggatatctccctccctgcgaggggttagttgcactgcccttcgggttggcaaagcgactccgtctgaaggacaacattgcaacagtcgagtgttgtgcaagcaaaattgttgattgctgccaacagagattggcaattaacggaattaaaagttacagttgtgtttgcccagctagggcgaaaaaggggcgtggctagtggttcgagggtggctaccctgggccaaaaccgcaccacccaaaccgtgaacccaaactaacaacagcaaaaggagttgaatggagagcagtgttgttatagaggtgtttaagacactgcgaaaaatactactgcatacactgaagaaatactaacaagtaaagcaatatgatatataatctcagagcattaacaacatgctgaagatcgaactaactaattataactgatcaactaacaatcaactaaatattgtaccatctttggaaatatctcgcagtgcactccgtaaacgcagccaattggcaacacgaaaagccactggccaaagcaaccgcataaactaactttttgttttgtttcctatttttctgtccacagtgctgtgtgtaacgaaccctcgactctacttgagccatgggtaaacaaaaagctttaatttcatttgaaattgcggcctgtgcatgtgtgaataactgccccagtaagagagccaacatggctgcccggccatttccggttaattgaagctgaatgaagccaagaaaacttacgcagtggcatattgccgccggaggcagtgcgtcgccacaggacatcaggcaggggatcgcctccgatgcggcactggaagaccaccgagctgcccaccaccgccgtctgattctggggtcctcggatgaggaatggacgtactgaaacagaaaagaaaataaatatagtgtgggataagatatttgtgaaacgggacatagcagatctgggcattcagcaaggtatgtacgttatataaccttgcatattaaaaagggactctcagccaacagattacttaccatgcactttaagaaaagcggtggccgactcccgggtgccaaccacattcttgaccacacactggtagcgtccgtcgtccgattggcgggcttcctggatggccagattgccaccgtcgacaatgcgaatccgcttgttcccgacaagattcagggtctggccgttcttgcgccacgagatttgcggctccggagatcctcggggggcaccgcattccatcagggccacctcgccttgggccacgcgggtatttgccggctccaaacggaattcgtcgcggagaactggtggagaaagatggggaaaatgacagcgagattgacaagtggtacgggaaagcgcccggagtaagagctttgattgattcaaaattaataactgtcaggtgtacgagagtcgccgtccactttgccgggctacagctatgctcctccatattttataagcccgacccaccacacccgcctgacccacctgaccctccggctccccctcgcgatcctgctgctgctactacctgctactacctcaatatgccaataaaagcttggtaatgatagccggactcagggtttacggctttgaacgaactcaactctctttcgcaaacagccaacggaaatattaataagctatggcatttgcaatgcttatttttatttattcgccgtccagccacttgcatcttctgtgctcgcatttttatcgagcgaaaatgcaaactggttggagtatacaaaatgtaaaatgcgaaatgcgaaatgcaaaatgcacttcaataaacgcataatgcgctccactgagcgccaaaggcactgcaataaaaacacagcagcgctggctttccgttgcgaactcggttatcagggaaacgttagtaggatggcgagtggtcaagtttatatggctttaagtccagctgaaatctgaatcctttatggcttaccggattaattaatctttgcttcttcaacaacttgaaatccccgcagctctcataagctagctatcgattacggggcaagaagatttctctttatataaattcatttgcttttgttttgtaagtaacgaagaggaatagaataatcgtaagaaggggaggacttatatgcagctgcccgatttggggtaatttccagaaaatgcaaccctccaattagctgaatatgttggcttgctctaaggctcaatcaatcaaagtcgcatttgtgtcgcttttgatatggttaactatattggctaagcactctatgaaatacttggataaaagaaactctagctacccaagttatttaaattaatacgctaaagccattattaatttcaatgaaaaactaaaaactgatgtgtattatcatgtaaatcgtactcctgttaaaacattcaaccaattagtgttgccaaaacagcagcgcatttacttacatgccacttgcaacgttgcattcctggaccgtgccactccaaactcgtttttggcctcgcaccagtaagtgcccgcatcgctctctctacgtgagtggataacctgcggggagtcgaggggaaagagattattagacacacgagctaagagatttaagtagttttttgggtgcagctttggccggtccgggtcacgtgtcagatcaaaaagtctcaaaatcgctcatccgaaatcaaataaaagggaaacgtgccataggcccattgtccagtctgcgtatacgcaatttaatttaattaaaaaatacattcaagccagcccaaggggtagcatccttctctgggcttggttgggccttaatcactcggccacttcaattttaattggcaacaaaccgaatctcatttgggggtcggggtgacttacccccaaaaaaaatacaaattgttatggacaataataaaagtgaattgctgaacttgagcttcgcctcgaggttcaacttgagaatttgcgtggaattactcgagggcatctagtaggttgttttttttttacatttaaatttaaaatttaacacaaattcaagcacccactgaggcattattaatctgcagaaaaacaataacaaaagcacagtgaatttgttgcatttaatgaaaatagcggagaaagaaagaaaaacgagtaggaatttaatataaacagagtccgaggaaattgcaatgcctgatagagagacagacagacgacgacacccctttttcatcggcgtttggggatttcgaggagtctcgttagctgaaatggcgcaatgtgcacgcacgaaatgatataggggttggtcggcgtcgtctaaccccaacgagatctctgtttgttcatcaggttgttttccctatcaactaaagtgcaaccagacggaagcccataaaataatatgggcaggccgaaaaaagcagaaacagcagaagacacacgaactgcttatgcacaaatgttgcgtttcacatgggactcgaggagtaggactcggcctgggaacccaaataaaggaattccacgcctcatccgcctcctcggccaccgccttcgacagctgtaagggccataatgatagagccgatacggaatgagttgattggttatgatgcgtaccttgagaaagaatagacccccggcgggcagcattatgcgatgcgaacccgtatccgtcttcagttcgcgaccgtccttaaaccattgaatggttggtgttggattgccctcggcctggcaattaaacgtaaatggatcattttttggcaccgtcgtgtccatgggatgctcgatgatgcgtggattttcacctggaatgaaagaggaggaagcgttcattaatatcgtatcttttataccatgccagggagatggatgtgtgcacggaaaccctacgctgagcaggccacttgagtgcgtgttggatgtccaaaggatcacatgtggggggatcatctctggggatttcccgttccctaaacgaaactcatctttgacggctaaacaagttttgtcacttaatgcagcggcaattaagaggccattaagtagacggtccagaggacctaaaatccagccagaaattatgttaagcagcaacgaaatttcacttgaggcgactgctcctctcaaattcaattaacttcatgaaaatatttgcccgccctcggctccgcgcacaaaggacccgtcctctgactaaacataaatttgtgcatgtcgataaggacgaaacaaaggacttcgctagataaactttattaaaagtagcagaaagtaacgatagacggcgagagcagttggatccgaaacaacatctgaacagctgaaatgtaattacaaaagcgcttaaaggtgaaaaatgtgtgtgttcgcccagcggaggaggagtgagatgtaaatccccggacagaggtggaatgcctttggttagtaacatcattcagccggaaattaagttttccagatttattgaaagcggatagtaatgagagcttgcagcgcaggagaggcacgggaaaccagagcaaacaggaatagagatggcgagtatcactgtttgcacaaaaagggaataaatcacgggatgtggagggtcacgcacttccagggtgccatgtgggtacattagttggagggagtgttagtgtagttaatattttatattttttaaaagctcaaagctgctaaccaataacgtagactaactatgaagctatctctcccttcagcagtaactagatctgctcgcaattcgacacccgaggcgtgacctttgagccctggcactgccagtatgcaaatcgaa

SEQ ID NO: 11447 - DNA, 2499 bp, DROSOPHILA
gaaaatccacgcatcatcgagcatcccatggacacgacggtgccaaaaaatgatccatttacgtttaattgccaggccgagggcaatccaacaccaaccattcaatggtttaaggacggtcgcgaactgaagacggatacgggttcgcatcgcataatgctgcccgccgggggtctattctttctcaaggttatccactcacgtagagagagcgatgcgggcacttactggtgcgaggccaaaaacgagtttggagtggcacggtccaggaatgcaacgttgcaagtggcatttctccgcgacgaattccgtttggagccggcaaatacccgcgtggcccaaggcgaggtggccctgatggaatgcggtgccccccgaggatctccggagccgcaaatctcgtggcgcaagaacggccagaccctgaatcttgtcgggaacaagcggattcgcattgtcgacggtggcaatctggccatccaggaagcccgccaatcggacgacggacgctaccagtgtgtggtcaagaatgtggttggcacccgggagtcggccaccgcttttcttaaagtgcatgtacgtccattcctcatccgaggaccccagaatcagacggcggtggtgggcagctcggtggtcttccagtgccgcatcggaggcgatcccctgcctgatgtcctgtggcgacgcactgcctccggcggcaatatgccacgtcgtgtgcacgtacttgaggaccgcagtctgaagctggacgacgttactctggaggacatgggcgagtacacttgcgaggcggacaatgcggtgggcggcatcacggccactggcatcctcaccgttcacgctccccccaaatttgtgatacgccccaagaatcagctggtggagatcggtgatgaagtgctgttcgagtgccaagcgaatggacatccccgaccaacgctctactggtcggtggagggcaacagctccctgctgctccccggctatcgggatggccgcatggaagtgaccctgacgcccgaggggcgctcggtgctctcgatagctcgatttgcccgtgaggattccggaaaggtggtcacttgcaacgccctgaacgccgtgggcagcgtcagcagtcggactgtggtcagtgtggatacgcaattcgagctgccaccgccgattatcgaacaggggcccgtgaatcaaacgttgcccgttaaatcaattgtggttctgccatgccgaactctgggcactccagtgccacaggtctcttggtacctggatggcatacccatcgatgtgcaggagcacgagcggcggaatctttcggacgctggagccttaaccatttcggatcttcagcgccacgaggatgaaggcttgtacacctgcgtggccagcaatcgcaacggaaaatcctcttggagtggttaccttcgtctggacaccccgacaaatccgaatatcaagttcttcagagccccagaactttccacctacccagggccgccaggaaaaccgcaaatggtggagaagggcgaaaattcggtgactctcagctggacgaggagcaacaaggtgggcggctccagtctggtgggctatgtaatcgagatgtttggcaaaaacgaaacggatggctgggtggctgtgggcactagggtgcaaaataccacgtttacccaaacgggtctgctgccgggtgtgaattacttctttctaattcgagccgagaactcccatggcttatcactgcccagtccgatgtcggaacccattacggtgggaacggtgagttctgaaaatcattcgtttacccttatgtttccatcattaatacattatttcgattccctcttccatccccagcgctacttcaatagtggtctggatctgagcgaggctcgtgccagtctgctgtccggagatgttgtggagctgagcaacgccagtgtggtggactccactagcatgaaactcacctggcaggtatgtaatcgactcacagacggctccattgccgctcctcattccattgcacatcgtcacctcattcgctctgcctcctttctcatgcagatcatcaatggcaaatacgtcgagggcttctatgtctatgcgagacagttgccaaatccaatagtcaacaatccggcgcccgttactagcaataccaatccgctgctgggctctacatccacatccgcatccgcatccgcctcggcatcggcattgatttcgacaaagccaaatattgcagctgccggcaaacgtgatggggagacaaaccagagtggaggaggagctccgaccccactgaacaccaagtatcgcatgctaacgattctcaatggcggtggcgcctcatcctgcaccatcaccgggctcgtccagtacacgctgtatgaatttttcatcgtgccattttacaaatccgtcgagggcaagccgtcgaattcgcgcatcgctcgcacccttgaagatggtgagttaagcaacttttaa

SEQ ID NO: 11448 - protein, 823 aa, DROSOPHILA
MDTTVPKNDPFTFNCQAEGNPTPTIQWFKDGRELKTDTGSHRIMLPAGGLFFLKVIHSRRESDAGTYWCEAKNEFGVARSRNATLQVAFLRDEFRLEPANTRVAQGEVALMECGAPRGSPEPQISWRKNGQTLNLVGNKRIRIVDGGNLAIQEARQSDDGRYQCVVKNVVGTRESATAFLKVHVRPFLIRGPQNQTAVVGSSVVFQCRIGGDPLPDVLWRRTASGGNMPRRVHVLEDRSLKLDDVTLEDMGEYTCEADNAVGGITATGILTVHAPPKFVIRPKNQLVEIGDEVLFECQANGHPRPTLYWSVEGNSSLLLPGYRDGRMEVTLTPEGRSVLSIARFAREDSGKVVTCNALNAVGSVSSRTVVSVDTQFELPPPIIEQGPVNQTLPVKSIVVLPCRTLGTPVPQVSWYLDGIPIDVQEHERRNLSDAGALTISDLQRHEDEGLYTCVASNRNGKSSWSGYLRLDTPTNPNIKFFRAPELSTYPGPPGKPQMVEKGENSVTLSWTRSNKVGGSSLVGYVIEMFGKNETDGWVAVGTRVQNTTFTQTGLLPGVNYFFLIRAENSHGLSLPSPMSEPITVGTVSSENHSFTLMFPSLIHYFDSLFHPQRYFNSGLDLSEARASLLSGDVVELSNASVVDSTSMKLTWQVCNRLTDGSIAAPHSIAHRHLIRSASFLMQIINGKYVEGFYVYARQLPNPIVNNPAPVTSNTNPLLGSTSTSASASASASALISTKPNIAAAGKRDGETNQSGGGAPTPLNTKYRMLTILNGGGASSCTITGLVQYTLYEFFIVPFYKSVEGKPSNSRIARTLEDGELSNF

SEQ ID NO: 11449 - DNA, 2782 bp, DROSOPHILA
gaataattcatttgatatttatagagatatatatgcgtacgtataattaactacagctagtgcattacaatatgtacacttagtggataaacattcgtggctactgaattgatatctgcctggacgcttagactaattacgaaccccttaagtaacaaacaaaatgctgcccatcgatctatctaagtgggtgtatacactatgtatgtgtatactctaaagctaacgcagcgttttggctatcatcgtctgcatacttggaggaacttatcatacgtttttttttttttttaatttacagtgatctttgctatagctaccttagcctaaagtttaacgaaagcagttcctagtcggagattagcgcgagtagagatagattgagctggagagatggagaaagagtaatatgtctatcactagcatagggccgacggctcagagttaagagctcggctttcttcacatagaaacgaaaccttgtaatactaatcaaactaaatgtaatcctcacacgaatctcgcactctgtcagtctcagtcttggtcacatttctcatttgtgacaaacgcagcagggaacaagcaaagttcagtgcagtgaattttggagggtcaagaaatactttgcatataaaaagcatggttgatttaccatttgtttagatttaaaatttcaaattaaatgttttaaaaaacacaagtattcaacccaccacaccattcgtttcacctgttccttgatcctgcccagctttttaatgcgtataccctttctttcgcaaaatcttgccttcagcacattcccctccaaatacccttcctaaccaggctactcaaagttctccactccaccgttgttgaagcgttcgcaccaggcgagtaattcccgcacttcccgagcgtagagttgttcctgggactgcagatcactctgggactgcgactgcgactgggatttggactgagactggcccaaggatgaaccagggagcaaaggtcagacattgtggccagctggctggctgctggtgccgctacccgagttgctgaggaggctccgttcgctggccacgcttcccggagcgtagatcaactcgctgggttccttgatgcattcctggccgttcttccgactgctccgcgtgctctgattccgccaggactgcaggtgaccttccgccggatgctgtgggaccaggggaatcagctgctgctgctgctgtggaggctgctgctcgtccaccttgacgtacagtcgttccatgtcgtccagatccccatccgccgtgtggtacagcgcgtgctcgtcctcgtgcgacatcagcatggccatcggggagggagatccaccgcagcccgagtctgccagaccgttgtagcacatcgaggagccgtcgagatccaggagattctgctggttcttgccctgatccgtgtttagcaccttgaagcgggcactttccctgccgatgctgcagttgggcggcagctgctgccgcctcacgctggcgaactgcgaggatatcggcgaggactgcttggcgccaggagccgcctcataggtgtggcagttgctcagcttgttctcggtgatgtggatgtgtctctgcttgtccttggggtagtaatactgctcagagtagacagagcgcgaaggacccgtgttcgtggggtatatctcgctggtggtggacatctgctggtagatgttgctgggtggcagttgctggtgctgctggagagcctggtgttgctggtgcgtctgctgcgcctgttgctgctgatgctgctgctgctggtagtgtgggtgcattgggcgctggagcccatagccgggcactggtcgctgttgataacgcggctgctgctgctgttgctgctggtggggactcaggatcgaagaggtggcataaggggccggggaggcgttgccatgccgaccatactcgctgggtgccttgccaaaactggacacctctgcatagtcggtcggtatgttggagtactcgcccacgtacctgcaatgaacagataaaaacaaacagagttgaaacacagaatactcggttattacttggcttgtttattacaatattcctctgacccactggctccatggccccgtgcgccccctgcttccgaccatttcggttataaattcgtgcaatttatggcgcggcgcaaatttgcattttcggtcatgctgctgcgcgcctttccgagcgggaaatatgagtatttagttggatttcccatacagacactgcggaacacacactcacggccgagatcaggtggcgaaatagtgctggagacggctatccttacatccattaaataaattaccagcttaaaacaaaggtgaaaatgccggactttcccaatggcagacgccccagtttccatcccaccagtcgaccgcttcattctcgcatttttagcattattttcacatttaaatactgaaagcggattaacctggcggggccatcgcgagcccagccccaaaaaggggaaaaacgattttaaaactctctgaaaagcttgtaaaaatatacggcgcattgatggagttgccatggcgaagggataaagccaggactccacatagaaggctcttaatgcccttaatgagtggcgccgtggaatgaaagttggttctgtacacgaagtagtaatgagcttgtcaaatgtctggctcaacggggcaagaacattttaataattttaagcgaattaattatcacaaggccatttgcgtggggaactcaagtcgaat

SEQ ID NO: 11450 - DNA, 782 bp, DROSOPHILA
agcaacaggcgcagcagacgcaccagcaacaccaggctctccagcagcaccagcaactgccacccagcaacatctaccagcagatgtccaccaccagcgagatataccccacgaacacgggtccttcgcgctctgtctactctgagcagtattactaccccaaggacaagcagagacacatccacatcaccgagaacaagctgagcaactgccacacctatgaggcggctcctggcgccaagcagtcctcgccgatatcctcgcagttcgccagcgtgaggcggcagcagctgccgcccaactgcagcatcggcagggaaagtgcccgcttcaaggtgctaaacacggatcagggcaagaaccagcagaatctcctggatctcgacggctcctcgatgtgctacaacggtctggcagactcgggctgcggtggatctccctccccgatggccatgctgatgtcgcacgaggacgagcacgcgctgtaccacacggcggatggggatctggacgacatggaacgactgtacgtcaaggtggacgagcagcagcctccacagcagcagcagcagctgattcccctggtcccacagcatccggcggaaggtcacctgcagtcctggcggaatcagagcacgcggagcagtcggaagaacggccaggaatgcatcaaggaacccagcgagttgatctacgctccgggaagcgtggccagcgaacggagcctcctcagcaactcgggtagcggcaccagcagccagccagctggccacaatgtctga

SEQ ID NO: 11451 - protein, 232 aa, DROSOPHILA
MSTTSEIYPTNTGPSRSVYSEQYYYPKDKQRHIHITENKLSNCHTYEAAPGAKQSSPISSQFASVRRQQLPPNCSIGRESARFKVLNTDQGKNQQNLLDLDGSSMCYNGLADSGCGGSPSPMAMLMSHEDEHALYHTADGDLDDMERLYVKVDEQQPPQQQQQLIPLVPQHPAEGHLQSWRNQSTRSSRKNGQECIKEPSELIYAPGSVASERSLLSNSGSGTSSQPAGHNV

SEQ ID NO: 11452 - DNA, 6508 bp, DROSOPHILA
gtcgcgctcgggcatttgcaaatattcactgacgcccacgctggatacgctggcctccatacgggagtttaagcagttgcgccacgagctgcgtcacattgagtgcctttcagaggatcgccttatcggctacggccagatgcgcatcaccgtctgggatcatcgcagcggcgatactctgatgaactacgacttgggccggccgctgggccgttgcctggctgctacgcactatcctagcctcgacttggaccaaagcagcatgctggtgctttatcagctgcttaaagaaccaaacaaaccgtctgaggtgcatgtgatcgcctgtgagctttcccatgccacgccctcgcaccgcctgctgcaggtccaccgcttaccatcgccgcaattcgacgatgccacggagggcgttaacaccggtgatcatctgatcatcaagtcagcatcgaacgacgaagcctggataagtgccgccgatccgagacagctaacctatttggcgccgcaaatcaatggagctcagcgtttttatgcccgccacaagtcccaagtgatcgagatgtccccgcaatccctaactgtagatagtatcgccaatcacatgttgaaattggctgtccagcagacccaatcggcgtagacctgtgtcgcggaactagaaatgtggagagtctcggccttgaacaaagtttttgtttttttttttcacacaaacccatgtttgaatatcacccagaatacccgatctataaatgtgcttttggctgtctgcccaagtatagttcaaatataggaaactataataagttgcgtgttaagccctgtagtcctaacaatcattttagtcgtaagtaagtcggagagtagtagcctttattatgcgctattttgaaataagtgtttttgtttctttcgttctttttattttttctaaaagaaaaacaaaactagcttaagctatcgtagttttaggcatatgaattcaactgtttgatttgctactatcgactgaagtagtaaatttgtcatatttttaagattaatggaaacaccaaaatggaaagaaattaatgtcattaaaacggaaatctattaaaaatacaacgtttttgtttgcatcaattgcatctagtcgattcacagatatgttgtcatccacaataatttggtttataatactcgatcacggatttcgagactgcctttggactcgcatcctaacgaagttggttttttacttcagttgaatcttgattatatggatgagccggtcaccgagatcttcgtgtattggagtacaagggaaggttaatcctataagatctcaggggtaaaatcatagctggctcttgagtattaatgataaaacgaaaatgcctttggtttttaattatagttcgtatattttaaactaattttgtataatatctaatcaatttcaactactctgttgtcgatcaattccgactgtctaccctataaactaacttcttaaaactaatcattatttacgattttgttagtctctaagttctaagtttttatatacagaagttttacttacatcaaaaaagtaaaatccatcgaaaaaattgtgaggtggaccaaatatacaattagaatgaacgcgaatgcgatgctattcggttataatatagccactaggaagccaattgcctgcctgagaaccaaccacgaaatgcaaagatccctaaactgagttccataactcgtggcattaaatcgctcttacatgtctagtaaagtacaggaaattccaatttagttacgttcgcttactgtacacacgttacgaatatagagaatatacatatctctattttggcgagaaccatttcaaggctgtatcaagccccaaaagaagagtaaacgctgagggtgctccggcagccgtagcagtccactacaattctttttccggtttctgtgctaccgacgctgtttggttctggcgctgctccttggccagttgccaccgcttaaactccaccatctgcatgacgcgaacacgcagaggttgtttccgtcgctgcatgaccgccgacagtttgccgaactccatgctgtacatgaatacgactggaatgagcacgtcgtccttgccgtcgccagacattgcgaacatcggctgcgtctcaccggaagagcccggaacattatcacagacaatcagcgccgccgcccccaccttctgggccagtcgcgctttgctaacgaacgtgcaatcgccgcgctcggccaccaggacctttcctttcgcctcctcggcgttctctaggctctcatcgcatgctcgtagcggcttggccagaatcacgtccccttcgacgaactgatcgccagttaactctgggctaaagtgcgacggcccggccatcagtgcgatccaatcctgtgagttctcgtcagtggcgtaggcaacggcctataaacgagaaaaccatttcaaatatcattatgatgatttccatttaaaatgtataaagcatgcaaacctgcagttgcgctagctgatttatgctttgcatcttggtcagctcaagcatctcctgcataaattgcagtcccatttcgccctcctcgtgacttttggcctgaataaagtcgaatttatattattatattttttctacgatctgtgtgctgatgatgatgagaaggaagagtaggaagcgaaagatcgaggaggaactggtggcacaatggttaccaaccagagtgtcaaactaaatgcaaacgaaaccaaaaagcagaacagaaaaaaacttacattatagaaactatgaaacagtcgcaccttgccttggctgcggtcgcctaccgaaaccatggtaatgcccatgtcgtaaacagctcgaagatgatctgcattgcttgcctgaaaatccagggcgctgagtcgctttcccgctgtggtgcgagggcacgagcccgtaatgaagttgcgcagtggtttgcgtactttttcaggaaaaagcctatttgaactggggcaggtgcgcatgaagtcgagtacgttgtgttcgtccgtctggcgaaagcctgtaaaagaatggaaaacatgaatagtagttctttcaaatggccaactagactatcagtacgttaaagacaaaagaaattgttgcaaataagcaattgaaacctttccagacctatagatggaattactgatagcgttgcggcgattacgtaaaacaatttacaagtacttactaaacgtggcattccctagttgggcaatagagagcggtagcagatgagcctcggtcgtgaagacgaactcatcgacgtttatgatcagatcctggggatcggagaacagtaggaagaggtacttgatcgtctcggagagcacaaacgagtccatgcgatcctcatgcttgccagtccgtacatcattgacggccgcatagccgcaagataccttagcatgctgctggagtgttttcagagccttcttgccaacctgcagataatgatgatcgccagtggcgcggtacaggaagtaagtggactctataaattctggtcgcaggggatgctgtccccaatggatctggaagtcgacggtaaatgcttctggaatgaaggtgtgcatctgcatgacctggaaatatgtttaaatatatttgtaaatcaaatcacattcattggtggctttggaaaggatgttacatacctgatagagcatctcgtgtgtctgcacagctggtttcagatcgcccgatagcacctgcaagcccggccaaaatgccagaagcgagtccatgaagtttttggacttagcatgtggcctgtgcatgagcacgtcgagtagcatgggtccttcgctgacgtacttcatcactgcgttgtagtggcgattaaagcgtgccaggtacttgtcgtcacccagtaggacgtacgacttgaacaggtactcatagtaactgtcgatgccagctccgactccagaatcgcgacgcacccaatcgcccgaatggacattaagtaccgtgcccatgagatcggagccacggtgccttagcttccacagtgcatccatggcggcgtgagctcgcacctcgaaaatgggatcgccggtgagacgcgacagagcagcaaattccagaaggatggtaccagcacacgccgtacacgtttcacgggacttcttgagcatcgggtccttcatgcccaggcggagattaacccgcgcatgcggaatgcccgtggatgtgttgaacgccggtagcaaacggtagcccagctcgcgagacatctccagcagttcgcccttgtaccaatgcatcgtgtccgcatgcttttgcagatactccgccaggatgtgcgccgacagcaagccaccgaccattcgaatgttcgtctcaaacaccgacacaataatgtcgctgtcgaattgaacgtcgcggataactagcttcaccgcgtgatcaaactctgtgaaatcgcccaggagcaccagagtgtccagagtatccaccagagtcatggagaaactaaaaataagaacaatgttagtaatccctccaaaccttaggtttttgaactcactttccaaggatgtcgtccatgtcgccacgtgatggcgtcactcctcggtaccgtcctttgcaggagagcggcataagctcatcagctggataggcgttctgcatgtaggcgttgtatgcatgatagaacatatcgcgagcctcttccctgaaagcaaatggaacatattgtatacttgaatttactttctacatatgtgattgttcagaacaacttttaagcttaagcgttttaatatgacttaatatgaaagtcatggatatataattcgtttttataagcatcacatttaaatgtatatccataaatgattaaaaacgagttatgctaatttgacctcgtcgtttctgacgcatatatgggttacatttaaacaaattgcatagatccctcgtaaaaccagagtacattaaaatattaatagtgtttctgaaactttcttagtttggtaaataaataaaaataagacgtacagaagttgccctggtcaggaaatacaaggaaacgagaagctgagacttaccggagttccgcccgctccttattggacatgttctgcgtgggcatggtggtttcggtgctaaggacgcaggcaactacgatgcacatggccaccaggaagatgagcataagccgctggccgcggacaaaggattcggaggatgtggtagacatggtgctggctatctggagactaccgatggcggcggcggtggcgttggaggttgtgctggtgacggcggatggctttgtctttcggccgccagacttgccgctcgagtcgttgtgacgttgaccttcactttgaacgtgtggtgttgaaaccaatgtttcgatgtctctctgtcccgcttctttgttgactccgctttgggcccgtggtccgcttgaattggctctgcagcctaattgaaacagccaactcataattagcttataacttaacaagtaattttgttcgactgaaattaggcttacctgtgcccgaaatgtcgacctaatttgttgttgtttttttcccggtttgcacgggcactagaagatcgggtctctgtggataaaactggagcgcgctgcttctacggcatctgcaattgcacattcatcctcccaacgaccgcgacaactgcgacacacatcgtgactatttataatctcgtttggaatatgttttctgctccaataacaaaacaccacgacggcaaagcgagcgtcagaatcgtaaggttactgcggccagccgatcggcggggcattacggctctctattatatatccagctgagtctgtttttatagttatccgagctgctgtgctggcaattatcagatcgctgcttatcaacgatgaactcaagattccttaattttatcacgaaaaaaaagtgattgcaccctcagtgtgaccagctgtgcagcgggcggaagagagtggccctccgccattaagctattgttataagctaatctttaaaattattttatttatgctctatattagttgaataagttcattattcttttccattttatagaataacgataatataaatatattaaattttatcattgcacagcactggcttttggtatatttcaaacgccttttccgactaccttctaatgcgtatgagtatacttcaacggttcttttacggccacactgtaagccagacgaaaaaagacgcgaaaagatgcagataatataaacaacggtgagataataattaaacaatatgtcataaaagacatatttattgagtgactagcttattggggtaaaaaacatagatgtttctttctatgtagcccagtgaaaagttcaaactttcgacagatgcgagtgtgtgcgtagctgaaacggctgcttcaggcacaaagggtgaaaaaaatgcgaaaccagaagtttcggtggcttcataattacc

SEQ ID NO: 11453 - DNA, 3585 bp, DROSOPHILA
atgagttggctgtttcaattaggctgcagagccaattcaagcggaccacgggcccaaagcggagtcaacaaagaagcgggacagagagacatcgaaacattggtttcaacaccacacgttcaaagtgaaggtcaacgtcacaacgactcgagcggcaagtctggcggccgaaagacaaagccatccgccgtcaccagcacaacctccaacgccaccgccgccgccatcggtagtctccagatagccagcaccatgtctaccacatcctccgaatcctttgtccgcggccagcggcttatgctcatcttcctggtggccatgtgcatcgtagttgcctgcgtccttagcaccgaaaccaccatgcccacgcagaacatgtccaataaggagcgggcggaactccgggaagaggctcgcgatatgttctatcatgcatacaacgcctacatgcagaacgcctatccagctgatgagcttatgccgctctcctgcaaaggacggtaccgaggagtgacgccatcacgtggcgacatggacgacatccttggaaatttctccatgactctggtggatactctggacactctggtgctcctgggcgatttcacagagtttgatcacgcggtgaagctagttatccgcgacgttcaattcgacagcgacattattgtgtcggtgtttgagacgaacattcgaatggtcggtggcttgctgtcggcgcacatcctggcggagtatctgcaaaagcatgcggacacgatgcattggtacaagggcgaactgctggagatgtctcgcgagctgggctaccgtttgctaccggcgttcaacacatccacgggcattccgcatgcgcgggttaatctccgcctgggcatgaaggacccgatgctcaagaagtcccgtgaaacgtgtacggcgtgtgctggtaccatccttctggaatttgctgctctgtcgcgtctcaccggcgatcccattttcgaggtgcgagctcacgccgccatggatgcactgtggaagctaaggcaccgtggctccgatctcatgggcacggtacttaatgtccattcgggcgattgggtgcgtcgcgattctggagtcggagctggcatcgacagttactatgagtacctgttcaagtcgtacgtcctactgggtgacgacaagtacctggcacgctttaatcgccactacaacgcagtgatgaagtacgtcagcgaaggacccatgctactcgacgtgctcatgcacaggccacatgctaagtccaaaaacttcatggactcgcttctggcattttggccgggcttgcaggtgctatcgggcgatctgaaaccagctgtgcagacacacgagatgctctatcaggtcatgcagatgcacaccttcattccagaagcatttaccgtcgacttccagatccattggggacagcatcccctgcgaccagaatttatagagtccacttacttcctgtaccgcgccactggcgatcatcattatctgcaggttggcaagaaggctctgaaaacactccagcagcatgctaaggtatcttgcggctatgcggccgtcaatgatgtacggactggcaagcatgaggatcgcatggactcgtttgtgctctccgagacgatcaagtacctcttcctactgttctccgatccccaggatctgatcataaacgtcgatgagttcgtcttcacgaccgaggctcatctgctaccgctctctattgcccaactagggaatgccacgtttagctttcgccagacggacgaacacaacgtactcgacttcatgcgcacctgccccagttcaaataggctttttcctgaaaaagtacgcaaaccactgcgcaacttcattacgggctcgtgccctcgcaccacagcgggaaagcgactcagcgccctggattttcaggcaagcaatgcagatcatcttcgagctgtttacgacatgggcattaccatggtttcggtaggcgaccgcagccaaggcaaggtgcgactgtttcatagtttctataatgccaaaagtcacgaggagggcgaaatgggactgcaatttatgcaggagatgcttgagctgaccaagatgcaaagcataaatcagctagcgcaactgcaggccgttgcctacgccactgacgagaactcacaggattggatcgcactgatggccgggccgtcgcactttagcccagagttaactggcgatcagttcgtcgaaggggacgtgattctggccaagccgctacgagcatgcgatgagagcctagagaacgccgaggaggcgaaaggaaaggtcctggtggccgagcgcggcgattgcacgttcgttagcaaagcgcgactggcccagaaggtgggggcggcggcgctgattgtctgtgataatgttccgggctcttccggtgagacgcagccgatgttcgcaatgtctggcgacggcaaggacgacgtgctcattccagtcgtattcatgtacagcatggagttcggcaaactgtcggcggtcatgcagcgacggaaacaacctctgcgtgttcgcgtcatgcagatggtggagtttaagcggtggcaactggccaaggagcagcgccagaaccaaacagcgtcggtagcacagaaaccggaaaaagaattgtagtggactgctacggctgccggagcaccctcagcgtttactcttcttttggggcttgatacagccttgaaatggttctcgccaaaatagagatatgtatattctctatattcgtaacgtgtgtacagtaagcgaacgtaactaaattggaatttcctgtactttactagacatgtaagagcgatttaatgccacgagttatggaactcagtttagggatctttgcatttcgtggttggttctcaggcaggcaattggcttcctagtggctatattataaccgaatagcatcgcattcgcgttcattctaattgtatatttggtccacctcacaattttttcgatggattttacttttttgatgtaagtaaaacttctgtatataaaaacttagaacttagagactaacaaaatcgtaaataatgattagttttaagaagttagtttatagggtagacagtcggaattgatcgacaacagagtagttgaaattgattagatattatacaaaattagtttaaaatatacgaactataattaaaaaccaaaggcattttcgttttatcattaatactcaagagccagctatgattttacccctgagatcttataggattaaccttcccttgtactccaatacacgaagatctcggtgaccggctcatccatataatcaagattcaactgaagtaaaaaaccaacttcgttaggatgcgagtccaaaggcagtctcgaaatccgtgatcgagtattataaaccaaattattgtggatgacaacatatctgtgaatcgactagatgcaattgatgcaaacaaaaacgttgtatttttaatagatttccgttttaatgacattaatttctttccattttggtgtttccattaatcttaaaaatatgacaaatttactacttcagtcgatagtagc

SEQ ID NO: 11454 - protein, 885 aa, DROSOPHILA
MSWLFQLGCRANSSGPRAQSGVNKEAGQRDIETLVSTPHVQSEGQRHNDSSGKSGGRKTKPSAVTSTTSNATAAAIGSLQIASTMSTTSSESFVRGQRLMLIFLVAMCIVVACVLSTETTMPTQNMSNKERAELREEARDMFYHAYNAYMQNAYPADELMPLSCKGRYRGVTPSRGDMDDILGNFSMTLVDTLDTLVLLGDFTEFDHAVKLVIRDVQFDSDIIVSVFETNIRMVGGLLSAHILAEYLQKHADTMHWYKGELLEMSRELGYRLLPAFNTSTGIPHARVNLRLGMKDPMLKKSRETCTACAGTILLEFAALSRLTGDPIFEVRAHAAMDALWKLRHRGSDLMGTVLNVHSGDWVRRDSGVGAGIDSYYEYLFKSYVLLGDDKYLARFNRHYNAVMKYVSEGPMLLDVLMHRPHAKSKNFMDSLLAFWPGLQVLSGDLKPAVQTHEMLYQVMQMHTFIPEAFTVDFQIHWGQHPLRPEFIESTYFLYRATGDHHYLQVGKKALKTLQQHAKVSCGYAAVNDVRTGKHEDRMDSFVLSETIKYLFLLFSDPQDLIINVDEFVFTTEAHLLPLSIAQLGNATFSFRQTDEHNVLDFMRTCPSSNRLFPEKVRKPLRNFITGSCPRTTAGKRLSALDFQASNADHLRAVYDMGITMVSVGDRSQGKVRLFHSFYNAKSHEEGEMGLQFMQEMLELTKMQSINQLAQLQAVAYATDENSQDWIALMAGPSHFSPELTGDQFVEGDVILAKPLRACDESLENAEEAKGKVLVAERGDCTFVSKARLAQKVGAAALIVCDNVPGSSGETQPMFAMSGDGKDDVLIPVVFMYSMEFGKLSAVMQRRKQPLRVRVMQMVEFKRWQLAKEQRQNQTASVAQKPEKEL

SEQ ID NO: 11455 - DNA, 2951 bp, DROSOPHILA
gatttgcatgtcctgcagccaaaagtgcacatcttccttttctaccagaagaattctaggactggagaaattttcagcgaatttatatcaacattatctgtatcaaggtctaaaagtatgaaaatttacactagaaacaatggttcctatatttgtatttattgacatggtgtaacatttgatttcaaactacatgatacatatatctcacaaaggtggcagtccaaaatattgtggcttgaatccttccagcgatcgcagtctcaaagtggcgtgagcacttgctcgaaaggataccagaggatcgggcacgaggaccacctgcatgccagcggacagagcagcctccataccaaccaaagaggactcgaagaccagacacttgctcggctccggcgattcctcaaaacgagaggcggtggtgaggaaaacatccggagcgggtttccccctcttgacttcttcgtcggagccgctcaaaaccacgtggtggaagacatcgaagggcctggagtgccgacgcgtctttatcctaaacgaatcccgacagcagccacttgcgatagccatgggaatgttgaacgctttgaggtgatgcagcagacgctccacaccgggcatcagtcgaatgaatcccattttgccacgacactgaagttcctgctggttctcaaactccgtcatgctgaagggcagattgaaggtgtttacgattagagcagcctgctcggaatctggctttcccatgcaccgcatcttcagatcgaagctatacgtgtgaccatagggatccagaatcctttgaacggtttccgttctcaaacgctcgctgtctatcagcagaccatcgagttcgaaaatgcaatgggtaactggctgaaaagagcactgcctagaacccgcctcttccgccgacattttggttcacttgaattttgaattattttttattttatagatagaatactaattttgacggatcaatttagagtgctagggattagccaaactcgaatttggagcaggtgtcaaagggtggtagaccaaagagctcaggcttaaagtccgccatcgattttagaaccatggtggcgccctttttctgctgcttggaaacgttatcagttggaataaagatgacttgggatcccgctgcctttccgcctatgaggcccactggagcatcctcgaatataagacactttttgggatctgcgggcggattgaatcgcgaggcggccaggagatatatatctgggtagggctttcctcttcccggtccaagtgccggatcatcgccacagacaacgtggtgaaaggccaggaatatatccttgaaggactcggccttcactttgaacagtttcctaaacgaacttgtggctatgcagaagggtatgcggtattcgtgcaagtggagaatcagatccctgacccctggcagcagagccacacttcccatgctcttatcaacagctgcctcgaattccttttgaaattccgcaggtgacaacggaagttttagatccttgacgatgtgttgggaaaatgtaccgaccggcattcccatatgctgcgtctgatcgactttggtgtacgttttgccatatttagccaacaagtcttgaaccgttttgaggtagatgccttcgctatctgaaagagcaaaaaaaaaaggtatgaatatagaaccatttattcaattagaatatgttaaatgtaatgcacctatcaaggttccatcgcagtcaaagatgacatgagtgacggggcagtaacacttcttggtgggcatttctacaatggtctaagctcttcatatcacacaccgcatgctccttaatttagagggttcgccttggccagaacggtgcttaattttccaaaaactaactacaacaatttgattcttctgttactgaattttcattaagaattttgagagataattccaagaggtcctgattacattttttaaatttcattcctctcagcggtagttgcactttcgtagttttagctatgtctaatgcatgcggcgcacgctttttggccaggactcgcatgttgttacaaagttgcgtaattgattaagcagttggcagccaagccgcaagagacgttttcaccagcgcgtcgccgaaactttggctttggccaatacgtgccacaaaatgttgggaagacagaggaagtaggtacggtgggtggtgcatgcagcatgtggtgctaaactttgtgtggtgggtggagcgggtggcgggtcaaaggtgaatgcgtcgcgacgcttgattttggcacgggtttaatagccaggcgcacctgggccgtatgaaacgagttaacgaaatgtttgcgcattttgcggagttgatagcggaaatttatgatgcttgataggcatcggatcatggattaaaataaagatcaatgtctttttttaatactattatccccaggcttttaaattgaatttagtttatttattcgatccaacttatttgatagttaagtagcgcgactctagcgtttccccttcctttttatattgccacaattttaattgatccttattgagaaaacccacttagtatattcagaagcaactccattgcttaacttcaaccatccgcattggctaccgaaggatggggcattttattaccttttattggcagcgctggctcggttgcagtcgcaaccattgaccgtaacgcattaatgtcctgtggccgccaaatcgaaacagaagttgcgcgatggcgaatggcttactggttcactgagcttgcatattttatgaccgagtccaactttaattggaacaataccaataaatgccaaatgcagatggcccacagggagagccaaaaagtttgatgtgctttgaccgggatatcgaaggacccgccagccagtgcggaaatcagctcaaggggacccatccacac

SEQ ID NO: 11456 - DNA, 879 bp, DROSOPHILA
aattatctctcaaaattcttaatgaaaattcagtaacagaagaatcaaattgttgtagttagtttttggaaaattaagcaccgttctggccaaggcgaaccctctaaattaaggagcatgcggtgtgtgatatgaagagcttagaccattgtagaaatgcccaccaagaagtgttactgccccgtcactcatgtcatctttgactgcgatggaaccttgatagatagcgaaggcatctacctcaaaacggttcaagacttgttggctaaatatggcaaaacgtacaccaaagtcgatcagacgcagcatatgggaatgccggtcggtacattttcccaacacatcgtcaaggatctaaaacttccgttgtcacctgcggaatttcaaaaggaattcgaggcagctgttgataagagcatgggaagtgtggctctgctgccaggggtcagggatctgattctccacttgcacgaataccgcatacccttctgcatagccacaagttcgtttaggaaactgttcaaagtgaaggccgagtccttcaaggatatattcctggcctttcaccacgttgtctgtggcgatgatccggcacttggaccgggaagaggaaagccctacccagatatatatctcctggccgcctcgcgattcaatccgcccgcagatcccaaaaagtgtcttatattcgaggatgctccagtgggcctcataggcggaaaggcagcgggatcccaagtcatctttattccaactgataacgtttccaagcagcagaaaaagggcgccaccatggttctaaaatcgatggcggactttaagcctgagctctttggtctaccaccctttgacacctgctccaaattcgagtttggctaa

SEQ ID NO: 11457 - protein, 240 aa, DROSOPHILA
MPTKKCYCPVTHVIFDCDGTLIDSEGIYLKTVQDLLAKYGKTYTKVDQTQHMGMPVGTFSQHIVKDLKLPLSPAEFQKEFEAAVDKSMGSVALLPGVRDLILHLHEYRIPFCIATSSFRKLFKVKAESFKDIFLAFHHVVCGDDPALGPGRGKPYPDIYLLAASRFNPPADPKKCLIFEDAPVGLIGGKAAGSQVIFIPTDNVSKQQKKGATMVLKSMADFKPELFGLPPFDTCSKFEFG

SEQ ID NO: 11458 - DNA, 8259 bp, DROSOPHILA
gcactttggctacttcacgtagccttagttggctccttcattccggatcctggctcctccagattcctcgggcatgacatttgcgtaggtagcgagagtgtttcaacgaaaagtttctctctcccttaccgccgctggtgctccaaggaccaaggactaaggagcccggcggcgttcaaattgaaaaacataaatcactcaagcagaagttgctgccagcgacttagtagtagtagaagtcgtagtagtatgtagtagtagccccggctttgtgtgaataatttcgtattaaagttaaattgaaagtgtgtagcaatttgttaaagacaaaagtcagtttagctgcaaggagggcataaaaacgtcgagcgagcggataggccacaaagttcagacaggaggaaggaatccagccaaaatcccattgcaaatagttctaaggcgctttattttaaaattaattttgcataccactctatgctgctgccatgctgaagctctgtgagcatatacgaccatagttatatagtgcgagacggctcttgccaagttttacgactccacagacagaggctcctcgactgctcggctccacgctaatctccagctgccatgttattgcacttgttggcaaagtttttcaaaaagtgattttgtcaggggtttggcggctggggtcgctttctcctctcgggctaaaaactttgcagtatgtttcttggtttttaattacaacaaattcgacttgttatgccaaaaagttagcagggattccagggcacgtacgcaagtgtgactaaaagaaattaacgtcattatgttttgtaactgctcatatcacgtgctaaccgcatctcaccgatctcccctttggttttgacaagcaaataatttgattaaatttacatatatgtgtgtgttgttttacttttgcacaattcgaacacgaaaaccaactctcaaaaattatgacagaaccgcacaaagtctggcgtcgacaatgccacatgcccccagcaaaatacccaaacagaagttgaaagcgaaacagattgagtcgtctcttcctactcccacggcacttgatccgcccaagccctcgctgctgcccaagccaaaggtcaaggttgtcattccaccagcactgcaacagcgtcttaagcagcagcaggtgcagcagcagcagcaacaacaccaacaatcccagcccgaagagccctcaattccggaggaggaatatcaccagcagccggagccggattcgccatccgccgcaggaggcagtcgcatacccgtaagaaccctaaaagccgagcgccgcgccttgaccttggcagcccgccaatccggacttagtgtagaggagtatctgaagcgactggagacccaggatgataaagagtccccggcttcgcccacaacgcccactggcaaaagccgttccatgattaagtaagttgaatgcgtgacggtcaacgagttgacatgcgtgcagaaggtccaggtccatgcccaggcccccgaaaggtcacaggtcaagtgtggtccaaatgtgagcgtgcgaaatgccagagactagcccctggtctaggtttgagtatatagaacacccacaccaaatgcacccactcacgcgaggcaatacgaacagctctcaatgtttccgtatatgtataaatcattgtataaatctatatgtcgattggaacacctacttttacatctttgtttttagttagcggtgtctgtcttagccacacccactttttccttctctgtctgtatatacaatagtcatatcttgtaattagttttgcttaagccggagttcagattgagtatcagttgcccatacatcttaagtggatgatatatatgctaaccaattgattctcgcccatttagtgctgagaagcgcgcctcctggcgggcagctcgtcttcgatcactggaacagggtgccgtggaggcacaagatgtgatcaagaatatgcgcaagatgaccgacgatctgatcacccacgaatccagggccagcgaggtaagttctcgagccggggtgaacacctcgaaaactaaccaaacccatagccaaatccaaaaaccatacacattaacttgcgcccgatgagatggaggaatggcccgaaatttgcctgcgaacataaccaaaaacgagcaaatgaacccacatagctacatggtttgcttcactaactaactgcaagaaatactaatatccttcagcctctcgattgtaactaatgaagatgcaaaattcaaatttaaatcgcaatcgagatatcgggatcggcaaatgtgtatccctaagggaatgaaaattggaaacccctgaaattgaaatctatacccctacctaatacgttgctcacccatttctctatctctcttatttattgtctacccactaatcaggctcagccgaaaatagtctttcctaaaattgccataaaatcgagcgacggtccagtcattgtgcgcgaacgcgagaaaatcctcgatgagaagattgtgcgccgcactgaggaggtggcatgccccattacggggcgacctcaactgcgcaccgtcgagtacattgagaaaatcatcgagacggaggttagagccagcaaatcaaattcaaaccagcaattactgtattatatatcaattggcaccaatttgagtttcgtttgagcattattatgggttgcatagcgtcctagacacattatatatatatatatacctaattatcggtttctgttgccgtttattgtgtgtgttttgtatccctgcaattgtagccatttaagctgtagcgttcctccttgtagtccgtatttccggttgcacattaagtacattttatgcacccacatctatataaagcactcgcctttatgtctctcattgtacaaagcaaacatctcgcgaaaaattcccggcatcgtcttaattattttatagagctcataatttttatggtctgttaaaaatgtctgttcgtctgtctgtccgttcgttgggttttctccgattttcttggtttttcatttctggaaagtttgtccaactgcgcgccacgttgagtaaaacaaattttaatatccttgaagcactcagttgccaaggggattttgttgacatttgccaggcttacgcgaccaggtgctccacgctaccgccgaccaagctccggctgaagtgcagcgcataaaaaggacaataagccacttttgcgagccacctacgcgaaaaggttttcgcgtttcgaatgcgaagcgcgcgagcggccaaaaatgatttccagttattgttcggcatttaagtgtcgcggttttttaaggtcgaaccctcgaaagagtttcattgtctgtttttagggtttgttgttgtcacgtgtctataaagctataacgactcagtcgaccgtcatttggctcttgattctggatacaatttttagtatgcgaacgcattataatgacgcgctgcttttttatggccgagtccattaaaattaaggcaaaagttttttgtttttttgtttgctgcttgctcgcaggggtagccgagttttaatgagtttcaaaatatatacttataaaaggaatgcaaataaaaacaaacaaacaaaccaggctaaatcgctaagaattttatgcgctattgttattctacgggcacgtgtttcggccaggttttttttttttggcattttatttcaatttgccaacggaagaaaggaagtgccatcagaaacaagccaaaagaatgtcaacgacatgaaagaaggccttctggctagcaaactgcagttgcatcacagttccgtgtggaactgcaagcgaagctttagcagtatctgattctgaatccgaatctggatgtggtttcattctggtaattcgagtgcaaaaaacttgcctgcagggcaaaagagacgaagacccgagcctcctgtccggaggctgaccccgttgcattgaattcgccgcaggatgtcgccggagcagcaggctctgttctcggattgcctgtcagctgcagtttagtttcggcttatcgtctcggccgggattcttgtgtgctagaatcccccgccccaggaccagatgaaaatgcaggcaattttcttttttagtcgtttgtcaatttgcctcatatcacgtatacgactaggctgcccccgagcgtgctagcttctcaaaattcgcccaggtcgtgatcggatcaactaaaactttaaaaatgttgcacgttcactacacacacccacccacccataattactaacgttaactaacacctgtacccatatgcatgcgtagccctcaccatctgtttttaatgcatcactccttttggcctggctcacatctcagttcacccgtcaagctgttcgttttccacctggctgtataaattagctttaagcgctttaagtgggacacacatctctggttgcggtgcctgctttttgccatctgctttcttggccttgcttccattagtagttagtgtgctggcaaaccgaatgcacaacgtatccgcctcatctacacttaggtggagacctgcaaggagcgaattatatccttggagctgcaggtgcccgaaacggaggacgagggcaagctagatgacacgcaaccgccgctggaactcgaggcggatgacttccaggacgacgaagatgatgacgacgacgatgatgatgaagatgacttcgaggatgaagatgaggaggaggacaccgcctccattgtgaccgtgcaggcgaacaatgagaagctattcctgcgccacgattctgatacctatggtccgtcgtccattgaaagtgttgcatccggcaaggtgcgcatcaagcccacgccgttgtcccttcaccaaactctggccaaggagaccacaattgtggaggtgctgaatcccgtcatcggaggcgatggcagtgcccgcaccattcacgtgagcggtggcctgcccttcgatgaggacgctttcgagcagggcgccgtggccgtgctgcgcagcgaaactttcgtcttgccaggagccgccggcggtggtaggtctgagttgtcattaaacgctaaaatgaaaaccgtgctcgaggagctgctggagaacgagcgcgtcaaattgaatttgcaaaagagcctcgagggtgaggagggggaggacgacgacgatgaggatgagaatggtagtgcttatggcgacgcgcgggacgaagaggagagcgcctatggcgatgccattgacgatgtagttgactttggcagcgccacggtcacgagccgcgcagctaatgataaggacgatgtcaagaacgggaatcagcagctcctcgaggagctgattaaggacagcaaccgcaacacaatcattgctaaattggcgggccaattgtcagacgatgatgaggaggatgacgacgaggaggagagcagtgactcttcggacgacgatagcgatgactccgacgaagaggacaacgcacagcagcagctgaatgtcacctatgtgcagggcgctcaggtaatcgagaatcttaatacactggccacgggcggaaagctacaaaagtcgcagacctacacggccatcaagcaagcagaggagccaaaggaggaggacacgaaactggaggaggatccatccgcggagaagccttgcggagctgataccctggccaagctgcaggccgagcaacgcgccctggccgagatctcaaagcagttgcgcaagtctgtggaggatttgctcagcgccgatggcgagacggtggtggaaactcagaggacttacactttgcccgctcccagcgatagttcagcggtggtcacggtcaccgaggtggtcaagaagcagaagaaaaagaagagcgaaactggggaggagcttttcaatcgcctgctaaacgccgcagagtcggaacgtcaggttttcgaccgacagcagggtgagaccatcacaaccaccaccacgaccacagaggctgtgagctcggaggacaacgagccgagtaccagtgtggtgaccaccacgcggactgtgtccaatattgtgaccagcggcattcccaggccagaaaccagcaagcagaacaaccgcagtagcagcagcagcaacagcaacagcagcaataataaccgcaacaagaacaagcgaaagggcaaaaagaagtagaggatatccggcagcagctgtaaggaaatgggctgaagtgttgaggttgcatatacgccgtgtggtgggtatgggttcgagtatgagtatgtgatccgagtgaatccttacacgcacaaccttccgcacaaacactcactacccacctacccacacacacagaaacacacatatcagcgtgttagagggctcgttgtcatctctctatattagaactactaattgtatacatatgtatattatgtatttacgatattcgcatatgtattgataattttaattaattgtgcaaataatgtgtcccctgcatttacaaaatcccatttgttactaatcatcaaagtgtacgcattaaaacaaaatattttcattgcaaattaaaaacaaatcgaattgccaaatgagatattgcaagaatttaactgaaaatttaatgttgtgcagcaaccgcaaagaaacgacaacaacacaaatcgccacactgagcccatcagaattaatacgacaacatcatcggacaaaaaaaaaagggaaacaaaaatcttatttaattgaattaaataatttcattttgtttgcatttactatcatttgcatactgcatctggtttttctccctcattgtgtttttccaaatgggccttgcttattttccacaaattaaatttacgttttatgttctagcacaaaaagtaggagcaatcccaaatccgtgcccagcagccggccgaagtatccacgatgattcttcacgagaaccatttataaactttaagcattcccgactgcccgagattttcgggcacactgtttttagttttagtcaataagcaaactaaacccgcaactaaatcaaactagattcgaaacgaaacagcgagagccgagaacataaatcaaataatcgtaaataataataataataatagttagcagtgtgtaagagcgtccagttgtaatccgtagtatgtaacacatggcataagcacaactatgacaaatgtcctatggcgatttcagtttccacttttatacaaatgtaaaaatatttacaagcaattttatgtaatacctatatgatatttagtgtgtaaactcgtctttttatgaaaacgaaagcaaatgccgcaaaacgaatgaaaataaacaaattgtatgcatttttatttgaaaaacaaaaaaaaaaatgtgtgtacatttaatttgctgggaggatttcgacctattgggcgatggtttatggcttctgaatgtggatttatctgtcatcgtttttgcgtgggcgtgtgtaattacgtcaactggattttctggaaataatccatagctataatagacagcgctgctatttatgtgccgcttcaaattgtgtaaaaaggctgagactcagctgaaatgctgggtaggttatatataaagcacgacaggtaagttactttagccgttcactcagagaaatgttgactcgacataaatattatttaatgctgttctcttcctaaagatgatagttttaaggatagtttgcgctgctaccacctctctatctgaactttctctgagtgtatttatgattgcgttgagcataaaaatgtgaaatattgttaaagccgagacattaaacgaccggctcggcatttatttatgcggcgcacaacacggagcatacacgtcccgtgttcctgtgacgcagcggaagaggctgccacgccgtgatggaagatacggcggcaaagatacgggactagaacctggttctgcaactaggacgctcaacaaacgtcttccgacacggcctgttgagacagtgaaatagatagacagctgccaggtccgatggaaagcgagggggtgggttggggcagttgctaatgtgaaaatcgttagaattcgctcagtacgtagaacttttcaccggaatcgccaggctcacgttccctgtttgctgcagtgtgcataatacgatttagagtgcgcagcatatggggcagatacttacatcggtatgcacttgcgtcagcatcttaaatatttcatgcccaccaatcgaattaa

SEQ ID NO: 11459 - DNA, 2774 bp, DROSOPHILA
atgccacatgcccccagcaaaatacccaaacagaagttgaaagcgaaacagattgagtcgtctcttcctactcccacggcacttgatccgcccaagccctcgctgctgcccaagccaaaggtcaaggttgtcattccaccagcactgcaacagcgtcttaagcagcagcaggtgcagcagcagcagcaacaacaccaacaatcccagcccgaagagccctcaattccggaggaggaatatcaccagcagccggagccggattcgccatccgccgcaggaggcagtcgcatacccgtaagaaccctaaaagccgagcgccgcgccttgaccttggcagcccgccaatccggacttagtgtagaggagtatctgaagcgactggagacccaggatgataaagagtccccggcttcgcccacaacgcccactggcaaaagccgttccatgattaatgctgagaagcgcgcctcctggcgggcagctcgtcttcgatcactggaacagggtgccgtggaggcacaagatgtgatcaagaatatgcgcaagatgaccgacgatctgatcacccacgaatccagggccagcgaggctcagccgaaaatagtctttcctaaaattgccataaaatcgagcgacggtccagtcattgtgcgcgaacgcgagaaaatcctcgatgagaagattgtgcgccgcactgaggaggtggcatgccccattacggggcgacctcaactgcgcaccgtcgagtacattgagaaaatcatcgagacggaggtggagacctgcaaggagcgaattatatccttggagctgcaggtgcccgaaacggaggacgagggcaagctagatgacacgcaaccgccgctggaactcgaggcggatgacttccaggacgacgaagatgatgacgacgacgatgatgatgaagatgacttcgaggatgaagatgaggaggaggacaccgcctccattgtgaccgtgcaggcgaacaatgagaagctattcctgcgccacgattctgatacctatggtccgtcgtccattgaaagtgttgcatccggcaaggtgcgcatcaagcccacgccgttgtcccttcaccaaactctggccaaggagaccacaattgtggaggtgctgaatcccgtcatcggaggcgatggcagtgcccgcaccattcacgtgagcggtggcctgcccttcgatgaggacgctttcgagcagggcgccgtggccgtgctgcgcagcgaaactttcgtcttgccaggagccgccggcggtggtaggtctgagttgtcattaaacgctaaaatgaaaaccgtgctcgaggagctgctggagaacgagcgcgtcaaattgaatttgcaaaagagcctcgagggtgaggagggggaggacgacgacgatgaggatgagaatggtagtgcttatggcgacgcgcgggacgaagaggagagcgcctatggcgatgccattgacgatgtagttgactttggcagcgccacggtcacgagccgcgcagctaatgataaggacgatgtcaagaacgggaatcagcagctcctcgaggagctgattaaggacagcaaccgcaacacaatcattgctaaattggcgggccaattgtcagacgatgatgaggaggatgacgacgaggaggagagcagtgactcttcggacgacgatagcgatgactccgacgaagaggacaacgcacagcagcagctgaatgtcacctatgtgcagggcgctcaggtaatcgagaatcttaatacactggccacgggcggaaagctacaaaagtcgcagacctacacggccatcaagcaagcagaggagccaaaggaggaggacacgaaactggaggaggatccatccgcggagaagccttgcggagctgataccctggccaagctgcaggccgagcaacgcgccctggccgagatctcaaagcagttgcgcaagtctgtggaggatttgctcagcgccgatggcgagacggtggtggaaactcagaggacttacactttgcccgctcccagcgatagttcagcggtggtcacggtcaccgaggtggtcaagaagcagaagaaaaagaagagcgaaactggggaggagcttttcaatcgcctgctaaacgccgcagagtcggaacgtcaggttttcgaccgacagcagggtgagaccatcacaaccaccaccacgaccacagaggctgtgagctcggaggacaacgagccgagtaccagtgtggtgaccaccacgcggactgtgtccaatattgtgaccagcggcattcccaggccagaaaccagcaagcagaacaaccgcagtagcagcagcagcaacagcaacagcagcaataataaccgcaacaagaacaagcgaaagggcaaaaagaagtagcacaaaaagtaggagcaatcccaaatccgtgcccagcagccggccgaagtatccacgatgattcttcacgagaaccatttataaactttaagcattcccgactgcccgagattttcgggcacactgtttttagttttagtcaataagcaaactaaacccgcaactaaatcaaactagattcgaaacgaaacagcgagagccgagaacataaatcaaataatcgtaaataataataataataatagttagcagtgtgtaagagcgtccagttgtaatccgtagtatgtaacacatggcataagcacaactatgacaaatgtcctatggcgatttcagtttccacttttatacaaatgtaaaaatatttacaa

SEQ ID NO: 11460 - protein, 800 aa, DROSOPHILA
MPHAPSKIPKQKLKAKQIESSLPTPTALDPPKPSLLPKPKVKVVIPPALQQRLKQQQVQQQQQQHQQSQPEEPSIPEEEYHQQPEPDSPSAAGGSRIPVRTLKAERRALTLAARQSGLSVEEYLKRLETQDDKESPASPTTPTGKSRSMINAEKRASWRAARLRSLEQGAVEAQDVIKNMRKMTDDLITHESRASEAQPKIVFPKIAIKSSDGPVIVREREKILDEKIVRRTEEVACPITGRPQLRTVEYIEKIIETEVETCKERIISLELQVPETEDEGKLDDTQPPLELEADDFQDDEDDDDDDDDEDDFEDEDEEEDTASIVTVQANNEKLFLRHDSDTYGPSSIESVASGKVRIKPTPLSLHQTLAKETTIVEVLNPVIGGDGSARTIHVSGGLPFDEDAFEQGAVAVLRSETFVLPGAAGGGRSELSLNAKMKTVLEELLENERVKLNLQKSLEGEEGEDDDDEDENGSAYGDARDEEESAYGDAIDDVVDFGSATVTSRAANDKDDVKNGNQQLLEELIKDSNRNTIIAKLAGQLSDDDEEDDDEEESSDSSDDDSDDSDEEDNAQQQLNVTYVQGAQVIENLNTLATGGKLQKSQTYTAIKQAEEPKEEDTKLEEDPSAEKPCGADTLAKLQAEQRALAEISKQLRKSVEDLLSADGETVVETQRTYTLPAPSDSSAVVTVTEVVKKQKKKKSETGEELFNRLLNAAESERQVFDRQQGETITTTTTTTEAVSSEDNEPSTSVVTTTRTVSNIVTSGIPRPETSKQNNRSSSSSNSNSSNNNRNKNKRKGKKK

SEQ ID NO: 11461 - DNA, 2978 bp, DROSOPHILA
atcagattaaatggtcgcctggcgccagctgattaccgccgaattccgaatagcttcgggtgctggtcaacagtaaaaaacctcaaggtcgcaacggttgttagctttatggcttctattttgcgaagccgtgtttttgccacaggttaaatggccaagcgacgagctccggacaaatggacagatgggccgtcggatagatggacggatgaatgaatggatgcgcaaaaaggctggcgaaaattgatttctatccatttcagatccattgtttttcaaccctaccacagtccacagtccagtgttcgggttttatatggccaaaccctagagcagccagttccatacaccatacaccatacaccataccataccatataccatatacaatattccaaataccaaagggggacgcaataatcgctggggattcccagctagaaatatgcggctggatcaactaaaaagtgtagaaaaaccgagtcgttttcgaactcgtttggatgctccgctaaatgttttagcatacaaaatatgaagaaaatcatttcatttactgaaagcatgaccatttatagtagtggcttttgctaaacgagttttcagccgtttcctccgccgagagcctgctctattggattacaacttgacgggtagggtcgtgtgcctaaaaattttcgatgatggtactacgacttggactgagggatcgtggaattagcataatgtcgacgccaacatttgcaagaatagggcggccaggtatcgatgcgctttgttcacgtcggcttggccattgttttatcgcacaagcttcgtttttcgaaggtggatagcatttcaagagacaaaagctgccgaagaagttaccaaaaaatgctgcggagccaacaaatacaacgatggtaaagtctgcatgaacttgagcgcagtttagtgacaccgatcgttggttttcgtataaatattggacctttcggtgatgcaaacgtcagacacaaccaagtggtcaaagtcaaagaactaaattcaaaatgcgtgccttcattgtaagtatacgttcgatcgccgacgaaatactccaaaaggataccaaggattacaatgctgttttctttatctccaggttatgtgcttggtggcagtcgcctgcgccgataagctcggctacaactaccagcccgtgggacactccagctccggactgtcctttgctcctggaagtggcagcattggaggtggctccatcggaggaggcagcatcggaggaggcagcatcggaggcggcagcatcggaggcggcagcatcggaggcggcagcatcggaggatccattggtggtggttccattggagccagcatcggaagcggtgccggtctgggtggtctgagcagcattggtggtggaagcattggcagcatcggaagcattggtggtggtgacgccctcagtgcccccgtctcctacaacgcccctgccccaaccgccgagctggagaaggagttcttcaccttcaccgccaacgagcaggacttcgatgagccccagcagctggagcgtgtgtcctctgccctgaacaaggccctgcgcgttgtcttcatcaagggacccgagaaccgtggcctggagaacgccgccctggccctcgccaagcaggctgcccagcaggagaccgccatctatgtcctgaacaagcaggccgatattggagatctggccaacaagctgaacgccatccgcagcaacaacaacaacaagcccgaggtgcacttcgtcaagtaccgcactcccgaggacgctgccaacgcccagcgcgccatccagggtcagtacgaccagctgggaggatccagccaggcccacaacggtggtgttgcccccgtcctgaacttcgcttccgccgctccagtgcgtcaggccgccgcccagagccccgacaactcctacctgccatcttcggtcttccgtcgcgtctaagtcgctcgtttcactcctttcggaatcgaaaacgccagcgatttttgactgatattaaatcgtagtttttgttgactaatgcttaaataaattcaattcttaaattttaaaaccaatttgacttgttgtagtgcatttgtaaaaaccaaaaaactttgcaggctgagttcattgggaacgaaacttcgcaagttcggatttatttgcagcgaaatattttcttgcaaactttgaaagcgcacataagtagaagcacttatatatttcttaggaactagtttatactttaaccatattcaaaatttaataccagtttatggctgctgagatcttgggttttgaacaagtatttttatttcttctttcttctttctttctgtttttattcgattatcgctgctataaataggtatacaatttattttgaaaactgttgcatacttatgttgctttcgtcaatttttaaaggaattaaccaaatgaaaatacaataatttacataaccaaattagataacttttattcgaaaacaacgtttaacaatcgattttctagtgacgcaggcgactcaggatgttggcgggtaggtagttgctctggggcacctgttgaggagtaacgcgtgctggagcagctccctgggatgcaaagttgatggcattagccacgccaccgttgatggactggctggagccgccgagttgatcgtactgcgattggattgcccgctgggcattggcagcatcctcaggtgtcctgtacttgacgaagtgcacctcgggcttcttgttggcattctggcgcacggcattgaatttctgggccagctcgttgatatcagtctgtttgtgcagcacatatatggcagtctgctgctgggccgcctgtttagccagggccaaaacggcattctcgtagccacggttctccggcgacttgatgaagatgacgcgaatgttcttcttgaccgaggcaagagccctctggagagcagccttat

SEQ ID NO: 11462 - DNA, 901 bp, DROSOPHILA
accaagtggtcaaagtcaaagaactaaattcaaaatgcgtgccttcattgttatgtgcttggtggcagtcgcctgcgccgataagctcggctacaactaccagcccgtgggacactccagctccggactgtcctttgctcctggaagtggcagcattggaggtggctccatcggaggaggcagcatcggaggaggcagcatcggaggcggcagcatcggaggcggcagcatcggaggcggcagcatcggaggatccattggtggtggttccattggagccagcatcggaagcggtgccggtctgggtggtctgagcagcattggtggtggaagcattggcagcatcggaagcattggtggtggtgacgccctcagtgcccccgtctcctacaacgcccctgccccaaccgccgagctggagaaggagttcttcaccttcaccgccaacgagcaggacttcgatgagccccagcagctggagcgtgtgtcctctgccctgaacaaggccctgcgcgttgtcttcatcaagggacccgagaaccgtggcctggagaacgccgccctggccctcgccaagcaggctgcccagcaggagaccgccatctatgtcctgaacaagcaggccgatattggagatctggccaacaagctgaacgccatccgcagcaacaacaacaacaagcccgaggtgcacttcgtcaagtaccgcactcccgaggacgctgccaacgcccagcgcgccatccagggtcagtacgaccagctgggaggatccagccaggcccacaacggtggtgttgcccccgtcctgaacttcgcttccgccgctccagtgcgtcaggccgccgcccagagccccgacaactcctacctgccatcttcggtcttccgtcgcgtctaa

SEQ ID NO: 11463 - protein, 288 aa, DROSOPHILA
MRAFIVMCLVAVACADKLGYNYQPVGHSSSGLSFAPGSGSIGGGSIGGGSIGGGSIGGGSIGGGSIGGGSIGGSIGGGSIGASIGSGAGLGGLSSIGGGSIGSIGSIGGGDALSAPVSYNAPAPTAELEKEFFTFTANEQDFDEPQQLERVSSALNKALRVVFIKGPENRGLENAALALAKQAAQQETAIYVLNKQADIGDLANKLNAIRSNNNNKPEVHFVKYRTPEDAANAQRAIQGQYDQLGGSSQAHNGGVAPVLNFASAAPVRQAAAQSPDNSYLPSSVFRRV

SEQ ID NO: 11464 - DNA, 2659 bp, DROSOPHILA
cccacccgctgtcagtctgctttttttaattttattttcgtcgttctctacttttagtcccagctaagccggaagggatcaaacggttttccccgcccgcttttgccagcacaaaaaaaatgaggcagaaataaggaaagaaataacatttcgacagctgccccactgcgaaaggtggggctactgggggtggcctttcctctgggtcaatgagcatcagaggttgactgcataatttatgaacataaatgggcgtgacaagggattaggggggcggagcgtggcggtctaccagcgaagaactgggggtcacctaatgacctggcgcactgctaaatgcatggaaattgtctgcgccagagcgaattacaattaattggaaatatggctaagcccggaattagccccgtctgcaggtgggagtatcctcttttccgcattttcacatagcatggtaaatcctcgccgaggcaattgaaaaacgagaaaaataattatgccagcattgacataaagattaagattcgccatgaatattgcgattaatagccggtagcttatcaacttttccaaccgtggtcattttgaattgagtcgaaacaggtatatacaggtatatactaatggaaatgtagtgcgaaatgtgagatgatagcaagatttgtaaagaaaataaagagcgttgtaaaagtgaagtagtaacgaattcttccgttatcccgtcgcatgcttaggcaggcgcattcgttaccagtttttgcctcgttacgaaatgtttttccttcgatcacgtactccgcgccaaagtgctcgaaacttcaaagcccgggcaaccaaccttacataagcaaatcacaacgattcgttgaagctagcacacacacacacatccctctttcggcctgttacaaaatttttaattttacaaaatcgtaaaataaatcgaggaaagttgaaaaattaaaagtgcccaatacacccagcataaccaatcgccacgatgacctgcacattggtactcctgattgccagcgttctgcacttccgaatgcgtggcagttgtctgctggacatagagcgtttcccggtaattcccggcaccatctacgccggccacattgcctactgcgccatcctatacttcctgcacgacctggagatcctgcccacgcgctatcgtagccggatgggctggctgaccaccttcctgatcgaactggtgttgggcgtggccttcatggaggtcctggccctgtggctctggtgcagcgtggagcacatcctccacctgtccacccagttcgtgctgcgccgctatctgggcgtctccaccgaagtctaccagcgctgggagtgggccatcatgggtggtctgatgaccacgctggcagccatgctctggataaacgccttcgaggccacggagacaactaaagcagagagggtgtcgaaggatgtcaaggacatccggatgaaggcggtcctgtgccagcgggaggagaaacagaagcaggatcacgatctggagaagattgagcagcctgctccagagccagaggagtcacaaaatcctgatgaagtgcagctgccggagaatcatctaaagctgctggccaccaccactgattgctaaccccttgtcgtcgcctcctgcaacttgggctgcagacaaaaagacttcgcaaagcggcctcaattagacgaacgatcatgccgggaccagaccagacgaagcaaatgtatttattccagccagatggactcgaaaggctctaaaagaccgtgccaaaggatactgggaatggggaacggggcgaaatgatggactgcagtaaaatgtctatgaaaattgacttggtgtcctggcattgagaggcagtcgggcggaaggagctgccagcgcctggatgcgcgtcaattgacaaattgtcggctcgactggcccattcgtcctggttttgccttgctccccgtgctaggcttgctctcaacttcccaaaaccaatacgaatgccaaaatgccaaaaatacaatcccgggcaattttagacccaaacagagcagaaagtcatcagaaatgttgtctaatttcatttcgtttcactcgaaggccaatttttggcttttatcattcatacaatttctggcaacgcgattttaacgctgctgcccgtattgcgtatacgcactgtggttcacggaattatggttttttttttttttttgctgtgtgcgtgccgcagagtgtgtgtgtgttcgctgtgtgtgtgtgtgtgtgtgtgtattcctaagcaaacaatggccgagcagagcttttgtttattcttccttcgctgttgcttatgttgcttatggccaccaacacaggcacactcatacaaagataccgagcactcatacacccaaagcgtgccgaattttggtgcgtgcctgtttttgagtccctcgttcccttgacggcctcccacttccacttccactcccgctcccagtgctatagccacttttcccattctgtgatcctgtgttgtgtatttatggaaacattgctccgaaaatattttaaggacgaccaactctcggatgaaagaaatccaagggatgctgtgggcggacagtgggcggactgtgggcggggtgcaggtgcggtggaaccttt

SEQ ID NO: 11465 - DNA, 659 bp, DROSOPHILA
atgacctgcacattggtactcctgattgccagcgttctgcacttccgaatgcgtggcagttgtctgctggacatagagcgtttcccggtaattcccggcaccatctacgccggccacattgcctactgcgccatcctatacttcctgcacgacctggagatcctgcccacgcgctatcgtagccggatgggctggctgaccaccttcctgatcgaactggtgttgggcgtggccttcatggaggtcctggccctgtggctctggtgcagcgtggagcacatcctccacctgtccacccagttcgtgctgcgccgctatctgggcgtctccaccgaagtctaccagcgctgggagtgggccatcatgggtggtctgatgaccacgctggcagccatgctctggataaacgccttcgaggccacggagacaactaaagcagagagggtgtcgaaggatgtcaaggacatccggatgaaggcggtcctgtgccagcgggaggagaaacagaagcaggatcacgatctggagaagattgagcagcctgctccagagccagaggagtcacaaaatcctgatgaagtgcagctgccggagaatcatctaaagctgctggccaccaccactgattgctaaccccttgtcgtcgcctcctgcaactt

SEQ ID NO: 11466 - protein, 210 aa, DROSOPHILA
MTCTLVLLIASVLHFRMRGSCLLDIERFPVIPGTIYAGHIAYCAILYFLHDLEILPTRYRSRMGWLTTFLIELVLGVAFMEVLALWLWCSVEHILHLSTQFVLRRYLGVSTEVYQRWEWAIMGGLMTTLAAMLWINAFEATETTKAERVSKDVKDIRMKAVLCQREEKQKQDHDLEKIEQPAPEPEESQNPDEVQLPENHLKLLATTTDC

SEQ ID NO: 11467 - DNA, 3787 bp, DROSOPHILA
gtacatagtggcagcgagataaccctttcgtttccaatgcattctagcgcacctgctggtggaacgaggtgtgtaaggaggagttccagagcctcttccgctgcaagtgcccccagttctcctactgccggtaagtttccgtttccggccgagtgcccggaatgcaatgcgacgggggaaaccgaaaccgaattagatttgcttcccccgattcggttttatgcaattactttcgcatttcccagctcgccgggacgctactacaatgcctactgctcgatgacggataccggttatatttggacccagccgaactgggattggggggcgtaggatgaagccgctccggactttgcccccgccacgccccctcaccaacaacacagctcgctgtgacgtcaaacacactgactgccgaccaaacgcctccgcaagccaaacgaaaattattccaggaggatacccacttggagcctcctgctcagcctccaaaaatactctagtggagatgggctagtctccctcgttgttatcgcacctcgcgctgactaaaaagtaccaagtgtcgcgttacttttcgcacgcactgtttccgcgctgctgttggaaaatcaatataggctttccaattcacgacggcttgtggcagggccacagtgaaaccgaaacgactagttctgcacgtttttaagttacattaaaagaaaccataagatgttaaatttaataatatttatatttatacgttcctagcacttttttaataaatttattcgagactagagtgcaacctttttgaactgtcttgtaagataaagaaatgatctcattggaatgaattttccactggactgactatgttcgatgatttgccccactgtgcaggaccaaggcgcaggcgtcgcagtgaaagcgaaaatcgaacagcgtgggagtgcgtgtgcgagtgtgtgtgtgtgtgtgtgtctggagcagagtcagttaatctattgccagctcgacatatagacaccgccaacagatgttggcagtgaggaaaatcgagtgatagaagccagaaccgagtcgccgttgttttgggtgaagaaaatcgcaggacttccagaaaatgtcgcgtctcctgttcgtggcgctgctagccataagcttgggatatgtggcgtccagcagcagcaaccacctgccagcgggcttggccatggacctgggaccaggtgtcaacctcaacgagcgcttcttcgaccaggtgcgggcgctcatcaagcggaggctccaggagaaggggctcgcgaagccggaacagccagagctggcaatgccactgaccgacgatgatgcagtggccctgcagaaccaacgcagctacgacaacgtgccacttccggcggccagtgtgccgactcccgtgctcgtggagaactggcccaccgagcagcacagctttggccaggtcaccgccgtggccgtggatccgcagggtagtccggtggttttccatcgcgccgagcgctactgggatgtaaagtaggtcaacagctggcgctgcctggtaacaagtgtctattccatatgtacacaggcagcagaaaccaatcactttgatcctttgtttttattgcaaactgaaaggagactaatagcatatagtatggatcaggtttttagtacatagtgtacaggggaatagcacttacatatatatagtacatatatataagctagttaccattgccaatacctttgcagcacattcaacgagagcaatatatactaccttattgagtacgggcccatcaaggagaacaccatctacgtgctggacgcaaagacgggcgccatcaagtcgggttggggatcgaacatgttctacatgccgcatggcctgaccatcgacttgcacgggaattactggatcacggatgtggccatgcaccaggctttcaaggcaggtgcactgattatgtcaataagcaatcctttaacgtaatccccattgtatcctttagttcaagcccttcagcaacaagcctctgctgaccattggcaagcgcttcaggccaggatcatccgtcaagcatctgtgcaagcccacatccattgcagtggcgaccaccggagaggtaagacatgcatacctgttgatctcattgactttcgaacttactataatcccgcaccgcagttcttcatcgccgatggctactgcaacagccgcatacttaagttcaatgccgctggcaagctgctacgaacgattccccagccacccggtgcgtatacttaatattttcgagatgtgtcgtgtttcctaacgatctgctctgcagaattcctctctttgcaggtgccacacgccatcaccttgctggaacacctcgatctactgtgcatcgccgacagggagaacatgagggtggtctgtcccaagtaagctaaactaaactagccataactgcagaatataaatggttaatcgtttacagagctggcttgatatcctcccacggtgagggtgaaccggcggccaccatccaggaaccggacctgggtcgcgtcttcggagtggccagcttcggggacatagtgttcgccgttaatggacccacatccatgctgccggtgcggggattcaccatcgatccgcgctcggagacgatcatcgggcactggggcgagttcaagaatccgcactccatggcggtcagtgtcaacggatcggcgctgtatgtgaccgagatcggaaccaatcaccagacgaaccgagtgtggaagtatgtgctggcctgagcctaagcctaagccaaacccgaatcccgaatccagaaggacacgacttgcactgcgctcctgcatatccttagacccatagactcatcccaactagttatcagcagaaacagaaagagaaccacaatcagagccgaatcaaatacagattatagcgatcctaagcctaagcagagcccacacaccaagtacagtttaacgtgaccagttgtcagatcaatagagaatagtcagtgcttaagtaatgtacaagttaagtatgtaaattgcttggaaacaataccacaacaaacataacctcagactcttatgttttgcactttaatgagcaaacaaaaacgaaatgaaaacgaaattacaaagcagcttaaatagtacatatacttaaatgtaatagttacgcgtaggcactaactaggcacgaatgtgaggatgtggggacgcgagcatggataaccgatttcgcagataaccgggggcaaccagcgcatataacatacttgtgtatcatattgtaacctatatcaaatatataatcgtatctgtatcttatcaacttatcgtagcccatgtaaattatgtacgtaataaactgttgttgttgtgacgtgaacgccaaaagtgagcaggactctggggactcagatgcttcacatggttcagtttgaatgactatatcccgctaagggaagggaatgttgactctcatacatatgatacatagggctatgaaacggaagtggtaaatctatacctttcttgctaatttcagacttaaattgaaaggagcgacacgtttgcatggcaaacaatatacaattagtggaaagatctaagcacaatttaaatataaccaaatataaatagaaaactttaacacatataaaaataaaaattgtttggcaatgcacgagctgtcaagaggagcccagccagtgcctggcgaatgcgatagcctcatttaggtggattagccattccgagagctccgcttgcgtat

SEQ ID NO: 11468 - DNA, 1332 bp, DROSOPHILA
acatatagacaccgccaacagatgttggcagtgaggaaaatcgagtgatagaagccagaaccgagtcgccgttgttttgggtgaagaaaatcgcaggacttccagaaaatgtcgcgtctcctgttcgtggcgctgctagccataagcttgggatatgtggcgtccagcagcagcaaccacctgccagcgggcttggccatggacctgggaccaggtgtcaacctcaacgagcgcttcttcgaccaggtgcgggcgctcatcaagcggaggctccaggagaaggggctcgcgaagccggaacagccagagctggcaatgccactgaccgacgatgatgcagtggccctgcagaaccaacgcagctacgacaacgtgccacttccggcggccagtgtgccgactcccgtgctcgtggagaactggcccaccgagcagcacagctttggccaggtcaccgccgtggccgtggatccgcagggtagtccggtggttttccatcgcgccgagcgctactgggatgtaaacacattcaacgagagcaatatatactaccttattgagtacgggcccatcaaggagaacaccatctacgtgctggacgcaaagacgggcgccatcaagtcgggttggggatcgaacatgttctacatgccgcatggcctgaccatcgacttgcacgggaattactggatcacggatgtggccatgcaccaggctttcaaggcaggtgcactgattatcaacaagcctctgctgaccattggcaagcgcttcaggccaggatcatccgtcaagcatctgtgcaagcccacatccattgcagtggcgaccaccggagagttcttcatcgccgatggctactgcaacagccgcatacttaagttcaatgccgctggcaagctgctacgaacgattccccagccacccgaattcctctctttgcaggtgccacacgccatcaccttgctggaacacctcgatctactgtgcatcgccgacagggagaacatgagggtggtctgtcccaaagctggcttgatatcctcccacggtgagggtgaaccggcggccaccatccaggaaccggacctgggtcgcgtcttcggagtggccagcttcggggacatagtgttcgccgttaatggacccacatccatgctgccggtgcggggattcaccatcgatccgcgctcggagacgatcatcgggcactggggcgagttcaagaatccgcactccatggcggtcagtgtcaacggatcggcgctgtatgtgaccgagatcggaaccaatcaccagacgaaccgagtgtggaagtatgtgctggcctga

SEQ ID NO: 11469 - protein, 377 aa, DROSOPHILA
MDLGPGVNLNERFFDQVRALIKRRLQEKGLAKPEQPELAMPLTDDDAVALQNQRSYDNVPLPAASVPTPVLVENWPTEQHSFGQVTAVAVDPQGSPVVFHRAERYWDVNTFNESNIYYLIEYGPIKENTIYVLDAKTGAIKSGWGSNMFYMPHGLTIDLHGNYWITDVAMHQAFKAGALIINKPLLTIGKRFRPGSSVKHLCKPTSIAVATTGEFFIADGYCNSRILKFNAAGKLLRTIPQPPEFLSLQVPHAITLLEHLDLLCIADRENMRVVCPKAGLISSHGEGEPAATIQEPDLGRVFGVASFGDIVFAVNGPTSMLPVRGFTIDPRSETIIGHWGEFKNPHSMAVSVNGSALYVTEIGTNHQTNRVWKYVLA

SEQ ID NO: 11470 - DNA, 2924 bp, DROSOPHILA
agagattaaaatgttaaatttataatataattttatgattcgtcacactgctgctgcggttgcaaatttttgcatggctttgtttttactggctctgcggaaagcggcatgcaaattatgagctaaccagaattggccagtgaggaggttcatagtccgactcggattgccaaatcagatggcgccaagtaatttattaagagaccaattatcgaattatctgatttggcgctgacaaggcgcagtggtgcagtttttaattggcaaccggcctaggcgatcagaaaccatgtatatatattaagtaaagatggctgctatatttagcgatgagttcgattcttcacttccggcggatggaaggtcgcctccacccgcaacattagcataaagcagctaaacacagcgaccaagacgacaagacaaagccgctgaataaggcaataataatttggcgaatcgttaaaatatttatttttggcagcggtaacgcgactaggcgcgcctcatttgcatgtgaaacggcctgtcaaacgttttgtttgctctccggccgatttaggtgacacttctcatcccgggcgaactgggaatgggtttggatttgtgatacacatgtgatacatgagtaacaaggcatccatctaaatagccccaaatgaggtttacgatgctcttgatgctctgtccgcggctttttatagccagattttattgatttcaacgataaagctacatgaaaataccaaaatggcaaggttggcccacaacactggccaaaagcggcgccgaagaatacgcgaattattgattaaggcagcatattgaatttaatatgaattttatggcgccagctccggctcatacatggcccgtacctcttccttctgagtttctacgttgacctcatgatgcagccacccgcttcgcttgcatattttagcggggtggtaccggtactgcctgatctagttggctaagaccgtaattagaccgctttatgcagagcgttttgcatagcagtggctttcatctgcataaaagcgaaagaaccatctcacaccatcatcaaatcccacaaccacctcacccgctcaacatgcgtcagttctccgtagttctttgcctgtgcctcgccgttttggccagagccgataaactcggctacaattaccaaccggtggcccactctccctccggattgagcttccagccatctggatcggccagtagcgatgcacccgctttcgcgcctgcacccagtgaatcctttggccccggtccctcatccattgctgatgccctggaaggatctcaatccgctgctgcccccaactacgctgctcctcaggcccaactcgaaaaggagttcttcacttacaccgccgacgagggtgacttctacgacccagctgcctccgaccgtgttgccaacgccgtgaacaagggactccgcgtggtcttcatcaagggacccgagaaccgcggtctggaggatgccgctctggctctggccaagcaggctgcccagcaggagaccgccatctatgtcctgaacaagcaggctgacattggagatctggccaacaagctgaactccatccgcaacaacaacaacaacaagcccgaggtgcacttcgtcaagtaccgcactcccgaggatgctgccaacgcccagagtgcaattcagggtcagtacgatcagttgggaggatcttcgcaagctcaagatggtggagtggcatccaccctgaacttcgcttcccagcccgctcctgttcaggctgccagcagccaagcgcccgcccagttcctgcccgcctcccagcccgaggctactgcacccatctcctcgtatgtgccacctgccaccccaggtagctcctacttgcccgccaacatcctgcgccgcctgcgtttctaagttcctggcatttcctttgttattgttgagattataatacgaaataaatttgtttaataatataaatttttaagttgttgttactctttttgagagctattgatataaatggtataatcagctattttgaggattaaaaatacgtaataagatagtctggatgctcctgaaattcccgacattcttgtgctattgtttagatttgaagacctaataaaattgttttaaaatgtaaattattaggttggcttgcggatcttcgcggccaacattcctaggcatattatcagccagaattaaatttccgaggcacaacattttcgcactcggcggctggcaaacaagttcgacttgcgttgaattatgagtccgtccggctaagctgtttgtgaaaattgcaaatgagcggaaacctaagatgttttctctggcatcgctttgaataatctgcttcgtgttaatctgtataatctggtgtataacatatggcttatcggctacttggctgcccatgcctacctacgcacttcgcggttcgaaattgagatggcactcggtttgacaaattgcacgagacatcgggcgacagacgacaatggtcaaatgccgaaaatccattggggcgggcaatttaaaattattaagctgggaaattagcccaaaagcggagggccagagtcttactttcaatcatccccagctcgatttgcataacaaaatgggcgaacaaaagaatgcggctactgcatagtcagacaatttggagcttggagccgctaccgcccagccctttgtcgcctgatttacataaaaattttgtttttccgtaagctgcaagttcatcaaaatttaatcaacgccgccgccaacgccacagcttctgcttttgctttagcttctgccaataggtctagaccaaatcgagcttgggccaaagccgccaagtggaaaaagaaaaacagaaaaacaggttaggctcgcagacaatgcgaaccttatc

SEQ ID NO: 11471 - DNA, 924 bp, DROSOPHILA
atgcagagcgttttgcatagcagtggctttcatctgcataaaagcgaaagaaccatctcacaccatcatcaaatcccacaaccacctcacccgctcaacatgcgtcagttctccgtagttctttgcctgtgcctcgccgttttggccagagccgataaactcggctacaattaccaaccggtggcccactctccctccggattgagcttccagccatctggatcggccagtagcgatgcacccgctttcgcgcctgcacccagtgaatcctttggccccggtccctcatccattgctgatgccctggaaggatctcaatccgctgctgcccccaactacgctgctcctcaggcccaactcgaaaaggagttcttcacttacaccgccgacgagggtgacttctacgacccagctgcctccgaccgtgttgccaacgccgtgaacaagggactccgcgtggtcttcatcaagggacccgagaaccgcggtctggaggatgccgctctggctctggccaagcaggctgcccagcaggagaccgccatctatgtcctgaacaagcaggctgacattggagatctggccaacaagctgaactccatccgcaacaacaacaacaacaagcccgaggtgcacttcgtcaagtaccgcactcccgaggatgctgccaacgcccagagtgcaattcagggtcagtacgatcagttgggaggatcttcgcaagctcaagatggtggagtggcatccaccctgaacttcgcttcccagcccgctcctgttcaggctgccagcagccaagcgcccgcccagttcctgcccgcctcccagcccgaggctactgcacccatctcctcgtatgtgccacctgccaccccaggtagctcctacttgcccgccaacatcctgcgccgcctgcgtttctaa

SEQ ID NO: 11472 - protein, 307 aa, DROSOPHILA
MQSVLHSSGFHLHKSERTISHHHQIPQPPHPLNMRQFSVVLCLCLAVLARADKLGYNYQPVAHSPSGLSFQPSGSASSDAPAFAPAPSESFGPGPSSIADALEGSQSAAAPNYAAPQAQLEKEFFTYTADEGDFYDPAASDRVANAVNKGLRVVFIKGPENRGLEDAALALAKQAAQQETAIYVLNKQADIGDLANKLNSIRNNNNNKPEVHFVKYRTPEDAANAQSAIQGQYDQLGGSSQAQDGGVASTLNFASQPAPVQAASSQAPAQFLPASQPEATAPISSYVPPATPGSSYLPANILRRLRF

SEQ ID NO: 11473 - DNA, 13295 bp, DROSOPHILA
ggctaaaatgttggcaaaattgagttggcaggaggtcggtatgcgagtgatagagggctgcaatttgtgctccagtttcgggggattctttgtaaaattaaacactccacaatacaatctattttcattggaaacttcatcacttctagggcttaaggccaacaaatagctgtttaagacgagcttacttatgtatgaataaaaatatgaaatctaaatattattctagacttatagtaatatgaaacaatgcatttgtaagtcgcttgattccatgataaggagtaaaaacaattttagcccatatttttattacccttgaccaacagatttataaaaatgtaatgcacagctgatacgcttaaattagatttatttctatggttataaattggcataactcataatttctttcataaaagaacccttttttttgacttttacttaaaatataggggcatttgttgctggtacataaagtactggccactgaccaattagaaggagcacagaagtgcaaccccaactgaatgagtgaccacttagaaaaaagaccgagtggcacagtggaccggcacttgatgaaattaagataaactcaaacaatagccactccactcagtttcaatcgagttgggattactcatctagagggaaagcactcaatagccaactgataagaacacgtgttgctccagccgccgtcccgctcgcaccactccagagaggctccacaagttgggagagcgagaggctcgttgccgttgagcttggctcgggagagagcagcgactcgtcgtggggtccaattagattaccggcaacaagcatgcgctccctttctgcccaacgcacgctcaactgaaaactgttccaaaggctttggcgctggcgcttctctcttctattctcgccgagtgtcttttgggccctccattcgccagtcgacttcgacttggactttcggctcagttgcttttcagtctctttccggtttgcgtctcgtcgtctcgcggaaactttggcgcacacgcagttccagacaaatacaatttagaattaaataatatttaaaaacacaagtgttactaaaagtttcctaaaaaacgattgttaagaaatgccgatggctttgtgaaaatcagtgaagataacaatccttaagctaaagtctatatacatagatctcctatagtgcagtgagaaattggaattcaatgtaagttctagaagctaatgctcaagaaagcaatacaaagtacataaattttaaagatatatcatttttaatacaactaatgtgcaaggaagtagtaaagtcaaggaattctttttacattcttgagtatgtagagatatgttcaaaaaatgctttcaccatcctagaaaaataagtcggattttgccaattccgaggtatggtaacttctaacggagcctatgaggttatttatatgcctccaaaataataatctatgtaagccaacgaaagtgagttctgcctatctagcagaccatccgcttccagattcaaattctcagttttagaaggaacactcacgaaatacaaatgccttcttatctcgcatcgcttgaagatcgttaatatttatggaatatacatagaggatgggcatccgagctgcgagaagctgataagccgacgacgctgattattcagtaatatgcatcagagatctatattgtgttgctccattcagttagcagcgttcgcaggcggcttatcttcgattttcccgacgggttttccccgcctatcgatcaccattcgaacgttccccgttcgaaattaataacttttgtgagaacaactggcagcgacaacgagcaggcgcgcacagtgaaatcatgttcgagtgattaaattaattaatgatatagacacactgcgcaatagtgtccacgcaatcgcagaaggagttagagatcttcgctgtgcagatccacagacttgtcgatcctgcagcgaccaacgccacatgatgcggatcggtggatagctggatcgcctggataccgtggccagaaccaagacaagaccatctgaagttgcagaggcgagcagatcgttgtcttaacttgtcgtacacgatgtcttatacgtgtagcaacaatttatttcaccggccagtggatcgatcgccagtgcaatcgatgatcgtgggctctgggaaaaggagtctgaggatccggctatccctggcgatcaatcaagcccggctagatgatcaatattagcaggtctaaaaataattgtagactggccatctctgtccatataagattggagaagaaaaagaggcgaagaacaagtaactaaatgggttcgtttagttttcaactgatagtcggctacactgttgtgtttgtgtgttatttaataggcaggcacataatatagctaaataaaaatagattacatttttagttgagtcaggaaaaaaaaaagaaacttctctagatgcccgtgctttcattcgctgataggaagtacgtaaacaaatgattaatttaatttaatcattttgcattatgccgatactgacagatttaaaagttaatgcagttaaattaactcataataatacaaatataacaaagaaaatattgcatttattttttacaagattgtagcttacatgtgttgaatatataaaaacaccttatatatataaaaaaaaacattgataatacaacggtggacaacatatgtctctatacgaagcatgagtcagatcatctcagtaaacttcagtcagatgtcgggagatctaatttggcttgccttttaggtttgttaagactttacgacttgtgtaattagtttttccctcgaagatcttttatggcgaccgccagactccgagtaatatgtacgtatatagatatggatgtgctaacgccccaaatagccaactctctcccagttacattgggtgttccaaaaaaaaaaaaaagggaaaaaacacaaaactaagatgccattaaaaattggagtaactgtttttccaactaatatctgtgtccaaagcgctaattgaaggcaacttcacaacttcataggcgactctcccagcagccagctcctccgggtcaagggtcaaagttctttcagtttgtgcacgtgtgtgtgtgtgtgtatttgtgtgatttccttgagacaatgggggccgaaaaagagctcgtcgcctgactgactaacgacaagtgcccgtccagtgtacacccctttttcgagtaagctgtcaaagacgggcctgttggccaaaagcttgtttacagccttcgatgccgatgccgatgctgaattaattaaactaactccgagctggactgaaggcatgggtaacccccggtggcagccaggtgagtgcagctcaatttgtgctcttcgaaattggtcagtgtaacccgaggacaatgacttggaccgcctgcgactcccttttatggccccaaacttgtctgctcgtcagaggtccttgcaagaaaaggacataattgctgcaatagattctcgacagaagttgaaaggttgcatcagctgaggatgtccttacagggactagaaaacggcaatgaaatttacacatggttatagaaaatcaaaccatttaccttcggagtatttgttttctgcttaaacttataattaccaatttcgtatacatatatgtatgttacattgtggtgcttctgagtcctttcactaatctaactcagccttaaccatctcattggccaacattttaatttcctcctgtgactttgtgagaggaggaggggtcacagattttctaaagcttcggcaacaacatcatccacctcctcatctattttgtgtgcgatggtctattgattggaatattcattgaatagtttctaagctgatttatatgctattgtgtgtgtgtgtgtgtgtgtgctgtcgatttaataaatatttaatttcaactccggccccgtctgctgatggctcctaaatccacacataaaagattcaatcagcggaaggagcacggtccagttggaggccaaagagccgacgatgatgatgttgttatagccggtgtgcctgaccgcctgccagcctgcattcacgtattaataatgccgggcagcgaataatccgcagagctcccgagacatcgtaatttgcaaaatgcacaatcgcttcctataaatcaaaccaaggagacacaccgtccagcagcctcgacgagaatctattcagatctcatcgctcagagctgaaatattcatgcatatatatatttcacctggccaaatcacaaaggtttctttcgaaagcctttcaaaacgaaatcaagccgaatagctgccacgtcgtcaaccgctatcaatctcaggtgaaatggagctgcgtccgccggccattagatgctcccagctacaacatcccggccagcaatggtccattctgttagcaggaaaccaggcagagccatccaatctcccacaattccaaccagcttcgcagtcatcgcagaccgagttgctccgctcaaaggaaagcgcccgtcgcaatagatcgcacattgcagatagaggcgtgcctgccactccactccacaaaatcgagaagtgacaaatctcgtggcgaaatctatataccctagaaatgaatggaattaaatgtttgtatatggataatagttcagtcaccatacgtttggtttcatcattgatttaaaagaaaatcttcaaggaatatatatatgatatgataataggatatgatgttgtaatgagttgatccttaatattcaaaagtacgcttttggatggagaatatattctggtaattcctgtgactttccaaattgatagtttaagatttggcaaactacaaattgacgaaaatgttccaagaagatccctaaagtctccagtgataaccgtgataacatgccacccgtttcaaagggtatacaaaaggcaaagtcaaacaatgagctgcaatttctggccacaaaggatgaacgcatcgcgtacgccggttgggggaagaaaataaaataaaggaggcaaagaagtggcagggaggggaagaaagaagacgaagagaaaggagttggggacaagagcaagagaagcgttgggatagatggagtcgcggagcagcaagagtcgcacattcggcgagcgccttcagcagttgttataaattatagtgccgcatgcggaatgaatgcccaagatcaaaccggtggtgcacacatactatatagccatgcatcaccgtaccggtgcggtgagggagggagggtcgattgggcggttgggcggctataaaaacaaacctccgcccccgcacgtagtcatttgtggttgctgttgttgttgttgttactgctgttgcatgccgcctgttgcatcaaaatatttagcagtgtaccgctatgaaatttggtattccaagacgtaccaacatgccgcctgagtggtgcagagcactgtaaaaaaaatcaggcaaacatccttttaaaaaatattaaattaatgcagcaaatacataggtctgtaaggttttaccttcttactccatatttttgatccaacttaaatttgtgagaattaagaaaaattcattgctcttttctagcttcgtgaattaaaatgattactttaatctacatttaaaattcagcatttaaaatataagattcaaaatactcgtacatttttttgtgtgtgtttttggcagtggtgctgcagttgggttgccattaccattaccacgttgtaggcatgttgtaaatgccagccgactgctgtggacttttgtcgttttttgctgctgcagttgttttgtatatatgtatgtcggtgtgtgtgctttttggccataaaaacagaaatgagcccacggaaaacatgtccaattgcgctagcaaatattcaacgctggcggcgcatcagacaagaccagatgggcaatccttgatcagaatttgcgggaattcgagactactaggagatattttggcgcaaagacgccttaaaattagctaaaaattatatgaaaatattaattataatcttaaagatactcagatactgcgcagataaatcatgatcgcttgcaaaatgaaattttccgatcacaaacgaattttgttgaaattacagattcgcggctgctcaataataatccataacacatatcaacagtgcggcgattttccgagaatttcgcagctaattttttagtacgcgtagcgttgagcgcagtccataaaagccaaacgagtttaacttagttagagtaagtcagactttggtttcagctaatgcaaaccgacggcgggttttgtttgacgagtgcaactgcggaggagaggacgacaaacaaagtgccgcggttgtcaagcagcaacagcaacaatatcacagagacaagaaggaatgcttcagtgcagtggctcgactattagatacccattactcgcatttcttcaccttcagatgcagaagatattctacttacggacaggacaaacggacagattaacggacagacggacatggcgttctcgatcagccatatatgaagttcaaaaggatctgtctgccttcatagcccagcatgcccagcatactactctgcgagtagggggtatccaaaatgtaaatacaaaaaaataaaaccgaagacaacgactgcgtttggtactgtgtgctatgctaattactggacatgacggcagcgcattgctttcggaatcgacggaccccaaccacatcgaaatccatgtgaacaaaaggcgcaagcgtttacgcacactccgctccgcagtcgcatttgcatttgcataagcagccataaaaacaaaataaggaaaaacaaaccaactggctgccaaggcattcgctaaaaaacaaaaaaataaaaaaaatcaaatgtggaggcagcggcaacttagcagatactacacgacagcaacaacggcagacgatcccaacttagtaatgggacaacggacttactcagaattcgcctttcttgggccgcactgttgtgtgaaaatgaatttccttttcggccaagtcgagggaattgtgcaatgcaaatgccgccaaataggccatttgtcccgagcgactaaataacttactaaattggatctttgtcgatgggttcttaactaatatacaactggaagaggccaccattacttgtttattacaggttttcttaaaacttcaaagtctacgaagcaaataaacccttacaaagataaaagatactttcaagaatcatttacatactttggttagatcaaaattaaccatgtatggtttagtttcttacctatttgaaggcaatattatcacacatttccaataacataaccaattcaattccattctattctatcctcactcgtttgaacgtatatattgccattcaactgtcgaatgattgacagccataggtttcagttatttttttattgcatttctaagtgaatgaggcgatgacagtacgcgtataatgaacctatcatcattaatcattatctggatgaaatagaatcataaaattgaattactgattcaagccacgacggggagcacgacgatcggtaattctaattagagctattcaggaaatcttcgactatagactttggatttttgtcttagccaaccgtacatgtatttccatcttccacagcgattcagagtcgctggtttagaccaaagttggcaacaaaaaaaaaaacagaaacgacacgaaaaacatggccagaaatgtcaacttgaattcggtctattccttcgcttgttgttatttcttttggcggattttggcatcccagaaagttgtaaccgccagggaggaacacgaagcccagcttccactcaatgttaactttcgatttcctcctctttttttttgctttgcttttctttttccatgggtgaccatttcttgggggaacccagctcagctcagctcagctcggaaggtagccgggctcacgatatttgcgtgccaaagcaaaattgtgtggaagtcaattggcagtcacgtttggccaaaaccattggacctgggtcttggaccacggccaaaacaatccactgcagatgggccaaattaaattgtcagtgcggcattaaatgccagattattggggatcaacacaagtggggggcagaatcagctccactgtctgtatagagttatctttcgattaacaaacgattgaaattaattttacaatatttccgcatgctggccatgaaatgtgtggaaaacaatgacaattgcaacagcatcagcaactgcagcagcatcagcaactgcagcagcagcagcaacaaaaggaaaatcacgaacccggaagaaggccttcagatttggccagatccaagtggctttgctttgatttgattcctccaactcctccgctcgctctgtcacatcacatgttgctgttggcttaagtttcccgccagcaatttcttcattttgcccggaattttggccaggcggagaaccgaaccggttgtgttgcagcttgtttttcttagctgaaatttgttcgcgctctcgttgacaattgtgttgtgtaaaaaaaaaaagaagaaaaagggctgtctaaaagaatttcaagtgtgcggccagcttgttcagacacgaggacagatgagccggatggctgaggctgggtgtaaattacttggccaaaaccaagaagcaagagccaagaaccaagaacccaaaaactatgggccaagaagaaaagtagcagttgtagctgttgctgctgtcagttgcagttgcagttgcagttgctgccgccgccgttgttgcactcgtcaaaattgcaatcaatcatgtggccaagaatgcccggccacagtagacagacaaatggaacctgttttctggccgggctatcagtgttaaatctacaagatcattttgccagctcggccacaaacccataatttgtgattgttataagccagaacagaaccgtaacgagttctacggaccagtccgtgctcctaatagactcgtcgccggcctaatgaattgaatcgtttctgatggccttgtttgttgcgttccttttctaccacatttttgttcgtcttcttagccatcatacccgttcgactgccatcgatcagcacgggattgggggactcctctttgactagctgagtgggatttcttgggattgtgcttggctggacggcctatcaggtggagggaatctctggcccaggcacgaactgactggcaagaccgcccgctcagccagagtcaacagaacttttgggtctttgattaggaatcggttttggtggaaaactcggtcatcctgcctcacctacatagatcggctgcattttgcggttccttttcctgcttggttcgattgcctggctggttggattgcacaaaagaaaattctacttccattgaaatatgttaaataaaaggacttatactacttatattactatgaagttgatcagttttgtgtgcagatacaatatacaatacaatatcgtttcgatacacttgtgctatatgcaatatcttcacaaaatactagagtattttacaactattatttctacacctcttttctctcactgtgaccatccatcctttggctacgagagtggagcgagcctatcgccaactgtcatcattttcaaattatttctcgttgaatatctaatcaagattcatgcatgatcgcggctaaattgcttccaggcaagaacagaccaggccggactcggagatggagaccagcataacaattgctatcctagctgggttcctgggccatccagcatctagcatccagcttcagaatccaagtcaagcatccagagcgggctcttcacgttttgctgtttgatttttccacaacgttttccattgttttccgccccgaacgaagttaatagtgttgttcctggttggggattctttggggctttgtttgctcttttggtttattattttgtgttcgtttaaggtttttttttgtttttttttgggacaagcatacaacgatttttgcatcgggaattagctcagacaattgttttttgagacattttttttttgcgctacccatgtaatcatttatgtttatgagcagccccccttacgatgtgttgttactttgctcgtattcgcatatgcacttatacttgaactttaactcgtctttatttcacttaattgaaactagacagcatccgtaggtaaataattcaattagccgacgggcggtgactcaagtcgagttgcaattgcactcagcgacagggtgatgttgagcattattaaattctacatattaaatttgttgttcatttgatggctaattcgctgccgcagcgtccacttaatgtttattaaactttcgtgtgacatctgtgacttggggtgttcgcctcaattggccgtcatatgggcagtggttaacactccgtaaattgatgacccccccggtggccttctaattgtttcattagatttccacgctggagagacgcacgagccggccaaaatgggaatcgatccccttctgggccacgcctctgcgaaccaatttcagggtgtccattgttggttaaccggtgagcgaatgggaatcgaatcagccgcaggcacccaacttttgacatttttattagcacttctcgttcgagagctggttaaatttacgagtcagtcgtggcaggatcgaggtgtaaacatatttctcagctccggctgcatgaaattattatcaaacatgcaaatctgtggcggttgcgggcatcgtaaattgatttttatgctgctgcttctgttgaagtttgagttcccaggggggggaaaatatacatacatatatcccatattcattggattctaagtcattttgtgttacctctaccgcttctagtttgcctgctactcatcttgctcgagagccaaaatccaagcaattgaaagcgaaacccttgcgagagggtcaaggaaggatacaacagacgaacagacagccaggatggtgctcgtgctgaatggtgtgctgcaggatgactgccccatggacaccaacagcctgttcctgcagcatcccgtctacagagactacgcccagcagctgcactccattcaggccaagtcggtgggtccggtgggtctgctctacgtgggtcagcgggagatggccgcctctgccccgcacgacaagcacgtcaacatcatcggtgccgacgatgccaccacctgtattatcgttgtggtccggcactccggtaagcatacccaatatcctttgccccataaataagcgtcgtttggctcattaacccgtactaataatgtttaccaacaattcacgacaggatctggtgctgtggccctggcgcacttcgatggcagcggcgtggacgaggctgtgtgcaccatggtgtcgcgggttcaggagctggccgtcggctatccggagggtcgcatcgagttgcagttgattggtggctatcgcgatgccaagggatacggcgaggacgtattcttcagcattatgcgtgagttcatttctaagctgcgtgttttagttcttatatgaatttcatttatcatttttctcagaatcattccacaatcacctacttgaaatcgatctgacgcaggcttgcgtgggcgagctaaataccatgatgcgcggcgagatcaactgccccatcatctatggagtgggcgtgaacatcaagactggtgagatctttccggcctcctttccagaccgaggacccgaccgggagctacgcgatgctcgcatcttcatgggcgcgcagtcggtaagtaaaggccaaaatttcccaatgagttaacctgctaatcacttggctgtgcttcataggttctggatatatacgactcctcgctgggcatgctacgcattggaccctttaactacgatcctttgcgcggcgctgatctgtggctatcacaaacggatgagtttctgttgcagcacctgtcctccagtccagacgtggagccgcctcactttgcgcctcaggtatgcatatactatatactatatgtttctgtgcagacacataagtttttttttaattgcagacgcgtgccaccattaggtttatacaggagaatcagttccccgccgtcaccgttttcagggacaatcggccgcgctacttccggcgggatgacgccacgggcttctgggtgctggttagatattaaagcttattttagtgtttagttgttacgcagttcgaaaatgtcgcagatgtgttaattgactggtgcatgtgttaattgtcgctgtccaccgcaaatgcttctgcttgccttttgtttaagttttgatcgttaagttgattgtattcggctgtaattgtcattgatttcctgattaatttgtatctgctgtaattatcggccgattagcaatagcaattgatgaatgcgacatacataatctctcttcaattagatacaagattgagttccgacgctggagacggttgcttgggacgagccttagaaatggatctgaactgggaacgtaaaagcgatatataacgataaataattattacaattctatgtgcaaatgtgcatgtaaatatttatgtgaaccccattaaagaacctattactatttaaaagagattcttagctaaatatatatgcgcatattccgtgtaaacgaaacgaaacaatttcgaatgcaatcattttagctgtaactataaactgtaatcaaaaatgtaagaagaaaaatatataaaaatggcttggctatacatacacacacacacagagaaataattgagttttcatttatgccatatattttttcgtggtattataaatttttaagactatgtgatgatttctgctatactaattgttaactgaactccaccaacacattcgccattttttagatacgaaatggtgaatctgttaagacctttaaagacaatgggtggccaatcttcggtagaaacaacgccgtttttcacaaaatatgtaccctttcgaaaaggacacatttcagcaccggtagtgggtaaattcgattcggtcgattttactaggaaaaaggaaatgtagtagcgattgaaaaattcgcagggtttgctggcggcggcgttcacgattcccttgacccaatatccatttttaaatgcgtgggattcgaaaaggacgtcgaacgtttcgtccaagtcttcta

SEQ ID NO: 11474 - DNA, 1257 bp, DROSOPHILA
tctcgtcgtctcgcggaaactttggcgcacacgcagttccagacaaatacaatttagaattaaataatatttaaaaacacaagtgttactaaaagtttcctaaaaaacgattgttaagaaatgccgatggctttgtgaaaatcagtgaagataacaatccttaagctaaagtctatatacatagatctcctatagtgcagtgagaaattggaattcaattttgcctgctactcatcttgctcgagagccaaaatccaagcaattgaaagcgaaacccttgcgagagggtcaaggaaggatacaacagacgaacagacagccaggatggtgctcgtgctgaatggtgtgctgcaggatgactgccccatggacaccaacagcctgttcctgcagcatcccgtctacagagactacgcccagcagctgcactccattcaggccaagtcggtgggtccggtgggtctgctctacgtgggtcagcgggagatggccgcctctgccccgcacgacaagcacgtcaacatcatcggtgccgacgatgccaccacctgtattatcgttgtggtccggcactccggatctggtgctgtggccctggcgcacttcgatggcagcggcgtggacgaggctgtgtgcaccatggtgtcgcgggttcaggagctggccgtcggctatccggagggtcgcatcgagttgcagttgattggtggctatcgcgatgccaagggatacggcgaggacgtattcttcagcattatgcaatcattccacaatcacctacttgaaatcgatctgacgcaggcttgcgtgggcgagctaaataccatgatgcgcggcgagatcaactgccccatcatctatggagtgggcgtgaacatcaagactggtgagatctttccggcctcctttccagaccgaggacccgaccgggagctacgcgatgctcgcatcttcatgggcgcgcagtcggttctggatatatacgactcctcgctgggcatgctacgcattggaccctttaactacgatcctttgcgcggcgctgatctgtggctatcacaaacggatgagtttctgttgcagcacctgtcctccagtccagacgtggagccgcctcactttgcgcctcagacgcgtgccaccattaggtttatacaggagaatcagttccccgccgtcaccgttttcagggacaatcggccgcgctacttccggcgggatgacgccacgggcttctgggtgctggttagatattaa

SEQ ID NO: 11475 - protein, 310 aa, DROSOPHILA
MVLVLNGVLQDDCPMDTNSLFLQHPVYRDYAQQLHSIQAKSVGPVGLLYVGQREMAASAPHDKHVNIIGADDATTCIIVVVRHSGSGAVALAHFDGSGVDEAVCTMVSRVQELAVGYPEGRIELQLIGGYRDAKGYGEDVFFSIMQSFHNHLLEIDLTQACVGELNTMMRGEINCPIIYGVGVNIKTGEIFPASFPDRGPDRELRDARIFMGAQSVLDIYDSSLGMLRIGPFNYDPLRGADLWLSQTDEFLLQHLSSSPDVEPPHFAPQTRATIRFIQENQFPAVTVFRDNRPRYFRRDDATGFWVLVRY

SEQ ID NO: 11476 - DNA, 3536 bp, DROSOPHILA
cctccaggtaattacgcgaacgttccatgcttatcccggtgataaactccctcgtcggagtacccattatgttaatcagacatcgtatttggcttacatagttttcaccgcgaaacaggacacgatccgtgataagttccgccagaatgcaaccaaccgaccacacgtcaattgcctttgtgtattgaccccttaaaaagataatttccggagctagataccacatagttccaacatggtccgtcattttgtctgcgcacatacgggataaaccgaagtcaagtatgcgcacctcgctatttccattaactgcgatattgcagggctttaagtctcgatgaacaaccccggcactatgtatgtacttcagtccccgcagtatttggtaaaggattatcctaatctcttgatcgctcatccttttcgaacgcgagtacctgtgcaaatccgcgtccatcaggtgagtcaccaaataaacctgctgaaattccatcatgttgtgcgctggtggatggaagacgttcagcaggctgataacatttcgatgattcatgtgcttcagcagacggatctcgcgataggtacccttagcatcctcctccctctcgaatgggcgcataagccttttcatagcgaagtaattttcagtgcctcgtagtctcaccttagccacctggccaaaggaaccgccacccagaaaacgaacgaactcgtatatatccgggaactcccaaaggctttcgttaattgccactctcacgaactccggcattctggattaaatgtgcaaaaatatgtcttctacgaaaggaaacagaaagaaaactgagcttgcatttagtcacccgctaaactcttatcttttctcaacaccttatctatcagtgcacattcgactgacagaacactaaacttgttcgattcagtcatctgtatgaccggagatacacacatatgctatagacccaaagatcctgcccaagaggtgacaaaaataaggtttttagttgaataacttgatgtttttataaaacaaattttttgttaaataagcagtaagcagcaaaaaaacaaaataaaaagttaacactaagaattgataaatttgagtacaaaagacatggttggaacataaaggctataacaaataaattggcctatgtaatactttaaattcttgatggtttgtgttcactttacatcctttagaacctgagcatacgatggtgggggcttaaagttggtgacctccttgtagatcaattccttccatttgtctacgggcaaatccatatcctcgaagctgtgatcgtatggtggtgaggtctgctcgacgctgggctccgcatacttctccagatatggatgggaaagagcctcctcggctgtgatccgcttttcggcatctagctccaacatcttttccagcaaatcaatggccagcggattggcgttcttaaaaacatttttaaaacttcgtcccttcataggcggaagtgactggatgtaggaacgtgcactttccgatgagatcttcttcaaaaattcggcgggtggcgtgcccaacatctccataatcaggtttagctggtgaatatggtcggtgcctgggaagagggttcgtctggtaattagttcggccatgatgcagcccaccgaccagatgtccactgtttggtcgtagtgcatccaattgagcattatttcaggtgcccggtaccaacgcgtggccacatagcctgtcatctcgttctccgttgggcgggccagcccgaagtctagaatgcgcagctcgcaatcctcgttgacggcaatgtttgagggcttaagatcacggtggatcactccggcgctgtggatatacttcaagccacggagtatctggtagactaaaaactggacgtggtcgtcggacaagtgctgcatccgtatgatgttgttcagatctgcgtccatcaagtgggtaaccaagtacacctgttggaagttctccagcgatccattagcgggatgtggatggaatatgtccagcagaccgattacgttctcatgatccatatgctttaaaagtcgaagctcccggtacgtcctctttgcatggacagctgattgaaaaggcctggcaagctttttaatggccacatgcatattggtgccacgaacaactgcctttgacacctgtccgtaagctcccgatcccacgggctgcagatcctggtatatatccgggatctcccattccgttcgatttatatccaacttgtaaaacttttttgtaatggacactgacatggtattgcttgaggaagggcgtcgtcaccttagttaatggtgcctataagcgagatatgtattgattcttaaaatgccatgcgaacgataattccatgctgattacgtttatcttgaggcagctctgcgtcagtagtacttacctctgttccacgcccaagaatatcaacaactaagtactggtccctggcatttttcctatatttgcgctattactccattccgatgcgtgttaggcattcatgaatcagatcgtcagtggatcagatcgatcagaagcgacacacgaatgcgctacatttgatcagagtaaagttgttaaaatcatttttggcacgatattaaaaaaaatccttaatatataagtaaataaataaaataatatattaaccatatcattgcattgtaacaagtctctttttccactcttatcgatgtccttaaatgtgaataaagggattaaaattaaataattttgttagtttttaataatattctaaaaattaggtaatataatatatttttaaagcccatataccgtaaaatttggagtgtagagcgtttaaatgaaaataaacacacggcgttgccagaccgtcagctgacagttcaataagaatttatcgaataagtatttgaatcagctgtctcttgtttttcctgcaaatttgagcagcaccatcccctgacccattttttgttgcacttttggtgtactttgaatgaaaaatagtcagagacactactcgcgcctgcgcagtttcaacgccggggttatcaaataagctaatctaatcgttccgtaaacgcagcctgacattccgccctaccattctccgacgaacagttagtttcgcacgcaagccgctcccgctcgcatcgtaacctagaaaactttagcgtatgtacataagtaaattgacgagtttatctgaatgatactgaatatattagcggtataaaagataaacattacatggtttaacgagtgttcgcttgaaagcctaaatgttagaccgcaggggagctggaagaagccacttcaaccgctgtgaactgcgacctttggaacctggactggcaaacatgcagattttctgtagtccactatctcagatagcgggaacattgttaacatcgatggcatgttcagcacaagtaaaagatctgcgaaccgaatgcgattagatagtccggggggttcaaagtatggtttgaagggttgctataacttcaacccctga

SEQ ID NO: 11477 - DNA, 1436 bp, DROSOPHILA
atgaatgcctaacacgcatcggaatggagtaatagcgcaaatataggaaaaatgccagggaccagtacttagttgttgatattcttgggcgtggaacagaggcaccattaactaaggtgacgacgcccttcctcaagcaataccatgtcagtgtccattacaaaaaagttttacaagttggatataaatcgaacggaatgggagatcccggatatataccaggatctgcagcccgtgggatcgggagcttacggacaggtgtcaaaggcagttgttcgtggcaccaatatgcatgtggccattaaaaagcttgccaggccttttcaatcagctgtccatgcaaagaggacgtaccgggagcttcgacttttaaagcatatggatcatgagaacgtaatcggtctgctggacatattccatccacatcccgctaatggatcgctggagaacttccaacaggtgtacttggttacccacttgatggacgcagatctgaacaacatcatacggatgcagcacttgtccgacgaccacgtccagtttttagtctaccagatactccgtggcttgaagtatatccacagcgccggagtgatccaccgtgatcttaagccctcaaacattgccgtcaacgaggattgcgagctgcgcattctagacttcgggctggcccgcccaacggagaacgagatgacaggctatgtggccacgcgttggtaccgggcacctgaaataatgctcaattggatgcactacgaccaaacagtggacatctggtcggtgggctgcatcatggccgaactaattaccagacgaaccctcttcccaggcaccgaccatattcaccagctaaacctgattatggagatgttgggcacgccacccgccgaatttttgaagaagatctcatcggaaagtgcacgttcctacatccagtcacttccgcctatgaagggacgaagttttaaaaatgtttttaagaacgccaatccgctggccattgatttgctggaaaagatgttggagctagatgccgaaaagcggatcacagccgaggaggctctttcccatccatatctggagaagtatgcggagcccagcgtcgagcagacctcaccaccatacgatcacagcttcgaggatatggatttgcccgtagacaaatggaaggaattgatctacaaggaggtcaccaactttaagcccccaccatcgtatgctcaggttctaaaggatgtaaagtgaacacaaaccatcaagaatttaaagtattacataggccaatttatttgttatagcctttatgttccaaccatgtcttttgtactcaaatttatcaattcttagtgttaactttttattttgtttttttgctgcttactgcttatttaacaaaaaatttgttttataaaaacatcaagttattcaactaaaaa

SEQ ID NO: 11478 - protein, 366 aa, DROSOPHILA
MSVSITKKFYKLDINRTEWEIPDIYQDLQPVGSGAYGQVSKAVVRGTNMHVAIKKLARPFQSAVHAKRTYRELRLLKHMDHENVIGLLDIFHPHPANGSLENFQQVYLVTHLMDADLNNIIRMQHLSDDHVQFLVYQILRGLKYIHSAGVIHRDLKPSNIAVNEDCELRILDFGLARPTENEMTGYVATRWYRAPEIMLNWMHYDQTVDIWSVGCIMAELITRRTLFPGTDHIHQLNLIMEMLGTPPAEFLKKISSESARSYIQSLPPMKGRSFKNVFKNANPLAIDLLEKMLELDAEKRITAEEALSHPYLEKYAEPSVEQTSPPYDHSFEDMDLPVDKWKELIYKEVTNFKPPPSYAQVLKDVK

SEQ ID NO: 11479 - DNA, 9162 bp, DROSOPHILA
atcggtataaattatagtataatagatttgtaaatttaaatgacataactgtcttttaaatcctacaaagataaagagtcgcttagttttggatgctttcagaaatatgtgtgtacatatattaccaggtaccgcctagtactagcgacctgcccattgtgtcaagtgggcaatttcttcgttcacagccaagttgcctacgatccggagccgtgtttagtaggaagcccagccaagttcgacccacggcacttggatgcagcggcccacgcagaaatcgagccatcatagcaaaggcatgaccaaaacaatccgaagcaaagtcgcgtcaagtacgcgtatataaatagcccgatgcccaggcaaatatatgtatatatatgtatatgtatgtgtgtacgaatgactcagtctgagaagcgatttggactgaaatgattttagctaaaatcgagcagcacaatatacaaagtcaacaaacagcaaaacaagcttgtcaaacagagttatgagacagaatgctggtgcattgggaaaaatagttttccaactgacaggctgaacaaatatatataactaaattaactacttcatcaatttgatctactgctttcgttactcgaaatgtttctagtttagcaagttgaacttatgcagacataatggtaaattagttataaaactaatgaatttggtaaattccgatctttattttgttaaaattacaacaactattggatgctactacctgaggagagataatttactttacaaatctttaatatcaagctatactatagttttttctctgtgtaagtggaagggttgtggatgcggggtagaggggaattcgggaagggaaggtgagcagatcagagcagagcagagcagctgagagatgacgccaacgtcgctcagctgtttctcggccaagttaagagttgcggccttataaatagcccaagctcgtctagaagccgactcagttgaaagcgaagcgtgccaagtgggaaatcgcaaccatttatcagttgacactttttgttttgttttttattttacgttctttatctgctgtagtgctagtgttttctaagaactgaaccccgaaaatggtgagttgcagtgggaataaccaaaatcaatatgtatatataaacgtgtgttaaggaatatatccttttttttttttaaatcatctaaactgaagcaatctatcaacgatggataatttataaacaattttataaaagtaataaaaatgggttcgatttaaggaaagaatctgaatcacgaataagtatatagatttaaacttgcacatttatttgctgtttattttcttcaccgcgaaaacttaagtgaaaaaattacgcacaaaggcaatacataaaatatgcattcagtaaatgatacgtgaatggaatattgatgtacttaaagcaaacacgacaaaaaaaatattcatttcacaatgtaaggacttaactttgctatttgctatttacttccggctagatgaatagtggtgaatggatttgcaaatacatcgaatgaaccaagaaatattcccacatactcgtaatgtttctgaagcccacgatcggtttattcttttgagtgtcttcgatctgccttttatctgcccatttttttgttttttttggcgatgatcaatcactcaacgctttttaagctgcccaagtaaacatcaagcccattattcatttgtttgtgcacaaagccaaaaacacaaaccaattagtttctagcactttagcatagcttgttattttaattgccattacgagaagagtaaaaagtccaatagatttgaattgtttacctttttacctacttatgttgagcacttaacattttcttgctcattatttaaatttagaaagcattaatttaatctaaactctgacaggttttacgttttatttaactaattcaagattgaacagattatatagttgactatttagttctcgcccttccaaaagcaattatttaaatgtacatatgtatgtacatatataatataacaaatatggctctgattcacttcacttcccttgcgcaatgtaatcagattataaatcaccctgcaagatgtgtgatttaagaaaaaaatccaatttcctccctcggtggatccatccgtgccatttacgcgatgatcgacaacttagttgatacgaacatggactaccatattggtcattcagagtaattcgaaaaggcagccgacccccatttgcatattcttattgtatgccgatatttgaataattgtttttagcccgaattgagcttccaaagaagcggacaacaagtttatcacccatgtgtcattcgccaacaatgatcgccaccttgagagcgaagccatatcatcatctcgatcgtctcgtctcgtctcgtctcatctccatgcccagttagcccaaacatggtgccaccagaatcccactgaccactgagagtccaagtccaagccaatgtttgctaccaaacagcggatcatcgagttagtcatgtttattgggctttttcagaactcgaatgcgattatgacacataaaccggcaaagggggcgtgatactcgcttctcgattgagatgtttgttcatatcgaatactttagtgaatgaatcccaatccagttcaaactcatttcattcgactggctctacgattgacgcagaatatgacatttatctttgtattaccgttgtcttttatttagtttcgttactaatgagaactagtgaatgcactccatttggagttacttcaagttagtattcaaatatattcaaatattatattcatcttagatcggtatcgtattgaatttaaattcaagtgatagcagcactaatcgcagctgatccttctcttgcagcagcagctcctggtcgtggccctggtggcggtggccatcgcgtccttgccccaactggccgcaggtaaaaagctggggaagcgctgcgtgaactgcacgtaccgcacttactacacctacggcgatgggcgatccctgcagcgggttgtctatagagatccggtctacacacgtggtatttacacagcttgcctatcagtatccgtattcgtagtcttaccgcaccagcacgatgtacataggaggagagcaccgccgccagcaccctgacccctgacccttgacccttgatccttgaccattgaccccgcgccccaaatgtgtctgcagtagctaacccctaacccctaacccctatatatatatagtatagtatatagtatagtatagtatagtatagtatagtatacatatgtatgtacataccatactcgtagtagcgtagcattagagattagattgagacacaagttcacctgcgcaccagtgcatcacctcaccgcctgtgcctctctcctctcctctcgcccacacagcgcagtcctacgcgagcggatgcagcggtagcccgtgcggcgtgaacgccgtgtgccaggaggcctccggaggacggcccgtctgctcgtgcccgcccggattcagcggtaatccgctcacccactgcaatcgcggcgagtgcctggacaacgtcgactgtcgcgacaacctgcagtgcaaggacaatcgctgcgttaatccctgcgtgggtgcctgtggcattggctccaattgtgacgtaagtgggacttttatgtcgccaacactcctccacggccaacttctggcgcattccctcgcattctgaccatcggcactctacgccacctccgcttgctctttccaggcccgcaaccacgtggccgtgtgcagctgccccgccggctacaatggcgacccataccacgcctgccacctcaacgatccgggtaagtgcctgaccactccactaccgcccacatgccgcggggtaggcgtggcagagctcaaaatcgattaaaatgccgggtgtcataagagtcgttcgctcaactgggagctgttgaaatcaatccgcttcgattgtgtatttcgtttcacgattaaataaattaattaattgggaaatctgagaaatgcacaatttaaagatatatgtactagtagatgatcgaatcaattaaaagctcttagttcttaacgcgcacatcttaacattgattatgtactaataatatatgaattacaatcatcagctggttaaaattttaattagctaaaagatgcaagtgatcatacatgtatgtacatacatagtgtggatgtgaaaaccaagccgagaaataagccttgaccacttgaattaaatcaagggcaaacaggtttctttactgagttacataacaatgagatgaaccaagaggagcggagtgtttgcagtgttaaaattattggcaatacacgaatgcacttgaaaattggcataatgcaatgccttgtctaatagaaaaatttcaaactaaatgaacacatagatcgcgacatatttgtaaacaatttgtaaacaactcatgttgtttattatgttttatttattattattattttttttttgcattaatgcaaagtggacatacgactgattgttccggaaatgcatagatatagacatggattgacataggtacatcgattaattagcccactcgcgaatcccttctccacaatgaggtgctagataagtggcaagatgacgtcgcaaatccaagtggtattgccaaatttggtcaaatctagtgtattgacaaaaacagggggctgggcctctggacagcatgtgggtttaccttgcttgcataacattttgcactcgatgataatgagaattataataataataataataatccaaagccaacggccaacgcccaacacttggggcctttgtaattttatggtaattagcatagcatttcgcttcgcaattgtcaagatcaaggacgcagtgggcgagctctcaaggccaacgagtgtccgtagtcgagcctagtagagctggaatccgacggaaccgaaaggtggccccggttaggcaccagtcaacatccgattatggtcataagctgcgcaggtcggccagctaccattcaggtagcacaggtcggccgagtggcttgggaatttcgctggaagaagacaacttgatccacccgggggctacactgcaagaaactgattgaaaaatatcatctttagaacgacaaactgaagcacactgaacgtaatttgatcggcttaaatatttaagcgttctaaatgggaatagtaacatttccaaacacttcatattcagaacttgccataaatagtggctaagcgcaggttccgtcattagttgaaataattcctgctgggaatttcttaactataaatattaaaattaacacataattgaaagcttttttctaaattgtgaccgtgaaagttgagcggtgtaaatgtcactaggacctgcttgtttattaccaacattctggcttttatacgaacggacaaacgcacatgttcaaaaggcaaattaactagaacttctaaccaggaaattatttgatgggtggggggggggggggggtcttctacctcaacgaatctattatattccttaacttttaacgccaatattgagctgctaaatattatctttggcttgaatttctttaaaataaagtcagttgaaaaccaatttcaattgctgtccgtccaagagtcggcgtcaataaattgcatctctacgttggttgctcattcgggattcgtgtcgagtccaagggcctggcatttctcgccccttttccgatttctgcatcttaactggtcctccgatatacatatattcttgatttcacttaaatccctttctgtgttgcctttactccggcctccgtttgcgtgcaattcccattgaaatacaatatttatttgcatttccaattagcaactgacttggaaacaataattgcaaacgaacagtctgcggggaatggaagtagctcggattccctgctccatgatgttccctgctgccgccccaaggacaccggattcttttccattcatgttcctggggagccgaagcagttgcgattccctttgggcgtgttgcagaccaactgaaaacattcacggacatttgccttaaagatttcgtgcaggaatacaaatgaattgctaacatttaaaggtccacaatgcgtttgccacgccgataataaaaaataactatttggttagctatatatttcgaagaaaatctaccaatacatcgatttaatgtcgacgacgagcatttccgactttcgttgcaagacattttgcaatcgattttcaaaaccgaactccacatttcattacaatacattttcccggcgcggaaaagttgctgcttctcgcaaattatgtcaaaaggaaatgtaagagaaaaggcctgataatggcgaaacttttgccatcggaacggaaaacaacgcaaactaatttcttgacttgctcaccgcaccaccaccatcatcatcatcatcatcatcaccatcatcatcatcatcatcttgaacgacgagtaacaacaattggtgcaaaaataaaagaaaatatggggtaaaaaccaaaaatatgcgcataaatgagcccggctatttgaatatgattttctatttgcccactttgagtggccggcccccaattattggccccattggaggtattttcccgatttgaccggaacacaagtcacatgacccggcataaatcaaaaatggggcagcaacagcggatgttgacaggggccacaacccccaacgatggtgaaaggtgaaaggtgaaaggtcgggtggaaaacaacttccttcgtcggccgattgaacttttcatagactcaactaaatcgacacttgaacttggcaatatagcacttacttactgaaaagtcttgctcagatggaaatgaatccatcatcgccatgccgcattcaaaatatactgttgcagacagctttgtgggcgagtctacgacactgctgtgtgtcgtccatttccaaacattaatctctcattccattccgcagaggagcagtgccatcccagtccgtgcggcgttaacaccaagtgcgagatcatcaacggcgtgcccacctgctcatgcgttcacggctatgtgggcaatccgctgagcggctgtcgccacgagtgcgatcacgatggcgactgcagcagccgggacatgtgctccagcaacttcaagtgcgtgccggcatgcgggcagtgcggcactggcgccacctgccgaacggtcagcaatcaccgggctgtctgcgagtgccccaagggctacattggcagcccgtacacggagtgccgaccggagtgctatggcgatgccgactgcccggccgggcgacccgcctgcttctacggcatctgcaagaacacctgcgagggtgcctgcggcatcggcgccgactgcaacctgcgcggcctcacacccgtctgcagctgcccccgcgacatgaccggcgatcccttcgtgcgctgccgtcccttcaccaaggaggacctttgcgaccccaatccgtgcggcaccaacgccatctgcgtgcccggacacgacaacaccggccgcgagcggcccgtctgcaactgcctgcccggccacaccggcaatccgctgagccactgcacccgggtgagtcactgtccaaatcataggcaatcatacagattgggcaacaacggtgttatctacgatgatccggtgatcccaatcatagagttcttcctactgtttctactttttaattataccaaaaaagagttgacaaactagtgacgaacgctctcttaagcggaaacggcaaatatgtcgaaattttgtctgtatttcgattttaaatagagttcttcttcttcttcattctccattataatggggcataactactgtactaacccacttaccctcgtccacagggtgagtgcctgagcaacaacgagtgccccgaccatcgcgcctgcatcaactaccagtgcatcgatccctgcatcggcaagtgtgccactggagccagctgcgagcccaaggcccacctggctgtctgccgctgtccacagggacagtcgggcgacgccctggtgtcctgtcgccagacgcgcacctttcccgtggccaagtaccactgaggcgggatggggagtcgtatagtcccggagccgcactgcctgccaaaccagtcaccatccgcccagccaatccccatcccaatccgcaccaatccgcatctgcccacttcccgtactagtcgttgccctaacctcgtgctctccccaacagaagcgataaaaaatgcgttgaaaaacaataaataatacaagtaaataataatcataaacaatgtgctatttttctgggatccgtaaagtcacaaacaactgaatacatcataaaaaagttaaacaaattgttttcaaatactgcagaagggaaaaaattccattttaaagatataaagattatattactgattgtcttagtaccgaaatccaacccaaaatcttaacggctaaatgcaaaagaccaaacattttagaaaatcaaattgccttctttattttgatcgataaatatatacatctatatatatagatatatatatacatttatataaatatatagttttcttttggttggtatgaaatataggtttcatattcgagaatagtatttaactatgagtttgcctcactttctgaaagcttttttcagcccaaaccacaactaggtaattcattttggtattcaaacgcaataacatagtctttgaattttgggtatagctcaaggtttacatataaataaatatatactggaaccgaaatcgattattgtggtatttaaaataaatctatgaatcgaatggttttttaagcagaataaatatggttaccacaaagcgaacccatatgtacattgtgaacatataaatataaattctagtgcgcttcgttactacgttattcactcgtttcatagagtcgccgaagagtatgcaactacttttagaagctaacaaaaattgtaaaatcgggaaagtttaccaaaaataacgaacgtgcttgcagtgcgatttggtgcgtttttaacttagatacaatacaaatgtagcgatgtattaaatgcatt

SEQ ID NO: 11480 - DNA, 1438 bp, DROSOPHILA
tgccaagtgggaaatcgcaaccatttatcagttgacactttttgttttgttttttattttacgttctttatctgctgtagtgctagtgttttctaagaactgaaccccgaaaatgcagcagctcctggtcgtggccctggtggcggtggccatcgcgtccttgccccaactggccgcaggtaaaaagctggggaagcgctgcgtgaactgcacgtaccgcacttactacacctacggcgatgggcgatccctgcagcgggttgtctatagagatccggtctacacacgtgcgcagtcctacgcgagcggatgcagcggtagcccgtgcggcgtgaacgccgtgtgccaggaggcctccggaggacggcccgtctgctcgtgcccgcccggattcagcggtaatccgctcacccactgcaatcgcggcgagtgcctggacaacgtcgactgtcgcgacaacctgcagtgcaaggacaatcgctgcgttaatccctgcgtgggtgcctgtggcattggctccaattgtgacgcccgcaaccacgtggccgtgtgcagctgccccgccggctacaatggcgacccataccacgcctgccacctcaacgatccggaggagcagtgccatcccagtccgtgcggcgttaacaccaagtgcgagatcatcaacggcgtgcccacctgctcatgcgttcacggctatgtgggcaatccgctgagcggctgtcgccacgagtgcgatcacgatggcgactgcagcagccgggacatgtgctccagcaacttcaagtgcgtgccggcatgcgggcagtgcggcactggcgccacctgccgaacggtcagcaatcaccgggctgtctgcgagtgccccaagggctacattggcagcccgtacacggagtgccgaccggagtgctatggcgatgccgactgcccggccgggcgacccgcctgcttctacggcatctgcaagaacacctgcgagggtgcctgcggcatcggcgccgactgcaacctgcgcggcctcacacccgtctgcagctgcccccgcgacatgaccggcgatcccttcgtgcgctgccgtcccttcaccaaggaggacctttgcgaccccaatccgtgcggcaccaacgccatctgcgtgcccggacacgacaacaccggccgcgagcggcccgtctgcaactgcctgcccggccacaccggcaatccgctgagccactgcacccggggtgagtgcctgagcaacaacgagtgccccgaccatcgcgcctgcatcaactaccagtgcatcgatccctgcatcggcaagtgtgccactggagccagctgcgagcccaaggcccacctggctgtctgccgctgtccacagggacagtcgggcgacgccctggtgtcctgtcgccagacgcgcacctttcccgtggccaagtaccactga

SEQ ID NO: 11481 - protein, 441 aa, DROSOPHILA
MQQLLVVALVAVAIASLPQLAAGKKLGKRCVNCTYRTYYTYGDGRSLQRVVYRDPVYTRAQSYASGCSGSPCGVNAVCQEASGGRPVCSCPPGFSGNPLTHCNRGECLDNVDCRDNLQCKDNRCVNPCVGACGIGSNCDARNHVAVCSCPAGYNGDPYHACHLNDPEEQCHPSPCGVNTKCEIINGVPTCSCVHGYVGNPLSGCRHECDHDGDCSSRDMCSSNFKCVPACGQCGTGATCRTVSNHRAVCECPKGYIGSPYTECRPECYGDADCPAGRPACFYGICKNTCEGACGIGADCNLRGLTPVCSCPRDMTGDPFVRCRPFTKEDLCDPNPCGTNAICVPGHDNTGRERPVCNCLPGHTGNPLSHCTRGECLSNNECPDHRACINYQCIDPCIGKCATGASCEPKAHLAVCRCPQGQSGDALVSCRQTRTFPVAKYH

SEQ ID NO: 11482 - DNA, 9947 bp, DROSOPHILA
tgtgtatgaataaaaataataaatgcgtcttccaaatacttgttcggccttgttaaattaattttaatttataaatttaagccaatggacataaaaatcaatgattttgggtagattatgatttagttattaagctggctttaatctttggagaaaagtacgaagccccctgcgtgcgacactgattaacagcattcacttgcgatatttcggtcacacagagcgcttaacagcatatcgtgccaaaatgaggagatatattctaaaacagtaagaggttacactgtttgttgacaaaaaggtaaacaaagtgaaaatttcgcaaaatgtgcaaaataattaagtaagggtcagtaaaaggtgctactggttaatcggaccataacaactacccatttaacacataccatgcatgacttggatatctcgtgaagtacacaaaccaaaacaatgagcgactccgacgaaggtgagataacacaacttttagtgaaattatgcacaatatgctagttttgcgcaaatttagtcagagtgcaaatgagcattatacgcttgactatgcaaattacctaagtggtgcaattaaaacttcaaccagttgttattggtttttcaacaacaccagcaagggcacagggtgacattggtgcaatggaagtgggcgcgcaaaaacttttttcaaacagccaccccccacagaagcaactggtgcaaccactggaccatccgacacccacgaagagacaaatcaaaacaaatgccacgcactcacccaatgccacattcttgaacaagtgcaacagttgccgcgcttcttgggctccgacttgcgcagtgcgacataaaacggcctggatcaatgaccacaaaaacgtggccatcgattttccgcagttcagtttttgctagcggcgcgttcggtcatcataccgatgccaattaatttttggggcttattcgcaccgatttgggttacataatgtcatggaaattcagcatggaacatcccaaaactggaactgaaacagctctggaagcctgtgactacttcgtggatgaggtcattgaggcatcctcaatacggggtgggaattggtttattccaaaggtgctgtgtattagttaaccaagcaaaacttatctttcacagatgcccgcgaggaagtgcgtcagatcaagcacggggagctgcgaacggcagtgatctctggcgatgagcggactgtgcgggtgctgctggcagctcttggaactgagcgtcagattatagtcaatatggctccttcaggagcaaacacccttctattcctgtgagaaaaagtcttttagaattagtccattttgagccaaactaatatcggtctcgttttagagcctgccagtctggttacgagagcattacacagcgattgctggatgctggagcggatggtcgctcccatgccgtgaccaagtactcacccttgtacgccgccgtccatagcggtcacttgggcattgcccgactgatgctagaccattttccagaactgatccagcagccgactgtagagcgctggctgccgctgcacgccgcctgcatcaatggacacatcaagctgctggaactccttatcagctacagttatcccgactacctctaccagacatatcgcgacgaggagggccagtgggaatggcggctccccttcgacgctaacgctcatgatgtgacgggtcagacgagtctgtatattgccagcatcctaggaaacaagcagctggttggtgtgcttctaaagtggcagctccattgccggcgtacgttgggcgattccgccagctcggtgagcactcctattacgcccaccaggaaacgtatttcatttggcattcaggctatcatgtccaaactgcacatatctggagagtcagaaggacccgacgacctagcttcacaagagtcaaccgagtgccaacggtgtcccattaacgtgaatctgctatgtggagcggcgagagaaacagctctgcttgcggccgttcgaggcggccacctagacgtggtgcagtctctgctacagcacggcgcaaatccgaatattgtagccaagccagttgaggatcacaacgacccgaaatgttgcgaggaaatatatgggctcagtaatgtccccattgcagaggcctgcaagcaaaggtcgctggctatgttggatctcttgcttaagcatggagcccgcgacgataatggcacggccattggaatggctattacatgcggcgacgaggccatcctgagtcgtcttttggcccgacgagtccatccggactcagactacaagatcaacaagaagggtcttcccacaccagtggaggtgaacgtgtttttgccgtccaccagcaacatatcttacagtgctatgttccccaacaatccaaccattattgactggcacagcatgggctccagtgtccagttgtctgttgtaagggttccctggatggtcagcggtgtgttgctgctgaatcctaagctacagtcgcatccgcgacttaatgaggttgctctgacagctatcacgcgaatagatttctcgcacaacgttctcacgtcaattccacaggagcttttccatttggttagcctaaggttagtaaagacaaagtaataagtttttcaagaattatattagtccttcatttaaggtatttaaatgtggcgcaaaacaagataaccgatctacctgcaccaataggccagacatatgggtgtccggtactggatgaactctttctacaagacaaccagttaactacgctgccagccgccatctttcacctgcccgccctatctatattggatgtttcaaataacaaactgcaacagcttcccttcgacctgtggcgtgcacccaagttgcgcgaacttaatgtggccttcaacctattgcgggatcttcctgtgccgccaatgcaaactagcagttcgctgctgagcctagacaaattgaatctgcaatcttttgaggagccgccatcaaacaaaccgcgaaatgtgactcagcaacgtctcacccatcgcaatctatggtcggctactttggacataaccgataatgacatgaagtggcagcatgaacaagatttaggcgatggaaagacagctggtgtgggctcctcccagctaagtagcttaaatatagcaaataacctcttcaccagtatccccgctgctttgccctgtctggctgtaaacctaacacggctgaatatgtcatacaacagtctgcgttctatgggacatgtaaccagttacccggcaacacttaagcagttggatctaagtcacaacgagatatcctgctggccaagtttaccgcgaattactgaatcggatccgcatctactgtgctacagttgtgtccagctaccagagggtcgagatgacgactacaagacggcctcctcaaagggcagtagctcgtctgccacatcgtttcgcgcttcggtgttaaaaagtgtttgtcggcacaggcgtcatctgcgcctggaggctctacgcacattgatcttggctgacaatctgcttacgcgcatccaactatcaactgatgacgccacaacccttttcaatgaaagtgaggacgccgattggagtgtggtaggcgtgaaccggtctaaggtgatatttcccaacctgtctatgctggatatgaccaacaattgcctgaaggagattcccgcctcgttgcacgaactgagcagtctgtcagtgctgaatattagtggcaacgtcaacatcacggaactgccgccgcacttgggactgctgtcgagactttggaatcttaatacgcgcggttgcctactgcaggagccactgcgctctatgatcgagagcaagaagcacaagacgatggacattgttggatatcttaaatctatttacgaagatgctcagccctacgcacggatgaaactgatggtggttggtgtggctggaattggcaagagcactctgctggacttactgcgccagggggcgggctcagggtccagctccagctctcatcgatcgcgcgccagcgaaaatcattgggccaagcgaatgggacacgcacgcagcacatctcgatctcatcgccattcgtcggcttctagcgcaaacatttctacagtaggagtggacattggaacatggatatgtgagaaacgaaagcgagcacccggctcccacggcccagtggtgtttcgtacttgggattttggtggtcagaaggagtactacgccacacatcagtactttttgtccaaacggagtctgtatttggtgctctggcgcattagcgacggtcacaagggtctggcggagttgctgcagtggcttggcaacattcaagcgagggctcccaactcccccgtaatcattgtgggcacacactttgatgccgttggtgaatccatctcgccccaaaaggcagagcaactgcagcaattgattcgggagaagtttatcgccattcccgatgcggaaaaaattgggctgccacgggtgattgattccatcgaaataagttgccggtaagtttttgaattattaatatgacttcaaagtctaaaaaataccgctttgaactttaggaccctacacaatatccacttattggccaacattatttacgacaccgccatgcaactgcgatcccctggttccaaggagcccatgctactgcaaaagatccccgccagctacattgccttggaggatattgtgaatgtgattgcatgcaatctgcgcgctgctgggcgagatcccgtcctggatggtgaacaatataagcgcttggtcaccgaacagatgagattgcacaactacaagagcttccgggatgccgctgagctgcagcaggccactacatggtgccacgaaaatggagttttattgcactatgatgatgctacgctaagggactactactttctcgatccacagtggctttgcgacatgctggcccatgtggtcaccgtgcgggagatcaacccctttgctcctacgggcgtgatgaagctggatgatctccagatgttgttccgaagtgtgcaggttcaaggaaatggaaacagaaggtatttaaatgagtgtgcataactatgtggtaaagtatttttgtattaattaaaatttctttctttaagctacattgtcagtctacttaacaagtttgaggttgctttaacgtgggattcgagaactctactcataccctccttactgccttcgcaggaggcagctacacccaattcaggaagcacggttaagctatcgcaacgatctcgcggccgtagtttgggttgctctgtatcgcaagaagtaaatctaaataatttgatatacgaacagaggtcagctccttcttcatcatcttcctctgcatcggttagccaaggcttgcggcgcatcctattgatgacttatttcccgtccgggttttggtcaagattaatcacccggattttagctgatgaacaaataatcgaagcaattcgtggcgtttatatggcttcacaagatgtaagtggaacatcttttacgaagcctaagttctaggtacaatctttattttctagtacgcggactttgatctacgcacatcgttggagcaggacacccaatggaatctttggcagacaggcttagcactgtactatggacctatcttaatattcaagatctgggaagtaccctttcagaagacagagcgaacgcaacctttccgcactgatggcaaccgatttaagctgaaacaagatggtatctggagcgatgtaaatctcagctcctctagcattttggaagtttactttccactctatgaagtgaacatatcgcaagaagtggatgacaatgaacgtcaattgctggccgagattcgtccgcacatgtctcaggtggccaagcttttggccctaacagtggatcatattgacttgcttttggaggattggtatccttcattgggaacgcggtttgtgcacacttccgagggtcgattcctaatcactcgattggtgttgtgtccgcgatgtctttggaagttgcagctgcagcagaacaacgaaccgtctgatcgggaagtgcctccagtgggttgcaatcgaccaagtcgaagtagtaggcgtggagcgggagcatactttctccacggtgtaggtgatcccggagaggatggtgctttaaacgtgttctcggcctatttaaacgccacagcaaggagagaacgccgatcggaggattctttgggtgctggatccgacgcggactcgggcgtgggtcccgactcagccggttcttcgcgcaacacttcagttgatggtcatcccggatatcacttgcctgataactcaaatgtgtgttatgcttggatgattgaggagtgcattttgtccgtttataatcaaagcaagattagttgccctgttcatcttgaacagtctatggctcagcttgcgccagacgtaatctttgccgatattcctgataagcacactattccaagcgagtgcatcatcaagggatcgttgcttggtcgaggtgcttttgggttcgtttttaaagcaaattgcaaggtaaggggcgccagatcctttaagccggtggcaatgaaaatgcttcagccagtgcctcccggagctcgtgcaaaagaggtgagtactataaattaacaaatgtactgaaatgaatagtaatttgttctttaatcattctattttagagcgctttgatggctttcaaggtagctgtaggcaaatgggaccgggatccactgcagcactcttgcaaggcctactgcactgcgcgtcaggaattggcagtacttctaactctcaagcatccaaacattgtacccttggtcgggatctgcattaaaccattagctctggttctggaactagctcctctaggcggtttggacgctttgctccggcattaccgacgcagcggagcccacatgggaccgcatactttccagacccttgtcctgcaggcggctcgagcaatcgagtatttgcatcgcagaagaatcatctaccgcgatctaaagtctgaaaatgtcttggtttgggagcttccacaaccacacacggaagacagtccccgcaaccttgtgcacataaagattgccgactacggaattagccggcaaactgctccaagtggagctaaaggatttggtggcaccgagggttttatggctccggagatcatacgctacaatggtgaggaggaatatactgaaaaggtatgtttatttatttacttctcataaatcatatggcttatcgattcttcttgtcaggtggactgcttctcatttggaatgttcatatatgagaatatcagtttacgacaacctttcgaaggccacgagtctattaaagagtgcatcttggagggtagtcgcccggctttgactcaaagggaaacccagtttcccacctgctgtttggatcttatggtcttgtgttggcacgaacagcctcgtcgcagaccgacggcaagtcagattgtttccatactaagtgcaccggagtgcatccacctcctggatgtcgttgccatgccgcatagcgagaagattgtctgtggggtttttcagtcgcttgttggtatgggcgatgatgaacgatgtggtcttgaactgtggctaccctccttcggctctcgcattgacattctagactgctcaccctcgggcagcctactgcagtgcaacagcatcagttgttctccgcagccacaggttgctccgcccaagacacccgaaaacggtgcaaattcacgtgcccgctctgcccaacgtttgcccaagatgaacatgttgtgctgctgcctggtgggtgaagccatctggatgggcgacgtttccggcaatctgcacgcctatagcacatccacctatgcccacctgttttcctacatgctcgatcccaacattaagtcagctgtgatcagtctagtctacatggagaaaatagctcgcgtggctgtcggaacgcataacggtcgggtgttccttgttgacgccacgcagatgcccagcaattgcgcatttgccgagggctcttttgtgcttacagagatctgttctggttttgtgttgcacgccgcttgttccgttgttgtggatgggtaagctgacaaatctataaccaaatatttacttaaatctatattgtgctttgtgtagaatctatgaattgtggtgcggcgaaattgcaggaaagataaatgtttttccgttgaacgagaatggagtttccggacatcaggctttatgccacagcgaggaacccaatctcatcgaggacgtcaaggtggctcgaatgtgcagtaatgaaagccatgtgttcagttgtctatatcccggttgtatggtgtaccagtgggatgttatctccaagcggatagaaaataagctggactgctcaaagctgctgccctgctccgagtctctgcaaagtattgcgattgatgagcatgtgaaccttataaaatgccagatttcggcactggcggctcacaattcagaactgtatattgggacgacctggggctgcttaattgtggccgaactgcacaccctgcgccccattagtgttttccgaccctatgaaaatgaggtaagtttggcgaattgtgcgttttatgtgcgtggatgctgattctattcccttacagatcaaatctataataaccctttctaaagacaatgttccgctgatcgccacgatcggaagacgatatcgctctctgatctctcgatatgtggactccgcagagtcatccaccaagagctctgccgtcagcacacccacccatggtgcagccaaatccgtgccaccggcggatgtggataatcacattcattgcctgctgtggcgcgccaagcactggacctaaattcgatctcattcaaaatatttgttgacgtatttaataatccaaaaatccttacacaaacttgttaagaaggtgctagttacatatgaggtatattcgctgaggagtatttatttactgtcctatttaatgtaaaatttttgccgatcttatactttacttgacgaattggaggtgcaatctattttattatttctatttagaattttctcataacttttttaatatttttatttatttatttaaaaatgttgcgtttccagttctataattgattgtagtattcttaaagtttatttactaatattttaagcacgaaaatgcaaacgtttattgtacatttagaagaacttgttgcctaaatttgacagttaacgcgatcataaaagttgaacaaatatttaaattttgtatttctgattttattggcttgtaacagaacaaaatgttttacattccgcagataagcttaagaaatattgaaatcttttaataaaaacatgcagcaaaaataagagttgttttcaatttttttcaaaatgcaggaatctattcaaaaacttttcaaattatacaaaataatgttaagaaatgacatgcactcaaatcaaatattttgcaatcggcatccgataagtgaagggacttcgctctactgcgattcctgggccacagaagctactgacatcgaggactggcgactgcgcgagtagatggaagcggagtttttcaatacccgtacatagttattgaaatcgataacgaactggaactcctccttgagagcgtcacgcagcggaacctggaaaataatagccaataactaagagtgcccacccgtgccaaagatgtcaacccactcggtagtgatgagctttcttcattacgaacaaaacccagctgataatcccgtaaagcagggcgcagcaacttccgacaagaagtacgaaaaaaactccctccaggttattcatgtccaaaggtgtcgcatcgggagcat

SEQ ID NO: 11483 - DNA, 6927 bp, DROSOPHILA
atggaacatcccaaaactggaactgaaacagctctggaagcctgtgactacttcgtggatgaggtcattgaggcatcctcaatacgggatgcccgcgaggaagtgcgtcagatcaagcacggggagctgcgaacggcagtgatctctggcgatgagcggactgtgcgggtgctgctggcagctcttggaactgagcgtcagattatagtcaatatggctccttcaggagcaaacacccttctattcctagcctgccagtctggttacgagagcattacacagcgattgctggatgctggagcggatggtcgctcccatgccgtgaccaagtactcacccttgtacgccgccgtccatagcggtcacttgggcattgcccgactgatgctagaccattttccagaactgatccagcagccgactgtagagcgctggctgccgctgcacgccgcctgcatcaatggacacatcaagctgctggaactccttatcagctacagttatcccgactacctctaccagacatatcgcgacgaggagggccagtgggaatggcggctccccttcgacgctaacgctcatgatgtgacgggtcagacgagtctgtatattgccagcatcctaggaaacaagcagctggttggtgtgcttctaaagtggcagctccattgccggcgtacgttgggcgattccgccagctcggtgagcactcctattacgcccaccaggaaacgtatttcatttggcattcaggctatcatgtccaaactgcacatatctggagagtcagaaggacccgacgacctagcttcacaagagtcaaccgagtgccaacggtgtcccattaacgtgaatctgctatgtggagcggcgagagaaacagctctgcttgcggccgttcgaggcggccacctagacgtggtgcagtctctgctacagcacggcgcaaatccgaatattgtagccaagccagttgaggatcacaacgacccgaaatgttgcgaggaaatatatgggctcagtaatgtccccattgcagaggcctgcaagcaaaggtcgctggctatgttggatctcttgcttaagcatggagcccgcgacgataatggcacggccattggaatggctattacatgcggcgacgaggccatcctgagtcgtcttttggcccgacgagtccatccggactcagactacaagatcaacaagaagggtcttcccacaccagtggaggtgaacgtgtttttgccgtccaccagcaacatatcttacagtgctatgttccccaacaatccaaccattattgactggcacagcatgggctccagtgtccagttgtctgttgtaagggttccctggatggtcagcggtgtgttgctgctgaatcctaagctacagtcgcatccgcgacttaatgaggttgctctgacagctatcacgcgaatagatttctcgcacaacgttctcacgtcaattccacaggagcttttccatttggttagcctaaggtatttaaatgtggcgcaaaacaagataaccgatctacctgcaccaataggccagacatatgggtgtccggtactggatgaactctttctacaagacaaccagttaactacgctgccagccgccatctttcacctgcccgccctatctatattggatgtttcaaataacaaactgcaacagcttcccttcgacctgtggcgtgcacccaagttgcgcgaacttaatgtggccttcaacctattgcgggatcttcctgtgccgccaatgcaaactagcagttcgctgctgagcctagacaaattgaatctgcaatcttttgaggagccgccatcaaacaaaccgcgaaatgtgactcagcaacgtctcacccatcgcaatctatggtcggctactttggacataaccgataatgacatgaagtggcagcatgaacaagatttaggcgatggaaagacagctggtgtgggctcctcccagctaagtagcttaaatatagcaaataacctcttcaccagtatccccgctgctttgccctgtctggctgtaaacctaacacggctgaatatgtcatacaacagtctgcgttctatgggacatgtaaccagttacccggcaacacttaagcagttggatctaagtcacaacgagatatcctgctggccaagtttaccgcgaattactgaatcggatccgcatctactgtgctacagttgtgtccagctaccagagggtcgagatgacgactacaagacggcctcctcaaagggcagtagctcgtctgccacatcgtttcgcgcttcggtgttaaaaagtgtttgtcggcacaggcgtcatctgcgcctggaggctctacgcacattgatcttggctgacaatctgcttacgcgcatccaactatcaactgatgacgccacaacccttttcaatgaaagtgaggacgccgattggagtgtggtaggcgtgaaccggtctaaggtgatatttcccaacctgtctatgctggatatgaccaacaattgcctgaaggagattcccgcctcgttgcacgaactgagcagtctgtcagtgctgaatattagtggcaacgtcaacatcacggaactgccgccgcacttgggactgctgtcgagactttggaatcttaatacgcgcggttgcctactgcaggagccactgcgctctatgatcgagagcaagaagcacaagacgatggacattgttggatatcttaaatctatttacgaagatgctcagccctacgcacggatgaaactgatggtggttggtgtggctggaattggcaagagcactctgctggacttactgcgccagggggcgggctcagggtccagctccagctctcatcgatcgcgcgccagcgaaaatcattgggccaagcgaatgggacacgcacgcagcacatctcgatctcatcgccattcgtcggcttctagcgcaaacatttctacagtaggagtggacattggaacatggatatgtgagaaacgaaagcgagcacccggctcccacggcccagtggtgtttcgtacttgggattttggtggtcagaaggagtactacgccacacatcagtactttttgtccaaacggagtctgtatttggtgctctggcgcattagcgacggtcacaagggtctggcggagttgctgcagtggcttggcaacattcaagcgagggctcccaactcccccgtaatcattgtgggcacacactttgatgccgttggtgaatccatctcgccccaaaaggcagagcaactgcagcaattgattcgggagaagtttatcgccattcccgatgcggaaaaaattgggctgccacgggtgattgattccatcgaaataagttgccggaccctacacaatatccacttattggccaacattatttacgacaccgccatgcaactgcgatcccctggttccaaggagcccatgctactgcaaaagatccccgccagctacattgccttggaggatattgtgaatgtgattgcatgcaatctgcgcgctgctgggcgagatcccgtcctggatggtgaacaatataagcgcttggtcaccgaacagatgagattgcacaactacaagagcttccgggatgccgctgagctgcagcaggccactacatggtgccacgaaaatggagttttattgcactatgatgatgctacgctaagggactactactttctcgatccacagtggctttgcgacatgctggcccatgtggtcaccgtgcgggagatcaacccctttgctcctacgggcgtgatgaagctggatgatctccagatgttgttccgaagtgtgcaggttcaaggaaatggaaacagaagccaaggcttgcggcgcatcctattgatgacttatttcccgtccgggttttggtcaagattaatcacccggattttagctgatgaacaaataatcgaagcaattcgtggcgtttatatggcttcacaagattacgcggactttgatctacgcacatcgttggagcaggacacccaatggaatctttggcagacaggcttagcactgtactatggacctatcttaatattcaagatctgggaagtaccctttcagaagacagagcgaacgcaacctttccgcactgatggcaaccgatttaagctgaaacaagatggtatctggagcgatgtaaatctcagctcctctagcattttggaagtttactttccactctatgaagtgaacatatcgcaagaagtggatgacaatgaacgtcaattgctggccgagattcgtccgcacatgtctcaggtggccaagcttttggccctaacagtggatcatattgacttgcttttggaggattggtatccttcattgggaacgcggtttgtgcacacttccgagggtcgattcctaatcactcgattggtgttgtgtccgcgatgtctttggaagttgcagctgcagcagaacaacgaaccgtctgatcgggaagtgcctccagtgggttgcaatcgaccaagtcgaagtagtaggcgtggagcgggagcatactttctccacggtgtaggtgatcccggagaggatggtgctttaaacgtgttctcggcctatttaaacgccacagcaaggagagaacgccgatcggaggattctttgggtgctggatccgacgcggactcgggcgtgggtcccgactcagccggttcttcgcgcaacacttcagttgatggtcatcccggatatcacttgcctgataactcaaatgtgtgttatgcttggatgattgaggagtgcattttgtccgtttataatcaaagcaagattagttgccctgttcatcttgaacagtctatggctcagcttgcgccagacgtaatctttgccgatattcctgataagcacactattccaagcgagtgcatcatcaagggatcgttgcttggtcgaggtgcttttgggttcgtttttaaagcaaattgcaagagcgctttgatggctttcaaggtagctgtaggcaaatgggaccgggatccactgcagcactcttgcaaggcctactgcactgcgcgtcaggaattggcagtacttctaactctcaagcatccaaacattgtacccttggtcgggatctgcattaaaccattagctctggttctggaactagctcctctaggcggtttggacgctttgctccggcattaccgacgcagcggagcccacatgggaccgcatactttccagacccttgtcctgcaggcggctcgagcaatcgagtatttgcatcgcagaagaatcatctaccgcgatctaaagtctgaaaatgtcttggtttgggagcttccacaaccacacacggaagacagtccccgcaaccttgtgcacataaagattgccgactacggaattagccggcaaactgctccaagtggagctaaaggatttggtggcaccgagggttttatggctccggagatcatacgctacaatggccacgagtctattaaagagtgcatcttggagggtagtcgcccggctttgactcaaagggaaacccagtttcccacctgctgtttggatcttatggtcttgtgttggcacgaacagcctcgtcgcagaccgacggcaagtcagattgtttccatactaagtgcaccggagtgcatccacctcctggatgtcgttgccatgccgcatagcgagaagattgtctgtggggtttttcagtcgcttgttggtatgggcgatgatgaacgatgtggtcttgaactgtggctaccctccttcggctctcgcattgacattctagactgctcaccctcgggcagcctactgcagtgcaacagcatcagttgttctccgcagccacaggttgctccgcccaagacacccgaaaacggtgcaaattcacgtgcccgctctgcccaacgtttgcccaagatgaacatgttgtgctgctgcctggtgggtgaagccatctggatgggcgacgtttccggcaatctgcacgcctatagcacatccacctatgcccacctgttttcctacatgctcgatcccaacattaagtcagctgtgatcagtctagtctacatggagaaaatagctcgcgtggctgtcggaacgcataacggtcgggtgttccttgttgacgccacgcagatgcccagcaattgcgcatttgccgagggctcttttgtgcttacagagatctgttctggttttgtgttgcacgccgcttgttccgttgttgtggatggaatctatgaattgtggtgcggcgaaattgcaggaaagataaatgtttttccgttgaacgagaatggagtttccggacatcaggctttatgccacagcgaggaacccaatctcatcgaggacgtcaaggtggctcgaatgtgcagtaatgaaagccatgtgttcagttgtctatatcccggttgtatggtgtaccagtgggatgttatctccaagcggatagaaaataagctggactgctcaaagctgctgccctgctccgagtctctgcaaagtattgcgattgatgagcatgtgaaccttataaaatgccagatttcggcactggcggctcacaattcagaactgtatattgggacgacctggggctgcttaattgtggccgaactgcacaccctgcgccccattagtgttttccgaccctatgaaaatgagatcaaatctataataaccctttctaaagacaatgttccgctgatcgccacgatcggaagacgatatcgctctctgatctctcgatatgtggactccgcagagtcatccaccaagagctctgccgtcagcacacccacccatggtgcagccaaatccgtgccaccggcggatgtggataatcacattcattgcctgctgtggcgcgccaagcactggacctaa

SEQ ID NO: 11484 - protein, 2308 aa, DROSOPHILA
MEHPKTGTETALEACDYFVDEVIEASSIRDAREEVRQIKHGELRTAVISGDERTVRVLLAALGTERQIIVNMAPSGANTLLFLACQSGYESITQRLLDAGADGRSHAVTKYSPLYAAVHSGHLGIARLMLDHFPELIQQPTVERWLPLHAACINGHIKLLELLISYSYPDYLYQTYRDEEGQWEWRLPFDANAHDVTGQTSLYIASILGNKQLVGVLLKWQLHCRRTLGDSASSVSTPITPTRKRISFGIQAIMSKLHISGESEGPDDLASQESTECQRCPINVNLLCGAARETALLAAVRGGHLDVVQSLLQHGANPNIVAKPVEDHNDPKCCEEIYGLSNVPIAEACKQRSLAMLDLLLKHGARDDNGTAIGMAITCGDEAILSRLLARRVHPDSDYKINKKGLPTPVEVNVFLPSTSNISYSAMFPNNPTIIDWHSMGSSVQLSVVRVPWMVSGVLLLNPKLQSHPRLNEVALTAITRIDFSHNVLTSIPQELFHLVSLRYLNVAQNKITDLPAPIGQTYGCPVLDELFLQDNQLTTLPAAIFHLPALSILDVSNNKLQQLPFDLWRAPKLRELNVAFNLLRDLPVPPMQTSSSLLSLDKLNLQSFEEPPSNKPRNVTQQRLTHRNLWSATLDITDNDMKWQHEQDLGDGKTAGVGSSQLSSLNIANNLFTSIPAALPCLAVNLTRLNMSYNSLRSMGHVTSYPATLKQLDLSHNEISCWPSLPRITESDPHLLCYSCVQLPEGRDDDYKTASSKGSSSSATSFRASVLKSVCRHRRHLRLEALRTLILADNLLTRIQLSTDDATTLFNESEDADWSVVGVNRSKVIFPNLSMLDMTNNCLKEIPASLHELSSLSVLNISGNVNITELPPHLGLLSRLWNLNTRGCLLQEPLRSMIESKKHKTMDIVGYLKSIYEDAQPYARMKLMVVGVAGIGKSTLLDLLRQGAGSGSSSSSHRSRASENHWAKRMGHARSTSRSHRHSSASSANISTVGVDIGTWICEKRKRAPGSHGPVVFRTWDFGGQKEYYATHQYFLSKRSLYLVLWRISDGHKGLAELLQWLGNIQARAPNSPVIIVGTHFDAVGESISPQKAEQLQQLIREKFIAIPDAEKIGLPRVIDSIEISCRTLHNIHLLANIIYDTAMQLRSPGSKEPMLLQKIPASYIALEDIVNVIACNLRAAGRDPVLDGEQYKRLVTEQMRLHNYKSFRDAAELQQATTWCHENGVLLHYDDATLRDYYFLDPQWLCDMLAHVVTVREINPFAPTGVMKLDDLQMLFRSVQVQGNGNRSQGLRRILLMTYFPSGFWSRLITRILADEQIIEAIRGVYMASQDYADFDLRTSLEQDTQWNLWQTGLALYYGPILIFKIWEVPFQKTERTQPFRTDGNRFKLKQDGIWSDVNLSSSSILEVYFPLYEVNISQEVDDNERQLLAEIRPHMSQVAKLLALTVDHIDLLLEDWYPSLGTRFVHTSEGRFLITRLVLCPRCLWKLQLQQNNEPSDREVPPVGCNRPSRSSRRGAGAYFLHGVGDPGEDGALNVFSAYLNATARRERRSEDSLGAGSDADSGVGPDSAGSSRNTSVDGHPGYHLPDNSNVCYAWMIEECILSVYNQSKISCPVHLEQSMAQLAPDVIFADIPDKHTIPSECIIKGSLLGRGAFGFVFKANCKSALMAFKVAVGKWDRDPLQHSCKAYCTARQELAVLLTLKHPNIVPLVGICIKPLALVLELAPLGGLDALLRHYRRSGAHMGPHTFQTLVLQAARAIEYLHRRRIIYRDLKSENVLVWELPQPHTEDSPRNLVHIKIADYGISRQTAPSGAKGFGGTEGFMAPEIIRYNGHESIKECILEGSRPALTQRETQFPTCCLDLMVLCWHEQPRRRPTASQIVSILSAPECIHLLDVVAMPHSEKIVCGVFQSLVGMGDDERCGLELWLPSFGSRIDILDCSPSGSLLQCNSISCSPQPQVAPPKTPENGANSRARSAQRLPKMNMLCCCLVGEAIWMGDVSGNLHAYSTSTYAHLFSYMLDPNIKSAVISLVYMEKIARVAVGTHNGRVFLVDATQMPSNCAFAEGSFVLTEICSGFVLHAACSVVVDGIYELWCGEIAGKINVFPLNENGVSGHQALCHSEEPNLIEDVKVARMCSNESHVFSCLYPGCMVYQWDVISKRIENKLDCSKLLPCSESLQSIAIDEHVNLIKCQISALAAHNSELYIGTTWGCLIVAELHTLRPISVFRPYENEIKSIITLSKDNVPLIATIGRRYRSLISRYVDSAESSTKSSAVSTPTHGAAKSVPPADVDNHIHCLLWRAKHWT

SEQ ID NO: 11485 - DNA, 3134 bp, DROSOPHILA
cgaatcacagaggactcagtggtctgactagctgagcacgaggattccgttccactcggctcctcgggcagaggcatgaactggaagaagttgccgttcttcagggattcgtggagaaagtgacccaaagctacaggctgctgaggagcagttgattgtggtgaaaccatctgggtgcttagctgcgctggattcgactgggtgcagcttttaggttgtaccgcctgatcaagaacaatatgtgttgttataggcggcgaaaaggaatgagtacttttctgtggctgaatagcttggaaactaatctgaggcttatccactggcttcatttgcggtgagttcttcggcgtcttttgcaccctggcgtacatggcactgatgtcatcgcgcgaggtcgacggagcaggcacagacccactcacatacgcggtggagctttccgtaggagtcggcgtgtggtctataatctgtgccgcggtcctaacctcgtggtggggactccctctaatccgcaggcagtcttcctcaatctccgagtaaatgggctcgctgtcgaaatcgcgctgttgccgtgtggtggccaacgatgtggttgcaccactgctgggtccgtctgtgcagtcgtagctctcggtttgaagatggctgatctgaggctcatggcggtcaaagcgggagcagtcctgcaatcgattgaaattatactcttattattgaaatacaaaccatattaacgatatatttataaaagaagagccttattacttggatcaataaaccaatgattaactaaatctatttgaccagaaagttagtaagaacgaatcttgcaatgctacttcgagatacacttttttaaatttcgatagaccgagtaccgccccgttatcgatatcagctgcaatgcagcccagcgaaggaaggcgcaaaacaagaagtgaaaacagctgacagcagcagatttctttcctccactcggaaattcagacgccatccaaaaacactaaagaaacaagaggctttcaaggggaccaggagctcgggcttatggggaggcgcacctggtgagatgtacaggtctctgctgcacaacgtttcactcaaggcgacatcaaggattatcaggcgcagcgtgagcagccaggcaaaaggagccagcggaaagcgcaaacaaaaagcgaaggagatggagtcgagccacgatcggaatagacgctggacgtcattggggaatcaggctgagggtcgagacccgcacaagtgctcctccttcaaggttgtctcatataacatcctggcccaggatctgcttctggagcacctcttcctgtacgtgggaatcccgcatgagttcctcagctggcaacgccgccagcagaaccttctcagggaactgctcaaactggatccggacatactgtgcctgcaggagatgcagttcgaccaccttccagtgctcgtccaacgactgcgtatgggcaacggcaagaagttggcttatgtgtacaaaaagaagaccggctgtcgaacggacggatgcgctattgtctacgactcctcaaagtttgagttgctagaccaccaagcagtggagctgtacgaccaggcggtggctctactcaatcgcgacaatgtggccttgtttgccaggttccgattcaaaaagcagcaggagcagcagaaggaattcgtggtcgccaccacgcacttgctgttcaacacgaaacggagcgatgtccgttgcgcccaggtggaaagaattttggaggagctgcagtcgttctccaccgacacacctatcgtcctgactggtgactttaacagtctgcccgactcctcgcctattgaattcctcgttggcaagaatggggatgtggattccacagcttgcccagaacccctgcatttcgagatcatcgattcgggcgaaggtactgcctccacataccagaacgaatgggttatcgtggactacatcctgcgctcgctaggatcgcggagcaggcacaagctcttgcctctcagcgtctactcactgccctcaatcaaccggtgcatcggggcgggacagatccccaattaccgtctggggtcggatcactacgccttgggtgcagtattcaccgttgtctagtatttaatctcttcatgctttcttggactcatcaataaaggtacgaaatgaacatgcccacttattataaagtaaaagattaagggaagggactcacctgaaaggttctaactgcgtgctcatcgctagcctccagcttggccctgatgctgctgagcagatagcccattttagtgatggtgacgtcctggtcgagatccttgtgatacgagcgataggtggtgggtgatgttgctgctgcttgaaagtccagcttgcgggctctgtttgcacggggcagcttcttcggaggcgtcggtgccttcaccttgcgttcgaaatcgaagtacggctgctctgtgtccagctgttggcgggtggatgtggtcgtacccgagggcgtggtctgcatgggggagtggtagcttcccggcggagactgtgactgcaggtccagctgcgaggtagatgtctgtacgccaatggtgcactgctggggagtgaatctgtgctgatccagctgcgtgtgcacctcctgattagacttcttcggcgagacgaagcgcaggatcttctttttggagttgttcagaaagttcttggacttctttccaaggttcttcggtttgttacccttccaaggagatagattgcgccactgctcgctccagatgaacttctggctagcctgacctcctgccgtgttaactcgactgggatacttgatgggcgtctccttgtgcaccatatttgatgccaggttctcggaaacacttccgtcaacagtgtccaaggaaacctttggcactacgggctgtggctgtgctttaggcatttgccatccaatggctacttgcggttccgccggtgtcctaaactcgctggctgtcttgccctcgtagttgagcatatcggtgatcttgggctctgtccagccaagaataacctccttggtgggcgctcctttccgcctactctcctgccgaatattccggtcgtaatttgagccccgcttggattc

SEQ ID NO: 11486 - DNA, 1134 bp, DROSOPHILA
acactaaagaaacaagaggctttcaaggggaccaggagctcgggcttatggggaggcgcacctggtgagatgtacaggtctctgctgcacaacgtttcactcaaggcgacatcaaggattatcaggcgcagcgtgagcagccaggcaaaaggagccagcggaaagcgcaaacaaaaagcgaaggagatggagtcgagccacgatcggaatagacgctggacgtcattggggaatcaggctgagggtcgagacccgcacaagtgctcctccttcaaggttgtctcatataacatcctggcccaggatctgcttctggagcacctcttcctgtacgtgggaatcccgcatgagttcctcagctggcaacgccgccagcagaaccttctcagggaactgctcaaactggatccggacatactgtgcctgcaggagatgcagttcgaccaccttccagtgctcgtccaacgactgcgtatgggcaacggcaagaagttggcttatgtgtacaaaaagaagaccggctgtcgaacggacggatgcgctattgtctacgactcctcaaagtttgagttgctagaccaccaagcagtggagctgtacgaccaggcggtggctctactcaatcgcgacaatgtggccttgtttgccaggttccgattcaaaaagcagcaggagcagcagaaggaattcgtggtcgccaccacgcacttgctgttcaacacgaaacggagcgatgtccgttgcgcccaggtggaaagaattttggaggagctgcagtcgttctccaccgacacacctatcgtcctgactggtgactttaacagtctgcccgactcctcgcctattgaattcctcgttggcaagaatggggatgtggattccacagcttgcccagaacccctgcatttcgagatcatcgattcgggcgaaggtactgcctccacataccagaacgaatgggttatcgtggactacatcctgcgctcgctaggatcgcggagcaggcacaagctcttgcctctcagcgtctactcactgccctcaatcaaccggtgcatcggggcgggacagatccccaattaccgtctggggtcggatcactacgccttgggtgcagtattcaccgttgtctag

SEQ ID NO: 11487 - protein, 354 aa, DROSOPHILA
MYRSLLHNVSLKATSRIIRRSVSSQAKGASGKRKQKAKEMESSHDRNRRWTSLGNQAEGRDPHKCSSFKVVSYNILAQDLLLEHLFLYVGIPHEFLSWQRRQQNLLRELLKLDPDILCLQEMQFDHLPVLVQRLRMGNGKKLAYVYKKKTGCRTDGCAIVYDSSKFELLDHQAVELYDQAVALLNRDNVALFARFRFKKQQEQQKEFVVATTHLLFNTKRSDVRCAQVERILEELQSFSTDTPIVLTGDFNSLPDSSPIEFLVGKNGDVDSTACPEPLHFEIIDSGEGTASTYQNEWVIVDYILRSLGSRSRHKLLPLSVYSLPSINRCIGAGQIPNYRLGSDHYALGAVFTVV

SEQ ID NO: 11488 - DNA, 2521 bp, DROSOPHILA
tgacaaattgcacgagacatcgggcgacagacgacaatggtcaaatgccgaaaatccattggggcgggcaatttaaaattattaagctgggaaattagcccaaaagcggagggccagagtcttactttcaatcatccccagctcgatttgcataacaaaatgggcgaacaaaagaatgcggctactgcatagtcagacaatttggagcttggagccgctaccgcccagccctttgtcgcctgatttacataaaaattttgtttttccgtaagctgcaagttcatcaaaatttaatcaacgccgccgccaacgccacagcttctgcttttgctttagcttctgccaataggtctagaccaaatcgagcttgggccaaagccgccaagtggaaaaagaaaaacagaaaaacaggttaggctcgcagacaatgcgaaccttatcgcgatctccagcacgctgtcattcgcctgttctgattgacgcccctgccgtgtcggccaggccatataaatggcccggcggctcagctcgacatcattctgacttccgactccggagctccaactagaacagcaatcagttaacagcaagatgcgcgccttcgtcgtcctgtgcctggtggccatcgcctccgccgacaagctcggctacaactacaagcccgtgggccactccagctccggactctccttcgctcctggcagcggatccctcagcctgggaggcggcggtggatccttgggcctgggtggcagcagcggatccttggatctgggaggagccagtggatccctcggcctgggaggcggcagcaacttcggcagcttggacggcggctttggcggtcttggcggtggctccatcgatctgggatcctccggcctgggttcctccggtcttggatctggattgggatcatctggtcttggatctggcctgggctcctccggcttgggatctggtctgggatccgctggactgagcgcccccgtctcctacaatgcccccgcccctgctgctgagctccagaaggagttcttcacctacaccgctaacgaggaggacttcgatgagccccaagcattggaacgcgttgccagctccgtgaacaagggtctgcgtgtcgtcttcatcaagggacccgagaaccgtggtctggagaacgccgcccttgccctcgccaagcaggctgcccagcaggagaccgccatctatgtcctgaacaagcaggccgatattggagatcttgcccagaaactgaacgccatccgcagcaactccaacaacaagcccgaggtgcacttcgtcaagtaccgcactcccgaggatgctgccaacgcccagcgcgccatccagtcgcagtacgaccaattgggaggatcctctcaggctatcaacggcggagttgccaacgctctgaacttcgcctccgctggcccagtgcgtcaggccaccgcccagatccccgagaactcgtacctgccctcgtcggtgctgcgtcgtctgcgttaccgccactaggaagtgccatagctttcagctgccctatttgttgactttttgtgttatctattgatttgtcgaacgaaccgctccaatacaatacttttttaaattaatgatcgggctatttctgtcctgtgtgtgggaactgagctaaccataaagctgtcgggaatttttgacgattgagccactcactgcggggcagagtgagaaattgcaaagctcggcgtttattacacgcccggagtggcaataaaaattccaaagcgatggcgccaaatggaatacaagtggaaatcaataaaaatttacatgttttgggatgcagagagaaaaaaaaacaatcgacgaaaattttttatcataattaaaatgttaatctgcgtgaagtaaaaggttagacaaactattagcgctcaaatttatggcaactgcaagacggaaccaagacggcatacataatgtatgagtgataacatgagtggccggatgaatggccaataacaaagagccaaagtggtcagcgacagatcttttcaagagcacccactatacgctcgattagcataagcagaaaagtggctaaagtttgttgtagaaaaatcataaaaattatgctcagcaccacaatgactaagctgaaaaccaaaatcgaaagaagccaactccaaagttaatagataacagcagaaaaagaaacggtgacaaaaaagcgaattgggaattggccaaactgcagattggctgatgagggagcaatgggcgaaatgctcggtttgaggtgcaaaatcaaagacagccaattaaaaaaccaaatgatggccataaacaaagagttgcaatctgcagtgatttcgcataaaagtcgtgggcgtcgtggagttggacatacttgccttcgatccagcaatccgagcggagttatccacctacacaccaaaaatcaagatgcgcgtccttattgtaagtaatttggaatcaaggatctctaatcagtagcttatactgactggta

SEQ ID NO: 11489 - DNA, 351 bp, DROSOPHILA
atgcccccgcccctgctgctgagctccagaaggagttcttcacctacaccgctaacgaggaggacttcgatgagccccaagcattggaacgcgttgccagctcccaactccaacaacaagcccgaggtgcacttcgtcaagtaccgcactcccgaggatgctgccaacgcccagcgcgccatccagtcgcagtacgaccaattgggaggatcctctcaggctatcaacggcggagttgccaacgctctgaacttcgcctccgctggcccagtgcgtcaggccaccgcccagatccccgagaactcgtacctgccctcgtcggtgctgcgtcgtctgcgttaccgccactag

SEQ ID NO: 11490 - protein, 116 aa, DROSOPHILA
MPPPLLLSSRRSSSPTPLTRRTSMSPKHWNALPAPNSNNKPEVHFVKYRTPEDAANAQRAIQSQYDQLGGSSQAINGGVANALNFASAGPVRQATAQIPENSYLPSSVLRRLRYRH

SEQ ID NO: 11491 - DNA, 5116 bp, DROSOPHILA
actgacactgtccacaggatcaaaaggctttgtatcatccaccaaaaagacatattcctgaatttaaacgctccaattgcgaaattttggattgtgcatctttaacttatagattttatagcgacatgagtatggcatgtcgataaaatatatttcaaatttaattataagtgagtgttaatgagcacttgttctgctgaaggggcatggccacaatcgatgttacaaaagttaggaagttaggatgttataacaagttaggaaaatggtataatataaaaaacatgcagtttttcgtaataagtatattagcaacgctgcgtattaagttagttttatttcagcattacattttattaatcaaccttaaactattttagcaatttatagaaatgacccaatggatttgcaatccaagcttatattgaaggtaagacatctagtatttaagcatcggtggttcagtggtagaatgctcgcctgccacgcgggcggcccgggttcgattcccggccgatgcaaattttgtatactgttttttttttttgaaatcttaaattcgtatttattttatatagtttgcaaactaaaaataatgaaaaaaaaacatcaattgcttgaccccgacgtgatttgaacacgcaaccttccgatctggagtcggacgcgctaccgttgcgccacggagtcgttgttaatgcctgtgccaaacagccattatacctaaagtcaatttacgaaaaacactttgttatgcaggttttaatactattaattatgttttgaaataaacattgactttgcctattaatttttattgatatagtatttactacaaatcattcaatcattaaatattttcttgcagcgcacatgcaaacggttgatgcacacaagcgccttctatcgctagtgatgttcagcctgttatcgatagccaccaagcacaagtatcgaacccaagcacggtagctctacgttttcgttttcccaatcgcagccaacttcacttcaacgcgttcggtataatatttaggtccatttatttattcgcaacaaatgcgaatgtaaaaacgaatattgcgttttaattgtgcgcgcacggtgctagcaaccattgcgacttgactacggtgacatttccagtgtgggtgtcatttgccagacagcgtgatttggcccgaaattcccccaattcagtttttcacatcgccagcttttcagcggtgcacattgagtgaataagcgtgtgtgtttctgccgccaatccaaattgaagcgcaagaatggatgtggcgaagctggagaagatgaaggtggtggacctgcgcaacgagctccagtcgcgcggcctggacaccaaaggagtcaaagcggtgctcgtcgagcgcctgagggcatatgtggaaggaggagccggcgacggtggtaagtttgtgtgtatgcgtcatttgaccgcccgattgttccagtgtgtatgtgtgtgggtgtcactgtgtgcgtgtgctttgccgcgtccaagtcatgcttgtgtttcggtttctgtttgtgtgcgactgagcgtgagttagttgtaagttttccttatataatgataaagtaatcacatttcacttttcccgcgtccagaaaatgcgccggtcacaccaagccgccgtcagcgtcgcacgcgctctatgtcccgctctccatcgccggtgcaagctgctcccgtggccgcagaaccagtgctcgatactctcgaagaggaggagcagccggaggataagacagtgccacagccagaaccagaaagtgaacagccagcagccgagccggaaccagaacaaagtgagccggaggaagctgagccagctgcagcagtgacagaggacacaaccgtcaaccaagcggtcaatgaggagtcgcagcctgagcccgaagagtttgatgaaaagtcggagacagacgacaagcaggagacaatcgaagaggcagtacccgccgtcgtaccacagaatgaagtggctgatgaacccatggaagaggatcatgatgctgcccctgaggagcaggaacctacacaaactgaggagcctgtagaggagaaaccagccgagagcactgtggccgagcatcagtcaaatggcgacagccagaaaatggacgttgatgaggaggattcggccgccccgaaaacggcggaggagaccgagccagcagctaagcctgaggatcagcccccggaacgccgcaagcgatcacacagtcggtccaaatcccgatcgcgcagtggctcccgctcgtccaaacatcgcggcagcgtaggtgacaagcgtgagtcaaaggcagcggccgaggaacgcacagttcctgaggacgagccaaccatcgaggagaacaaagtcggattgagctggcgtaagtagacttgctgtttgcaacgaattcgatacacacattccttaacgttcaaagcttgatccatcattcacagtaactaatatccctttgtttttatattccagtggactctgacttgcatttacgcatcgacccaaccacgtttgcatcggccaaacccctgacatcggaaatttactcgcttatttggtccggagcccgcgcaaactacggagtgcgcgaaggcaaagtgtgctttgaggtgcgcctttccgaggagtcggtgccggagaactcgcactacttccgcgatgagccgcatgtgcgaggattccgcgtgggattttcaatgcccaagagctccttgttgctaggcgaggccgagcattcatttggctattgcgagaccgggcgtaaggctactcagagcgagtttaccgattacggcaagccttaccagctggatgacgttatcggctgctatttagatctggaaagtgagccgtgcacaattaactacactctgaacggcgaggatcttggagttgcgttcgagtttgagaagagcatactgggcgaggagggagccctgtttccgcacatcgttaccaagggctacgaatacttagtgaatttctctgacaccgagcagctgttggtgaatgccgagaggcccacgcgcaagcgccgcaagccacgtaaagacgaagacaaggataaggacgacgataaggatgacaacgatggcgagaagtggaaggtcttggacgaagccacggcggatgatgatgaggtggagaaaaaggatgaagatggcaaggcttcttcggagaaagatgaagaggaagccgaagatcctgaaaaagccaaagaggatgaggcggcgccaaaaacggaaacagaagccgaaactaaagtcgaggctcctgctgaagctgctaagcccgaatcagaagctaccgaggcttcggaaactggtgagtaatgattgattgaaaatcagttatcccacaaaatgctaatattttgggttttccttttagctgaaacttctaccgaaaagtcgtcagaaactgcagctgtgtcaaatggtgatgctgctgcagaacaggcaaacgatgaaaaggcatctgaggataagaaaccctccgaaaacaatgatgaagaagatgaggatggcccctcgccgaacaagcgacccaaaaccgatggagattcggaaaaggctgaatccgaaaaggaaaaggacaggtcgcagacgaccgaagatgagtacgaggatgtcgtgcccgagccaagggatacagctgccctgctggaaggctatgtattgatcggcttagtacctgtcgaaaagctggtttccggtccacaacgcgtcggatctcgcaaggagtgcgaagtcattttactggttggcttgccaggagccggaaagacccattgggcccataagcatgtggccgagaatgctgacaagcgttacgagttgattggacccgacgcattcatttcaaagatgacagtaagttggttaataaatgtacatagctaggcgctgaagatattcagtactgaccaatatatttgcagatcgatggcgcctctcgcaagactgtgcacaaaggtcgatgggacaaggtgtacgagatatgcttaaatagcttggcggctctggaagatattgccatgaagcggcgtcgaaatttcatacttgatcaggtaaaccattaacaaatgacctacatacacccgaaacaaaacaccagcccacaaacacacaagattacactatgaacgaacgataaccaaacacaaaacgaaacaagcgagaattatacgttgatgatgactttggcgcccacccaacacactggggctctgatcccctcgggattgaggggttccaccagcggggcacagcaatgttgcgctatatattttttaattgtacatttgagtatgcattttttttttgctcatcgctctaacttaatagagtgcccaagtgcccctagaaggggcaccaacgtgcaggtatgtcctaattgtaagtcgatccgataattagagtgcttaagtttgaggcagtaagtatctgtggacttcccattagcttaagttttacgtgcaggcgcaacagttgacggggcagttaagagggaattgtaagaaaagtggggatggaagtggatatggatatggaaatggcattggagaaagatgagtgagtgtaatggaatggagtgaagtaaagtatggaagaaggaggaggaggaggagcgagcggcatggatgccactgtaagtagacaaacacaaatccgatcgacgagtcgttcgcctacaatctaatcacatatacgtattagtacctactatctctactctatctctctctctaaatgccaactattctcatatatatgtatgtgtatctacagaaagctatgcgatgcttcatcctacagccagcagcacagccaaccgcgactacttttcccccatagtacattctgttatccttatgcaaagtattaagtcaactgttgttagatgtggccgggttaacattaacccgtcgccgccccctaggtattatgttggtgtgcgcgcaccgcttccgtaaggccccgctcccttgccggcggagtgtgggcgggaagtgggtgtcccgccgtgcaacaggtatgtgttagattataagcgctgaaagcaagcgagctcaatgcgag

SEQ ID NO: 11492 - DNA, 2674 bp, DROSOPHILA
ccaacttcacttcaacgcgttcggtataatatttaggtccatttatttattcgcaacaaatgcgaatgtaaaaacgaatattgcgttttaattgtgcgcgcacggtgctagcaaccattgcgacttgactacggtgacatttccagtgtgggtgtcatttgccagacagcgtgatttggcccgaaattcccccaattcagtttttcacatcgccagcttttcagcggtgcacattgagtgaataagcgtgtgtgtttctgccgccaatccaaattgaagcgcaagaatggatgtggcgaagctggagaagatgaaggtggtggacctgcgcaacgagctccagtcgcgcggcctggacaccaaaggagtcaaagcggtgctcgtcgagcgcctgagggcatatgtggaaggaggagccggcgacggtgaaaatgcgccggtcacaccaagccgccgtcagcgtcgcacgcgctctatgtcccgctctccatcgccggtgcaagctgctcccgtggccgcagaaccagtgctcgatactctcgaagaggaggagcagccggaggataagacagtgccacagccagaaccagaaagtgaacagccagcagccgagccggaaccagaacaaagtgagccggaggaagctgagccagctgcagcagtgacagaggacacaaccgtcaaccaagcggtcaatgaggagtcgcagcctgagcccgaagagtttgatgaaaagtcggagacagacgacaagcaggagacaatcgaagaggcagtacccgccgtcgtaccacagaatgaagtggctgatgaacccatggaagaggatcatgatgctgcccctgaggagcaggaacctacacaaactgaggagcctgtagaggagaaaccagccgagagcactgtggccgagcatcagtcaaatggcgacagccagaaaatggacgttgatgaggaggattcggccgccccgaaaacggcggaggagaccgagccagcagctaagcctgaggatcagcccccggaacgccgcaagcgatcacacagtcggtccaaatcccgatcgcgcagtggctcccgctcgtccaaacatcgcggcagcgtaggtgacaagcgtgagtcaaaggcagcggccgaggaacgcacagttcctgaggacgagccaaccatcgaggagaacaaagtcggattgagctggctggactctgacttgcatttacgcatcgacccaaccacgtttgcatcggccaaacccctgacatcggaaatttactcgcttatttggtccggagcccgcgcaaactacggagtgcgcgaaggcaaagtgtgctttgaggtgcgcctttccgaggagtcggtgccggagaactcgcactacttccgcgatgagccgcatgtgcgaggattccgcgtgggattttcaatgcccaagagctccttgttgctaggcgaggccgagcattcatttggctattgcgagaccgggcgtaaggctactcagagcgagtttaccgattacggcaagccttaccagctggatgacgttatcggctgctatttagatctggaaagtgagccgtgcacaattaactacactctgaacggcgaggatcttggagttgcgttcgagtttgagaagagcatactgggcgaggagggagccctgtttccgcacatcgttaccaagggctacgaatacttagtgaatttctctgacaccgagcagctgttggtgaatgccgagaggcccacgcgcaagcgccgcaagccacgtaaagacgaagacaaggataaggacgacgataaggatgacaacgatggcgagaagtggaaggtcttggacgaagccacggcggatgatgatgaggtggagaaaaaggatgaagatggcaaggcttcttcggagaaagatgaagaggaagccgaagatcctgaaaaagccaaagaggatgaggcggcgccaaaaacggaaacagaagccgaaactaaagtcgaggctcctgctgaagctgctaagcccgaatcagaagctaccgaggcttcggaaactgctgaaacttctaccgaaaagtcgtcagaaactgcagctgtgtcaaatggtgatgctgctgcagaacaggcaaacgatgaaaaggcatctgaggataagaaaccctccgaaaacaatgatgaagaagatgaggatggcccctcgccgaacaagcgacccaaaaccgatggagattcggaaaaggctgaatccgaaaaggaaaaggacaggtcgcagacgaccgaagatgagtacgaggatgtcgtgcccgagccaagggatacagctgccctgctggaaggctatgtattgatcggcttagtacctgtcgaaaagctggtttccggtccacaacgcgtcggatctcgcaaggagtgcgaagtcattttactggttggcttgccaggagccggaaagacccattgggcccataagcatgtggccgagaatgctgacaagcgttacgagttgattggacccgacgcattcatttcaaagatgacaatcgatggcgcctctcgcaagactgtgcacaaaggtcgatgggacaaggtgtacgagatatgcttaaatagcttggcggctctggaagatattgccatgaagcggcgtcgaaatttcatacttgatcaggtaaaccattaa

SEQ ID NO: 11493 - protein, 795 aa, DROSOPHILA
MDVAKLEKMKVVDLRNELQSRGLDTKGVKAVLVERLRAYVEGGAGDGENAPVTPSRRQRRTRSMSRSPSPVQAAPVAAEPVLDTLEEEEQPEDKTVPQPEPESEQPAAEPEPEQSEPEEAEPAAAVTEDTTVNQAVNEESQPEPEEFDEKSETDDKQETIEEAVPAVVPQNEVADEPMEEDHDAAPEEQEPTQTEEPVEEKPAESTVAEHQSNGDSQKMDVDEEDSAAPKTAEETEPAAKPEDQPPERRKRSHSRSKSRSRSGSRSSKHRGSVGDKRESKAAAEERTVPEDEPTIEENKVGLSWLDSDLHLRIDPTTFASAKPLTSEIYSLIWSGARANYGVREGKVCFEVRLSEESVPENSHYFRDEPHVRGFRVGFSMPKSSLLLGEAEHSFGYCETGRKATQSEFTDYGKPYQLDDVIGCYLDLESEPCTINYTLNGEDLGVAFEFEKSILGEEGALFPHIVTKGYEYLVNFSDTEQLLVNAERPTRKRRKPRKDEDKDKDDDKDDNDGEKWKVLDEATADDDEVEKKDEDGKASSEKDEEEAEDPEKAKEDEAAPKTETEAETKVEAPAEAAKPESEATEASETAETSTEKSSETAAVSNGDAAAEQANDEKASEDKKPSENNDEEDEDGPSPNKRPKTDGDSEKAESEKEKDRSQTTEDEYEDVVPEPRDTAALLEGYVLIGLVPVEKLVSGPQRVGSRKECEVILLVGLPGAGKTHWAHKHVAENADKRYELIGPDAFISKMTIDGASRKTVHKGRWDKVYEICLNSLAALEDIAMKRRRNFILDQVNH

SEQ ID NO: 11494 - DNA, 2786 bp, DROSOPHILA
gtaaaatgtgagtttaatgagggaactgtagcgggctggttagtggcttaccttggcgctctcagatcgcctgctgcgccttggtagtcgcacgtgctggtcacgtggcggtgccgtggagccgcagtctccgctgtcgctggtgaagcagtagcagaagccgttctggcacggcttccccttgcgctcctgctccttgttgcagcgattctggttgattaggtccgcatccgtggttctgcggactcggggaagttgtcgggacatgttgatgtggttattgttggtctcgcagtcgcgactttgagtggacacacggcgaatgcggcgtgccctaaactcgtcgatgcactcctgcaaactgaacgacgatgtggaaccagactcggcggaatcctcctcctcctcctccccctcttcttcatcaactagaacatgtttggagaactttgagcctacaaaagtctggaggccaatatgctgttcatttgcacttgtgattaaatagcgatttaatgcttacggtggccattttgcagtctatgtatttatggagctgattagaccagctgcatgtgctccacttttacacgttgcacgctttctactccgcttctacttcgtgtttttccaatcaaatgaaaagcgacgcctcgcctgcatttttgttttccgctttgtgccgcttcttctttatcagcgaaagagagagaggagagagtgcataacagccctgtcttgcgtcagagattgggcaattggctggtataactcaggcagcactatattcatatgcttgaaattgttattatttatacaattgttcaaatgggctttactatttattatttaattcagcgcggaataggttcatatttaaaagaggatgtgctagagattaattatgttccaatgtaagctggggttataggggttatagctataaaacataatgtttctagctaactcgtcatctctggtcagagagaatcagctgtttgcggcatgctattacgtcgtctcttatttggaattgtaaaaaatagttaaaaattgttttgaattaaaaacaaatacagaatgtcaaacagccacttgttcttgaagtccggcttcccccgtgcacccctgcaaaatggattgggacgctatgtttgtcagctccagcggatcaccctgaagttctgcaagaataatggatccagcagaggcatgcggtaagcaaaatccttaaatgtttacatataaagtaaaattaatcatacgaaacgttcaatagcgacttcattgagaatcacttgctggactttgccaaagagaatcccgggattgtggtctatgtgaagcccaggcgccaccgcacgccagttttggtgggagagtactgtacgtatacataatgtataaggatgctccctagaatacactttaaatatgtcatcctgttccagtgaacggcgagcgcgaatggatgagctgcaggaacagcacccaagaggagatctccaagtggattgacctgctaaagactcaaaacggcagctccagctccctgcgactccggaaaatgtggcataccgaagtgccctccatccaaggcccgtggacgccattcctgctgcgttcgccggatgcccaaggccaggcttaccccagtgccgaggcgtcaaagccgctggatacgccgcaaactgccaccgagaagctcatcgagttgttccggcaacagcaactggaagctggcgaggaagcacacgacgtgctgaacaaaaagcgggccgagtgatagggattaggactttttggtaattgttgcttttatttttatagtcaacatagttttgttggtaaacaaataaatatttaaaatctaaaccactaaacttgtgcctccatcgctggaatatcgaaccaaaagtcatagaaaaatgcaaacaacttattgtccccttagctatgttgcctttcagatagtttcgatatgtttcgggtagttggaatatcattgtgggagtatcataaataatgcttaaggttaccgaccccttggaggcttggaatacgaatacgaatacgaatacaaatacgaatagaaatagaaacaggttctggtgacgacttagcataaccaacttagcatcgactaacgactgcaggtgagatgggtggctccgatcggcggcgatcggttaagtacgcaaaggtctgactaagacgttgatatagttacttgcgggtgcacacagcgagtttgggagtatcaaaaagtagaccacgaataagtaattgcttatgtgccgaagtattttccatctaacacttaaaactattgtacatatagttactttcacacgtacgatcaacgatcaacttacacaccgataaaagcattttgctcgagtttacaatttccgtttagtgaattcctttggcgaaatgcatttggttcttcctaattattactacatagaccttgagtacacgaatgttaacgttgtcatcaaaataatcaatacggacgtctttacacttttgatattgttgtcaatgttatatcactagttgaactaaattaaacttctccttaaacccatgtcttttttccattctttcccagctctgcttcatctctgccgctgctggcccatatttatacctagattttgtattttggtggtgatggtggtggtggtggtgttggtgggtgagctttaagcaagcgttttccattcgcaactagctactggctgctttttggtttcgatatatagcctttcgttcatagc

SEQ ID NO: 11495 - DNA, 659 bp, DROSOPHILA
gcggcatgctattacgtcgtctcttatttggaattgtaaaaaatagttaaaaattgttttgaattaaaaacaaatacagaatgtcaaacagccacttgttcttgaagtccggcttcccccgtgcacccctgcaaaatggattgggacgctatgtttgtcagctccagcggatcaccctgaagttctgcaagaataatggatccagcagaggcatgcgcgacttcattgagaatcacttgctggactttgccaaagagaatcccgggattgtggtctatgtgaagcccaggcgccaccgcacgccagttttggtgggagagtacttgaacggcgagcgcgaatggatgagctgcaggaacagcacccaagaggagatctccaagtggattgacctgctaaagactcaaaacggcagctccagctccctgcgactccggaaaatgtggcataccgaagtgccctccatccaaggcccgtggacgccattcctgctgcgttcgccggatgcccaaggccaggcttaccccagtgccgaggcgtcaaagccgctggatacgccgcaaactgccaccgagaagctcatcgagttgttccggcaacagcaactggaagctggcgaggaagcacacgacgtgctgaacaaaaagcgggccgagtga

SEQ ID NO: 11496 - protein, 192 aa, DROSOPHILA
MSNSHLFLKSGFPRAPLQNGLGRYVCQLQRITLKFCKNNGSSRGMRDFIENHLLDFAKENPGIVVYVKPRRHRTPVLVGEYLNGEREWMSCRNSTQEEISKWIDLLKTQNGSSSSLRLRKMWHTEVPSIQGPWTPFLLRSPDAQGQAYPSAEASKPLDTPQTATEKLIELFRQQQLEAGEEAHDVLNKKRAE

SEQ ID NO: 11497 - DNA, 9661 bp, DROSOPHILA
caaccgaaaaaaagaaacactaacattactttcgtttcctataatttacgcatgcatttgttgttgatacgtacatatgtactttatagctctatttatgtctagtgcatcaacttaaggcagatatagagattaacggatgttgatcatgatagtggtagcgatacacaatattaaagcccttagttacgcgtagaaagttcgttggatttttgatttttcgttacaaagttaggagctgggcaaatcgaatttggattcgtttgctggccaacagtgtttgtgtagacacataaatttataaactaatatggcacagtctgcgcaaaattaagttgagtaaacgtccaagtaatttacttaatataacattttacaaatacaaagtacagcaaagacagcacattaacaaaaagacagccctgttgccaagctaagcgaattcggaaataaactggtttttagctagtagtattggatcccatttacagattttactacatttctaaattctgggtcactgaacaatcttaaaataaatatatattcgatgacaagccgttttatcaattccgtttccgatacattcaaattcaaataaaattggacttttataacagggccattacaaatttgggattctaatttccctgcgttgacggtttagtctgttgttgttgttgttgttgtgattgtgtggctactttcgtagtactgctcctcctttactatatcttcgtgttctcattcggtgtcagtcttttgaaataccattttgaaatcgattcatctgatgcaagctgcaatttgttcgttcgttgtggttgcgggaatgttctgtggttgcctcgtttcagggagtgagtgagcgatgtggtgggtgggtgtttttttttttggctgtgcacgtttcaaggtttaaagctaactaaactagataaactaggctacaatgagtacaatatatattcgagtttctgtgtgttcttgggcgcccggcttattcaaaggacattaggttggtgggcagaggtttgggcactcgcatggtggccaatttgcaaatggcattcgaccagagatgcgtcatctggggactgtccgtccggaagcgatagacggtgcccagagttcggtggcacagttcgaaggtgttcttgtgcttggtgttatcgctcacgtgggcataccatccatccaatggacacactttgcacggttcccgcttaaagtcgttgcgttcgcttcctttaaaggatttgggtgggaaatacaccagcgagttggcccaaatctgtagccagtatcgttgccaagatgccaccgctggcttccttccctccttttgaactgttttacgccggacacatccgtgcatggcggctgctgcctctggtgacatcaaatcgcaatcgctgccggtaaaatcacacataattccctctgcactttccaacgatgttagatctgcttgggatagggcatcgctgtgctccaagaccgaatcatctagcaggtggtgacgaggctgcacttgactcggatcaagttccaggtgcaggtggtgaggatgtccatcgctgtggttgtgcgttgcaatcttgccaaaaatgctgtaaaaggagaaaatggtttagtcaagatattcttgcgggttggagccattcatgctgttcatacaaatgagaagaaatgaaatagcaaaaaggcaaacaagggtgaactgcgattcgtatttgtaggttatatcgatttattctcagcatagaattgactaaggtttcttgtttaaaataaatgcgatagaaccttctaatatgttcggggaagttgtgtgcgtaaggttggtgagtaatgcatggtttcccaaatcaaaatcaaatgaaatgagtcaagtgttgggtcgtgtatttgtgtatatcatagcattttcaactcgggtccgtgcaaaagaaaagaaaatgaggagacgataactgaacacatcaaatgttaaaatgaggataacgcatcgaatcagtagtattcagtatcaagctggcaatacacacatatcctagctacaggactctgttctggactcaccgacggcatctgcaacgcttgttggagatggtgccgatgcccggcgcaatcatgacgatgcaacattggcacttctcggcaaagtttcgcggcaggctgctgctgcgaaatcttcattcgttttgggcagaggcggatgtttgacaattaacgaacacacacacaaaacgaaagcataagacaaaagcaaaacggtagaagtgagagacatagagatttaaacgattaataaggacccagtgtacaaatgtccaattcttgcgcagtgattcgaggtggtggatttcaaacaggtggttaacaagggaagccaagtgttggctctcaaaacgtaggattccttttacttacttggtgcccagactgcgacacttgcgatggcctggcacaaattttgtgccgcttgccattcgcatggagccaatggttttggccggcgagagatttaggcatccaagggccggagtaactacttccacattgaaggactcttttgagctgcaggacgaagaactgggtccagagggcgacgcaggttccaggtttagagagcgcctgaaaggttaatgagtattataacagcattatttttagataagaaaacagctcggattcaaaagattaatcttacttgtactgatcctcctcgaatatgttctgcaactcctctatataccttatcgaagtcaaatacttttgtgtcgcctcatgcttctgcaaatgcttatagttcgactgttgatagttcgaaattacacgcaatatattgttcatcttattgcgacgctgctctggctccaatccgcccttatgtgggtgggccaaatcgatgtagatcagatcggtgagaaagagacccagataggggatgcagggcaggcggaggctctcgaggtaggagcgcagattcgcccagttgtcctgatcactgaatatatcgctgaggcgatcgaatgcatttcgatcctttttcgataagcaagcccaggttttagttaggcgatatatgctggcgctttgcatggccgaaataatggcaaacagcgagtgcagattgttgagctcgtggagttttttggccacctaaaagggaaacattcaatcaatatgtgaaccgacatattatttgggggctcaagtctactcacctttataaagtgtgtaataatctcggctctctgctttggctgctcggcattgagaatctcctggactgtccaaaagctcgtgtggttaaatcgcttagtaaatgccacaatgttcggcgtattgacatgcttatcctttttcgtccacgcacaactgctcagctcatccggttggatctgggcaaagactgggaaatccagtagcgtaatctgattagccaacacatcggcgggtacacgtaacgcgctcaaaataaccgcatccaactgcttgatggaggcgtgggctggtaaactttgcgacttggacggtggtgctgccgaggctctacaaattgaaagaactgtgcttagtggggaattcatttgtctgaaactttggatgccgagtaactactacatacatatacaaattgtataaatatgccgagctctaactactgattacttacgctatagtgtagtagcaaccaggcgaatctggcgaggaggagaaactattcaaacaaccgatggaattcttgcggcgcgtgctcttgatatttagagttttgctggcctgcggttgcatactgggcggttccatttgctgctccttgtaggtcttctcctggcgcaaacaggccatggtgtgggcactaccattggtattcggacttcgttgcttggacacccgagttggctgctgctgctgttgtgaaggaggaggaggaggtgagctctgcttgaattgagtcgcggcataggcctgacccgtatatccattatagtccgtggtgggctttctgcttaactgaaataacgtaaaatctttaatatcgaactacaatcgagtgggaagaaggtatagatagccacctctgagtagcgcagattatccgtggacaggtcgcgtgagatttccgagtatcgcatcatggcagccaactccggctgtcgttgcacttcgacaagctcttcaaaactgtaatggacaagactcaagttaacttcgtgattaagttttggctctcggtgttccgcacactgggcagactttttgttgactgaaaccgagtttgttttcctcagttctgcattgtggcttttgtgttgcacgaacattcgtaacagaaaacaacaaaagaaattaaaaacaaaaaagtataggaaaaaactggtggcaagccgaaacgaagcttctggcacgcttcgctgctcgatttccaatggagcgggccatgtgagtcacgagcggtgcgaggaaaccattccatgctcttttatggtagctctcaagtggtcaaatggcttttcgggggtgcaagccgctgataaaaagtcacgggctgcagcggtcagcggaaagtttggttggaaaacaagtcacccgtttagaaaccaaattggttttcagcccagttcaatgaacccgtcgaccaaggcatagaaaattaaaatttaaataagccattcgtttccggcatttttctcatttccacaaaaacacaaaacaaaatgcagtcgcttaagtgcgaaatatacaatcaagaaatgacacaatatgtacatatgtacatatacgtttacgtaattaaaggagaaacatatttatttgaaataatgaaatgaaaacaaaagtaaccacttacattacggatcattatcggcatgtacaaccttctagaaaccactattcatttatttcccatcattgcaccaaccacaatacacatatgtatttaaaattcctctaagactgactgttttgaccccgtctgattaatttcaattaagatataatcatttgaaagcaaaagctgatcaaaagcaatgacgtccacactttgtcattggtatatctgggcttctgcctgcggtttccttcgattattttgcgcttttccgtttgagcaaattgaattatccgactctgaaataacagcgcaaatatctcgagactagtgtgggcgaaatccaaaagatacattcccaagacggatgcaaataaaatcggttggggaacgatattgtttttatgctgttcttatctattatgaattccattctaaatcgtttcaaactcattgtgctcagttgggatttaatctacatacatatatatctctattgcagcaaaagaattaaaaaaatacagtcctatatattttagatttgtagtatacagatgaattgaaaacaaattgggcggaaaggcaacaaaaacagaaacaagatgtagacaagacaccaggcgtatgcgaattatatttcaaaatgccagacgactgcctcaagattttgaacaaatggactttattgactatttgaactattccatatacacatcacttctctccttattgaattcatatatatggccatacatacatatacatatgtatctgtatctgcgccaatctgtgccatttttcttctggacttcccttcggctggtcggcgttttaatggagatatcatccaatgcaattaaagcccaacgatttacttgcctcatctgagggctcgtaaagttccacccactggatacaatttaatccatagcatttgtaaataattcctgccagacagcgcgctcctttaatgcgaatttgtaaacttttgatgggcgaatgaatactgattgttttttttttcgtggtcagggatatggcgaaatatgtacatatgtatgcctgcttggaggcaaaaacatcgcccactatatcgatactcccacagaaaattcagtgtgtttattgcttttacacaaatttcttaaaagaaaacaaataacgcagctgtagaattcaaggaaatcacatttgcctatgggcgatttcgattcttggttttttgtttatcagactagcaattgtatttaaataaaatacaatagcatatactgacgagcacatttctacataatcttgaggaaactcggtgagatttctcgtttcttttttttctcttgtgttggcattttccattgataaattcttcaacttgtgggtagcactggaattcgctatgatgacaagtgatgactgaccatcaagggaatttgcagttcaacccattcgctgactcgcactgacctccagctctagaagaggggggttaaagatctctggagcagctttctttgccgttcaaaagcggggtggcgaaatgcatatttacagaagcgaccgtttcgcaaggtcaacggcaagcgagtggctgtcgcccggtgatattcgcgattgaaatattcaactgacaggttcaataaccgcctcgaaagattgcgattaaaactgaatacttagcctctattacgatcagccttcgacttgggttttctacacgagtgggaaaacatttagctaatctcccattgaaaagcgaggggcgttatcagacagtcgtctaactatttgcttacacatgcatgccagaataaatacatgtaattacgctggttaacaacaaagagagaaactacaaatggaaaggtgccaaagcagcagcaaggcaagaaagcctgctttcgaggatcgaaggcggagtaccctaaacacatctttatttatgagataaaattggcacaattctatatattatgttatactgatcccattcagagccaatttgtaagagaacttttagcccacttttgatctttgcaacttttgtcctataccatccttaaacacaacatactcccacataaacaagacgtaaattgttatttatggcaggccagtgatatagtcatccgtttccggttcttccgaatttgtatacaaaatgaaaaacggaatttgggttctgtgcatattttttctaaacagatggcatttcgatttgaagatctgttttcgcggaaaaacaggtagatacatgatttttggccaggtagatatgtaagtagtttcaaatgcaagatacgacttctaagatttcaccgttgcagcataacgttgccaacttatgcgtgcaattataatacccacttgtagggtagtagcttgaacaaaaacaatgccaaggaaggccaagcaatcgagctggggtttcttctttcatctcctattctcgtgttttgtatttgtttcatgagctgcttatacatgtacatacatacatatgtacatgcgatctatggcacatgtgagccaccaaagtgggtcacttggtgagcatccagccagtcgcggagcagcgagcctagaactgagccacttacccaatttctgcgtcgagtggctgtacttaagtccaaggaataagcatgaacaaaaggcaattggaaacgggcgagaaaccttgaaatgcagcatttcagcatcttggcaacgcattcaaaaacatctgtcgcacatatcctgttggacgagtccgggcaaaacagatgcaccgaaagaaaattgcatgcagtttgaatatttagtaaatacttcgtacttgatatgaatttggactggggaatgtaatgttaataattcgacggttttttttacagtagtatactacagaatatacactacatttccaagaagagcaaagttgcaattagtacttgcatgtaatacgagtacatttggatttttgaacggcagaccacaaagttaatgatgaatatcacattttgcagtgtttccatgctttatttatttgggatacgaatggagcacatcgttttttgcggtgcttatcaacagcagctggctcttaaaaatccagaggcgttgcctgcgactgcgagtatcttcttatcaagccgcttatcacctgatctaacgccgaaaggaagtggcaagtgggtttcgctggccgccgccacccgatgattcacatttcgagacatttacgagtatgttcgaatataatcaatgtttgtttcgcggaggaaataaatcgatagaattgaacgcgaaaagcggaaaacgggaagccgaacataaacacggatacacaggcagccactctcacgcaatttgctgtcgtttggggttctaagctcattgtatgcaaagtgtggcgcccactcaccaaccaaccacccaccacccacttgggcgtagtttcgtaatcagtccccgacaaactacaaaaaaaaatggcacaacgcattgcacttgccacttggatcttggagcatttggggcgacaaatggacgaagatagcgacgcccaaatccgaaatagcaatgcatattgttatttataggctttcgccgccccacctatgtaacccgcactttcaactcacttcgagctccagctgctggtgcattttatatcaaataatcgatgtacatgcgatgacagccactgcgtcgcgcttttttaattactattcaccacgcttattggcttcacctttcgttcgtttgttttaaaactcgagaacaacgaaaattcagcagcgaattagccgaaaacgatccgcgcgcgacgccgacgccaacgtacagtgtgaccgtgtggcttttggcttgaaataccactcacgaaaatgtactaatataagtcgaacggtaaaatatgcttcttaaatatattttttaaagtcattataatttaatcagattccattccatatttttatgtatctcagtgtatgacttagatattcattattaaaactgtttttcaaataatttctttaaatattaattttaaaatttgttttgtatgttcttgttatagcaagttataattgaaatttattagtacattttggttgggaacctggataacaatgtagcattgactcgagccgtatggccaaaaaactcagtcttgataatttttttaaattcttttttgaaacttgttagcattgataaaagtttaatgcgaaatttgattataatgtccctttaaagcttcgatcttaaattccaaaaatgtacatatgtatgtagcccatgatccaaaataccgaccctttgccaaacaatgaaagtccttaacttttataaaaaatatatatgtatttaatttctttacttacatcggaagtagctttatcatttcattcctttttttgggttatttttcgcacttgcatttagatcaacagggacttacgactacgaggaattgagcaggctgaatggatgggcgaaagacagcaagaagtgggatagaatgggcacgaatagatgcggaaggatgaggggcataggtaggggacatagttctagaaggacttaacactaggtattgctatatgttcggggaatctagctaaatgtgtctgtgagtcgttcctagtaccgataaccgctgccatcgttgtcaccgttctgaccaccgggtccgaatccattccggccaccctgacccggcctgccgctcgagtatccttggccatcctgactatcctggccgttgccgcctggccgaccaccaggacgaccgctggagtagccatcacgtccaagatcctgaccacc

SEQ ID NO: 11498 - DNA, 2236 bp, DROSOPHILA
tcggcgtcgcgcgcggatcgttttcggctaattcgctgctgaattttcgttgttctcgagttttaaaacaaacgaacgaaaggtgaagccaataagcgtggtgaatagtaattaaaaaagcgcgacgcagtggctgtcatcgcatgtacatcgattatttgatataaaatgcaccagcagctggagctcgaattttgaagagcttgtcgaagtgcaacgacagccggagttggctgccatgatgcgatactcggaaatctcacgcgacctgtccacggataatctgcgctactcagagttaagcagaaagcccaccacggactataatggatatacgggtcaggcctatgccgcgactcaattcaagcagagctcacctcctcctcctccttcacaacagcagcagcagccaactcgggtgtccaagcaacgaagtccgaataccaatggtagtgcccacaccatggcctgtttgcgccaggagaagacctacaaggagcagcaaatggaaccgcccagtatgcaaccgcaggccagcaaaactctaaatatcaagagcacgcgccgcaagaattccatcggttgtttgaatagtttctcctcctcgccagattcgcctggttgctactacactatagcagcctcggcagcaccaccgtccaagtcgcaaagtttaccagcccacgcctccatcaagcagttggatgcggttattttgagcgcgttacgtgtacccgccgatgtgttggctaatcagattacgctactggatttcccagtctttgcccagatccaaccggatgagctgagcagttgtgcgtggacgaaaaaggataagcatgtcaatacgccgaacattgtggcatttactaagcgatttaaccacacgagcttttggacagtccaggagattctcaatgccgagcagccaaagcagagagccgagattattacacactttataaaggtggccaaaaaactccacgagctcaacaatctgcactcgctgtttgccattatttcggccatgcaaagcgccagcatatatcgcctaactaaaacctgggcttgcttatcgaaaaaggatcgaaatgcattcgatcgcctcagcgatatattcagtgatcaggacaactgggcgaatctgcgctcctacctcgagagcctccgcctgccctgcatcccctatctgggtctctttctcaccgatctgatctacatcgatttggcccacccacataagggcggattggagccagagcagcgtcgcaataagatgaacaatatattgcgtgtaatttcgaactatcaacagtcgaactataagcatttgcagaagcatgaggcgacacaaaagtatttgacttcgataaggtatatagaggagttgcagaacatattcgaggaggatcagtacaagcgctctctaaacctggaacctgcgtcgccctctggacccagttcttcgtcctgcagctcaaaagagtccttcaatgtggaagtagttactccggcccttggatgcctaaatctctcgccggccaaaaccattggctccatgcgaatggcaagcggcacaaaatttgtgccaggccatcgcaagtgtcgcagtctgggcaccaacatttttggcaagattgcaacgcacaaccacagcgatggacatcctcaccacctgcacctggaacttgatccgagtcaagtgcagcctcgtcaccacctgctagatgattcggtcttggagcacagcgatgccctatcccaagcagatctaacatcgttggaaagtgcagagggaattatgtgtgattttaccggcagcgattgcgatttgatgtcaccagaggcagcagccgccatgcacggatgtgtccggcgtaaaacagttcaaaaggagggaaggaagccagcggtggcatcttggcaacgatactggctacagatttgggccaactcgctggtgtatttcccacccaaatcctttaaaggaagcgaacgcaacgactttaagcgggaaccgtgcaaagtgtgtccattggatggatggtatgcccacgtgagcgataacaccaagcacaagaacaccttcgaactgtgccaccgaactctgggcaccgtctatcgcttccggacggacagtccccagatgacgcatctctggtcgaatgccatttgcaaattggccaccatgcgagtgcccaaacctctgcccaccaacctaatgtcctttgaataa

SEQ ID NO: 11499 - protein, 665 aa, DROSOPHILA
MMRYSEISRDLSTDNLRYSELSRKPTTDYNGYTGQAYAATQFKQSSPPPPPSQQQQQPTRVSKQRSPNTNGSAHTMACLRQEKTYKEQQMEPPSMQPQASKTLNIKSTRRKNSIGCLNSFSSSPDSPGCYYTIAASAAPPSKSQSLPAHASIKQLDAVILSALRVPADVLANQITLLDFPVFAQIQPDELSSCAWTKKDKHVNTPNIVAFTKRFNHTSFWTVQEILNAEQPKQRAEIITHFIKVAKKLHELNNLHSLFAIISAMQSASIYRLTKTWACLSKKDRNAFDRLSDIFSDQDNWANLRSYLESLRLPCIPYLGLFLTDLIYIDLAHPHKGGLEPEQRRNKMNNILRVISNYQQSNYKHLQKHEATQKYLTSIRYIEELQNIFEEDQYKRSLNLEPASPSGPSSSSCSSKESFNVEVVTPALGCLNLSPAKTIGSMRMASGTKFVPGHRKCRSLGTNIFGKIATHNHSDGHPHHLHLELDPSQVQPRHHLLDDSVLEHSDALSQADLTSLESAEGIMCDFTGSDCDLMSPEAAAAMHGCVRRKTVQKEGRKPAVASWQRYWLQIWANSLVYFPPKSFKGSERNDFKREPCKVCPLDGWYAHVSDNTKHKNTFELCHRTLGTVYRFRTDSPQMTHLWSNAICKLATMRVPKPLPTNLMSFE

SEQ ID NO: 11500 - DNA, 3970 bp, DROSOPHILA
aatcattactggtctcaatattcgtactccacgcagtccaatgcgggtgccgacaagaagtagaatgcagcaacactatgcagccgtgttccaccaggcccagacccctctgcgttgtcccgaaaggagttaaccacaaatctgaactaaactttatataatagttttaaacgattaacgaacagtaaaacaaaattaatttagtttagccagtttgggctagtcgaaaccaaacaattgcgagggctaaccaaaccctaagtcaaaattcttaccttaccttcggatggattgtacaaaactaagactacatatatcatttgaaattgaacgtgaatgtttcgcttttcattttccacaacgcattttctatatgacagtgacgaagcaattgaatgaaacgcggtctttactctggcactacgtatctaggcagtacaacttgttttaacgtttattacgattattgttttattttttacaatcaacgcaaacaattgaaatgaacgcattagagaagaaacattaacgaataaatctatacattgaaaaaatctatttaaacgatcttattactgggaaagggtgtgtaatgcgctcgcattttaaaggacaaatcgttaaaacacgataaacagctaattttaaaatttacattaggccgaatgcaatttaagaaatattggagtctgcaagtatgtattttctaatttagtgtttaaaacagttttattaaactaaaaactaacgtttgcttttttttttaaatgtatatttttatttccaaaaaaaaattagtaagtttgccttagatttcaaacttaagttgtgctatgagtaactgaaattcaaaaaaataaagcaaaggatatttgtagctaataaatattttctaaagataagctgtttaaataataaactaatgtgataaaatttttacttgagtcactaccagtgcggcttagcggaattttcggcaaacgggcacactgcaacttggtcacactggctagctggcagaagtccgtaaaattatttttcgtttcccagtaactttcttgtcgcattttgcttttgaaatcaaattaaatcattttttttttaccaaaatccgatatcacaatcagatactgctgtaagttgagattaggtgtgccgttctgaaaccagcaaactcgaccaaccctcccactttgcctttgccctttgttccgagttccactgatttacatactttcgcctcgccaagcataggtaattatggatacggagaagtctagcagcagctccttcgaggacctgaccaacgccgaggacaccaaagacattcgcaaggtggcagcggaggaggcagcctccggagatggcgcacccccggcatccgtttctggagacggacagaaggcggaggaggaggatgcagaggaggaatgtgatatactgggtaacaagcagctgattaagcgcaccatcaaaaaggcaccgcaagactcgtttaggcgtccgattcgcggcgaattggtcaccgtgaacttcactggaaaactggacaacggcacggtggtcgagaacgagttgaacttccagtgtcacgtgggagactacgaggttatccaaggattagatatggtgttgcccatgctgcaggtcggcgaagtgtcccaagtcagcgtggattcccgcttcggctacggctccctaggactgaaaaaagagggtgaatccgagtacctggtaccacccgatgcgcacgtaagtttatattcaaattgtcataagaactcttcacatatatcaattttccagcttacctacgaaatagagcttctggatatcaaatacgaagaatttgcggaccttaagagctttgaaatactgcgcaaatatgggtatgttatattctttgctttgctagtcggttcttaaaaaataattcatcttttcagtacgcgcaagaaagaacgtgccaatttcttttacaaacgctcggagttcacaaccgccattcacctgtacagacgtgccctcgactttctggacaatcgtgatggggatccggactccgagttcgacaaggaagacttggagctctcgaacagtgacacgcagaccctgctagaggatcggttgatcgtttacaataacttggcaatgactcaaatcaagattgccgcttatgacgcagctctgcagtccgtggagcatgtgctgcggtgccagccaaataactccaaagccttgtatcgcaaaggaagagtaagttgttggctcagaaccatcgattttcattcacaaaatacttaaattacccggcagatattggagggcaaagcggacacccagggtgctattaagctactgcaaaaagtggctactctcgaacccgaaaatcgagccgttcaatcggatttggccagacttttcatcaaggctcgtcgtgaggagcacaacgaaaaggagatgtatcaaaagatgctgggccaggccaaaaaaatggagcagaatactgccaccaggcaaaagcagccgcttgtcgacaattccaaggtgagatagctaatgagtttataaaaaaaaaccgagtgttaattctcattttgtcattcagctgaagctgcttggctatctaatgggtacgatattaattggagtggctggcgtcgctatttatcgttacaagtactaaggacaagcattgcacacgaactactggttattttaagcaattgaaatgcattttttaagtatatatagaaggcaaaattatgaatgttggaaagtcgcagttgcttattatgatgatatggctctcgttgtacatttaatgctatgcacacttcacaatagtatgtatctttcaaatagtatggttttggatatcgtacatataatgttaaagcttaagtttaatcaactacattctgtcagacaagtaacgggaattgttaaaataaacacaatattctcatcattatgttttatacaattttcaaacgaaataaagcaacacaatcgaaatcagaccatatttatgaacttgcaataaggttcgaaagaaagcatatgaaataccatatgaatgtaatgatactgataagagcagcactgataagaactcctaacttgattttttttgttcgttacttaaataatgcatgatttaactaaactctgctctaatctaaaaggcaaacgaacttttgtaaaaacaaatcggaacatccgttcaagagatataattttcttctatcgcgacttagaatgattaaatgatggtgcgaatttaaacatgctgattcattgtttgcgtatggtaatcgacatgacaatgggtatatttgggtctcccaaggctgtttctatggggggtcgtggaggtaatgcagctgcgatcgtatataaacctatcaagacatcaacaattttcagtatctgatcactatatcaacaataattgtgaaaaaaaaaccagcaataacacaaagctttatttaccacatcttatcagttcgccacaatctgtaatatctattcgatctatccagaaagtctatatgtttacaaacgtatgtttataagcaagtgtttataaatatctttcatttgagacaaaacacttttattggggtgattaatatacaaattcataagctttcggttaaacaaattcctgcgaaaaataaaaaaaatacatgtgatgcgagtaacttaggccttcgatgcaatttcaagggcctgctccagatccttgatcaaatcatcggcatcctccagtccgacggacaagcgaactagaccgtcagtgatgcccaaagttttcctatcctccgctggaaccgaggcatgggtcattattgatggaagctcggccagactctcgtagccacccagactctctgccagggtgaacaccttgagggccttgaggaaagccgaggagtgcttcagctcgcccttaatgtagaaggag

SEQ ID NO: 11501 - DNA, 1619 bp, DROSOPHILA
tcacactggctagctggcagaagtccgtaaaattatttttcgtttcccagtaactttcttgtcgcattttgcttttgaaatcaaattaaatcattttttttttaccaaaatccgatatcacaatcagatactgctgtaattatggatacggagaagtctagcagcagctccttcgaggacctgaccaacgccgaggacaccaaagacattcgcaaggtggcagcggaggaggcagcctccggagatggcgcacccccggcatccgtttctggagacggacagaaggcggaggaggaggatgcagaggaggaatgtgatatactgggtaacaagcagctgattaagcgcaccatcaaaaaggcaccgcaagactcgtttaggcgtccgattcgcggcgaattggtcaccgtgaacttcactggaaaactggacaacggcacggtggtcgagaacgagttgaacttccagtgtcacgtgggagactacgaggttatccaaggattagatatggtgttgcccatgctgcaggtcggcgaagtgtcccaagtcagcgtggattcccgcttcggctacggctccctaggactgaaaaaagagggtgaatccgagtacctggtaccacccgatgcgcaccttacctacgaaatagagcttctggatatcaaatacgaagaatttgcggaccttaagagctttgaaatactgcgcaaatatggtacgcgcaagaaagaacgtgccaatttcttttacaaacgctcggagttcacaaccgccattcacctgtacagacgtgccctcgactttctggacaatcgtgatggggatccggactccgagttcgacaaggaagacttggagctctcgaacagtgacacgcagaccctgctagaggatcggttgatcgtttacaataacttggcaatgactcaaatcaagattgccgcttatgacgcagctctgcagtccgtggagcatgtgctgcggtgccagccaaataactccaaagccttgtatcgcaaaggaagaatattggagggcaaagcggacacccagggtgctattaagctactgcaaaaagtggctactctcgaacccgaaaatcgagccgttcaatcggatttggccagacttttcatcaaggctcgtcgtgaggagcacaacgaaaaggagatgtatcaaaagatgctgggccaggccaaaaaaatggagcagaatactgccaccaggcaaaagcagccgcttgtcgacaattccaagctgaagctgcttggctatctaatgggtacgatattaattggagtggctggcgtcgctatttatcgttacaagtactaaggacaagcattgcacacgaactactggttattttaagcaattgaaatgcattttttaagtatatatagaaggcaaaattatgaatgttggaaagtcgcagttgcttattatgatgatatggctctcgttgtacatttaatgctatgcacacttcacaatagtatgtatctttcaaatagtatggttttggatatcgtacatataatgttaaagcttaagtttaatcaactacattctgtcagacaagtaacgggaattgttaaaataaacacaatattctcatc

SEQ ID NO: 11502 - protein, 397 aa, DROSOPHILA
MDTEKSSSSSFEDLTNAEDTKDIRKVAAEEAASGDGAPPASVSGDGQKAEEEDAEEECDILGNKQLIKRTIKKAPQDSFRRPIRGELVTVNFTGKLDNGTVVENELNFQCHVGDYEVIQGLDMVLPMLQVGEVSQVSVDSRFGYGSLGLKKEGESEYLVPPDAHLTYEIELLDIKYEEFADLKSFEILRKYGTRKKERANFFYKRSEFTTAIHLYRRALDFLDNRDGDPDSEFDKEDLELSNSDTQTLLEDRLIVYNNLAMTQIKIAAYDAALQSVEHVLRCQPNNSKALYRKGRILEGKADTQGAIKLLQKVATLEPENRAVQSDLARLFIKARREEHNEKEMYQKMLGQAKKMEQNTATRQKQPLVDNSKLKLLGYLMGTILIGVAGVAIYRYKY

SEQ ID NO: 11503 - DNA, 10378 bp, DROSOPHILA
cgccaagccatcaacggaaacacaatgtgaacaattgcgctgcccaacgctgcgctccacagatttttactatcgaattcgttgcgtattagaggacccttttgacaacagaacaggacagaagagaagacggcaacaatttgaggatacatttccccagaaatcctccatccatcaacaaggcgggcggtcggtcggtcccgcgccaactttacctctttatttcctttactataagctgccttcgtttatcggtctgttcaacatcatcgcaacgaaaaagcaaagcaagaactgtcatcaaattgtaacaattttaacgctaaatgatcttaaaatataattcaagtgaaacgttattaacgctgcgtagtaggtattaaataaaattaacattttctataaaacagccgataaatgccaaacgatttttcatttatttactttccgctggcgcccaattttaattcgatttcgatacgcttctcattctaataaatgcacttgcgagttgtgtttattttatacgtttaatttagttttgatgttcacattcacattatacaatttgtaatttagatttcttgccttttgttattttaaattttacagtctcatctttgaactcttgtattacgaaagttgcaagaataacttcgttatgttaaacgtcacttagtgctgtgctcacttggccaccccagttgtccatcccagatccaatcccaacaagaccagaccaattcgatgccgtatacggcgactttgcccaactcgctgacctcttcccttgcgtcaaacaaaataaagaacaacaaaaaacgcaattgctgcggatgaagtatagaaaacacgagcagcacttgcagacgacaaagatatgtggccggtgatcaaaagaggatctgggatttaatggtctgccgtcgcttacatacatggtttggtgtactttttttttttttgttatgatcgccgcgactgttttctactcgccagactaattattgacatgcacgtccatcggtgcggaggcggtcacgttgctcgacttctccggagagtccaggtaaatcttcaaggcacgttcccggcgctgcgcataccgcgtggtggacacgcagcccacccgatccagtcgtgccttctccctggcgttcatcaggcgtcgctcctccagcgtcagctctcgcgcaggtaccgtcctatctctgttgaattcattggttagtctaggaactgaactgccacttgctccacgcttacttgtacaggtagatgtttcctgtctgtgtgctattaagcggatatttgtccagggtggtgggcacggagtaccaactgctggactcgttaacacttaacgctgatatgcttgtgcaggggaagttgctgttcaactgcagagaagaccaattagatcaatatacacagtagaacgcaattttacgaaccttcatatagctcagtttgtctattgggatgtcgctgatctgtgataatgaaagtctgatttcgctgtcctctgcagaagatacgagttcgatttactgcttacagggcaatatacagatttaacttacggtccaaagtgatttcttggaactttccaaactccagtttagccggacaccaccgtcttacaaataaagtcagagaatcgtccttgggctgcgggtccacttcctcctcgcactcttgcacaatgaactgaaatggtgtgatataaaatccaagttaagtttttttctcatcacagagacaggggaacccacctccgctgcgatgctggagcgcatgtcgcagtagagcgtttcatcgtcggacagaattttgatgggaatacgtccgcccttcagccagatgcgacagttttgcacagacagtgtggcgtacttggcgtctatgcgatgcagcttggccaccagttccttcttggcctgctccgccgtggtgttggcattgtagacccactcgcatacgcaaggcagtttggacgtctcgttatcaatgtccgccagtcgcaggaagtgaatcttggccttgaactcgtccggctccagcgtcttacccaactccaccgtcagtgtttcgccttctatgagatgtaccaacgagttgttctggttgttcgacagattattatcgtgtttccgctgcagtttaaagtgggcggcgggcacttggatcagctgctcgatgtgtttcttaaaggcccccattcgcatgtgtgtgcccaccagcagcttataggcacgcgtgggcttacgcagctgagcctcttcgtcggactggtgaccagaactggaaccggtgccaaccacatccacgcactcgacctttgtggcgtagaagaagtggttggtgctggtgggcaggagcagcggatccaccacatcggccgccgcataactgccgtttccattgcagtaggcatgaacgcgcatcatggcatcgtgtgaggctgcttcgtcctccggactagacagctgcggcgagtgactggtggaactgacttggctgtcgcctccaccgcgatgtgccatgttgtccgtctccaccagagttcggtctccgtcgctcagactactgtcctccgagttggactcgtggccgtggctgggactgggttgtgacatgggttccactagatctcgcttgtagcgcctccaatcgtagtcgttgctggatgacatgtgaccaggtgccacgccattcatcattgcagcatccacaacatcacccccgctggcgcactgaaaggacagccaaaaattaaccttagttataaacccaacagctgtataacctacctcgactgactcaacggtgggcacaccgagcatctcaagggtcgcggcatccgtgttgggtacgttcaagtagaagtatgttatggacttaaactgggtgttggccatgttctggagatgttgcagggcctccggcgtcggatgcggatcgtaggacacgaaagccttcggcaccgtggcgcgcaccgtggcgagtaggaactgctgctcgctaatgtgcaaacggagggcgatcgagcggcgaaggacgtcgctggcttcccgctcccgcgctgctgagtaaaccaggaagggaccgtccatcgccatggtcgatagatctaccttaaacacataccaagtaatgccgttcggcggatagacctcaaactcttggtcctcggcccggtactccagcaggaagtcgagactgtagttctgcgccgcgcgcagttcggtcaaagctgggtctgtgcaactctccagggactgaataatcgtgtccatcgaggagttgtaagccaccaaacgacagcgggaaagcggcgcgaattgttccacattcaacatctcataggccgacatgaggaccaagttgatgttgaaactctgcgatacgtacactctggtaatcttcatcttcttcagggagggattatagaagtagacgcgcggcttgtacaaatccggaagagccaagtccgtaaccgtgatatgcctgcccaggcgggacacgcgcgtctcctcctccgagtgcagctttggtagcagcgttttgatgtgctcaggaaagtcggccaccttggcgactagctcgtttcttttggcatccacctgccggtacatcaacatgtatgcattggtgctggaggtgtaggcactggagtagtagctcccgttgggtccgccaaacgaacgttggatgtcctcttgggtgatctatggatagatagtcgttcaatattttctcaagttatgaatgtgttgcgaaaacctacactagtcacgttctgatcgttaaaacagaaccactcgttgttgtcgaagtccttaatataagcatagtagtgtccgcccgaagcgctgcctgaatgaatcatgatggcgaacagttcgtagagatacggaccggatccttgcttggcgctcttgctggtgctgctgctcatgtcgatgccttcatcctcgtcgttcagatcgttttcgtgctgactagagctcgctgtggtcaccacgccgctgctcaaattatcgtcctccatggcggatccactatccgccgtgctgcaatcgtccacggtgccgttgagctgagagttttgctcaccgctgtttccacttcggttaatgaacgtgttcaggttgagcgtctgagggaaggtcactctgaaatagagggcgagcatggaattaaatgcttatggattatggcaaagagactaacctgtcgtttaatttgatgcggtgcatggtctggtagtcaaagtcaaagcgtttaaggtgcagcgtgaggatgtagggaaaggacttaaagtgcagtcccttgtgggcgtcgcattttttcttgcacttctcgcacagatactggttattgccatcgagtgtttcgggctgaacgaaggcacgcagagcttcctcgatgctgccgtatgcggagctgcttccaaagggcctcacagggagcgggatatctagaaaggtgtcctcgcgcgtcttctcggtattgcactccaaacacttgacataatcattcatcttgccctcgtacagattagagatgagatttgcctgcttagtgttcttgaatttgtgctccagagcgtcgaacataactcggcacagttcctggatatcgtgctgctgccatgcctccgtcgagtcccacccaaagctgcgagtcaggtctgtggtttctaccgccgctttgggcgaggtctgcaagttgaggaagagcttttgcagttggtatggtatgttcttggcctcgttgtcattgtcgaactcccagcggtacagagcatttctgaactcgggtgtcataaagagtgcctgcagcaagctgtttagatagcaggtcatggcttggttgaccaaaccaacatatcccctgggacccaagctcgcctgccttgcctctgcctcagtttctgtggtggccgaggacacgaagtccgcacccgttgtgttgactctctgccatgctcgcaactcatcgcctccatacttgcgacgatagaagtttgacagagccgggtacgtaccatcgtctgttccaattgtggatgggtctgtcactccggtcacaccctcgacgtccgagtcaccggtcggagctccgtaatcgtatccaggtcccagcattgtcggactagcagatgctccgagtgccaggtcgtcatccgacaattgttcagcatctgagatgaaaagatctgaaggagcatcgtccaccggtgagattaggtttctaccttgtggatacagctgcagttgctcagagagctgttgcttgctcagggtgtctactggttcgcagtccaactctttgatgggtgatgacggcttgattggactcagcaactctaaagtcggcttagaagtgaccttggccgttttcttggccacaggactctccgaagaagtgtttttagagtttatctctgtagacagctcgggacattcttcagggctagccctgggagctttttccgaaccgggcttggagatctttgctgcagtcgtcttgatcttggaagtcttttcgggacttgattccgaactgatgctggtcttagccaaagagtcctcactcgtcgtcttggccttgcttggagaggaagatcccgaagctggcttctttttcgttttctcaccaactacgcgtttcttcttctcgccggtggcaggactcttggccttctcgccgtccgacttcataacctttttgactaccactcttttaatgggtaactcaaagcgtttggtcacgtcaccatcccaactgccggagggcagcaggatcaagtgattcttcagctggggctcaaaaccagccacttcgtacatcagctgagattccagggcattcagattgacctaaagtaaaggggaattcaattagcggtttattagaacctcaagatgtgcagatatttttaccagatccttgttatcgtgtggctgcagcaacagctcgaacttttcgtacgagaactgcgtgccaataaggtcaatcacgcgtttcaccgtgaagtgggagcggaccactacgttgatcttcttttgctccgagccgggtgtctggtcaaagaccgagacggtgcactgctcgctctccttgtccgtcatgtccagcccgcggaataatcaagtgatggtggagaaaaccctgcaaaaagattgtaggcgaaacgttggctttacttatgaattttgtctggagttttctttttatttttttttatttctttattttagaattaaaaaggtgacacgacacctttgacgttttcggcggggccaagttcctggacatgacgatgcttcttggcccatagtaaataaggaagagatgcccagccccaaattactgcgaaatcttcttgttttcgaccccattcgcgaataaagcggcagaaaccaagaagattccgtcccacctcccgcagccgcagatattgacgtgctccgggtttgcttttcgcgccttatttgtacgggccagcaccagttgccgtatacatatatatatatatatatagatagatatacacatatagcacgtacacccaatcgagcatcgactgccccccgaaatcgacgtcgtgactaacgcgcaggggaatttcgtaaacaaccggccatcagagttgcctccggaggatgctacgggaattattatttgcctccaatggactaccaacgtcatcatcatcatcatgaccatagctatcaccatcgggcgtaccgaatgcataaatttcagtgcaaatgtcgctccatgtttcagctggcttcctttgtggctccccgcaagactctgtaacggaagtggtggctattatacgaacgaatatctggcgccttcaattcggcagtgcgcatattgcaagtggacggtggacatatccatatgtacaaattaatacttatcggacatcagcgtgaacactgcgaattattctagaaacatttgtagaattcgaaagatttaaggaaagcagatgctgaatattaggcgaaaagcgattgaactactctataatatgcagtcaaaaatatcatcgattcgcctgtcaattaattgtatctaaaattatacttttcgaatgtctattttggcaataatctttagtgattcgtactgctcagcatttaattgagtgtcgcaagcaattggggccggggtatttgcaatgtttttccaattctctgcaccgaaataaccacaaaaaagacagccagtcagccaagatattttgggtctcctccgaatggaggatgcacatccacgatgtgcgatgtgaatgcgctgcaattgggcgttcaaacacatgttggatggtccaaacacaaaccgcattgcccggcaagggagcgagtgagatggggatccaaaaatgctaatacacgtcggccagcacaaaatcaaaataagaaacccatgctgctaaaaataaaaactggcggcggcgacacaacgacacatcggagcggtcggaaaaagcacacaggcgagtggaggagcaagatataagacagctttgggagcgtcttgaatacgcgtatatctggctatttgtgaatgcgaaggtttttgagaaattcagagaagcgcacagactgttcgaatacgtctatcctatacatcagaatggtcaggcactttcaacacattggccccatccatcccactcaatatttacatgatgacgatgatcttttggtcaatgtttgtgttggtcgggtattacagaaaccgatatcgcgagttatctatgccatatacacgatccaatggggggacggcgggaggggcaacagtcatgctcgcatatatttgtgctatttttgaactatttcggtactgcgaaatctatgtgatctacaaaaaccatgagatgtctgagatatgactgctgagtgccggaaattgtaggattctcgattcccgatcatataatgcattctcgaacagaaaatctccattacgaaatgctttctattcttaggcgtcgcacaactttaattggagcttccaatgttgtgtgaataagtgtgtatatatccgtggtctatatatgcaacggattttggtgagttttaccgtctgtgtcggaactgagtgtgccgaaatctttccgaactagaagaccgcaccgtcaacgcacggcatagttcacgcgtgtactggccgcttaggatgccgatgccgattccgattgcgatccgaagatacaccacccgatctggcgcccgatctttggcgaagcgagctacgtgttaagttctcggcgtgatgtactataacaatgagaaacagtttacttatctggcttacacttcaataggaaaacaatacttttatatagcttctataacttcggggtgcgataagaacatgaatacagatacacggattgcaacagtacccaagccacttgttttaaacaaataacaggataatggggagtaatgtaagctattgactgggttacaatcaggggtctgataacaatcaaacattgtccagttgccttttgcgaatatcaatgaccactcacgagttgcaactgataacgattatcgccgcacaatgcagtgggtgggtatttcactggggggaacttttgggtccctagaacccagacggattactcaatgaatataggcgatatgtttgggtttacagcgaaagtgctattaatgtcgaccgtatgctctcttcgatgtgccagctctctatttgcgggaatgaatgactatttttatgggtctgccgtcgctgctacaatgctgcattgctgcagtgggacatcctttgaacaggcgccatgccaaaggatattctttgtggaagggggggggggggcaagggttaagggtcacattcgtttgcgcaatacttccagcgatggggcggtgaacggtgggcggggcgatcggtcaaggcttcgactgtggaacgtgacacgcatatgtcggccggagtttggcccaaaaagtggccccaatggttgtccttcgcgctggcaattagtccctagcaaggcgcgtccatattttgcaaaaattcgtggggcgccttgttttcttctctctgtatgtgtgcatgtgtgtgtacctccgtctcactcacctcaagtgtgtgtgtgtgtatgaaaatactgcggtatacggctgcgtttgtgtgtgagtgtgggtttcggctctactctcccgatgatcctgctcctccggtcctaatcccggcctgctcggctgctcctgcgtcctgactgcgctagaaattcgcttaaaacgagcctcgacgggtcatttttacaattgttttttgttgttccgttcggctgttttaccagacgtgctcgttccggtgtgactgcccgccgctgactgtaaaatactaaacgcattgcagctgtggcaatgcccaagtcttggtcttacggtcacactggcaaagtttaaaaatttatttatttcaactttcagttacttttcgttggcttgaatattacactaagaattcaatttgacacttgcaatttatacattgtatattataatatattatatgtattatattttatatcatataaagatatttatatctattgatcttttgattataagctctttggttgaacaatataagtgcaactttctccatcaccttcctatctttttacaatatgcttacctcgtcaatacgttttttctatttcaaatatttcaatatttcaaagaaatattttgtttatttttctgtgtgtttttaagcaatctgacccctgtagaagaatcccttataatattaacaaatgtatcctcaaaatagatcgatctctatcttcgcagacttacacgaaacattccagaaccgatagttttatgcgatatatgagatttaaggagtactttccgcatttcgccatcacagtcacgctttccttggcatttgcaatcaaataagcgctaataataatcgtaaaagcataagaagcatataaagaagagtcaccgccaaaagcatgcacaaatatatataaatggggagcgatttaaaaacagtgcactgtgtttaaaacatcgacagctatcggttagcatatcgatattgacattcgcagtcaaacgttttcgagatacaaccctaaaatccgagaagcatccagaaatttcgacgtagacgagggcgaacctataaaatgaggttgacgcacgaatcccgctcattattaaacaaaattttgaagagaaagaaactctgaagtagggtgtgtttttagtgcgcaagccacatttggtggataaagaaaaaagcgaagaagaacaattgaattgaatcaattgcgagaaagaga

SEQ ID NO: 11504 - DNA, 4434 bp, DROSOPHILA
cacgtctggtaaaacagccgaacggaacaacaaaaaacaattgtaaaaatgacccgtcgaggctcgttttaagcgaatttctagcgcagtcaggacgcaggagcagccgagcaggccgggattaggaccggaggagcaggatcatcgggagagtagagccgaaacccacactcacacacaaacgcagccgtataccgcagtattttcatacacacacacacacttgagggttttctccaccatcacttgattattccgcgggctggacatgacggacaaggagagcgagcagtgcaccgtctcggtctttgaccagacacccggctcggagcaaaagaagatcaacgtagtggtccgctcccacttcacggtgaaacgcgtgattgaccttattggcacgcagttctcgtacgaaaagttcgagctgttgctgcagccacacgataacaaggatctggtcaatctgaatgccctggaatctcagctgatgtacgaagtggctggttttgagccccagctgaagaatcacttgatcctgctgccctccggcagttgggatggtgacgtgaccaaacgctttgagttacccattaaaagagtggtagtcaaaaaggttatgaagtcggacggcatgctgaacaattgtcggatgacgacctggcactcggagcatctgctagtccgacaatgctgggacctggatacgattacggagctccgaccggtgactcggacgtcgagggtgtgaccggagtgacagacccatccacaattggaacagacgatggtacgtacccggctctgtcaaacttctatcgtcgcaagtatggaggcgatgagttgcgagcatggcagagagtcaacacaacgggtgcggacttcgtgtcctcggccaccacagaaactgaggcagaggcaaggcaggcgagcttgggtcccaggggatatgttggtttggtcaaccaagccatgacctgctatctaaacagcttgctgcaggcactctttatgacacccgagttcagaaatgctctgtaccgctgggagttcgacaatgacaacgaggccaagaacataccataccaactgcaaaagctcttcctcaacttgcagacctcgcccaaagcggcggtagaaaccacagacctgactcgcagctttgggtgggactcgacggaggcatggcagcagcacgatatccaggaactgtgccgagttatgttcgacgctctggagcacaaattcaagaacactaagcaggcaaatctcatctctaatctgtacgagggcaagatgaatgattatgtcaagtgtttggagtgcaataccgagaagacgcgcgaggacacctttctagatatcccgctccctgtgaggccctttggaagcagctccgcatacggcagcatcgaggaagctctgcgtgccttcgttcagcccgaaacactcgatggcaataaccagtatctgtgcgagaagtgcaagaaaaaatgcgacgcccacaagggactgcactttaagtcctttccctacatcctcacgctgcaccttaaacgctttgactttgactaccagaccatgcaccgcatcaaattaaacgacagagtgaccttccctcagacgctcaacctgaacacgttcattaaccgaagtggaaacagcggtgagcaaaactctcagctcaacggcaccgtggacgattgcagcacggcggatagtggatccgccatggaggacgataatttgagcagcggcgtggtgaccacagcgagctctagtcagcacgaaaacgatctgaacgacgaggatgaaggcatcgacatgagcagcagcaccagcaagagcgccaagcaaggatccggtccgtatctctacgaactgttcgccatcatgattcattcaggcagcgcttcgggcggacactactatgcttatattaaggacttcgacaacaacgagtggttctgttttaacgatcagaacgtgactagtatcacccaagaggacatccaacgttcgtttggcggacccaacgggagctactactccagtgcctacacctccagcaccaatgcatacatgttgatgtaccggcaggtggatgccaaaagaaacgagctagtcgccaaggtggccgactttcctgagcacatcaaaacgctgctaccaaagctgcactcggaggaggagacgcgcgtgtcccgcctgggcaggcatatcacggttacggacttggctcttccggatttgtacaagccgcgcgtctacttctataatccctccctgaagaagatgaagattaccagagtgtacgtatcgcagagtttcaacatcaacttggtcctcatgtcggcctatgagatgttgaatgtggaacaattcgcgccgctttcccgctgtcgtttggtggcttacaactcctcgatggacacgattattcagtccctggagagttgcacagacccagctttgaccgaactgcgcgcggcgcagaactacagtctcgacttcctgctggagtaccgggccgaggaccaagagtttgaggtctatccgccgaacggcattacttggtatgtgtttaaggtagatctatcgaccatggcgatggacggtcccttcctggtttactcagcagcgcgggagcgggaagccagcgacgtccttcgccgctcgatcgccctccgtttgcacattagcgagcagcagttcctactcgccacggtgcgcgccacggtgccgaaggctttcgtgtcctacgatccgcatccgacgccggaggccctgcaacatctccagaacatggccaacacccagtttaagtccataacatacttctacttgaacgtacccaacacggatgccgcgacccttgagatgctcggtgtgcccaccgttgagtcagtcgagtgcgccagcgggggtgatgttgtggatgctgcaatgatgaatggcgtggcacctggtcacatgtcatccagcaacgactacgattggaggcgctacaagcgagatctagtggaacccatgtcacaacccagtcccagccacggccacgagtccaactcggaggacagtagtctgagcgacggagaccgaactctggtggagacggacaacatggcacatcgcggtggaggcgacagccaagtcagttccaccagtcactcgccgcagctgtctagtccggaggacgaagcagcctcacacgatgccatgatgcgcgttcatgcctactgcaatggaaacggcagttatgcggcggccgatgtggtggatccgctgctcctgcccaccagcaccaaccacttcttctacgccacaaaggtcgagtgcgtggatgtggttggcaccggttccagttctggtcaccagtccgacgaagaggctcagctgcgtaagcccacgcgtgcctataagctgctggtgggcacacacatgcgaatgggggcctttaagaaacacatcgagcagctgatccaagtgcccgccgcccactttaaactgcagcggaaacacgataataatctgtcgaacaaccagaacaactcgttggtacatctcatagaaggcgaaacactgacggtggagttgggtaagacgctggagccggacgagttcaaggccaagattcacttcctgcgactggcggacattgataacgagacgtccaaactgccttgcgtatgcgagtgggtctacaatgccaacaccacggcggagcaggccaagaaggaactggtggccaagctgcatcgcatagacgccaagtacgccacactgtctgtgcaaaactgtcgcatctggctgaagggcggacgtattcccatcaaaattctgtccgacgatgaaacgctctactgcgacatgcgctccagcatcgcagcggagttcattgtgcaagagtgcgaggaggaagtggacccgcagcccaaggacgattctctgactttatttgtaagacggtggtgtccggctaaactggagtttggaaagttccaagaaatcactttggaccaggacagcgaaatcagactttcattatcacagatcagcgacatcccaatagacaaactgagctatatgaagttgaacagcaacttcccctgcacaagcatatcagcgttaagtgttaacgagtccagcagttggtactccgtgcccaccaccctggacaaatatccgcttaatagcacacagacaggaaacatctacctgtacaaagataggacggtacctgcgcgagagctgacgctggaggagcgacgcctgatgaacgccagggagaaggcacgactggatcgggtgggctgcgtgtccaccacgcggtatgcgcagcgccgggaacgtgccttgaagatttacctggactctccggagaagtcgagcaacgtgaccgcctccgcaccgatggacgtgcatgtcaataattag

SEQ ID NO: 11505 - protein, 1248 aa, DROSOPHILA
MLGPGYDYGAPTGDSDVEGVTGVTDPSTIGTDDGTYPALSNFYRRKYGGDELRAWQRVNTTGADFVSSATTETEAEARQASLGPRGYVGLVNQAMTCYLNSLLQALFMTPEFRNALYRWEFDNDNEAKNIPYQLQKLFLNLQTSPKAAVETTDLTRSFGWDSTEAWQQHDIQELCRVMFDALEHKFKNTKQANLISNLYEGKMNDYVKCLECNTEKTREDTFLDIPLPVRPFGSSSAYGSIEEALRAFVQPETLDGNNQYLCEKCKKKCDAHKGLHFKSFPYILTLHLKRFDFDYQTMHRIKLNDRVTFPQTLNLNTFINRSGNSGEQNSQLNGTVDDCSTADSGSAMEDDNLSSGVVTTASSSQHENDLNDEDEGIDMSSSTSKSAKQGSGPYLYELFAIMIHSGSASGGHYYAYIKDFDNNEWFCFNDQNVTSITQEDIQRSFGGPNGSYYSSAYTSSTNAYMLMYRQVDAKRNELVAKVADFPEHIKTLLPKLHSEEETRVSRLGRHITVTDLALPDLYKPRVYFYNPSLKKMKITRVYVSQSFNINLVLMSAYEMLNVEQFAPLSRCRLVAYNSSMDTIIQSLESCTDPALTELRAAQNYSLDFLLEYRAEDQEFEVYPPNGITWYVFKVDLSTMAMDGPFLVYSAAREREASDVLRRSIALRLHISEQQFLLATVRATVPKAFVSYDPHPTPEALQHLQNMANTQFKSITYFYLNVPNTDAATLEMLGVPTVESVECASGGDVVDAAMMNGVAPGHMSSSNDYDWRRYKRDLVEPMSQPSPSHGHESNSEDSSLSDGDRTLVETDNMAHRGGGDSQVSSTSHSPQLSSPEDEAASHDAMMRVHAYCNGNGSYAAADVVDPLLLPTSTNHFFYATKVECVDVVGTGSSSGHQSDEEAQLRKPTRAYKLLVGTHMRMGAFKKHIEQLIQVPAAHFKLQRKHDNNLSNNQNNSLVHLIEGETLTVELGKTLEPDEFKAKIHFLRLADIDNETSKLPCVCEWVYNANTTAEQAKKELVAKLHRIDAKYATLSVQNCRIWLKGGRIPIKILSDDETLYCDMRSSIAAEFIVQECEEEVDPQPKDDSLTLFVRRWCPAKLEFGKFQEITLDQDSEIRLSLSQISDIPIDKLSYMKLNSNFPCTSISALSVNESSSWYSVPTTLDKYPLNSTQTGNIYLYKDRTVPARELTLEERRLMNAREKARLDRVGCVSTTRYAQRRERALKIYLDSPEKSSNVTASAPMDVHVNN

SEQ ID NO: 11506 - DNA, 2913 bp, DROSOPHILA
attgcatttcgatggcaagcgccacagggccaacagacattggggctaagttcattaccggcgtaacagtttgacagccactgctggcagccctataagtatgcaacgaatggctctaaccttaagttcaattgggcaatcgatgaatgaatcaagcatatcaaattccactatgaatgccatcataaatgcccagtaatatgcaaattgaaaacacaataaaacaaatccctaaaccacacaaaaatgccacaagcgatatggggttaatttgcataaataggttttttgtctgcgccccttttgttttttgttgctagtcagtgtgtttacgaaatcgaaattatgtatcataaactagatacggtggacagtcggcagagagtcgcagctcgattagcgattgatttgtgatccatcatagccagtattcactgccacggtttaccaatttgcaattgccggaaagatatattgactgaattaattaatattgaatttgaccaatcattcgcagaattctgtggacactgtaattgatttattttcttccttttttcgccagctatatggctgtactgcaattaattaaatacgaccagctatgcaaatcgcatggcattgctccacttaagtggccataatttctggtttggcctaccaacatccagttccgtcgtggtttgtttttgcatttcattgccaacgaaattggcaaaccgttttcgaatttatgcaaacaaatgctggcggatacagttttgagggctttgcgtcacctgcaacgggtattggtatttgtgctggattagcatcaatggcatgggctacacccgctgtctcatcacgaaaatctgcatcttatattggacctgattagggtcgggctataaaaacgcccctcgacaagatgggctgtagcattaacagtttacacctcccggcgtgcccaacacgttaacagattggatcgaatattggctaggatagggctatcaatatgcgtggatttattgtaagtttaaatggtattattagtttgaaatagttggattaacctgagctttctttgccagatttttgctgtcttggctgtggctcgcgctgatgtaggcggctataactatggagctggcattggatcaggcggatccatctcgggaggctctctgtctggaggctccatctctggaggctcgatctcaggtggctccatctcaggtggctccatctcaggtggctccatttctggtggttccctttctagtggttccctgtccgggggatcttattccactaactacgctcctgtaaacaccgaatttaacaaggagttcttcacctactccgctcccgaggccgattttgaggataataagagtgtcagtgatctggctgctactctgaagaagaacctccgtgtggttttcatcagggcccccgagaataagggtctggagaacgccgctctggccttggccaagcaggctgccgagcagcagaccgccatctatgtcctgaccaaacagggtgatctgtccagcctggccaaccagctgcagaacctgaaccatgtgagcgccagcaagccggaggtgcatttcgtcaagtaccgcacccagcaggacgccatcaatgcccagcgtaccattcagcaggagtacgagcgtctgggtggagccagcacctcctacaacggaggcgtggcaccagtcctggactttgccaccaaagtgcagcaacagcaagagcagcagcagcaacagcaacagcagcaggtgcagctgattgatgagcgtcggccttccagcggaagtgtaagcgccgaactggaggctccttcggcaggatatattccaccaccagccgcagcgcctagtgccacgtacctgcctgtgaacaaggtcaagtaggaaacctgcaagaccacattcttatttacgaattagctcacacattctcctttaagtgctaccgtataaaatataaacttaacttaatgtatgcccgatatattgttgctgtcgagattaatgcaggaagtcatttcagcgccttgtagccactatcggccagagcctgagcagcaattaaaactaaaagcgcattggcattggagggtttgggtttaaaaggggttgtaaatttaagtgcatgccctctgacaccggattcgttgccagcggtttatggcacgtcaccgacgaccagtgttgacccgtcctaaagtactaccaccatacacgcgatcagggccaactggtctgggctaattaccgccgcacagagccaatttctggcgcttcatgaccgcgaccagtcgcgacatttaatgggtgcccttttgagggtcaagtcggtggcaatttggtcctgccactgttgcagccaaagaaacccacactgagaattaaatgaaaattactagctacattttggagcgcactcctttgttgaccgtcgtgaaatttcagctagcaagcaaagaaaaccacaaaacttctaaaccagaaagctttgctttgttttctgttacgccacagtccttgcgcggcaacagaagtcctctcaacggcatacctcaaaataatttaagaatgcagttttaatggcaattccatttgcagccaagtggccagatttccccgatggagaaaccgaaaaaacggtcatgaagctcctattaaagaggtgtttcccgtggccgatttaagctgccgcttgttggcattttggattgccattcggatgtatcgtgtgtgctgtgttttcgggcacttctggcttatggcacaaaggaagtgtgcaaagggcaagcaagctgccggaataaaagccaggttgcaactagacgcagacaaggaccttcagacctgcccaacatttagttctctgctggcgtgggcctgccac

SEQ ID NO: 11507 - DNA, 852 bp, DROSOPHILA
atgcgtggatttattatttttgctgtcttggctgtggctcgcgctgatgtaggcggctataactatggagctggcattggatcaggcggatccatctcgggaggctctctgtctggaggctccatctctggaggctcgatctcaggtggctccatctcaggtggctccatctcaggtggctccatttctggtggttccctttctagtggttccctgtccgggggatcttattccactaactacgctcctgtaaacaccgaatttaacaaggagttcttcacctactccgctcccgaggccgattttgaggataataagagtgtcagtgatctggctgctactctgaagaagaacctccgtgtggttttcatcagggcccccgagaataagggtctggagaacgccgctctggccttggccaagcaggctgccgagcagcagaccgccatctatgtcctgaccaaacagggtgatctgtccagcctggccaaccagctgcagaacctgaaccatgtgagcgccagcaagccggaggtgcatttcgtcaagtaccgcacccagcaggacgccatcaatgcccagcgtaccattcagcaggagtacgagcgtctgggtggagccagcacctcctacaacggaggcgtggcaccagtcctggactttgccaccaaagtgcagcaacagcaagagcagcagcagcaacagcaacagcagcaggtgcagctgattgatgagcgtcggccttccagcggaagtgtaagcgccgaactggaggctccttcggcaggatatattccaccaccagccgcagcgcctagtgccacgtacctgcctgtgaacaaggtcaagtag

SEQ ID NO: 11508 - protein, 283 aa, DROSOPHILA
MRGFIIFAVLAVARADVGGYNYGAGIGSGGSISGGSLSGGSISGGSISGGSISGGSISGGSISGGSLSSGSLSGGSYSTNYAPVNTEFNKEFFTYSAPEADFEDNKSVSDLAATLKKNLRVVFIRAPENKGLENAALALAKQAAEQQTAIYVLTKQGDLSSLANQLQNLNHVSASKPEVHFVKYRTQQDAINAQRTIQQEYERLGGASTSYNGGVAPVLDFATKVQQQQEQQQQQQQQQVQLIDERRPSSGSVSAELEAPSAGYIPPPAAAPSATYLPVNKVK

SEQ ID NO: 11509 - DNA, 5953 bp, DROSOPHILA
aaatcccacccaaaaaaaggagattggtcactgcccacactagtagcaggtcgccttgaaagacggtgaaattctcacgtatttcttatcaaccacaatgcagacagattgtggaaataactgaaataaaacagcaaatagtaattgcccgtcgagggggaaatgggggagaacaggtacaaggcaagtacaagcgatctaggcgattgtttgaactattgataaatgttaaacataagcaagggtcgccccttggcacgcgtccagtgtttccgagtccgtccaacggttaacagctcctaaaattatcgaatcaagagcgcgacttattaaacgcaaattaacagcagccattaaaagacattcgcgaacagcggaaagcaattaggaaatcaaatcagcaatatgtcacagttgtacgaactctcggaggtggcccagcagaacggcaagaatggcaaaccctgctggctgatcatcaaggggaacgtgtacgatgtaaccaagttcctcggcgagcatcctggcggcagtgaagcactactcgaatatggcggcaaggatgccaccaaggccttcaagcaggcaggccattcctccgacgcagaaaaggatctaaagaactacaaaatcggagaaatcaactcagctgcacccattcaagtgcagccaacgtccaatggtgcagcaaagccgacggcaaacacaatatccgaagatcccgaacccgcgaagaatagctcctccggtttctgttgctgctagtcataggtttacatgtcatttgattgatttattaacataggatgaggtcgtagttagtttatcatagttaaattgtaaatagttctaggtttatctcataatagctacatcttcatgtccacaaagctatcttaaaaaagatcaactcttcttaaacgatctgaataaattgcaaacaaagccggcggagctgctccaccaatttcaaaaaaattaaactaaatccaaacgatgcctaatctttcggttcggcctccatggttggctcgctgctgggggcagccgattggaacgtactgcatgcagtgtcaaagtaatccgtcgtgaaactggtcacgtttaccgtgtggttgcgcagatagtgatagaatctactcgacttccgttccagtcctgcccgttccttttcgctgcggcatatggagcgcagggcgggctcgaagtccagcgatttggcggagtcggaacggagaactccgttgcccaggtgctggcaaattgaaaacctggaaagattacagaaagttataaaaaatgaaaaaattaaagcataactaaaataagtttggtatctaattagtgaaaagtctgggcactaatttaatgaataggtgtgttcctaagatagttataagatcggtcatttttatgacaaggctattagaattccgaacgctaaagatatcttgtgactagttgttattatgactgctggatgataacaaaaccccggtttcctttttccatcgattactgccatgacagctaattaagttagcattattaagccttaaaatgtgtttaaagcaaaatagatatagatacagatagatattgttaataaagatcttttgatattaaagtgtttatatattggcttagttaaagagtaactcatcattttgaaaatcttacctctgaaccggcttatcaaatagattgtaggggcactccttggtcgcgagtccagtttggagagcctgctccaccagcaggtgaccgatttcttcggacaggtgccactgcaagcgatcactgcagtcggagtccatcaacgaagccaccgaaatgttgtcatagaaggatgccaatgtggcgagcgatgagctgtgcccatcggacttctgcccagtggcgctgctcagccaggccttctttggtgagcgggacttccgcttggcagcggttctacttccaccgcccgctgcctgctgctcctttagcatcgccgaactagccataagatcggggagattcaaacgcaagaggctgaagtcaacgggaaagggtattcgatactggacattctgcgggcttgtaaagaactcaaagaatctctgatggattcgactgccatcgacggtggccagccggctatttgaggttttggttggtgatttaatcccaccgccagtcctatcgcgagttgaatctccaccactctgaatgtagaactgaagttccatcaacgtcttgcgcagattctgttgattgtatagatacacggatatcaattcgtccaactcgatgggacagttttccattagcgataaaacggccaagaatcgggagatgttcaatgcgttcggagcttggaaatggattatattctgctgcattaggcgctgcaagtgcgcgcaattcggatccgtggcaaccacaatgaccggcctcttggaactggcggccaatgtataaatggcatccgtaaatccagcgtccaagttatcaaacaagatatccgcatcctcgattaggatcagagacttccgtacttcggaaggaggttccactgcggctgcttttgcttttaatccactcttttgcaacttttgaagcaactgctgtgaggatcctccacccgctttaccatctttccttatctgatgcgactgcgtggcctcttgaagttcctgtatcagcttcttgcccgtcctcttcatccctgcatttatctccaagacattaaagttcatgtcgttggctaaggtaaaaacggcattggtcttcccgctggatgaaggtccgaccagaaccatcgtgttgctacttgagcccattgatgccgaatcattgctcatgtcaaaggtgtcatccatgccctgcgagtttcgattgctacctccattgccactccagctggacaggaactccctaagctcctgcactggcgtcagattcaccagaacctgttcgaacagcagcggtttgtacttctccgtaaagagcagctcgccattcggagcggaaggcggtggtttcgcctcctcttcgttctgtgccatattctgctccattgaacggcgagtgcgacgtgttaccaccagtgattctcccatttgctgcgtatcctgtgcactgtcaatggcgctgaagtggcgatacttctccctcatctggttatagcacttaaaggtgggaaaccgatcgaaatcattcttccagagcttcacaaagccacgtttattttccagctgtggcaaagttgcatagttgaacttgttcaaagttttgctggatgtaaaatccgcgggcagacagctggtgatgctactcgctttggcacgtcgtttgttggcgggtaacgctttcgtaacctcggaatattcctcttctgccctcagagcaaagggaatgtccagaggaccgttttttgaaccgaagctctcgcagcctatatgcgccagtctgggaaacacttcatagctatcttcgtacatctggtcgaagttcttttgacggatctgctcctgtcgaattttgtccggaactccggattgcagaaacgcctgtcgagccttcaaaaccgacggatctgggctgggctttggcaattgacggacgaatagcggcgctagtttctttggtgtggcagctggattactattgtctaggtcaataatctctacagactcgtctgccttttggggcttcgccttttgttgcttgccgggactcgtttccagatcgtaatcgtagcgcgctttgcccacacacgatcgtcttggtcttgacgagggagtggattcggctacaatgggtgtctcttgctggctctttctgcgcagtgttcttcgcttgggtgtctccatgggtggggtttctatcgcaatgatcaccttttcagctaactccttcggggattccactttgggaaagtagcccagcaggctgtcacgctttttcgtgggcgacgaaagcttcgagagaagctcctctgttcctggatcttgatcttttgctttcacgaccgggggcttcgattccacaatttggttctgtgcatccatggaactgattcgtcgagagcgcggtcgacctcttagacgcttgactgttggatccgtgggtgccgaggatggagccgtcacctctttggcgtcagtcttggtcagcatttttcgcagtctagggaaataaaatgttgtatagcgctctgaatctaattcttaatcaaactcacctctttgccctttgctccatctgcagctcaatgaactccccgcgagcttcgtccgctagtcttctcttggctccccccttgcgttcgttccattcttggaggagaagcttccgtttggtggtcggcgttgctgcctcactgccgatttcttgatccgcgggagattctgccccaccttcattaacccccagagagcgattccgagcattcatcatgaactcaaagacattggtggttggcttcggtttggctgtgctcaccggagaaacacccacgttctccggctttcccgccttggcgaagtgcttcatgatgctctgattgtcggccaccggagtgctggacttcagcggactggaccgccgccgaccgttcttgagaccgttttcttgggaggatttctcgcgaagtggctgcggtttctctttggcattcgccttgacctcctcggtggtgctcttctggtcctccatgagtgctgcgcggcgcttctcctcccgctttcgcttgtgcttctcccgatgcttctgcttcaccgagttcagcacttcctccatgttctggagtatcagtttggatttggcgctgggcggtgctctcagaacgaacggagatgtgggctcgacgggatccgtggccgcatttttggagggagttcctggtggactcgcagtggtcgttgtgggtgcaatgtgctcacttgtaagacaatttacatcggtcatttttgtgggtctcttttgctgttttctttttgggtttaggcttaatgcattttgctgagtgtgtgcgtgtgtttgtgtatggtgtggtattcttttgtaagatctaagtacttaagcaattgatatatctacagataatacgaaagccaaactcaaaagatcgcaaatgaagatcgggggcaaaagcaaaaacatgacaacaatacaataataatgagatctaccttcgcagcgacttttcgtttttcgtatttgttacactcccgcacacgcacacacactgccgcgatcgaactggtgtcccgttgatcgcgatcctctttctaacggtacttgggcctcaatatgttattactttccggtgtctactttatgcgttaaatatcattttatacaagtttgcttaaggtataaattgttagcacaatgtgctggggggaaaaaaggcgcgaagaaacggtgttggtaaacagtggaggggtaactatttccagcactgatcggccaggcagaaattaatttgttgcactctcatttatgctttttaataatttgtttgtaaatttctatttttactttgtgaagtaatgattttatattaataatataattaccaagactaaacggaataattataaggttgtgtattagtagagaacaaaaacagaatgaaatacatttgtaggaatcacctaatatttaattatattttatattatattaattataattatatttgttctttatacaattttatacattgtattttatagttttattaaatattcccgcttaaaaaataaaatgttgtttctatttaaattaccgcagctgttggtggtaatttagatgacctgattcgatttggtattatgggaacttttccagatttggtcacactgccctttacactgttttggttttcgtgaaaatgtccacatactactttgttattgtgggtcaaaatgataatcccatttacgagaaggaattcagcacc

SEQ ID NO: 11510 - DNA, 3225 bp, DROSOPHILA
atgaccgatgtaaattgtcttacaagtgagcacattgcacccacaacgaccactgcgagtccaccaggaactccctccaaaaatgcggccacggatcccgtcgagcccacatctccgttcgttctgagagcaccgcccagcgccaaatccaaactgatactccagaacatggaggaagtgctgaactcggtgaagcagaagcatcgggagaagcacaagcgaaagcgggaggagaagcgccgcgcagcactcatggaggaccagaagagcaccaccgaggaggtcaaggcgaatgccaaagagaaaccgcagccacttcgcgagaaatcctcccaagaaaacggtctcaagaacggtcggcggcggtccagtccgctgaagtccagcactccggtggccgacaatcagagcatcatgaagcacttcgccaaggcgggaaagccggagaacgtgggtgtttctccggtgagcacagccaaaccgaagccaaccaccaatgtctttgagttcatgatgaatgctcggaatcgctctctgggggttaatgaagaatggaacgaacgcaaggggggagccaagagaagactagcggacgaagctcgcggggagttcattgagctgcagatggagcaaagggcaaagagactgcgaaaaatgctgaccaagactgacgccaaagaggtgacggctccatcctcggcacccacggatccaacagtcaagcgtctaagaggtcgaccgcgctctcgacgaatcagttccatggatgcacagaaccaaattgtggaatcgaagcccccggtcgtgaaagcaaaagatcaagatccaggaacagaggagcttctctcgaagctttcgtcgcccacgaaaaagcgtgacagcctgctgggctactttcccaaagtggaatccccgaaggagttagctgaaaaggtgatcattgcgatagaaaccccacccatggagacacccaagcgaagaacactgcgcagaaagagccagcaagagacacccattgtagccgaatccactccctcgtcaagaccaagacgatcgtgtgtgggcaaagcgcgctacgattacgatctggaaacgagtcccggcaagcaacaaaaggcgaagccccaaaaggcagacgagtctgtagagattattgacctagacaatagtaatccagctgccacaccaaagaaactagcgccgctattcgtccgtcaattgccaaagcccagcccagatccgtcggttttgaaggctcgacaggcgtttctgcaatccggagttccggacaaaattcgacaggagcagatccgtcaaaagaacttcgaccagatgtacgaagatagctatgaagtgtttcccagactggcgcatataggctgcgagagcttcggttcaaaaaacggtcctctggacattccctttgctctgagggcagaagaggaatattccgaggttacgaaagcgttacccgccaacaaacgacgtgccaaagcgagtagcatcaccagctgtctgcccgcggattttacatccagcaaaactttgaacaagttcaactatgcaactttgccacagctggaaaataaacgtggctttgtgaagctctggaagaatgatttcgatcggtttcccacctttaagtgctataaccagatgagggagaagtatcgccacttcagcgccattgacagtgcacaggatacgcagcaaatgggagaatcactggtggtaacacgtcgcactcgccgttcaatggagcagaatatggcacagaacgaagaggaggcgaaaccaccgccttccgctccgaatggcgagctgctctttacggagaagtacaaaccgctgctgttcgaacaggttctggtgaatctgacgccagtgcaggagcttagggagttcctgtccagctggagtggcaatggaggtagcaatcgaaactcgcagggcatggatgacacctttgacatgagcaatgattcggcatcaatgggctcaagtagcaacacgatggttctggtcggaccttcatccagcgggaagaccaatgccgtttttaccttagccaacgacatgaactttaatgtcttggagataaatgcagggatgaagaggacgggcaagaagctgatacaggaacttcaagaggccacgcagtcgcatcagataaggaaagatggtaaagcgggtggaggatcctcacagcagttgcttcaaaagttgcaaaagagtggattaaaagcaaaagcagccgcagtggaacctccttccgaagtacggaagtctctgatcctaatcgaggatgcggatatcttgtttgataacttggacgctggatttacggatgccatttatacattggccgccagttccaagaggccgaatctgcgcaagacgttgatggaacttcagttctacattcagagtggtggagattcaactcgcgataggactggcggtgggattaaatcaccaaccaaaacctcaaatagccggctggccaccgtcgatggcagtcgaatccatcagagattctttgagttctttacaagcccgcagaatgtccagtatcgaataccctttcccgttgacttcagcctcttgcgtttgaatctccccgatcttatggctagttcggcgatgctaaaggagcagcaggcagcgggcggtggaagtagaaccgctgccaagcggaagtcccgctcaccaaagaaggcctggctgagcagcgccactgggcagaagtccgatgggcacagctcatcgctcgccacattggcatccttctatgacaacatttcggtggcttcgttgatggactccgactgcagtgatcgcttgcagtggcacctgtccgaagaaatcggtcacctgctggtggagcaggctctccaaactggactcgcgaccaaggagtgcccctacaatctatttgataagccggttcagaggttttcaatttgccagcacctgggcaacggagttctccgttccgactccgccaaatcgctggacttcgagcccgccctgcgctccatatgccgcagcgaaaaggaacgggcaggactggaacggaagtcgagtagattctatcactatctgcgcaaccacacggtaaacgtgaccagtttcacgacggattactttgacactgcatgcagtacgttccaatcggctgcccccagcagcgagccaaccatggaggccgaaccgaaagattag

SEQ ID NO: 11511 - protein, 1074 aa, DROSOPHILA
MTDVNCLTSEHIAPTTTTASPPGTPSKNAATDPVEPTSPFVLRAPPSAKSKLILQNMEEVLNSVKQKHREKHKRKREEKRRAALMEDQKSTTEEVKANAKEKPQPLREKSSQENGLKNGRRRSSPLKSSTPVADNQSIMKHFAKAGKPENVGVSPVSTAKPKPTTNVFEFMMNARNRSLGVNEEWNERKGGAKRRLADEARGEFIELQMEQRAKRLRKMLTKTDAKEVTAPSSAPTDPTVKRLRGRPRSRRISSMDAQNQIVESKPPVVKAKDQDPGTEELLSKLSSPTKKRDSLLGYFPKVESPKELAEKVIIAIETPPMETPKRRTLRRKSQQETPIVAESTPSSRPRRSCVGKARYDYDLETSPGKQQKAKPQKADESVEIIDLDNSNPAATPKKLAPLFVRQLPKPSPDPSVLKARQAFLQSGVPDKIRQEQIRQKNFDQMYEDSYEVFPRLAHIGCESFGSKNGPLDIPFALRAEEEYSEVTKALPANKRRAKASSITSCLPADFTSSKTLNKFNYATLPQLENKRGFVKLWKNDFDRFPTFKCYNQMREKYRHFSAIDSAQDTQQMGESLVVTRRTRRSMEQNMAQNEEEAKPPPSAPNGELLFTEKYKPLLFEQVLVNLTPVQELREFLSSWSGNGGSNRNSQGMDDTFDMSNDSASMGSSSNTMVLVGPSSSGKTNAVFTLANDMNFNVLEINAGMKRTGKKLIQELQEATQSHQIRKDGKAGGGSSQQLLQKLQKSGLKAKAAAVEPPSEVRKSLILIEDADILFDNLDAGFTDAIYTLAASSKRPNLRKTLMELQFYIQSGGDSTRDRTGGGIKSPTKTSNSRLATVDGSRIHQRFFEFFTSPQNVQYRIPFPVDFSLLRLNLPDLMASSAMLKEQQAAGGGSRTAAKRKSRSPKKAWLSSATGQKSDGHSSSLATLASFYDNISVASLMDSDCSDRLQWHLSEEIGHLLVEQALQTGLATKECPYNLFDKPVQRFSICQHLGNGVLRSDSAKSLDFEPALRSICRSEKERAGLERKSSRFYHYLRNHTVNVTSFTTDYFDTACSTFQSAAPSSEPTMEAEPKD

SEQ ID NO: 11512 - DNA, 4485 bp, DROSOPHILA
ccaaactgtaattgatgatgaacatctctaggaaatacgtcaacggtggacacttgtcaacgctgcgtatgcgtaataatggccgatagcgaaaacttcttcagggaattcaactgatttcgactaaaacttgcggtcacccagagaacaaatgttgatgaaatcattaaaccaattagcatttggtacgaaatcacgatttactctatccaaaaattcggggatattattataaattatcgtactatgatgatggatgcctcagtcgtgtgtcgactgttgttctgtgatcgtaagtgatgataatcggttgcgattggtcgatgttatctaactggtgttgcaaaaaacgcgattcagtgtttaagataataagcttcaagtggattgccgaaaaattttccgtttcctatcttttactttgaaagtatcaatggtgataagaaaacaaattaagacaagtacttaaagatctttaggagcttcaagaaagtaattgctctcagataagatgaattgaaaaatacaagttgatttattccccaaacgtacttcactaagtttatttataaggtttattaagcaatatgtatacaaattttcagcatacttaaaattctatcattcttcttttcagaaaccaaaacaccatcttcaaaccctgcctaaaggagcttggaagcgattaaaagacttacgcgatcgccagaaaagacgacgctacttaccaatagagaacaatttccaagattcacatattaacatcgaatctggtaccctattagtacccattggctataacgaagagataccatcaaaaaaagctactggaacaatacccaagagacccaaagacgcttttccgaatccaagttctccagtttctcgcttcaggcagtcgcaattccaacgcgacctacgcattcatccctttacagacaccaatgtggaacgcgggacgaacccaaaagacatagaagtagtggaagatatatccaaaatgcctagtgataaagaaagtccagagtgagtaatataggagtgatattttgttcgcttttagagatacttacatcgttgcttcttgcagaaccaagccactgaacaataacaatacaaatggaaacggtggcagtgtaccaagcaagccaaagatccagccaaaatatagcattcaccgagatgtgctgacccatgaggtggtgataaagcaaacaggatatgcggccagggacaagagcataccctcctcgctgcgaaactgctggcggagctggaacttctttgcactcttcaccggcgtgattcccattctgcaatggctaccccagtattcacccaggagagatcttcctggcgatataatcgccggcttcaccgtcgccatcatgaacatacctcatggcatggcttatggcattctagcaggagtttcggctggaaatggtctctatatggccgtgtttccggtgctggcctacatgttcctggggacctccaagcacatctccatcggcacttttgcggtggccagcatgatgacggcaaaggtggtggatacgtatgccaacgtagatgaccaccatcagatattgcctattaacgccttcggtttgcaatcgaatggaacagcgactgcgtccccactcctgctaataaattcctcagcgcttgcggattctgtctcctcaaccactatatcaccttttcagcttttaaattctactctaaatgcggatcccattactaaaatagaggtggcgacctctttggcacttaccgtgggaattgtaaacgtaagttgtcgcttaaaaaggtttgcctaaaaaattaatatttaattctttttcagctcctaatggcctttctaagactgggaaccctgtcatcccttttgagtgaacctctggtgaatggattcaccactgctgcagcgtgtcacgtggttaccgcccagctgaaggatgtgctgggcatctcagtaccgcgtcacaaaggtgcattcaagatcatatataccgttattgacgtgatcaagggagtgccacaaacgaatcttgtgaactttggcttttgtatggctgtgattgcgttcatgatgatctgcaatgagatcctaaagccgcgactgagtaaaaagtgtcgctttcccctgccggcggagctgatcatggtgatcggtggtactttaatctccaaatggttcaacctgtatgtcgattacaacgtaaatccagtgggaaaaatacccagtggcttaccggagccagttcttccgcgcttggatcttgtaccaaaggtggccgtagattcaattgccattgctatcgtcacctactccataatcatgtccatgggcctaacgttcgctaagaagcacggatatgaggtcagaccaaatcaggagctgttcgccatgggcattggaaacatggttggcggctgtttctcctgcattccgatggcgtgctctctgtcaagatcggtaattcaggatcagactggtggggtttcgcagatagcttcattggtctccgcttcgctggtggtggtcaccctaatgtggatcggcccctttttcagcagtttgccaagggttagtctgacactttgcttaattatttttcaacctttatttattcgttattcgtgattcattcagtgcgttctggctggcgtgattatagtggcactgaagccgatgtttatgcaggccaaggaattgaaaaagttctccaagcagggcaagttggaaatgttcacatggatatctaccttcctctgcgtcgttatcatcgatattgatattgggtgtgtttgatatttaattttgcattttccacttaaaaccgacaataatatgtttatcattgctttacaggcttttgattggcatctgcatctccttgttggctctgtatatcaagggactgaagccgtactcctgccttttgggctatatgccagaggctccaggcatctatatggatctcaaccagcatcgaaacgccatgcaggttcccgaagtccgcatcttccgctacagtggatcgcttaactttgccaccagcctgttcttccgacgtgctctgtacgaggccgtgggcctggacaagattcccctaacgaaagtcagcagcagcaatagcaatagtcccagcaagggcagcaaatcgagttattccccagtatcgcagaacggaggcaaggcgatcaatggcaagttagaagagacgtcaggtgctttcaaggtgctcgtcctggatttctccatgctgggacacatcgatgtggctggatgtcgcaccctgacggatctgagcaaggaactgaaggtgcgaggagctcgtttgttgttggctagccccgtagatcgggtatacgataccctcgtgcacagtatggcccttagcgaaggaccttttgagatcttccccaccctgcacgattgtgtggaatatgccaatgcctgtcgaacagcgtgagagggtgttcctgctccagacaccccagttaactggggcagagagccaaaccacgttttgtgatatgtccaagtgatagcttgtgaatcgtagcatcaaaaccccttcctagttgctaaaatctattttaaactgaatagaaacaatgtcgccgtctacaatcaagcagaataggctaagtttgtttaagtgcctccaaaatattgatttttgtacttaaagcatacacagcccaccagtcaggcaaccgaagaacttcaatcgatcaatgaagtgcattgatttagtgcaatttgtaccaaaatgaacaattcaaacacacacaattagtccataaggttgatatgtatggagatgtataaactgtacataaacatttcaatgaatttgttgcatttattctaatgtggattttaagcgggtcggattcgaacttctagcacatttatgaagcctacctttagggtttctcaacaaaagcattatcgaatgtatttcattttcgaacaaagtgctgcatacaaagttagctaaggctgggtaccggaaaccctataccgtgcattggatggttcaattccttcttagaaaagaatttagaacaggaacgatgttttacaacatttttcaaaatttaaaggtgccgccacaaaatatttaaaaacaaattaaatatgtagataattttaaaagtgtcatgtagccataataaatattgaacataaaggaataggattaaaatataatatgcatttatagttactacatgttctctaaaactattaatttgtgtgcggataggaagttaacagagtaataacaaaaggaaaatcgcattccgtgatgttctatctgaagagtctcatgtaaatattcagaaattaattaaattgaaaaacgaaaacattctcagaactttcgtcaaaccgttttctggacaagacacataatatacatacgttgaaatgattcatattcatatcatttatgtacttaggat

SEQ ID NO: 11513 - DNA, 2229 bp, DROSOPHILA
atgcctagtgataaagaaagtccagaaaccaagccactgaacaataacaatacaaatggaaacggtggcagtgtaccaagcaagccaaagatccagccaaaatatagcattcaccgagatgtgctgacccatgaggtggtgataaagcaaacaggatatgcggccagggacaagagcataccctcctcgctgcgaaactgctggcggagctggaacttctttgcactcttcaccggcgtgattcccattctgcaatggctaccccagtattcacccaggagagatcttcctggcgatataatcgccggcttcaccgtcgccatcatgaacatacctcatggcatggcttatggcattctagcaggagtttcggctggaaatggtctctatatggccgtgtttccggtgctggcctacatgttcctggggacctccaagcacatctccatcggcacttttgcggtggccagcatgatgacggcaaaggtggtggatacgtatgccaacgtagatgaccaccatcagatattgcctattaacgccttcggtttgcaatcgaatggaacagcgactgcgtccccactcctgctaataaattcctcagcgcttgcggattctgtctcctcaaccactatatcaccttttcagcttttaaattctactctaaatgcggatcccattactaaaatagaggtggcgacctctttggcacttaccgtgggaattgtaaacctcctaatggcctttctaagactgggaaccctgtcatcccttttgagtgaacctctggtgaatggattcaccactgctgcagcgtgtcacgtggttaccgcccagctgaaggatgtgctgggcatctcagtaccgcgtcacaaaggtgcattcaagatcatatataccgttattgacgtgatcaagggagtgccacaaacgaatcttgtgaactttggcttttgtatggctgtgattgcgttcatgatgatctgcaatgagatcctaaagccgcgactgagtaaaaagtgtcgctttcccctgccggcggagctgatcatggtgatcggtggtactttaatctccaaatggttcaacctgtatgtcgattacaacgtaaatccagtgggaaaaatacccagtggcttaccggagccagttcttccgcgcttggatcttgtaccaaaggtggccgtagattcaattgccattgctatcgtcacctactccataatcatgtccatgggcctaacgttcgctaagaagcacggatatgaggtcagaccaaatcaggagctgttcgccatgggcattggaaacatggttggcggctgtttctcctgcattccgatggcgtgctctctgtcaagatcggtaattcaggatcagactggtggggtttcgcagatagcttcattggtctccgcttcgctggtggtggtcaccctaatgtggatcggcccctttttcagcagtttgccaaggtgcgttctggctggcgtgattatagtggcactgaagccgatgtttatgcaggccaaggaattgaaaaagttctccaagcagggcaagttggaaatgttcacatggatatctaccttcctctgcgtcgttatcatcgatattgatattgggcttttgattggcatctgcatctccttgttggctctgtatatcaagggactgaagccgtactcctgccttttgggctatatgccagaggctccaggcatctatatggatctcaaccagcatcgaaacgccatgcaggttcccgaagtccgcatcttccgctacagtggatcgcttaactttgccaccagcctgttcttccgacgtgctctgtacgaggccgtgggcctggacaagattcccctaacgaaagtcagcagcagcaatagcaatagtcccagcaagggcagcaaatcgagttattccccagtatcgcagaacggaggcaaggcgatcaatggcaagttagaagagacgtcaggtgctttcaaggtgctcgtcctggatttctccatgctgggacacatcgatgtggctggatgtcgcaccctgacggatctgagcaaggaactgaaggtgcgaggagctcgtttgttgttggctagccccgtagatcgggtatacgataccctcgtgcacagtatggcccttagcgaaggaccttttgagatcttccccaccctgcacgattgtgtggaatatgccaatgcctgtcgaacagcgtga

SEQ ID NO: 11514 - protein, 742 aa, DROSOPHILA
MPSDKESPETKPLNNNNTNGNGGSVPSKPKIQPKYSIHRDVLTHEVVIKQTGYAARDKSIPSSLRNCWRSWNFFALFTGVIPILQWLPQYSPRRDLPGDIIAGFTVAIMNIPHGMAYGILAGVSAGNGLYMAVFPVLAYMFLGTSKHISIGTFAVASMMTAKVVDTYANVDDHHQILPINAFGLQSNGTATASPLLLINSSALADSVSSTTISPFQLLNSTLNADPITKIEVATSLALTVGIVNLLMAFLRLGTLSSLLSEPLVNGFTTAAACHVVTAQLKDVLGISVPRHKGAFKIIYTVIDVIKGVPQTNLVNFGFCMAVIAFMMICNEILKPRLSKKCRFPLPAELIMVIGGTLISKWFNLYVDYNVNPVGKIPSGLPEPVLPRLDLVPKVAVDSIAIAIVTYSIIMSMGLTFAKKHGYEVRPNQELFAMGIGNMVGGCFSCIPMACSLSRSVIQDQTGGVSQIASLVSASLVVVTLMWIGPFFSSLPRCVLAGVIIVALKPMFMQAKELKKFSKQGKLEMFTWISTFLCVVIIDIDIGLLIGICISLLALYIKGLKPYSCLLGYMPEAPGIYMDLNQHRNAMQVPEVRIFRYSGSLNFATSLFFRRALYEAVGLDKIPLTKVSSSNSNSPSKGSKSSYSPVSQNGGKAINGKLEETSGAFKVLVLDFSMLGHIDVAGCRTLTDLSKELKVRGARLLLASPVDRVYDTLVHSMALSEGPFEIFPTLHDCVEYANACRTA

SEQ ID NO: 11515 - DNA, 6604 bp, DROSOPHILA
tactgctcatccagcacaggcgcacccccgtcaaaatcctgcttccaatcttttcgagctgcgctgctaccagtgcttatttgcagtacatacttattgttgcaatgctaatcgacttggtgcacgatttacacttaaacctagttcgacaaattagatgaataaattcagttgttcacttcgttagtttcttttcgtttaactttacatagttaaataaaaacggtgcattttaaaattagctcgctcttttttcttttaccattggtacaattctagttttctgcttttggcacaatcctgacaacaaattggttactctgattgtcacttgtgaacgaaactaaattgtaagtgtgactgtatgaatatattgctaaaattgtattttgatccctgggaccatataaaagtcgactgaccccggccaccgcaaaaagcaatggtaattgcaattgcatgatgactggcgacaatttttggatacgttccgccgaacacgagttctgcctaaggcgaagaagatgatagcagcggactcgaagagctgccacgatcaggtttcgattctgtcgcggatcacacaattatctccatgcggttcgccttgcgtgtgaccttgggtgggccttgtgctaagtccgacatgccgccgtatttgaacgaaaagatgacagtctgctggccgaagttcgcttcaaatctgtaagattacaaattagtattagttggccttaatcgtcatcggatctagagcagaatagcttaatatccagaggatttttcgacattgattgttagcccttactcagtgcttatgtgtatctccgggggtttgcctgtggcattttgtatgaccagaaacattttggtaacaatttcaatcacatgacccgtttgaaaaacgaaatcacccttcttccgtccaaattcagactgcgaatggaataattaatgattttaagattaggaaatatgaatcgcacagtatatataccgcttttacgtgaaacacagcaatgtcatctaggtaggggctcagagacattcggtaaatctccgatgcaggcactctgtacttaatttgcagcgttcgttggtccaacagcaaaagcgatgacgtggatagcaccagcaaaatgggcacaaactgaaaataaaagaatttgtcttgttatattccactgttgaatgaaatatattagcttaccttgccactggagcgcgctatcttgttgattatgtctgcgaatacaacatactgatcgttggtctcggcgcagatctttttccactgctggttgtgtcgcagtcgcacgtagtcccccacaaaaggatgacccacactggaaaggaaataccccttaattattattttgaatttttaaaaaaataagcagctgttaccttcgtccatatgaagcttttcgatccttgaagataatgctggctgtgaccttctcccgcattcgattacgcgccgtttgatcaaaggagtttcggtagatgtagcacttccaacgatggtatatggacctaagatgacgagaggcatctgccagaaatgcgggagccactggccattcggtggagagcgggcttagcgtgttcggtggcagtcgcaagggaattgtcagaaggaactgtctgatcttccactggcggtagtagcggcctataatatcgatggcccatctcacctgtcgtttgtacttcaaggaccgatactcctcgcgggcctaaggaaaaaaaaatgaaacatttgtaaatatatggcataaactacctttagataaattaggtaaatcatgcaatgcttacgacacgatataaactccacaaatgcctacgaccagtgaagggaatgccaaatcggcattcctatacatgcagaaaatgagagtaatacaaatctcatcatgcaaattaatagatttcccacaaaactgcttacccgccacgtgcgccaggcactcgatatgatcatctggctgtgtcgcatgcgctgaaagcgcttccttgcgtgatacattcggaacatggtttgaataagcacggccagctcgctaatacgcaggcggcgaaactgttccaactcatatacggtgcggggactacgcacgaacacatttttggtgccgatcgtgaactccgctgagggcagcggtaggttacggattatgagggcgataccctctacctgactgccgccatgaaagtggggccacgtcaggctgttgagcaacttatagcgatgaaaaaacttaacgtgcaacaggtggtagcaatggccagtgcgacacaggtggaccagcggcatgagcgacatgtagcgcacctgatgttgcactagagccatatcgaactggtgcggctgcttgccctcgttgggcttaatacagaacacatagtgggagcggcgatgcttaacgatggccagcagcgtctgcaattgggtgcggatattcgaactcaacgtgctgggctttttggtaacctgtcgacggggattcccctcggggaataggctttgcaccaaagaaagtttgctctgataaaaggcagcgcttatgtacttcggcagcatgtcggagttcttttcgagaaaccgatgtattgagtagttcactacacttgcataatgacgaatcctgaaaataaagacattgagacattattgagaatgagatcacattgctcaattacatactgaaagcacatggaattgctgccggtggtcataaagttgggatgccccgcacaacattgctgaactcgcaaaagcaaagcgtcgttgctatttaaatggggttcattaatcaagctcaatataccatagctgggtttgtctattaactcgcaaatagactcgttgtcgaaatagtcaatgcgagaccattccaatccctcgcgaatatagagctcttgctccgaacgcagcacatgaaacacaaaattctgaaatgggagaaggattaaattacaatattaaagacctttaatttaagacaatgtaattttcattaactaaagtggatgagtcatgtgtacttgcctggtggatcttttccgcgctgtagttaatggcaaattgctcaaatgagttgtggtccagcgcttcgaatccataaaaatctagcaatgctaggttcttttcgcgctgtgttgacttcagggactcattaattttgttcaccagccacgtgaagagacggctataaagagtgcgacacagcgtgtttcggttggtagctgcttgtcgtgcatccatttcgcaacccacatcctcttgagcgctgttcgtgctattcgctctggttaagcaatttatgagaatttgggcttccatattaagaagctgtgctgtttcttgaacttctgtaaatggaatatattataaattatgttgccggtaatataataaacttaataaacataccgtatacattggacacctgacaaccctcagttccatcaatgttagtaatgggtacgaaaataaagttacccaactttagaaccactgcgatgacccgaaagatggagttgctctcttcacaactaagtcccagcacatccaaggatcgctggaatagaagtgaaacccatcggttatttgttcacttatataataatccggttaagatctaaccttcgtataatgaaaattcatgcggtcctcctccatggcagttgtgttgcggagcagctcgtacttttccacatttcgatacagcttgagcgattctaagaagatagcaatagcatttagcaggtagcatttaaaacgagtgaaacatcttacttagcaactggagatcagctcctaatagtaattggtaaaagatgtgaaaatttcgctctccaatgatagggtccgttatacgggtctgcaaacagatgaaatattagacataataactaaactaagttaattaaaattatcaatcaaaccttttccaacatatcttagaagtacgcacgaattaaataaatgtcagaatacatatttataattaataggtggagttttacttacaatgggtaatgtgcactcccattggatctcccttaaaatcaatttcgatatcaaatagctttccctgaaatcaaaaaacaatagaaaattaaaattaaagtcatatttaagttatctctgtaaaagtgcggaggtattcttgcacatttcagtacatacacatttcacttacatatcgactagagttattatttttcagggtgcaggcattgcccatggcctccaggaacacatccgcacaggtgacgcactctcgcattcgttgcgtgggcgatttatgacgcctgtgcagcgaagagctggccgatggcgtgggcgaaacagaactaggcggaggcggcggcagatcgcccagaaccttactcagcttgtgtgcatcgtacagcgatatacgttgcgtggaccccataagggagcttcgatcccgctcccgctccggctgactctctgtcgagtgctggcgcatcaggttggagcaactaccgcgatgcggatgtgccggattggtggtggcagtggctatggtagacaggcggcagttgctgcctcgtagatcatcccgctcctccttttccaggctctgagcacggacacacttgctgtgtccgcactggcggcaaccgccgtacacggtgggtaccgcgtatttgggcgatcccttggctgctgcgggcattgcagtgcaggcgctgacttgggtctgctggtgcttgaagcacgacttggtcggatgcatgtggtgggcgtgcgattcaggaaggccgctgatgttttcgctactcttgtggtgtgagaaatcaaagtcgacaattttctcccgcatgtggcgcctgctttggcgctcgatgctctcggcccgcgtccgcgatcgctgcgatggtcctggcgatggactttgtcgccgtgaaacactgcctgacggattttccgcccggtttttgcatataataaaattggcagtgccggagcagctgctggaggctcgcctgtgggcgtgcatcaccaatccgctggccgagctagttgaggattgcttgcgcaaaacattcggtgttggggggcagtgggagcgatcttgtatgtgggtcagaaagttcacgatcattttaaaagtctccgttttgcccgctccgctctcaccggtgagcagaacacactgatcctcgctctgatctttgagcgattgataagccagatttgtgagaccatatctgatgaaaaaaagttgtataagtaaagataatgggccagcctcctaaatgatatcttacatgtggggcggcagctggaaaatgcccttatcgccatagttgcggacattgtccagagagtgctcggatatgtgatgatatggattcagagccacaacagatgttccaatgtaggtctggaaatgaatatatacggaaatgtatagaaatctgaagagtgtagaactgtacggactcacatatatgtgatcgcgcttatagcgctggtggatgttgtttatgaaactatcctcggacaggttctccaacagtaccgagtcccaggtgccgatttcctgctccatcgcgattcccagctccaattacaacgtgcacggcagtagtgacaacaacgacaacggccaaaatcgagttcaccatttgaatttgaatacatcaactgcaaacggggccaaaacaagaacgggaacgatgggaagggtaaggggggttgttaatggctccaacaattgcataatttatcgcgggcctgcatgcatctgggcgaatccgtgttttgattttctgattcaattattgattttcatgtgctggcgagcaacagcctcgagctcgtgttcactcatatattccggatagatagagtccggcttctaatatccgtgacaacaggactcccgactgcccttctacgccttcgtttttagcgtattattgtctttattcgcaacgatttgcacattttgtttaccttttcagaaaagacatttttgcatccagtgggtactagtggtggcccagccatcgacgaccatatcgatatagtctctgagccaccaatcgattcgcataccctacaaagattattatatctaattttaatagttttaaaataacaattaattttatattaaattgaatggtttattaatatctgttatatttaaaaggctattattttactagacttaagctctcaaaatggttttaaaattatagtataaacattgctagggtgttaccagcgtcggtaatcgaagctggttattcttcgcggtgggtttgccatccctattgttaggataataaacgcaaaaattaccatgaatactgacgagcgaaacttcaggtccatctactatgaaaaatgccaaataaacagcgtcgaggaacaaaagtcgctgaacaaactactacaggatgacatccgcaacctgagcaagctgaaacaattctgcatgaactacacagtgccgaacaacaataggagctatctgtgggccctggtcatgggtattctcccgctccacaaagcgtccacggcgtacgtacgcgaccaaagacgcgaaatgta

SEQ ID NO: 11516 - DNA, 2597 bp, DROSOPHILA
gggaatcgcgatggagcaggaaatcggcacctgggactcggtactgttggagaacctgtccgaggatagtttcataaacaacatccaccagcgctataagcgcgatcacatatatatatggtctcacaaatctggcttatcaatcgctcaaagatcagagcgaggatcagtgtgttctgctcaccggtgagagcggagcgggcaaaacggagacttttaaaatgatcgtgaactttctgacccacatacaagatcggcgtcataaatcgcccacgcaacgaatgcgagagtgcgtcacctgtgcggatgtgttcctggaggccatgggcaatgcctgcaccctgaaaaataataactctagtcgatatggaaagctatttgatatcgaaattgattttaagggagatccaatgggagtgcacattacccatttcatctgtttgcagacccgtataacggaccctatcattggagagcgaaattttcacatcttttaccaattactattaggagctgatctccagttgctaagtaagataatcgctcaagctgtatcgaaatgtggaaaagtacgagctgctccgcaacacaactgccatggaggaggaccgcatgaattttcattatacgaagaagttcaagaaacagcacagcttcttaatatggaagcccaaattctcataaattgcttaaccagagcgaatagcacgaacagcgctcaagaggatgtgggttgcgaaatggatgcacgacaagcagctaccaaccgaaacacgctgtgtcgcactctttatagccgtctcttcacgtggctggtgaacaaaattaatgagtccctgaagtcaacacagcgcgaaaagaacctagcattgctagatttttatggattcgaagcgctggaccacaactcatttgagcaatttgccattaactacagcgcggaaaagatccaccagaattttgtgtttcatgtgctgcgttcggagcaagagctctatattcgcgagggattggaatggtctcgcattgactatttcgacaacgagtctatttgcgagttaatagacaaacccagctatggtatattgagcttgattaatgaaccccatttaaatagcaacgacgctttgcttttgcgagttcagcaatgttgtgcggggcatcccaactttatgaccaccggcagcaattccatgtgctttcagattcgtcattatgcaagtgtagtgaactactcaatacatcggtttctcgaaaagaactccgacatgctgccgaagtacataagcgctgccttttatcagagcaaactttctttggtgcaaagcctattccccgaggggaatccccgtcgacaggttaccaaaaagcccagcacgttgagttcgaatatccgcacccaattgcagacgctgctggccatcgttaagcatcgccgctcccactatgtgttctgtattaagcccaacgagggcaagcagccgcaccagttcgatatggctctagtgcaacatcaggtgcgctacatgtcgctcatgccgctggtccacctgtgtcgcactggccattgctaccacctgttgcacgttaagttttttcatcgctataagttgctcaacagcctgacgtggccccactttcatggcggcagtcaggtagagggtatcgccctcataatccgtaacctaccgctgccctcagcggagttcacgatcggcaccaaaaatgtgttcgtgcgtagtccccgcaccgtatatgagttggaacagtttcgccgcctgcgtattagcgagctggccgtgcttattcaaaccatgttccgaatgtatcacgcaaggaagcgctttcagcgcatgcgacacagccagatgatcatatcgagtgcctggcgcacgtggcgggcccgcgaggagtatcggtccttgaagtacaaacgacaggtgagatgggccatcgatattataggccgctactaccgccagtggaagatcagacagttccttctgacaattcccttgcgactgccaccgaacacgctaagcccgctctccaccgaatggccagtggctcccgcatttctggcagatgcctctcgtcatcttaggtccatataccatcgttggaagtgctacatctaccgaaactcctttgatcaaacggcgcgtaatcgaatgcgggagaaggtcacagccagcattatcttcaaggatcgaaaagcttcatatggacgaagggggtatttcctttccagtgtgggtcatccttttgtgggggactacgtgcgactgcgacacaaccagcagtggaaaaagatctgcgccgagaccaacgatcagtatgttgtattcgcagacataatcaacaagatagcgcgctccagtggcaaggtaagctaatatatttcattcaacagtggaatataacaagacaaattcttttattttcagtttgtgcccattttgctggtgctatccacgtcatcgcttttgctgttggaccaacgaacgctgcaaattaagtacagagtgcctgcatcggagatttaccgaatgtctctgagcccctacctagatgacattgctgtgtttcacgtaaaa

SEQ ID NO: 11517 - protein, 59 aa, DROSOPHILA
MEQEIGTWDSVLLENLSEDSFINNIHQRYKRDHIYIWSHKSGLSIAQRSERGSVCSAHR

SEQ ID NO: 11518 - DNA, 3909 bp, DROSOPHILA
agcgccagcccacctccggactttcggtggccagtgtctgggagaagaggcagctgggcgaaaggctgatgtccaaacggggcgagaagtccacactgtcgtccaagctgggcttgtgtttgtgtggtggagtgctctccaggtcggacgtgattcccactactgctgaggagttgggcgagccgggagtgtccacggatacacttacattgtgccctgtgcgtacgctctgtggtgaagctattaacaaaggattgttttatggatattcctgatttttcgagcttggaaatccttaccactgtggcgcttatgcagcagacgcgtgctgagcgttaaagatcgccgtttaagtgcgttctccataactttgacttaacaataaagtgaactgcagtcaattatttaactaatcaaatttgttttgttttgcgctgcggaatgcgctaaaaattaaagtaagccgacagtgttgccagatggcactgtcaaaactcacatggtcactctgctattcaactcgttttgtttatagcccttttccacttaaacgcatagtttaataaaaaaatccactctccaaaatctatgaaaatattttatctttaaaatacaatcaatttaaattttcatctacatatgttcttttatataatggctgacttgatgatatttctgttaccaccaatgcaagaaatcagttatttgagtactgagacatccattggcacataaatccatatatcgcaataagatgaacaataggaaattgtcttaaagaaagtttagtgtataaataaaatagtgtataaatttacatataagtaaacttacggagtaaacgttataaaaatagagaaatgtacaaatatacaaaatataatacaaaaaaaaaaaaaaacaaagatatctataatttttttttgtaacttttagtattttatctatcggagtgcaaacattctggtaggcggtcatgctttggtatttggcaacactaaactccggtcacacaacaaaatgcttatggtgatgtgttaaaaagcgaaattttgaatacaatttactgatccagaaagatgaactacaatccaaatccgggtatgcggaaccgtaagtgggagaactgtaaggatcaggctacgcaagcaagtatacctgaaggatgtccggtgcagccactccggaatttccccacccgccgctgaccggaatcggaatccggagtgctgtcactgtttacgttacacgttaccccgttttgtgcgccgctcctggcttccactgcatcctgctccccagtttctatgcctgctgtgcgtttccgttccgtgatgcgtgtgtagcttgagtgcctgtgttccccgcttcccagttgtatcgtttagatcctccggcactaactaatggttgctctgtcccaaaatagcctcagctgccggtcgcccaaggccgccgaagcgtgtgagtgatgttaacgccatgggaccctcggctccgatgatgggcggtggcgccaccttcatggccccgcccaccggccccggaatactagatcccaatatgtacggagcacctgctccggccccggtcaacagctatggcttcgaccccaatctcggccagccctcgcagcacattcagcagccaccacaacagcagcccggatacggatatggagcaccacctccccaacaggcggctgggccacccacctacggaataggagcacctcagcctgtagctccacccactggacagtacccacagttcgccatgttccagcagcccatcgtgcaagacatggctatgcagtacggtcagaaactagcggatcagggcaagcagatcatggagaatcagttcgagaagtgggtgcccgtagccaagctcaagtactacttcgcagtggacaacgcctacgtgggcaggaagttgcgccttctgtttttcccctatatgcataaggtgagagtggtgaagcacaaacggagaaaccatataaattacatactcctttcaggattggtccctgcgctacgaccaagagcacccagtgcaaccacgatatgatgttaatgcgccagatctctatctgcccaccatgggctacatcacatacgtgatcgtagcgggtttgcttctgggcatgcagaagcgattttcgccggagcagctcggcattcaggcctccagcgccatggcatatagcattttcgaattggtcatttactccctagccctgtacgtaatgaatgtgaagacgagcctgaaaacgcttgatctgctggcattcactggttataagtacgttaatatagttgtctgcctgatggttagcacgctgttctttaagtctggatattatatagcactggcgtataccagtttctccttcggtttcttcatggtgagtttgcgcttgctctacacttgtggagcaatcagtaatcttaccttcattgtagctccgcacgttgcggacgaaactgctgcaggacaactccccggctgcgcccagtggagccatcaactacgatccgtatggcaatccacagcaatttgactacagcggcgggaaaaagcgcaaactctacttcctgttcatgatcgtcgcgggacaggcgctgttcgccttcctgctctccaagcacctgtatctgcccgaggcggaggtgctgacggtgcccaagaccttctaacccacaggcttgataggttaatttgcatactccttgagttaatcgtggccagggtggccactcacatgtcgaacgattccacagagcctaggcattgtgttttccagcatgaagtttgtggttgtctcatttgagactcgagcgagagaagcatatttttgttagaaacaaacacattttataaataaataccagctatgaaaactaattttttatataattttattgaaattttagtctttttttactgtaacgtgttcttggttggttttgcttgctcggctcattgttaacttattggctaacatcgcaaggtgccgactgttgtttctcctggctcgttataaaatatatgtgtgaaatgtttgttgctgtgttggttcgggtttcagatttcaaatttccgatcaccgatttccggttcctgtctgcatttagtctaatttgttcggttgtcgtctgcatgctaaaacgttgcactcggcggcttgcatcaaaaaataaaaggcatacgaatccatagtattagtaatgataacagttcctactttaggttagttcgtgagtttacatagttagatagttcgtcgttggttagtttggggcctcgaccgcaactcagtacatagcacgatgtgtaaagacgtccacttctcattcccttccactccattcctctatttgattctgtttattttagttcgctaatgcagttcacttcttcgttcttttgctttatttatcgtgtgtagtgtaggctagcacttagtaaatagttataaacatgctttgctttgttttcaacaaattccacgtactaaaaaaataatacatttacaactaataatttagattaaacatatacgtttgttctgttgcctgatgatgctgcgtatatagatcgtagttatgttttacatagctatatatcgtatatatacatatatgtatatatgtatatatattacgggtgtacggtgtgtcgtgtgtggttcataaactcatttaggctacatttggaatacaaaatacgcaacataaaacctttaaaactcttgctcctatcaataaattaccgaaatcaatcgcctagctttaacctagatcaccgactgcttctgttgctgctcctgctcctgctgcttgacaagattacgctgatagttgaccaagtccactttattgaactaaattaccgtcccgccgg

SEQ ID NO: 11519 - DNA, 1480 bp, DROSOPHILA
aactccggtcacacaacaaaatgcttatggtgatgtgttaaaaagcgaaattttgaatacaatttactgatccagaaagatgaactacaatccaaatccgggtatgcggaacccctcagctgccggtcgcccaaggccgccgaagcgtgtgagtgatgttaacgccatgggaccctcggctccgatgatgggcggtggcgccaccttcatggccccgcccaccggccccggaatactagatcccaatatgtacggagcacctgctccggccccggtcaacagctatggcttcgaccccaatctcggccagccctcgcagcacattcagcagccaccacaacagcagcccggatacggatatggagcaccacctccccaacaggcggctgggccacccacctacggaataggagcacctcagcctgtagctccacccactggacagtacccacagttcgccatgttccagcagcccatcgtgcaagacatggctatgcagtacggtcagaaactagcggatcagggcaagcagatcatggagaatcagttcgagaagtgggtgcccgtagccaagctcaagtactacttcgcagtggacaacgcctacgtgggcaggaagttgcgccttctgtttttcccctatatgcataaggattggtccctgcgctacgaccaagagcacccagtgcaaccacgatatgatgttaatgcgccagatctctatctgcccaccatgggctacatcacatacgtgatcgtagcgggtttgcttctgggcatgcagaagcgattttcgccggagcagctcggcattcaggcctccagcgccatggcatatagcattttcgaattggtcatttactccctagccctgtacgtaatgaatgtgaagacgagcctgaaaacgcttgatctgctggcattcactggttataagtacgttaatatagttgtctgcctgatggttagcacgctgttctttaagtctggatattatatagcactggcgtataccagtttctccttcggtttcttcatgctccgcacgttgcggacgaaactgctgcaggacaactccccggctgcgcccagtggagccatcaactacgatccgtatggcaatccacagcaatttgactacagcggcgggaaaaagcgcaaactctacttcctgttcatgatcgtcgcgggacaggcgctgttcgccttcctgctctccaagcacctgtatctgcccgaggcggaggtgctgacggtgcccaagaccttctaacccacaggcttgataggttaatttgcatactccttgagttaatcgtggccagggtggccactcacatgtcgaacgattccacagagcctaggcattgtgttttccagcatgaagtttgtggttgtctcatttgagactcgagcgagagaagcatatttttgttagaaacaaacacattttataaataaataccagctatgaaaacta

SEQ ID NO: 11520 - protein, 397 aa, DROSOPHILA
MNYNPNPGMRNPSAAGRPRPPKRVSDVNAMGPSAPMMGGGATFMAPPTGPGILDPNMYGAPAPAPVNSYGFDPNLGQPSQHIQQPPQQQPGYGYGAPPPQQAAGPPTYGIGAPQPVAPPTGQYPQFAMFQQPIVQDMAMQYGQKLADQGKQIMENQFEKWVPVAKLKYYFAVDNAYVGRKLRLLFFPYMHKDWSLRYDQEHPVQPRYDVNAPDLYLPTMGYITYVIVAGLLLGMQKRFSPEQLGIQASSAMAYSIFELVIYSLALYVMNVKTSLKTLDLLAFTGYKYVNIVVCLMVSTLFFKSGYYIALAYTSFSFGFFMLRTLRTKLLQDNSPAAPSGAINYDPYGNPQQFDYSGGKKRKLYFLFMIVAGQALFAFLLSKHLYLPEAEVLTVPKTF

SEQ ID NO: 11521 - DNA, 6283 bp, DROSOPHILA
cccgctctatgatgcgtagggcggtaacgatgatggtgggcttcttgcgcagagtgttcagcgtgcggctaagaatgagtcgcagctttttctccagctcttgggataccgtgtcaaccttctcgaagtgacgctttagggtgatcttgtcggacgcatgctgcttgggctgcttgtgcagttcgtagagaagatcatcccgcgaattctccagatccgccaggcactgatgggcattaagcagcttatcatcctcgatcagcgccatcgtcttttgtacgctggcatctacgttgaagatgtgcttcagattctccatggcggtggcgtactgggagtgctttgtgttttcctcccgcacaacttccaaagcgtcgtagacttcgggaacgcccctcagcaggcgctccacctcgtccattcgacgccttacctcgcgcacgtcctgcatgcaggtctccaactgcttaagtcccaccctgaccccgtccagctgtccttgcattccggtcttaaggagcgcctcaacggatgccttcttccgggcgattcggtggcgatattgttccaccttctccagttgacctggtcgctgcaacatgttctgtatgtccttgagcgctgcctggcgagcctgctcctccagctgctgtaaatccatcttcaatttatttggatcactttcagtctctgttttggtcaatcttcgtcagcagtggaagtgctggtgtgaccatatagcagtgcggctgacaatctcacttccaagaactacagtgtaacttgacaataagctatattctactcttaaaattattatagttttattgtgtcttaaaatttttattttattcttcaagcttaaaaaattatgaagttaaagtatatcttttagtttgccaaagcaacagaggattcgacctaagtatggaaaactgtacttatcgataagttatcttctcattggtctatcgccatcgagagctttgtttgtttataatttgcagccaaacgtttgaacgtaaacaacgccctaagcaaaacatgagcacggaaaaagagataattttgcaatttgctccgtgggaatcttttgtgtcgcccactttctggcacaagctagcggagcttaagctcgaccacgatcgcctgtccgactcgaaacgctccattactggacactacacaaatcgtaatgcaagtggatgccttttggaagtagactacacggcctacaacaggtgagcttgaaaactacgagtttgatgaaaccagcgcttgaccacccacattccagaatggcaaagcctccaaaattcagccattccgctataggcaccatctacaataagaacacaatcgaagagttcaaggccctggacaaattacaactgctggccgatgagggcaaggaactgctggctgatatgtgcagtggtggcgccttgagagatcccagtctattgacccggttctttgttctctcctttgccgatttaaagtgtcacagctactactattggttcgcctttccgtgcccgctgacgcccaccttaaagcttcagggagccgtccaaaaactgcgggacttgcccaatagtagtagctatataatggctctaaaggccttacccactgagtcacagaacttcttcattctgtatgctaatgtggagaagaacattttcgaagcccgtagtttaagttcccttgacgataaaaatgttgagttctgttattttggttttgctgatcccagcgagtatgagcatccagcttggataatgcgaaactatgctgcctttctgcttcagcaatggtaggtaggaatagcaatgttatgatatcagttcacacagttgtcggtctattacagtccctcttttgttggaaaaccattgaagtttcttggcctgcgacacaatcaacaaatgaacatcgatgacagccttgtatggaaggtgattcagactgaagcttgcgatcttagccaaagcgaaaatataaagttcgtgggctgggagctaaataaaaatggcaaaatggggccaagaatggtgtgcatgagggacagcatggatccagccaagtaagttaatagctatagacttaaatgataagaactatcagttcattgaggtgtgtccttagtgttagctaccacgacagttgaaagtaacttgtttattatttataatttaacaatatttctttccgtagactcgctgagaactctgtaaacctgaacctgaaactaatgaagtggcgccttgttcccgatctcaatctcgaaatcatctcccaaacaaaatgcctgctctttggagctggtactttaggatgcgctgtagctagaaatctgctggtgtgcttttatacgaaatgatttaactgatctgataactaatagtttatttattttgtagtcctggggatttaagcacataacccttttggacagcggcaaggttgggttctctaatccagtgcgtcagaatctctacacgcatgcagatgctgtggcaggcaatcggatgaaggcgactacagctgctcagagattgaaagagatcaatccgtctgcggaaacggcgggttatgtgctggagattcccatgcctgggcatactattggagaatcgcttctagcccagacgaaggagcatttgaaggttatcgaaaagcttgtgcaggaccatgatgtcatctttctgctcacagattcgcgcgaaagccgctggctgcccaccctgcttggagcggcaaaggaaaaagtgggaacaatcatatactcacctttcagaagagatgtacctaaaatgtttcccttatagattgtcatcaacgcagctttaggctttgacagttatctggtaatgcgacatggcactacgcgtaaggaagcaggcgacgatggccaagaaatcgaaggacttaagtgcattaatggcgatcaattaggttgctacttttgtaacgatgttacggcccctggaaatgtaagtcccatttgttgtatagtttaagataacatttgtattttcagacttcattagttgggttaacatggttactaaacgcattcgtaatcatggcgggaatatttttcgaagccagcgcacgtaggatcccccgtctgcaggtgatccacaccagttatctgcactaccaggccatttatgctggtcaccttgaaacccactagattcatcatggcattaggtgtgcgccaggtgtagctgaagaagttataaccgtccactgcagtcaaaacctcgcgttccgtaaacgcaagcgccagcttgaattgctggttaaagacgaaggggaaacctccatgacgctcctcgcttccgaatctataaaaagaattagttaacgcccaaagaggtacggcattataaagttaacttactcaaaatttttgttcatggaattgcgcactactgccttctcatcgaaacgcacactgaagtgtagctcttcgcgcttggtatccgagtccatgaacttgattatgaactgtccctttttattctcgaaacaccgagctgtaaggacaatcacatggcccggactaaacaaaattggctgatcgttactgaacgccttaaagtagtccgaggcgtgaacggctggccacggatttggaaacacagtacgatgatccacctgtttaatgacttggatctgatcacggatctccagagcacgaatcgttcccaacggcatgcggtagcggaatctgcagaactctcggctatttatcgagatggcaaagctgtcctcgcaacaaagaatgtagaccaaaaagaactcgccactgacgatgggattgggcagggtgttggggtccatgacatgggactcctcctcgccccaggcgccgtttatccgggaatttcgaacgatcacatcgttccgaaaatagcatgagaagcgtagcccaatatctgcgttcggatcgaccgtgctcttggccgtgcagaggttaatgtggaacctatccgaaccaaatgatcacaatcgattagtcacgtactgataagaagcccaatttgacaagtaattagtcagaaaacggaaaagcggtcttacattaatgccggacaacacttacctggctgctccatcgatggtcttggccacgacctccagaacatgaccaaactccagcggatgcgatagattgccagcgaattcggtcaacatgattccttcctgcaattaccaattcaactaactatcgcctttgtactgaacaatcaagcgcaaaatgtgttttatagttccgtgggagagtccggagttctccggctctcccaaatgttaaaactttatctaatcagtgatgggcggagcggcgggttgctcaagtaaccgatacaaacgccgaagttttctatatcttgtgtttttggtttttaagcgctgctatttgttttgttctcgcccgaaggcgtcatctttgtttgctcggagcatgtgtttgtggacacagaaaagctttcaaaagctcttgatcgtactactgcaccggcgtcgaatgtgctccaaatcacactgaaaaaaactctgtataaaaaaatctcttatagactcgctttataaagttgtacgtacaaatttggatacagatactcattgcatttcgttctattccattttcagtcgctcaaagaccgaactttggatcaacagtgcacagtgacacgacccggagtatccaacattgcggccagctatgcggtggaattgttggtggctttgctgcagcatcctcgtaaggagctggcacccgcctactatgcacagagtgggcgtggcaggtcggaggagacggaagaaaaggtgccggagggtctgctaggaattttgcctcactccatccgtggaatgctgtgcaactacgagaatattctgcccgccactcaaaagtttgctcagtgcatagcctgttcagcggtaagatttgacaatcttttaaaatggttttgatagcgttttcaatattgttaaaattttttttttaatatattcgcttacaggccgtcctaaatgaatataaaaaagagggtcatgctttcctgtttaaaacttttgaaacagccaagtttctggaggatttgacgggaatctccgaattcaagcggttaaacagcgaggtttgtttgtttcctgtgtttaatctaatggagatatttaaaaattattcatatttttgcacagattatcgattttgatgatgaagaatttgacatgtccgatagcgacgaggattaggttccacaaaattggtcaagttttatcttcaaagcaaaatatcttaaatatgaaattcagcttattgtggctttaattttctgcagcatttatagttcaatgtctataccaaaaatgtgtgtacttcaatgcttttattctatctagtcgttaagcaaattgtgaatcattcaaatgaaattgatgtgaaaattaggcataagaaaaatgtgaatttactattgaaaattgtaataataaaagtgtgaatttactattgaaaattgttataataaaagtgcttaagtacgggaacaaatgtatttccgccaatttacaagtcgcagcctttaagctttgtttgtttgtacgaaacgtgtttctgctgataagagcactcatttataggcgaaaatattattctgatctgagaattcccatttttgtggttgacaaataccaaaatattgttttcaattcccgatcggtcattgaatatgttattagctgcattattcaaggcgaaaacacgcaaacaaagatgaatgttcgtataaaattgttttgggaatatgcaaatgatttacatagtgggccaggtatgcgaaaagaatagttcaaagttgaataaacctggttagaaagccacgaactaatcgcatatgtaaatttgcttattatgtctcggtcaaagtagatgacatcctagaaatacgctcacaaatgttatactttaaagagatatgtaaagttaaaactatatttttagtccaggaatataaaatgtttaaattttcattaaatggttgtatgaaaatttaccactttaatttatcaaagtggttttaggccaagtgttttgagctgaacaaatattggcaacaagtacttgacacacaattcgtgtgcgtttccaagcgatttgatgataaagcctttcatcattttgaccccaggccaaaatggagctagagaattccatccactggctatgacaaaaggctcccggccatttctcttg

SEQ ID NO: 11522 - DNA, 2099 bp, DROSOPHILA
tttgcagccaaacgtttgaacgtaaacaacgccctaagcaaaacatgagcacggaaaaagagataattttgcaatttgctccgtgggaatcttttgtgtcgcccactttctggcacaagctagcggagcttaagctcgaccacgatcgcctgtccgactcgaaacgctccattactggacactacacaaatcgtaatgcaagtggatgccttttggaagtagactacacggcctacaacagaatggcaaagcctccaaaattcagccattccgctataggcaccatctacaataagaacacaatcgaagagttcaaggccctggacaaattacaactgctggccgatgagggcaaggaactgctggctgatatgtgcagtggtggcgccttgagagatcccagtctattgacccggttctttgttctctcctttgccgatttaaagtgtcacagctactactattggttcgcctttccgtgcccgctgacgcccaccttaaagcttcagggagccgtccaaaaactgcgggacttgcccaatagtagtagctatataatggctctaaaggccttacccactgagtcacagaacttcttcattctgtatgctaatgtggagaagaacattttcgaagcccgtagtttaagttcccttgacgataaaaatgttgagttctgttattttggttttgctgatcccagcgagtatgagcatccagcttggataatgcgaaactatgctgcctttctgcttcagcaatgtccctcttttgttggaaaaccattgaagtttcttggcctgcgacacaatcaacaaatgaacatcgatgacagccttgtatggaaggtgattcagactgaagcttgcgatcttagccaaagcgaaaatataaagttcgtgggctgggagctaaataaaaatggcaaaatggggccaagaatggtgtgcatgagggacagcatggatccagccaaactcgctgagaactctgtaaacctgaacctgaaactaatgaagtggcgccttgttcccgatctcaatctcgaaatcatctcccaaacaaaatgcctgctctttggagctggtactttaggatgcgctgtagctagaaatctgctgtcctggggatttaagcacataacccttttggacagcggcaaggttgggttctctaatccagtgcgtcagaatctctacacgcatgcagatgctgtggcaggcaatcggatgaaggcgactacagctgctcagagattgaaagagatcaatccgtctgcggaaacggcgggttatgtgctggagattcccatgcctgggcatactattggagaatcgcttctagcccagacgaaggagcatttgaaggttatcgaaaagcttgtgcaggaccatgatgtcatctttctgctcacagattcgcgcgaaagccgctggctgcccaccctgcttggagcggcaaaggaaaaaattgtcatcaacgcagctttaggctttgacagttatctggtaatgcgacatggcactacgcgtaaggaagcaggcgacgatggccaagaaatcgaaggacttaagtgcattaatggcgatcaattaggttgctacttttgtaacgatgttacggcccctggaaattcgctcaaagaccgaactttggatcaacagtgcacagtgacacgacccggagtatccaacattgcggccagctatgcggtggaattgttggtggctttgctgcagcatcctcgtaaggagctggcacccgcctactatgcacagagtgggcgtggcaggtcggaggagacggaagaaaaggtgccggagggtctgctaggaattttgcctcactccatccgtggaatgctgtgcaactacgagaatattctgcccgccactcaaaagtttgctcagtgcatagcctgttcagcggccgtcctaaatgaatataaaaaagagggtcatgctttcctgtttaaaacttttgaaacagccaagtttctggaggatttgacgggaatctccgaattcaagcggttaaacagcgagattatcgattttgatgatgaagaatttgacatgtccgatagcgacgaggattag

SEQ ID NO: 11523 - protein, 684 aa, DROSOPHILA
MSTEKEIILQFAPWESFVSPTFWHKLAELKLDHDRLSDSKRSITGHYTNRNASGCLLEVDYTAYNRMAKPPKFSHSAIGTIYNKNTIEEFKALDKLQLLADEGKELLADMCSGGALRDPSLLTRFFVLSFADLKCHSYYYWFAFPCPLTPTLKLQGAVQKLRDLPNSSSYIMALKALPTESQNFFILYANVEKNIFEARSLSSLDDKNVEFCYFGFADPSEYEHPAWIMRNYAAFLLQQCPSFVGKPLKFLGLRHNQQMNIDDSLVWKVIQTEACDLSQSENIKFVGWELNKNGKMGPRMVCMRDSMDPAKLAENSVNLNLKLMKWRLVPDLNLEIISQTKCLLFGAGTLGCAVARNLLSWGFKHITLLDSGKVGFSNPVRQNLYTHADAVAGNRMKATTAAQRLKEINPSAETAGYVLEIPMPGHTIGESLLAQTKEHLKVIEKLVQDHDVIFLLTDSRESRWLPTLLGAAKEKIVINAALGFDSYLVMRHGTTRKEAGDDGQEIEGLKCINGDQLGCYFCNDVTAPGNSLKDRTLDQQCTVTRPGVSNIAASYAVELLVALLQHPRKELAPAYYAQSGRGRSEETEEKVPEGLLGILPHSIRGMLCNYENILPATQKFAQCIACSAAVLNEYKKEGHAFLFKTFETAKFLEDLTGISEFKRLNSEIIDFDDEEFDMSDSDED

SEQ ID NO: 11524 - DNA, 5066 bp, DROSOPHILA
gattttccgagtgcatgagtgcatttgggagtgcaacatctagattagcggacagcaaagaaatgctgcaacatgtggcaacagcggtggccaaaagtgaatagaaaatccattttgctgtcttttgttttccgcttgcttctttgggcagtgctcttgtttctcctttttttttaatttgcaaagttttcgtttcgttttccgatgcagttcaatgattaaagaggcaaacgcccagaaattggccagctcacatttcgttatggccaccattggggcatgttgcaagcggtgggtaagaattttttaatttgatcgagcgttgcgcttggggcggggctcttgggcgttttttggaaaggcactgatcgataagatcggcctaatcccgtggccaaataatgagtgctaattgtccgcaccgcggaagtcaaagaactagcacccgaaacaacaccaaataaaatacattaatcgcctaatgttgaagccaggttgaaaccaataccggcaattaaatcgcgttgaaagcaaggtcatggcagctgtgattttttccacagtgacaaacgcagcgcggaaacgcacgagcaacatgttgccagtgcaactgcaggccagcaacatgctgcagcggcactccactgcaagcgattgatacacattcttcggctgcgatatccacttcggctctggccaaaccccgcttcgagccccgattaaagtggtaattcgattactctggaactggtaccacacattgttctgctcttgctctcgttggcttttgttggcttttgttgaacgcccgatattgctggtgttgcggtgttttcgctgctgttaccaatgttgcgcatgcgccggcgtctcagccggagtctcggctgcagtgtctctgctccccaatccccagtctccgggctcgctggtctcgggcggtatatattagggccgccagccagcagtcagcacagttcgttaacagtcctagtcgtggttctaggaggttcaaccagcgtccagcgaccagtgcctgtgcccgtgtgtcgtgtgtagttagttttccgttcatccgcagtgtgtccccgaaactccttttcgaagctcaatcgtgtgatcatagctaaaatgaagccattcgtaagtatgcgccatgggatcgaaaggataacgccgagcaagaggattaaagttataaataatatgagttggagtgtgtagattaccgtgaggagaaaaggatatttggattccgtgcttgaattactgagatacatttctaactttttctgttctacaaattagtgattaacgtctctgcatgtaatttatttttcttaaagttacaaaattttaccataaaagtgggcaaaagttcatttaattgattgattctatcatgaaatgcttaagttcattaaaatcgtagtttaatggaactatgtaagtccacagccaggtttcgctagttagaactgctttttcattttcgatctttgggatatgttaatcggtatcaagagagaagtgtggcataccaaatctttaaattggattttgtcagccgttcgaaaagtaaacactagtttgacagtgacttgccattaagtttgaatgaattcctggcattcttttaatctgtcatagcgcaattaatttaaaattcaactgacattgcttttgtaaactcaatttatttcgcttaaattccgctccgaacgaaatggcacctgtgcatcgttcagttccatccgagagtcaattaccatggcacgtcatgctaaacgtaccacccagcaaaccatcagctgccatggaactccgtgcgaaatcccgttgataagccgctgacatgttgcatgtcggacagtttattcaaccgtttttccaccactttctgccccactcacctgctgacacataatatcgtacataatcgcgccgcatgcggtaatatcttcgaacgaatattggccgaccgaccgactactgactacatatctcggaatcaaatctaacggttgcgcttcgcggctctgaaaagcgaaaccattggaaaagcgaatccagaggagaagcgagtccaggagaaaagcgaaaagatgggcgtgtggggcaagaaaagcgagaggaaaacgctggcgcaagagcaagaaaagcgaaaagcctgtaattaggttagcagaggcggcttataagcttccactgagtgacacctgcgattaacgattttgggcggtggctaccgcacgagtaattattgagcagtcacataatcccacgcctaacaccttctgcactgtgagaaacatgtagaagctatatgttaaataatttgaaatattcaaagagatgaaggtacaaaagttctctaatcggaattcaacataggcaaaatcaaaaagatttttaattattattatatatatatttaatatataaaaatcagttctgtaaagctatattgaaatttgttagttttttttatcagctacatcaaaattacaaaaaataatttcccatttttatttagtttattgccgcagcgttgctgatctcgacggtgtccgcctcttggcacggagccgtctccacacagtaccagcacctggacccgcacagccacacctactcctacggatacgccgatcccaactcacagaagcacgagacgcgaagccatgacggcaccacgcacggctcctactcctacgtggatggtcacggtcatgtgcagtcggtgtcctacaccgctgatccgcaccatggcttcaacgccgtgggcaccaacctgcctcaggctcctcaagttcatgccgctcccgtttacgctgccgcccacgcccatggcgcctatgctccttacgcccacggacccatccacatcccggtgctgacccacggaggcgtccccgtcgatactcccgaagtgcagcacgccaaggccgcccatgccgctgcccacgctgctgccgcccacaatgccggaggacaccacctgtacaagcggtctatttacggcggaggatgggcctacggacaagccgcccatgtgccgctgactcatggaggtgtgcccgttgatactcccgatgtgcaggccgccaaggccgagcactatgccgcccacgccaaagcccttggccatgtagctcatgcccacggtgctcccgttgagacacccgaggtgcagcacgccaaggctgcgcactttgccgcccatgctgccgcccgttctggacatgccgtttcccccattaaccacggtggctatcacgtgccggtaatccacaatggagtacccgtcgatacgcccgaggtgcagcatgccaaggccgcccactacgccgccctgtcccaggcctccgcccacggaggagcctcgcatggatcctgggatgatggcagctacgacggacgctgggaacagagccacagcagccacaacagttacgcctccggctatgcgcacaagggacccatccacatcccggtcatccacaacggagtgcccgtggagcctgccgaggtgcagcacgcccgtgccgcgcatctgaatgcgttggccgccgccggacatggagctcccgccagccatggtagctactacggtggcaatggacacgaggatgatggccagtaccacgcgcactatgaccactattaagtgacgagtggtcggcacttgagagaagtttaacttccgatcgacgacgagcatctctatacactctgactaaccgactaccgaagccagcgtggcgtatgcgtaacgttgcattgcgtattcgctcgccagtgccacttttatacagcattcgcaactctctgtctttctatacatttatctgttctattactgcttctatttcttaacctctgtcacaaaaacacacggaaaactgaaagctactacacacgggagattgaagtgcttcgttagaagccttccttgcccgctgggttttgaccgatttggattttcgatccagtcacagcacacacatctctacctacctacctacatacttctctctgtactaggattttccctcattttttatctatatctttatcctcctgttacttcgattgagaaacgctgtatgagtatgttgtaaataacagttgtaatctttatgtatctgaccagatatagatctatattttatatgaacatgcaaacagacaaataaactgcaaaaatgtatttgatcacaatttgaagtgtttggaactggtggtgggattgtggtattaagaatttaaaatcaaagccccaggatgcaatgttaacttacttcttgagataagcttttaaattttgttggtaaaaagcgcagccctaaataattagataaatatttcgctttacatttttcaacatatatatataaattagttacttttttaatttaatcaatgatttctgttaaaatatttcaaaatttgctaaggctcctagacaaaaattaaaacactttttaggcttattagatttaaattcaatcgaacttattgtatttaaagttggaattgaaaattcatcttcatcctgaagataaaattccacatttaatgatttttctgatgttttgtcatgttaattaaaaggccatccagttttggggcttcgcatccatttactttaaactctgttgcatatttcccagtctcaggtcaaatgccgcaccacccagaacaaccatctaaaccaccactgataccgcacaactagcaccacccagtttccacccacagtgactgcattgaaaggaacataaatatttgcaatgcaacgattgaaatttgcatagccccatgcatatatgtgtttttgtgtgttccatgtgaaagtgcccctgtggggggcgttgggtggtttgctatgtgggcgtggcctttgaatccccaccagggaatagctgcatgtggcacgacactgagagcgaacaaacaatcaatcaatgcggtatgagtcttgtattttttgcccagccgcctgcaaaattgtgtgtcttatgcggggaatgtgtcactcgacttcgggtgactcgaactat

SEQ ID NO: 11525 - DNA, 1673 bp, DROSOPHILA
ttctaggaggttcaaccagcgtccagcgaccagtgcctgtgcccgtgtgtcgtgtgtagttagttttccgttcatccgcagtgtgtccccgaaactccttttcgaagctcaatcgtgtgatcatagctaaaatgaagccattctttattgccgcagcgttgctgatctcgacggtgtccgcctcttggcacggagccgtctccacacagtaccagcacctggacccgcacagccacacctactcctacggatacgccgatcccaactcacagaagcacgagacgcgaagccatgacggcaccacgcacggctcctactcctacgtggatggtcacggtcatgtgcagtcggtgtcctacaccgctgatccgcaccatggcttcaacgccgtgggcaccaacctgcctcaggctcctcaagttcatgccgctcccgtttacgctgccgcccacgcccatggcgcctatgctccttacgcccacggacccatccacatcccggtgctgacccacggaggcgtccccgtcgatactcccgaagtgcagcacgccaaggccgcccatgccgctgcccacgctgctgccgcccacaatgccggaggacaccacctgtacaagcggtctatttacggcggaggatgggcctacggacaagccgcccatgtgccgctgactcatggaggtgtgcccgttgatactcccgatgtgcaggccgccaaggccgagcactatgccgcccacgccaaagcccttggccatgtagctcatgcccacggtgctcccgttgagacacccgaggtgcagcacgccaaggctgcgcactttgccgcccatgctgccgcccgttctggacatgccgtttcccccattaaccacggtggctatcacgtgccggtaatccacaatggagtacccgtcgatacgcccgaggtgcagcatgccaaggccgcccactacgccgccctgtcccaggcctccgcccacggaggagcctcgcatggatcctgggatgatggcagctacgacggacgctgggaacagagccacagcagccacaacagttacgcctccggctatgcgcacaagggacccatccacatcccggtcatccacaacggagtgcccgtggagcctgccgaggtgcagcacgcccgtgccgcgcatctgaatgcgttggccgccgccggacatggagctcccgccagccatggtagctactacggtggcaatggacacgaggatgatggccagtaccacgcgcactatgaccactattaagtgacgagtggtcggcacttgagagaagtttaacttccgatcgacgacgagcatctctatacactctgactaaccgactaccgaagccagcgtggcgtatgcgtaacgttgcattgcgtattcgctcgccagtgccacttttatacagcattcgcaactctctgtctttctatacatttatctgttctattactgcttctatttcttaacctctgtcacaaaaacacacggaaaactgaaagctactacacacgggagattgaagtgcttcgttagaagccttccttgcccgctgggttttgaccgatttggattttcgatccagtcacagcacacacatctctacctacctacctacatacttctctctgtactaggattttccctcatttttta

SEQ ID NO: 11526 - protein, 381 aa, DROSOPHILA
MKPFFIAAALLISTVSASWHGAVSTQYQHLDPHSHTYSYGYADPNSQKHETRSHDGTTHGSYSYVDGHGHVQSVSYTADPHHGFNAVGTNLPQAPQVHAAPVYAAAHAHGAYAPYAHGPIHIPVLTHGGVPVDTPEVQHAKAAHAAAHAAAAHNAGGHHLYKRSIYGGGWAYGQAAHVPLTHGGVPVDTPDVQAAKAEHYAAHAKALGHVAHAHGAPVETPEVQHAKAAHFAAHAAARSGHAVSPINHGGYHVPVIHNGVPVDTPEVQHAKAAHYAALSQASAHGGASHGSWDDGSYDGRWEQSHSSHNSYASGYAHKGPIHIPVIHNGVPVEPAEVQHARAAHLNALAAAGHGAPASHGSYYGGNGHEDDGQYHAHYDHY

SEQ ID NO: 11527 - DNA, 6702 bp, DROSOPHILA
ctcgagcgcatgacaaattcattaaatgcacaaagaccgtaaagtgctccactgtccgcatggagcaacaggacgaaaggatgttggtcgacgggcgaagaaatgaagagagcgttttacaaaattttatacactccctgaccgtaattacaccacacagaggtagagggcagccgggattacagggtatggcgtatggcgtatggcgtatggcgaatgcataccgggcagatgggcgaacagtagttgggcgtggtttcgaggtgagccaaccatgaaatgcaacatggcagaggaagcgaactctgagaagcgaaaaggatgtgtgttcgtttgtgccatatttatacacgagtgttgtgttgccactaggtgtcgtccggtgctttgtgtgtgtatgtccattttttttcttttagcccagaagtcatccggattttgcgacccacaaacgttggcatttaaattaaattcatttttcgtcctttgccgctcgctcacacactgcgtatgcgtgctgctaatgacatattttgaacgggctgtcaaaaattctgactcgcgcttaattaaccgtccctgattaagccgcattcaaaggactttacgcaccgacgtgcaatgagcacatttgccaaatttactcgattcggcgcaatggcaaatgtttgtatccagttttatttcactttcatataattacgtaaatgttaatgccgcctctgagtcgctgccttttcattacatttcgagaatttgccgttctgtctgtcactatgagaatgacaaatgcgctaaagttttcttcgtgctaattacggagtgtgcactaaaggaaaaatcaccttgagtacgttatttcgttataatttcctagaataattagtctctaattaatcacaagtgtataggaaatatgaatggaatgatattttctaagacagcacattctttccaattgactgccacacatttctaaacattcctttcaatttctccatttgcagtgaacccatttggacaacatgagtcgactaaaggccgcttccgagctggcattgcttgtgatcatcctgcaactgctacagtggccaggatctgaagcatccttcggtcgggatgcgtgcagtgagatgagcatagacggactgtgtcagtgtgcacccataatgtcggaatacgaaatcatctgcccggcgaatgcggagaatcccacgtttaggctaaccatccagcccaaagactacgtgcagatcatgtgcaatctgacggataccacggactaccagcagctgccgaaaaagttgcggatcggtgaggtcgacagggttcagatgcgacggtgtatgctgcccggtcacacgccgatagccagcatcctggactatttgggcatagtgtcgcccacgacgctgatctttgagagcgacaacttgggcatgaacataacacggcagcacttggaccgtttgcacggtctaaagcgattccggtttaccactcgccgtctcacacacattcccgccaacctactgacggatatgcggaatctgagtcatctcgaactaagggcaaatatcgaggaaatgccatcgcatttgttcgacgatctggagaacctggagtcaattgaattcggtagcaataagctgaggcaaatgccgcgtggcattttcggcaagatgcccaagctgaagcagctcaatttgtggagcaatcaactgcacaacctcaccaaacacgacttcgaaggtgccacctcggtgctgggcatagatattcacgataatggcatcgaacagttgccgcacgacgtctttgcccatctcacgaatgtcacggatatcaatctgagcgccaatctcttccgttccctgccgcagggcctattcgaccacaacaaacacctgaacgaggtgcgtctgatgaacaatcgagtgcccctggccacgctgccttcgcgtctgtttgctaatcagccggaactgcagatcttacggctgagagctgaactgcaatcgttgccgggtgacttattcgagcattccacacagatcacaaacatctcgttgggagacaatctgctgaaaactctgcccgccaccttgctggaacatcaggtgaacctgctgagcttggacttgagcaacaaccggctgacacatctgccggattcactctttgcacataccaccaatctgacggatctgcgtctggaggataatttgctaaccggcattagcgggtaaatatatttaatagtttactttttagttacaggcaatcgccaacactcctattatcattctttcagataggatattttcttaaagtaatgcccttctttgttttttaattacagcgatatattcagcaacttgggcaaccttgtgaccctcgtcatgagcaggaatcgactgcgtaccatcgattccagagcctttgtaagcacaaatggactgcgacatttgcatttggatcacaacgacattgatctgcaacagccattgctggacatcatgctccagacccagatcaactccccgtttggttacatgcacggccttttgacccttaatctacgcaacaactcaatcatattcgtctacaacgactggaagaacacgatgctccagttgagggagctggacttgagttacaacaacattagctcgctgggctacgaggatctggcgttcctgtctcagaatagattgcacgtaaacatgacgcacaataagatacggaggatagcgctgcccgaggatgtgcacttgggcgagggctacaacaataatctggtgcatgtggatctcaacgataatcccctggtctgcgactgtacgatcctctggtttattcagctggtgaggggcgtccataagccgcagtattccaggcagttcaaattacgcacagaccgattggtttgcagccagccaaatgtcttggagggtactccagttcgtcagatagaaccacagacgctcatctgtccgctggacttctccgatgatccacgggaaaggaagtgtccgcgcggctgcaactgccatgtgcgaacctacgacaaagcactggtaatcaactgccatagtggcaatctgacacatgttcctcgcttgcccaatctgcataagaatatgcaattaatggaacttcacttggagaacaacacactgctcaggcttccttcggccaatacacccggatatgagagtgtaactagtctgcatctggctggcaacaatctaaccagcatcgatgtggatcaactgcctaccaatctcacccatttggatataagttggaaccacctgcagatgctgaacgcaaccgtgctgggtttccttaatcgtaccatgaagtggcgctcggtgaagctgtccgggaatccgtggatgtgtgattgtactgccaagccgctactcctcttcacccaggacaatttcgaaaggattggagatcgcaatgaaatgatgtgcgtgaacgccgagatgccaacacgaatggtggaactgtcgaccaacgacatttgtccggcggaaaagggcgtgttcatagcccttgctgtggtgattgccttgactggtcttttggccggtttcacagcggcactgtactacaaattccagacggagatcaagatttggctgtatgctcataatctcctcctgtggtttgtcacggaggaggatctggacaaggacaagaagttcgatgccttcatctcgtactcgcacaaggaccagagcttcattgaggactacttggtgccgcaactggagcacggtcctcagaagttccagctctgtgtgcacgaacgagactggctggtaggcggacacattccagagaacattatgcgctctgtggcggattcgagacgaacgattattgtgctcagccagaactttatcaaatcggagtgggcacgccttgaattcagggcggcgcacagatcggcactgaacgaaggacgctcgcgcattattgtgatcatatactcggacatcggagatgtggagaagctggacgaagagctgaaggcctacttgaagatgaacacctacctgaagtggggcgacccgtggttctgggataagctgcgatttgccctgccacatcgcagacccgtcggcaatatcggtaatggagcgctaatcaagacggcgctgaaaggttccacggacgacaagttggagttgatcaaaccgtcgccggtgacgccaccgctaaccacgccgccggcggaggcaaccaaaaatccgctggtagcgcagctaaatggcgtcaccccgcatcaggccataatgattgccaacggcaagaatggtctgacgaatctgtacacacccaatggcaagtcgcacggtaatggccacatcaacggcgccttcatcattaacacgaatgccaaacagagcgacgtataggactgggagaaggcggagctgtttcagttcgatcccgacgatgagctattgttccgttaaagagaagcctccaagaagaacactgccactgacgaggcggcggtgaaaagacccagctgaatgtaaaaagtctagagaatattatcgatttcctcgtgtttggtcaagttacagtcgccctcttataggtttaaatctcttgcgctggtagtgaagctacagcaaaactaagtgaaaatttcaaatttcattatttcatgtggcctttgttgacgaaaaatgaaacaaaaatgtttagtttgaggaaagatggaaacacaagctagttttaaacacatcactctgttttaagtgttatctgtaagcttagcatagaccctgtgcagactcttgtagacataaaaatctcatttatttagtaattatttgtacattaggattattgcaagctgccgcatacaaaactgagaatagctcaatgctaaaataccttttgaaatgaccacttttatttatgttttaccttttaacagaatctcaatgaaatgggaatctgaattttgaacaaatcgagctttatttcgaactaactacttattatttgttagaacgcagcctacaactaggtgaaccacttgcaatacacatacgacgtatccaaatagtagtatagactctgtaattgtgtgaacaaacgcaacaaaagcagccgaaatgaaatacaaattgccttctttgtatgtatgtatgtacgtatgctagatatatagaccccaaggattcataatcgattgcattgcatacacaccccgtctctgtacataaactggatattgatttctgtacttttccaaaactagtatgtgtatcgcacagcagattcaaggaccttacacacaactatcactagtatcaactgtaatctcacgcccatttaaatgacgctatataaataagtacataacacgcgaatacataattcagtggacacacattatcatgtcatctaccaaacaattaggctagctcttcatccatacaaaaaccagaatgaatatcgtctatgatacgtaaatgtaattaagctaaactatgtgtatatcgtctaagctatagattgtctctgatatgtaatacctaaggtacctacagatttatgcagacacactcatctactctgtatgcgtatgagtacattaaatctaattgtatatgaaaaacacatacaacgcaaataaaatatattttaaaaatttaaacccttgagatattacatttttaatcccaaccaaggcaacagaagggtaagatattcgtatatattgttttagattttattatgtatacacttaaaattgtacactcagccgttttaagtgtggctcgccttattgaactaaaaacaactcaagacacaaacataaatgtaagtacagattgccttagagtaaaatacaaatcgtttcaaaggaataccactaacaagctgcacttgaaagttttaaaaatgaaatcacatcttttatggaaggaaaaagctgctgcgctatactggttatacattttggcgtcagcgaaaatacgatttaagcaattgtcctttgcaattctctggcgaatgcaggccgcatttaactatagctataggtacgggttaggttggggattctcctttacatacgaagggtatataaaatatataatgtgtatatatgtatggttccggtaattggttttcgtaagtcgtcgttgtagcctacgcgtattgtacagtttatatcagcagttcgcccccctcttatcgctacttgtctactacggttttctttagttttcaattggtttgtttagctcacaatcagttccagttttcagtaatgtcttctttggtgtcctatgttactcacattgggatctctcgcgactttaactagctacccccgctccttcccaccaccatctgtcccccatcagcctcatcatcctaatggcaaagaaggcgtcccacgacgacttggcttagattgggcccacctaaagcagcatgtcgtcatcgctttcggtgaactccccattgggttccaatagcaggttggcctcctcattggattgcacctgcaaatattaaaaaaaaaaaaaaataaacaaaagaattcaaaaacatgttttcgaatgttcagcaatgtgtattctaggaaaaatctgtaggtatttgcaaaatgtaacagcaacaatgaaactcttcgcttaagcacacacaaaattc

SEQ ID NO: 11528 - DNA, 4585 bp, DROSOPHILA
tttgcagtgaacccatttggacaacatgagtcgactaaaggccgcttccgagctggcattgcttgtgatcatcctgcaactgctacagtggccaggatctgaagcatccttcggtcgggatgcgtgcagtgagatgagcatagacggactgtgtcagtgtgcacccataatgtcggaatacgaaatcatctgcccggcgaatgcggagaatcccacgtttaggctaaccatccagcccaaagactacgtgcagatcatgtgcaatctgacggataccacggactaccagcagctgccgaaaaagttgcggatcggtgaggtcgacagggttcagatgcgacggtgtatgctgcccggtcacacgccgatagccagcatcctggactatttgggcatagtgtcgcccacgacgctgatctttgagagcgacaacttgggcatgaacataacacggcagcacttggaccgtttgcacggtctaaagcgattccggtttaccactcgccgtctcacacacattcccgccaacctactgacggatatgcggaatctgagtcatctcgaactaagggcaaatatcgaggaaatgccatcgcatttgttcgacgatctggagaacctggagtcaattgaattcggtagcaataagctgaggcaaatgccgcgtggcattttcggcaagatgcccaagctgaagcagctcaatttgtggagcaatcaactgcacaacctcaccaaacacgacttcgaaggtgccacctcggtgctgggcatagatattcacgataatggcatcgaacagttgccgcacgacgtctttgcccatctcacgaatgtcacggatatcaatctgagcgccaatctcttccgttccctgccgcagggcctattcgaccacaacaaacacctgaacgaggtgcgtctgatgaacaatcgagtgcccctggccacgctgccttcgcgtctgtttgctaatcagccggaactgcagatcttacggctgagagctgaactgcaatcgttgccgggtgacttattcgagcattccacacagatcacaaacatctcgttgggagacaatctgctgaaaactctgcccgccaccttgctggaacatcaggtgaacctgctgagcttggacttgagcaacaaccggctgacacatctgccggattcactctttgcacataccaccaatctgacggatctgcgtctggaggataatttgctaaccggcattagcggcgatatattcagcaacttgggcaaccttgtgaccctcgtcatgagcaggaatcgactgcgtaccatcgattccagagcctttgtaagcacaaatggactgcgacatttgcatttggatcacaacgacattgatctgcaacagccattgctggacatcatgctccagacccagatcaactccccgtttggttacatgcacggccttttgacccttaatctacgcaacaactcaatcatattcgtctacaacgactggaagaacacgatgctccagttgagggagctggacttgagttacaacaacattagctcgctgggctacgaggatctggcgttcctgtctcagaatagattgcacgtaaacatgacgcacaataagatacggaggatagcgctgcccgaggatgtgcacttgggcgagggctacaacaataatctggtgcatgtggatctcaacgataatcccctggtctgcgactgtacgatcctctggtttattcagctggtgaggggcgtccataagccgcagtattccaggcagttcaaattacgcacagaccgattggtttgcagccagccaaatgtcttggagggtactccagttcgtcagatagaaccacagacgctcatctgtccgctggacttctccgatgatccacgggaaaggaagtgtccgcgcggctgcaactgccatgtgcgaacctacgacaaagcactggtaatcaactgccatagtggcaatctgacacatgttcctcgcttgcccaatctgcataagaatatgcaattaatggaacttcacttggagaacaacacactgctcaggcttccttcggccaatacacccggatatgagagtgtaactagtctgcatctggctggcaacaatctaaccagcatcgatgtggatcaactgcctaccaatctcacccatttggatataagttggaaccacctgcagatgctgaacgcaaccgtgctgggtttccttaatcgtaccatgaagtggcgctcggtgaagctgtccgggaatccgtggatgtgtgattgtactgccaagccgctactcctcttcacccaggacaatttcgaaaggattggagatcgcaatgaaatgatgtgcgtgaacgccgagatgccaacacgaatggtggaactgtcgaccaacgacatttgtccggcggaaaagggcgtgttcatagcccttgctgtggtgattgccttgactggtcttttggccggtttcacagcggcactgtactacaaattccagacggagatcaagatttggctgtatgctcataatctcctcctgtggtttgtcacggaggaggatctggacaaggacaagaagttcgatgccttcatctcgtactcgcacaaggaccagagcttcattgaggactacttggtgccgcaactggagcacggtcctcagaagttccagctctgtgtgcacgaacgagactggctggtaggcggacacattccagagaacattatgcgctctgtggcggattcgagacgaacgattattgtgctcagccagaactttatcaaatcggagtgggcacgccttgaattcagggcggcgcacagatcggcactgaacgaaggacgctcgcgcattattgtgatcatatactcggacatcggagatgtggagaagctggacgaagagctgaaggcctacttgaagatgaacacctacctgaagtggggcgacccgtggttctgggataagctgcgatttgccctgccacatcgcagacccgtcggcaatatcggtaatggagcgctaatcaagacggcgctgaaaggttccacggacgacaagttggagttgatcaaaccgtcgccggtgacgccaccgctaaccacgccgccggcggaggcaaccaaaaatccgctggtagcgcagctaaatggcgtcaccccgcatcaggccataatgattgccaacggcaagaatggtctgacgaatctgtacacacccaatggcaagtcgcacggtaatggccacatcaacggcgccttcatcattaacacgaatgccaaacagagcgacgtataggactgggagaaggcggagctgtttcagttcgatcccgacgatgagctattgttccgttaaagagaagcctccaagaagaacactgccactgacgaggcggcggtgaaaagacccagctgaatgtaaaaagtctagagaatattatcgatttcctcgtgtttggtcaagttacagtcgccctcttataggtttaaatctcttgcgctggtagtgaagctacagcaaaactaagtgaaaatttcaaatttcattatttcatgtggcctttgttgacgaaaaatgaaacaaaaatgtttagtttgaggaaagatggaaacacaagctagttttaaacacatcactctgttttaagtgttatctgtaagcttagcatagaccctgtgcagactcttgtagacataaaaatctcatttatttagtaattatttgtacattaggattattgcaagctgccgcatacaaaactgagaatagctcaatgctaaaataccttttgaaatgaccacttttatttatgttttaccttttaacagaatctcaatgaaatgggaatctgaattttgaacaaatcgagctttatttcgaactaactacttattatttgttagaacgcagcctacaactaggtgaaccacttgcaatacacatacgacgtatccaaatagtagtatagactctgtaattgtgtgaacaaacgcaacaaaagcagccgaaatgaaatacaaattgccttctttgtatgtatgtatgtacgtatgctagatatatagaccccaaggattcataatcgattgcattgcatacacaccccgtctctgtacataaactggatattgatttctgtacttttccaaaactagtatgtgtatcgcacagcagattcaaggaccttacacacaactatcactagtatcaactgtaatctcacgcccatttaaatgacgctatataaataagtacataacacgcgaatacataattcagtggacacacattatcatgtcatctaccaaacaattaggctagctcttcatccatacaaaaaccagaatgaatatcgtctatgatacgtaaatgtaattaagctaaactatgtgtatatcgtctaagctatagattgtctctgatatgtaatacctaaggtacctacagatttatgcagacacactcatctactctgtatgcgtatgagtacattaaatctaattgtatatgaaaaacacatacaacgcaaataaaatatattttaaaaatttaaacccttga

SEQ ID NO: 11529 - protein, 1097 aa, DROSOPHILA
MSRLKAASELALLVIILQLLQWPGSEASFGRDACSEMSIDGLCQCAPIMSEYEIICPANAENPTFRLTIQPKDYVQIMCNLTDTTDYQQLPKKLRIGEVDRVQMRRCMLPGHTPIASILDYLGIVSPTTLIFESDNLGMNITRQHLDRLHGLKRFRFTTRRLTHIPANLLTDMRNLSHLELRANIEEMPSHLFDDLENLESIEFGSNKLRQMPRGIFGKMPKLKQLNLWSNQLHNLTKHDFEGATSVLGIDIHDNGIEQLPHDVFAHLTNVTDINLSANLFRSLPQGLFDHNKHLNEVRLMNNRVPLATLPSRLFANQPELQILRLRAELQSLPGDLFEHSTQITNISLGDNLLKTLPATLLEHQVNLLSLDLSNNRLTHLPDSLFAHTTNLTDLRLEDNLLTGISGDIFSNLGNLVTLVMSRNRLRTIDSRAFVSTNGLRHLHLDHNDIDLQQPLLDIMLQTQINSPFGYMHGLLTLNLRNNSIIFVYNDWKNTMLQLRELDLSYNNISSLGYEDLAFLSQNRLHVNMTHNKIRRIALPEDVHLGEGYNNNLVHVDLNDNPLVCDCTILWFIQLVRGVHKPQYSRQFKLRTDRLVCSQPNVLEGTPVRQIEPQTLICPLDFSDDPRERKCPRGCNCHVRTYDKALVINCHSGNLTHVPRLPNLHKNMQLMELHLENNTLLRLPSANTPGYESVTSLHLAGNNLTSIDVDQLPTNLTHLDISWNHLQMLNATVLGFLNRTMKWRSVKLSGNPWMCDCTAKPLLLFTQDNFERIGDRNEMMCVNAEMPTRMVELSTNDICPAEKGVFIALAVVIALTGLLAGFTAALYYKFQTEIKIWLYAHNLLLWFVTEEDLDKDKKFDAFISYSHKDQSFIEDYLVPQLEHGPQKFQLCVHERDWLVGGHIPENIMRSVADSRRTIIVLSQNFIKSEWARLEFRAAHRSALNEGRSRIIVIIYSDIGDVEKLDEELKAYLKMNTYLKWGDPWFWDKLRFALPHRRPVGNIGNGALIKTALKGSTDDKLELIKPSPVTPPLTTPPAEATKNPLVAQLNGVTPHQAIMIANGKNGLTNLYTPNGKSHGNGHINGAFIINTNAKQSDV

SEQ ID NO: 11530 - DNA, 5593 bp, DROSOPHILA
caactcagccaaaactatttgttcgactaacaagaaaattaagctgttaattgccaaaggttgtccttcggcacagcaattgagttcgaccagcaaaagtaacatgaaacacggataataagcatattttccttgtgctctcttggaacactaagcccttgaaatcaagaaagaaagatagcctcgccaatgtttgatttcttttctaatattttcaattaaatttcgatatttatacatacatgatacagaagacaaattcacatactacgagcaataaaaagaagatttttagaaaagttccaagctttaaaactatgattctagaatgcgtaagaaaggaacggactgacaaacttggctttatcaagttgtctgatcaacactcgtatattgaatataaatatggttgcaaatagatgcaaatgatccaactgaagaaagaaaacaatcattacaaataatccttgttcaaaaagtatttaaacttaaactgttataacaaaacggtaaccaattcggatagatttgcctccaaaatcaattatgcggacattgccatgtgcagaccgagaactaaaacaaatatcaaatttcgtttgcttatcaatatttatattttgcaattgcccgaaatgaaacaaaggtgctggctgtggacgacggatcatattttgtttgctcaacgcattttcacatgccgactccgcaaagggaagtgtgggtaaaagaagccgaaaaatagatgaataaataagagagaagcacgaaaacattcagagaagtatttgcggtttgtaagcgagtagagactcccatctctctcgcacctgcagtgctaagccttcgaaaacaggggctcaagtcgaagttgttgtaatgtcgagagaccgagaccagaaaaagcccaacaacgaagctctttgtgagcgaaactaataaaaaaccgatcgccccgactgttcccacaaccagttccaagcgagctctcgggcggtagagtcgtccctgtcccacatataaaaccatagtatcatagctccccggatccactcaatccctgtaaggcgagacttaggtccatcaagtgaatcgtatagttttatccccacgaaatatcccgacagtacagtgataactccgctaaggataatgctgccttggcaagcgtgacgtaacttgaaaagcaaatgttaaaagcaaggcggcaaaaaaaaagttgtttgccatgggagaactgcaattgacaataacagcaacagcaatcgaataaaaactcaataacaattatcaactgcgagtgacgcttaaaacaaatgcaagaaacctgtattaaaaaagtttcataaaaattcgagagcaaatattaacgaatattgcataaattgctatatgcgtatgtaaactttgcgatctcttttgatctgaatgaagtgatctgaatgaagaatgaaccaaaaatttaaacaagttaataaaatcgaccgaaaaaatgaatgaatgcgtcttcatcaaaaagttgtttataaataaaagtgaaattaaaaactcttctacttcttaccacaaaaatgttaattgaaagggttaaaataatttccttctttttttatagccactcccaaagtttctgtgcattcaagtgcaactaaaaatagtagccgtttcttttgttttgctttgtgtttttgcaaaacaacaaattgaaggcaatttacatacacaaagctgagaaagaaaaccgccaaaattggttacctaacgaaaacttcgtttgtgctacgggacggcaaacttgtaagtgaatttgcttattagataatatttcatttgttttaattaatcataaatttcatacagaggtccttcaaatgcgaccactttcctattttcactgctatattttcaagcttcgagtataaacaaggagtacatatttcatatttatagcctcgaccgattctgctcactaacttttaagctaacatcacctacaaataaagattacatacgagttttaaacataaatgacctagtaaagctattattcctatgattacagatagataacagggtatgaaaggagcataaaagagtgagctcagagtttagtagatagtacttaaaaagtctgattttctaagtttttcatgagtgacaggacttggaatccgagctttaagtgatctattaccatgtgtagcacgtacagctgaacaattaccataaacttaattggtctcagcttacaagcggcagatatagtgattcgccccgccgccaacgccccgtcatcattaatggcgactttcggatgacttactgtcatctcaggcacgattcggattcgcttaacatgataacgtcgaatgaaatatagtgaatattcagatagtgtgagaacatttttttaatagccccgccaattacctggcgaactcgactgcggcttaacatatttgaatttggagaataatgctcgaaatgagatgtcgtttaccagctagtggggtgaaggggtacccgactgctcagcctgcaattacttttaattagcatttagaacatcgcactgcgccaagatgattcagagctgggacggcactcgtagttaaaccactacaattagctgacaaattttcgggcaggctattactttgatttatttgttttgatcgctccaacttcaacggggggaattcgtctcggaatcgccgcgcagcgaacccttcaagtgggcctaatgcgatgtaagtaaccaaaaaaaaaaaaaaaaacgcgagtctttagagccgtaactgacaaaatccacaagacgttggcagccaccgccgataatgaacgcttgtctaggcacatagcgttggcagcttcgctgctcagtcgcagttccataaagtgggtcatggttaagtgtacttcggtcgcttcgcggttcggacccggcttagaaagagcgaaacgttcggccgaaaccacagctgcgcatgcgcatgcgcatgcgcaccactcgccaagccgaacaccattgataggcagcccatatgttggagtgaatcttacgcgaaagaaactcgttaaaaagtacattcttgagattacatcacattgcaatagagagtaggccaaaaatagctaatttgaaatcgggatgatgagttatgattaacttggttatcgctaaggacctgttgaaattgaatgatctctaagaactttaacttaattaaagcatagtgtgaaattatttttatctgtctttggattatagagttgtatcgccatcaagaacctctgcatctcatcctaccccaaattccctgcataattctcctcgcatcaatatcctctgggggctcttcacctgtagacaaaagtaaacaatgtgaaatctttttatcccattgaattggttaattgaaatgtattatcctttcaaaggaagacgatatgggcttcagttcgcgaatggactgctgcgggcagttcgtcaagtacagtcttttcatagccaactttgtgatattcgtgagtatccaggagtcgcttgaattaaaaaacaatttaagagaaataaataataccaaaatatatgtattttccaggtgggtggagcgattgtgttttgtctcaccctgtggactctggtggatcggagtttcgtcaatgagttgctcggtacaaatcttttctcgggtgctgtctacgtcctgctggttacatcgattatcatttgtctggtgtcctttttgggttgtgttggtgccggaaaagaagtcaaatgcctcctcctaacagtaagtaaacaacaaacaataaaaacaaaaatttcattttattaaataattaactttgtcctttttggagtaatcatatctggatttgcatatttacaaagataccatctaaagaaatgatctatttgatttaatcttctaaatgttgtcagtctcttctttactattatgcaaacaccatttagctaaaaaattaaccactcgttttccctttgcagtatttcataatagtggccctagttttcgtgaccatgctaattggcggtgtcttgggttacgtgttccgcgaacgagttcagcagaccatgcggcaggtgaggcaaatccatcgataacaacacgtgggtggcacattaacccttaccaatatcccataggaaatgcgttccacgatggcactatacggaagcaggagggagatcacccaggcctgggatttgacccaggagcgactacagtgctgcggagtggatacgtggcacgactggaataggtacggaccagtgcctgagtcctgttgccaggagcttttcggtggacagcgtaaggagtgcacaatcttcccgaccattacgaatctgtacaaccagggatgcctctatgtgacgaccaacttcatcagggatcacgcggcggttattggaggtacatccatagcggtggccatactgatggtaagtgaacgcctttcttcggtagcaaaattattatataatatataattaattggaatttggtttatttttagatctttggcatgatattctcctgtctactattcaatatgatcgaatagcgccaacgaggaggggaatcccatggtcacgcaggaaaatcagataccaaggtccacagtccagaagaaacacatttttaaacataattcgctggagttaaattaagagtattatctgagtgtatgctaatgttagatctgcacagatcaactgtccgcttgtattatgtattgtattgtatgtatatacgtgtttagatacgcataactagtgagtattgaacttagtagggattctattgttattatctgttgcataaatttgtattatttgtgtgaagttttgtaaatttcctcttaagccaccgttatcaacaacccattacaattgctagttttaagtgagcttttcaatacttaatagagaatttagatgtctgtccattgttgttttcaataaaaattagttaaaaccaaatacttcggaaatgtttatatatattaatattttttatttttaatccaattatcattaaacgatatgttgtgatatgagtataaaaaaaaaacgaaaaaggataaatatttaaaatgatctggtccatgaaatatgtccatgttacgtaaaaatttgtatttaaaaaacggtttaaagtattaaactgtttttgatcgaagctttaatctacatgcaatattgttgcatatttttaggttttttttgtcttaagtcacatttttgaagcgggaaaatagggaaagtatggatcacgctgtgacctgaaggtgtttacaaagtgaattatcatcagataatataacaacttttatgttatttaactgaaaataagttcgcactcaagcgactttaaagatttgaataaaaaagtattttctttaattaacttttattaaaaattattctactaagaacttacagctacaacagatttctgtatactaagcctataatactacccatcgcaagccataaattgatggagaaggtgccggaacctgattgcgtatccgtattattccaccactcccagtttccgtt

SEQ ID NO: 11531 - DNA, 1069 bp, DROSOPHILA
agtcgtccctgtcccacatataaaaccatagtatcatagctccccggatccactcaatccctccactcccaaagtttctgtgcattcaagtgcaactaaaaatagtagccgtttcttttgttttgctttgtgtttttgcaaaacaacaaattgaaggcaatttacatacacaaagctgagaaagaaaaccgccaaaattggttacctaacgaaaacttcgtttgtgctacgggacggcaaacttagttgtatcgccatcaagaacctctgcatctcatcctaccccaaattccctgcataattctcctcgcatcaatatcctctgggggctcttcacctgtagacaaaagaagacgatatgggcttcagttcgcgaatggactgctgcgggcagttcgtcaagtacagtcttttcatagccaactttgtgatattcgtgggtggagcgattgtgttttgtctcaccctgtggactctggtggatcggagtttcgtcaatgagttgctcggtacaaatcttttctcgggtgctgtctacgtcctgctggttacatcgattatcatttgtctggtgtcctttttgggttgtgttggtgccggaaaagaagtcaaatgcctcctcctaacatatttcataatagtggccctagttttcgtgaccatgctaattggcggtgtcttgggttacgtgttccgcgaacgagttcagcagaccatgcggcaggaaatgcgttccacgatggcactatacggaagcaggagggagatcacccaggcctgggatttgacccaggagcgactacagtgctgcggagtggatacgtggcacgactggaataggtacggaccagtgcctgagtcctgttgccaggagcttttcggtggacagcgtaaggagtgcacaatcttcccgaccattacgaatctgtacaaccagggatgcctctatgtgacgaccaacttcatcagggatcacgcggcggttattggaggtacatccatagcggtggccatactgatgatctttggcatgatattctcctgtctactattcaatatgatcgaatag

SEQ ID NO: 11532 - protein, 236 aa, DROSOPHILA
MGFSSRMDCCGQFVKYSLFIANFVIFVGGAIVFCLTLWTLVDRSFVNELLGTNLFSGAVYVLLVTSIIICLVSFLGCVGAGKEVKCLLLTYFIIVALVFVTMLIGGVLGYVFRERVQQTMRQEMRSTMALYGSRREITQAWDLTQERLQCCGVDTWHDWNRYGPVPESCCQELFGGQRKECTIFPTITNLYNQGCLYVTTNFIRDHAAVIGGTSIAVAILMIFGMIFSCLLFNMIE

SEQ ID NO: 11533 - DNA, 3082 bp, DROSOPHILA
tcgcccggctaagggagttcctggtggacatagatgatacgctgcagtacgaaattgtgcccatcgatgatccctttggtcccacgcaagtggatcctgacctggacatgattgtggtcagtgcggagacgttgcgaggagggcagaaggtcaacgaggtacgctccgctaagcaactgcgcgagctggagatctttgtgattgacattgttgaaagcaacgtgcatgatggcatccacgagaccaaggtcagctcgagtaacacacgcatcgatctgctgggaacccgctggagaaggccggagccacgaccacagctcccgccgcgcccttacattattggactcactggcggcatcgcatctggcaagagcaagatgggcgagagattggccaacatgggcgcccacgtgatcgactgcgataaggtggcgcacgatgtttacgaacctggtcagttgtgctacacccgaattgtgcagcacttcggacagggtattgtttcagacgatggtcgcatcgatcggtccaagctgggacccttggtgtttgccgatcccaagcagttgcaagcactcaacggcattgtctggccggaacttattgcggaggttaacaggcggctggatgcactgcgttcccaggcggacgtgccgcgtgtggtggtcctggaggcagcggtgctgctgcgagcgggctgggagaccaattgccatgaggtgtggtccatgattgtgccaccggatgaggctgtgcggcggattattgagcgcaacaagttgagcgaagtggaggcccaaaagcgactggccagtcaggtgcccaattctgagatcgtggccaagtcgcatgtgatattcagttcgcaatgggatcacgaattcacccagaaacaggcggagcgtgcgtggaaaatgcttaccaaggaactggactcttaccagagcagcctttaacccgatggatatttagattatcttgttgatccttattttgtatgattttttatgcatttgttgtatattgtttagttgtaagtccaaagttgaaaagaaatgctgggacgtcattggggaaaaacgctgaaaatttcaatggaaccttagtggctctcgcccttcttgccagccactcgcttgaagtcgttcatcttggtggtcatgatgggggaaccgatgaagccgatataatcaatctgcgtcacatcgccacctgactgattgttcttcacgaagatttggatgttttgcacattctggaacttgacgtagcgcagattcacgggcactccactctccagctccttctgagccaggctgcaaaatggattgaacagtgagaagagctaagcagccatagagaaggcaatagctaccttagatcctgcacactgttcatggactcggccatgtcaaagtcaatcgtgcggggctggttaatgaacagcttcacatccttgggacccaggtgcgaaggtgccttgaacttcaaagagtggatcttcacagcctgattaaaggtgatggacaggatgagctgctcatcgcaatcggactgcaggtagccaccggcggaggccagggcgtgctttaagttgtggtcatcagcttcgttgaggcactcgcactcctgcttcgaaataaatgtattcagttccatctgtaagaaggattagggattatttttggaacatttccaaatactgcactatattaccaatccctgcccgtaatcctcgcccccctcctcgccaccggatgtaccgatgtgctcctggatcttggcctcgagcccattgacgtccgcaccctggacgcgatcgatcttggtcctgttcctgtagaagatgaatgttggcatggccgaaacgccctgtccagcagccgtgtcctggcacttgtccacatccactttcaggaagatggcctttgggtactttgttggaaacgtctcgaagatgggcgcaatccgcttgcagggaccacaccacgaagctgtgaagtccaccacaaccaattgaatgcccgcttgggccaactccgcctggaagtgggactcgtcgttgatcacgcgcacggacatggtgataggattaggtttctattaattgagcttttgtttcggcagccgaattggatttaagcaagtaaatgttattattaacgttcaatgcaaattttttttgttaaagatgacttgtaatatgcatttagtccaaattcgtgctaagaaaaataccgaatgcggtattccacaagcggtcacactgtgatggtatcgatatttcgagctctttgacttcctatttttagagggaccatttatgtgtaatagaaaaaaaccgaaacttaatatttaaacttttattgaaatattagtggattacaatatgtaaaactatgaaatattctcatttgatatagctcaaagtgttatttaaaattcattcagtgtttacgactagcaatctacgctttcacgctcatcttaagcttaccgcccatttgccagggttgtcaaggcgaatgagcggtcccaccatacacgccactggaactttcgatacctgcgctgcgcctggccacacgttcattacctcgtggtgtttcagtcggtcgcattttcattaagtcgccattttaaaattattagagtcaagtacaatggcagatgtggaaaaggagcccgagaagaccatcgccgaggatttggtggtgaccaagtataagttggccggcgaaatcgtcaacagtgagtattccttggccggaaacagcgaacgctggccgattcctggagtcgctgctacgtggcgcttacacaatgcaccgaatgccgctttcccttgtgcgccacgcgttggttaatctgcctatttctggactctgtctgctcgtttaattttagaaaccctcaaggcggtaattggactctgcgtggttgatgcctccgtccgggagatctgcacccagggcgacaatcagctcaccgaggagaccggcaaagtaagtggtggccacctggcggtcattcgcgccaatttcatgtccaatgattaagacttacacctttgagggtttcc

SEQ ID NO: 11534 - DNA, 966 bp, DROSOPHILA
atgtccgtgcgcgtgatcaacgacgagtcccacttccaggcggagttggcccaagcgggcattcaattggttgtggtggacttcacagcttcgtggtgtggtccctgcaagcggattgcgcccatcttcgagacgtttccaacaaagtacccaaaggccatcttcctgaaagtggatgtggacaagtgccaggacacggctgctggacagggcgtttcggccatgccaacattcatcttctacaggaacaggaccaagatcgatcgcgtccagggtgcggacgtcaatgggctcgaggccaagatccaggagcacatcggtacatccggtggcgaggaggggggcgaggattacgggcagggattgatggaactgaatacatttatttcgaagcaggagtgcgagtgcctcaacgaagctgatgaccacaacttaaagcacgccctggcctccgccggtggctacctgcagtccgattgcgatgagcagctcatcctgtccatcacctttaatcaggctgtgaagatccactctttgaagttcaaggcaccttcgcacctgggtcccaaggatgtgaagctgttcattaaccagccccgcacgattgactttgacatggccgagtccatgaacagtgtgcaggatctaagcctggctcagaaggagctggagagtggagtgcccgtgaatctgcgctacgtcaagttccagaatgtgcaaaacatccaaatcttcgtgaagaacaatcagtcaggtggcgatgtgacgcagattgattatatcggcttcatcggttcccccatcatgaccaccaagatgaacgacttcaagcgagtggctggcaagaagggcgagagccactaaggttccattgaaattttcagcgtttttccccaatgacgtcccagcatttcttttcaactttggacttacaactaaacaatatacaacaaatgcataaaaaat

SEQ ID NO: 11535 - protein, 287 aa, DROSOPHILA
MSVRVINDESHFQAELAQAGIQLVVVDFTASWCGPCKRIAPIFETFPTKYPKAIFLKVDVDKCQDTAAGQGVSAMPTFIFYRNRTKIDRVQGADVNGLEAKIQEHIGTSGGEEGGEDYGQGLMELNTFISKQECECLNEADDHNLKHALASAGGYLQSDCDEQLILSITFNQAVKIHSLKFKAPSHLGPKDVKLFINQPRTIDFDMAESMNSVQDLSLAQKELESGVPVNLRYVKFQNVQNIQIFVKNNQSGGDVTQIDYIGFIGSPIMTTKMNDFKRVAGKKGESH

SEQ ID NO: 11536 - DNA, 3129 bp, DROSOPHILA
attacctttaatgcaagctcaagtgttttatttatttcgagttttcacctgaagttatataattaaatttatgagttcaattcatatcgtgttaggagaaacaatgacagaatcattttctttgtttaacattttaatggagaaagtaaggtcagtgtgttagtcactaattaacttcctgagtaacaaagacacgactgatctgctgacaaatggcaggcaattgagagaaatctgtaacgaacctgaaagtaggcaatactttctcgaaacaaaaagtatctcaaagtgtttcggttaactataatccaaaactagagaaagtcgcggttctttttttcaaatgaatttgcgggaaaatcccggctggtaagacccgcagatcttgaaagcaaattcgtcagcatccagattcaaccagctatcagttatcaattggtatattaacgtatcagtgacaatgcccgtatcgcccaaatattttttattgtcggctccagagtatattgtggaataaatttgttttttatttgccaaacgatcccattagatcgccgttaacctcttgtctcaaattcaggcacatctgttgagcccctcctggcaacattcgatctatcatcatctactgagaaatacgtgtattatatagccgagggtattggtaaaatctgctattgataagttggatggacggttatcgccggcgacttcttgtttttgttattgttttggacttgcgcctccgatttacgtcggatccgagctgattatgcagcctggacaggagagcgaaatctccagaattcagttcgaattttgcgatccgaggtggagcgtgtgcggttagtcgaagcaattcaatcaattgtaacagcaacgaatcggaatattcatatatatatataccaatagctattatcagcgatcatcgactttacaacgtaattcatctaaatcaattgagcagtgatctttatagactttataggtagttttccacgcccttcagcctcaactgatgcaccaccactctaacttccgcttcccttttcgcaacctaggtcaatcagagcaagcccaaaatggccctgtccaagatcgacaccgagatcgagcaggttgaccaggagaagtacctgcgtcaggccactagctactatcagccgctggagaaacccctgaaatacggaccggaggtgaattccctatcggacttggtggccgcccttcaccgggaattcgagtcgaactatgttaacatcgagatggtgaatcaccttatgctcagctacaagtccaatccgcgggagtggcgcaaatatgccaagttcgatcgttacacctacacgcggaatctcgtggatgctggcaatggaaagttcaatctgctgattctgtgctggggcgaaggacacggctcctcggtgcacgaccatgccgattcccattgcttcatgaagatgctgaagggtgatctgcgcgagaagcgctacgagtatcccaatagatctgccagggacaacggccggtcccatcatcccgatggcgagatcgatagccgagagctggtggagattggggagacaccaatcgccgtcaatgatgtggcctacataaatggtgagaaaattagaaactttaaaagtggggtattcctatacttactgtttttttttttttcgttttgttatccatagacaatctgggtctgcatcgcgtggagaaccccagccattcggatacctctgtctcccttcacctatactgtccacccttcgacacgtgctccgtgttccaggacaacctgaagaagaccaccgccaaggtcaccttctggagcaaatacggcgtgaggacgaagcagaacgagcagtagatccatcaagatcctaaaaatatagcctctcgtattgttgcataatactaagaatctttattactagatatttaatgagctagggcctaagaagatccgggagctgagctatcaaacatggcgagcaagggccacgttggcgctgataagttcccattccaatccattggctatcccggatcacagcagcgattagtgtactttaagtgttagctgtaccaaaaatattcaataaataagtgaaccattgacaactgcttgaatgtgcttttttaaatgtcaccagatcctgaattgcatcccggttagacatccatgttgcgtgatcttttcggcggacccctgtccagtgtttgcttgatcgacttgagcagaccaggtatcaggtttatgtacttgtccacacagttgttcgtgcaactctcaaacatgtgctgggatcgggacatgtcccggtcactcggattgctgggcatctgagaccgcgcatcgctgttgcaatcctgcgggttggcaatcgtattaaaaataggatatatcaatccaatattaagcatttataattatagtttaagctcctaccctaacgcagttttgaagtctattctggaattggcccagctcgtgctgcaggaaatcctgggcatccatcaggggaccggcgcacttctcgatgcagttctgtacgctctccagcgtccctcgatcatcgtcgcagcagcgggcggcacagcggtgcatcgtggacttggaaacaacgttcttaccagaaattcatagtaggcaagtggaggccacacactcacctgcattctgcgcaagtgggtgcggtacatgtcctcgatcatttcgctaatggcgccctccaagcgctttttttgttgctccaccatttcaatttaaaatttgaacaatttcgaaagaacaaaacaaaatgttgaattgacagttttcggtgtacaaagtatgtttattttttttactgatggcaaaacttgacattcttccgaagattgttagcacaacagttgttggttgctgcttaagactttcaacaattaataaggtaatttttgttctatattcttaaaagcaaaatttgaaatgactccagagatgggactcattgcacggttttaaaataaacgaattcaacaactaattatgtagtaaatgcaggttgagttagacttggggaatgctctcgggtcccttggagagcacagccttcatggtcttcatcatgccgg

SEQ ID NO: 11537 - DNA, 1052 bp, DROSOPHILA
cacgcccttcagcctcaactgatgcaccaccactctaacttccgcttcccttttcgcaacctaggtcaatcagagcaagcccaaaatggccctgtccaagatcgacaccgagatcgagcaggttgaccaggagaagtacctgcgtcaggccactagctactatcagccgctggagaaacccctgaaatacggaccggaggtgaattccctatcggacttggtggccgcccttcaccgggaattcgagtcgaactatgttaacatcgagatggtgaatcaccttatgctcagctacaagtccaatccgcgggagtggcgcaaatatgccaagttcgatcgttacacctacacgcggaatctcgtggatgctggcaatggaaagttcaatctgctgattctgtgctggggcgaaggacacggctcctcggtgcacgaccatgccgattcccattgcttcatgaagatgctgaagggtgatctgcgcgagaagcgctacgagtatcccaatagatctgccagggacaacggccggtcccatcatcccgatggcgagatcgatagccgagagctggtggagattggggagacaccaatcgccgtcaatgatgtggcctacataaatgacaatctgggtctgcatcgcgtggagaaccccagccattcggatacctctgtctcccttcacctatactgtccacccttcgacacgtgctccgtgttccaggacaacctgaagaagaccaccgccaaggtcaccttctggagcaaatacggcgtgaggacgaagcagaacgagcagtagatccatcaagatcctaaaaatatagcctctcgtattgttgcataatactaagaatctttattactagatatttaatgagctagggcctaagaagatccgggagctgagctatcaaacatggcgagcaagggccacgttggcgctgataagttcccattccaatccattggctatcccggatcacagcagcgattagtgtactttaagtgttagctgtaccaaaaatattcaataaataagtgaaccattg

SEQ ID NO: 11538 - protein, 238 aa, DROSOPHILA
MALSKIDTEIEQVDQEKYLRQATSYYQPLEKPLKYGPEVNSLSDLVAALHREFESNYVNIEMVNHLMLSYKSNPREWRKYAKFDRYTYTRNLVDAGNGKFNLLILCWGEGHGSSVHDHADSHCFMKMLKGDLREKRYEYPNRSARDNGRSHHPDGEIDSRELVEIGETPIAVNDVAYINDNLGLHRVENPSHSDTSVSLHLYCPPFDTCSVFQDNLKKTTAKVTFWSKYGVRTKQNEQ

SEQ ID NO: 11539 - DNA, 2987 bp, DROSOPHILA
gcccacttaccagctgattggctgcgtcagcggcgacactctcaccgctgcagaaaagcagcaaaagcagggaaatcacaattgggaaacgcatctgctggaatgtcagtaaatgcaatgaatagtttttagttcagtttaaatgtattcagcatgtatcatcttacctgacgaaaattttcctgcgtgggagctgcgcagtccttttgcaaactgcaacgcattttgtcacctgcaggctctgaaatattggcactaaatgagtcaaagcgctggaaagcgtttgcagtttgtttcttttactgttttattggtaattccacctaagattagcgctcttttttcgcacacaaagtaatttaatttcccttatcacaagctaactgtttgttttgcgagagagccaagttgttattgcttttccaattggctctctgcttcgatttttcaacggccgttcgcagcaattcttcttctttgcgcagcagaacaaataaggaaatgccggcgacgcagttgcacgataggcataacaacgaacacaaatagtggcgaaataactatttttagcttgaatatacctttttcggatgcggctaaattacctggccaaaaaacaacacccgctcttaccaatgttactttacgtttacaagcgagtggcagcgctcagaagaagtcgagctgcgtagcagtgtggtagcactggtcaaacagctgttgggcttttgaatatacattatgtttgagaatccaatacaaccaacgtgtgtagtgttacttacatactaacattgttgttaacaaggctatattcagattacatgaaatgatccataactttattttcatcgtattatggctaataacttaaaatttaattttcccgcctaaaacctatgcacgttgccaagtgaatggctgaaaccaaacaaacagctgttgcgcgggcataaacttgcatttatattgttatttactatatctacccggtattaagatggccgcaaatatagccgccgctgctgcagctgcccaagaagtggatcccgtgctgaagaaggccatcaagttgctgcactcgagtaatcccacctcggcggccgaactgcgtctgcttttggacgaggctttgaaggcgcgttttggtccggagaaaagtttgaccaacaacatgacgccacggatgctggaggatgaagcgaacttttccggacgtgctgccacgcccccgcagcagcccatcaatgcggacgagatcatcaatttgaccaactcaccggacaaggagccctccgattcggtggacacgattgcggattcggatgacggtctaagcgccgtgggaatagttaacaccggtgacaccggcgactttggcgacctcaattgctgcgtgtgcggcgagatggttttcacggccaccaatcggctgattgagtgctccaagtgcggtgccatgtaccatcaggagtgccacaagccgcccataaccaaggaggaggcggccgatgaccaggagcagaactggcagtgcgacacgtgctgcaacaagccaacgagcagcgggaggacaacatcctctgcagcggccgtaacgccaactgtcttcatagccgacgaacccatgccgttgaccagcaaagccaaatcgtcggtcgcgtcgtcgcgctcatcgaactcttccaactcctcgtcacccttctaccggcccgagcccagcagttccacgaatgccagcagcagtagcagcagcaagcatggccacaagtcctcctcttcgtcgtcgtccaaatcgcacaaggaagaacgatcctctaagtccacggcggcgtcttctcttagcgccatcggcggaatggagaagcacaacagcagtggcacctcatcgcgacgcagcggctccagcaccaaatccagctccaagagcagttcctccaagcatcacgaaagcggcagcagcagcaagcgcagatccaagcagtaatttagcatctctaataattaagtataaagttacaatccgcataaaattctgaacgttcattcataataataattcaataattcattttcaataaatgatttttaaagatatgtacgtgctatcgaattcagtaaatgtaggtaaaagtaagaaaatatttcaagtttttattaatgaggttacaaatgtaaaaatacagaaaacaaaggctcctatccctggtatttccgcacagtgacggctggtgtccgcggactacggccgggcgtggaggagtcgccatggccgtttaccttgcgcaggttaactcgggtcacaggtgaggcctcctccttcgaactggacgccaacgcgctgcgggatgagggtgtacgtgaatcaaccgccgtcgccttatcctggtccgctttctttttgcgtttgacattcacaattacgttggcatccatgctaacgtcgagctcgaagttaaactcataggtcttcttggaacgcggctgtggagtgaggtcatcgttgatcacggttttgccaccgggacgtccacgcagcgaaatagacgggctgaaattgatcttggcattgggagtacggagccgcgctgctgttggtgtctgtggcttggggctggccttcggcgtgctccttggcttgggactggccttgggcgtagctctctccctgggtgttgacttgggctcagtcttaacgcgcttctggctgggtggtgaactatctgcgactcgcttcaagggcgataccttggcgtttcgggctgatggggtgacctttttggctgtcttcttgcgatgtgacttctcctcctcctcctcatcatcttcgctggcggagattttttcgtccagtgatgagttcaagactggcgaatcaattttttttgctttcctggctgttgctgccttgctcgtgccgggcggacttagattattgttgctgctggtctgtggcttcatcttaaagtcgagatctccgttgtttg

SEQ ID NO: 11540 - DNA, 987 bp, DROSOPHILA
atggccgcaaatatagccgccgctgctgcagctgcccaagaagtggatcccgtgctgaagaaggccatcaagttgctgcactcgagtaatcccacctcggcggccgaactgcgtctgcttttggacgaggctttgaaggcgcgttttggtccggagaaaagtttgaccaacaacatgacgccacggatgctggaggatgaagcgaacttttccggacgtgctgccacgcccccgcagcagcccatcaatgcggacgagatcatcaatttgaccaactcaccggacaaggagccctccgattcggtggacacgattgcggattcggatgacggtctaagcgccgtgggaatagttaacaccggtgacaccggcgactttggcgacctcaattgctgcgtgtgcggcgagatggttttcacggccaccaatcggctgattgagtgctccaagtgcggtgccatgtaccatcaggagtgccacaagccgcccataaccaaggaggaggcggccgatgaccaggagcagaactggcagtgcgacacgtgctgcaacaagccaacgagcagcgggaggacaacatcctctgcagcggccgtaacgccaactgtcttcatagccgacgaacccatgccgttgaccagcaaagccaaatcgtcggtcgcgtcgtcgcgctcatcgaactcttccaactcctcgtcacccttctaccggcccgagcccagcagttccacgaatgccagcagcagtagcagcagcaagcatggccacaagtcctcctcttcgtcgtcgtccaaatcgcacaaggaagaacgatcctctaagtccacggcggcgtcttctcttagcgccatcggcggaatggagaagcacaacagcagtggcacctcatcgcgacgcagcggctccagcaccaaatccagctccaagagcagttcctccaagcatcacgaaagcggcagcagcagcaagcgcagatccaagcagtaa

SEQ ID NO: 11541 - protein, 328 aa, DROSOPHILA
MAANIAAAAAAAQEVDPVLKKAIKLLHSSNPTSAAELRLLLDEALKARFGPEKSLTNNMTPRMLEDEANFSGRAATPPQQPINADEIINLTNSPDKEPSDSVDTIADSDDGLSAVGIVNTGDTGDFGDLNCCVCGEMVFTATNRLIECSKCGAMYHQECHKPPITKEEAADDQEQNWQCDTCCNKPTSSGRTTSSAAAVTPTVFIADEPMPLTSKAKSSVASSRSSNSSNSSSPFYRPEPSSSTNASSSSSSKHGHKSSSSSSSKSHKEERSSKSTAASSLSAIGGMEKHNSSGTSSRRSGSSTKSSSKSSSSKHHESGSSSKRRSKQ

SEQ ID NO: 11542 - DNA, 3132 bp, DROSOPHILA
gcaaaacttgacattcttccgaagattgttagcacaacagttgttggttgctgcttaagactttcaacaattaataaggtaatttttgttctatattcttaaaagcaaaatttgaaatgactccagagatgggactcattgcacggttttaaaataaacgaattcaacaactaattatgtagtaaatgcaggttgagttagacttggggaatgctctcgggtcccttggagagcacagccttcatggtcttcatcatgccgggaatgaggcccacatgcttgtccacacactggatggcacagcgctcgaattggtcggtgtacttggctatctgatcctcattgggactgggcggcattttcaccttcacatcgtcgttgcattgctgcggaagaggagaatgtgaaatatgagcgttgcctaataatattctattattcttagagccaccagggcaaaaagttggtgcaatggatactaaccatgacgcaacgttgaagtctgccctggaactcgcccaattcgtgttgaacgtagttctgtgccctcgtcatgggcgcggagcatcgatccacacatctctggacactgtccacgctggaggttccatcctggcagcacttggccgcacacaagtgcatctcattctggaatttcgtgaaaagcaagtcagtttcgggatatcccctaaagcgaactccacttacctgcattttgcgcaggtgcgtcttgtccatgtcgtcgatcatctccgttaccgcggcctcgattttctggcgctgttgctggatcattttgcttgtttaattgttaattacctacgtcttacaaccgatttcgtaatatcaaaataaatgccggcagcgtgttttttgtaatattcgattagtgatgagccgacgcagctgctaataatcgattagcagtctatcggtgccgctcttcttctttggttttccacttggttttggttttcttgtggatatttttgagcaatattaaattaaaaccatgtcgctcttgcaaaaactaagcagatctggtgtaccgatggcttcattaacctgtcgttcccgaatgccaatggtcattcgacttatcagcggtaacacagaaaaaccggcggaggaatctactcccgcagtgaatacggaaacggcggagattggcagcagcaagggaggattcgcccgtgccttcgacaagtacacggcaccagccacgcctccacagctgccggaagacaaccagaccttcgcctccctgctgcgcaactccaaattaattgatgtgggtacattatttaagtaatcccattgtttatgtaataacttgttgatttctggagcagctggacaacgccgagggcaaggtggtcagtggcaagatctttcatgtggtgggcgatgatctctacatagactttggttggaagtttcactgcgtctgcagtcgtccaacacgcaatgccaggtgagttcaatataatttcctgtctctttatccaataaaccgcctttcctacttcagcgactatgtgcgaggagcccgtgttcgactgcgcatcaaggacttggagttgtccaccaagtttctgggttcgtccaaggatattaccattctagaggcagattgccatttgctgggtctcctgtccacgcccacccgccagtcgacggccaaaacaacgccgaaaatcgaagatatcctataaatcctttattaaaaccaaggtttgttaaacgttacgtcaagtcttcatcctccttggttgtgaactggaacacttcgtagtgatggttgagttcccgcaccgaatgcagttggaatctcgtggctagagctccgttttcagagttcttaacgaaaaatactcttttcgccctgctatgtaccagggccatggagcacataaggcagggttcctgcagcagatagatatcgtagccggtgcacagatagggtccgaatttggccaggttatctgctccttgaactgcgtccacttctttgcattctctcgacttttccgctccgaatgtcaggtctttgtagtcttcattgttcatcaggtaatcgtagtaggctttaggaataccccgcagagtggtatccttcttgaaatcttcggtgaatgtaacctccgtttttgtggcgcctccttcttgactgcgagccacaaaatcgacgagcatcatgcagcagtgctcgtgcggcctacaaacttcaccagttccagcaatggacacaatgctgggttgtcgcggatccacgcagatgcccaccggacgattggcattgacatcccgcgagagcctcacaagcaattgcccgatccttttgtgaaatgtgcgttgtgcggagctaaagttgctgccattcctcagtgactccgagtagtgattagggtgaaacttgcagggccagtgcttaagggtcttctcgtactgcacccgcagtcggggcatccgttccggcacctccaccacccggactccctggcacaaagcacggagcacgtgctccgaaaaggcaaactgttcaaggtgttgttccaggctttgagacactccgatctctgagctgggacatatgagcacgctgcgatcctggacgcgctttaggtgttgaaagtggggcaatttctgtgagagctcctggatgaccgcctggagctgctgtttcgtctccaactcgcaactgtgcgccttgatgagcgcaatatcctcgtcgaactcatcggagaggatggcccggatcccagttatgtcttcatccagattgggtgattttcgagcacgtttgtttggtggcgcggatatatccattatttacttaattcttcaattagaagaatgccaattggaatcgattgaaataggttatcgataagtgccaagcgctggcgttgaaacagctgtttggatattaagcgccaactttgaaaaatgtcttctatttaaaatatgcatttaaaaataatttagtgaaagattatacgtttaaaagtctttaaagctatttagcttgggagctgtttcaaatatttcctacttttgatatacattccctaatacttaatctaatcagctcaataatctgatcaattgtctaatttgcattataattcc

SEQ ID NO: 11543 - DNA, 1014 bp, DROSOPHILA
taaattaaaaccatgtcgctcttgcaaaaactaagcagatctggtgtaccgatggcttcattaacctgtcgttcccgaatgccaatggtcattcgacttatcagcggtaacacagaaaaaccggcggaggaatctactcccgcagtgaatacggaaacggcggagattggcagcagcaagggaggattcgcccgtgccttcgacaagtacacggcaccagccacgcctccacagctgccggaagacaaccagaccttcgcctccctgctgcgcaactccaaattaattgatctggacaacgccgagggcaaggtggtcagtggcaagatctttcatgtggtgggcgatgatctctacatagactttggttggaagtttcactgcgtctgcagtcgtccaacacgcaatgccagcgactatgtgcgaggagcccgtgttcgactgcgcatcaaggacttggagttgtccaccaagtttctgggttcgtccaaggatattaccattctagaggcagattgccatttgctgggtctcctgtccacgcccacccgccagtcgacggccaaaacaacgccgaaaatcgaagatatcctataaatcctttattaaaaccaaggtttgttaaacgttacgtcaagtcttcatcctccttggttgtgaactggaacacttcgtagtgatggttgagttcccgcaccgaatgcagttggaatctcgtggctagagctccgttttcagagttcttaacgaaaaatactcttttcgccctgctatgtaccagggccatggagcacataaggcagggttcctgcagcagatagatatcgtagccggtgcacagatagggtccgaatttggccaggttatctgctccttgaactgcgtccacttctttgcattctctcgacttttccgctccgaatgtcaggtctttgtagtcttcattgttcatcaggtaatcgtagtaggctttaggaataccccgcagagtggtatccttcttgaaatcttcgg

SEQ ID NO: 11544 - protein, 181 aa, DROSOPHILA
MASLTCRSRMPMVIRLISGNTEKPAEESTPAVNTETAEIGSSKGGFARAFDKYTAPATPPQLPEDNQTFASLLRNSKLIDLDNAEGKVVSGKIFHVVGDDLYIDFGWKFHCVCSRPTRNASDYVRGARVRLRIKDLELSTKFLGSSKDITILEADCHLLGLLSTPTRQSTAKTTPKIEDIL

SEQ ID NO: 11545 - DNA, 4370 bp, DROSOPHILA
aattagcggaatagcttttattggacgggctaaaaaaaaaaatcaaagccaatcagtggcgtgatccgaaatcaacaccatcttggccatcacctagatgggtggtggaagatagtgggctggtgaactcgatcccttttgacatgtttacacatttaattaacttacacgcgccgaaagtttccggacacgttagatagtccccgtctaatcacacccaagcgaaaaccccacccgcatgaacttccaaaatggggctaagaaaacaaaaggataaagaccctttcgcaacccaacccctaagtcttccctttttgacaatttgaaaccagttcaagtggtttaatcatttaacgcacatcataaaaatcgcatcaagtgatttttatttacacgcccaggacaaaaaggatccccaaaacctaaacggaatacaatgattggggcgggggtgcgaaatggttgggggtgagccatccctttgaaacccaaggcgttggctaagaacaagaaaaatgaactcgctcactagataaggtttcggttagttgatagacttttacgctgtaatgaaatcttagaaattccatttaagaaggaaatatatatgtattacaaataagcttaaccgcaaaaggtattagcttttaatcttaaggaatatataagtctttatataatgagtacgaacttcctaaacatttttccttactccaatttgtgattaactaattttatagaactatttaacctcagaacaagagcacatatcagtaattaaattcaagttttcatgtaggttgtgttagcgaagtatttaatcatatagttttattttttaaatacatgttaagctggtgaggcgtagtgtatatgtgaattttattcaaaatttaatgcgcaaccgcataatggacataagatgtgagactttagatgaatttgcgtgaagattgatcttgatcagaggcagacgaccgaagaatgcggattacactgcttaactgaaggtgttgacctgtgaataaataaaaacattcatttaaatttaaatcatttcattcatttgtataacacttacaatatcgtcgatcttcaagatcgatcgaatcgtctccgtggccagggtgatcgacgaaatactgaccagcagcggctgcacaacgttctccgcgaaaatgtctgtgatggcgcccttgcgcacattaataccggcgttcttctcaccctgagcgtggcggttgcgtagctccgtgaccgtggcaatgggattcaaaccggcgttctcagccagagtggagggaatcacctccaaagcatcggcaaatgcacggaagcaatacgcatccacaccctccacggtttgtgccaatgcggctagctgcagggccatctcaatctcgggcgcaccaccgccgacaatctgggcgcgcagcttcaccaggcaacggacgacacagagggcatcgtgcagggagcgagcagcctcctcgagcaccagcttgttggatccgcggcagatgatcgagacagtgcgtcccatgttctgaatgccggtgatcttcacaaacttgttggtaccactggccacctcctcgaccagatcggcactggaaaggttctcggctgtgaagtgatccagcgaagcgatcggtcggcagtgcagggtcttgcacacgaactcaatatcctcgcgctccacatccttaacgaccatgcacttgatcttgtccaggaaatgctgagccagatcagagacagcatcgctagataagtggagaactatcagcacaaagtggacaaataacaagtaagctaaacctaccgcaagatagacttctgaacgagaagaacattgcatcctgacttcttgatctgcttgacaatgttcaggatgtatgaacgctcctccttgagcacacgatccatggcagcgtaatccgatacaatcacattgtgatccatctgtaatttcggcataaattataaaagacaataaattgttaggatcatagcgatgtactcacatcggtcttgggggccgaaatgcagaactggataagaccgatcttggccttctcaatgcgcttgggagcgttggatccggcagagcggcaggtgaagaccaatccatcgaccagctcggtgtcctcaacagtgccacccaggctggagatgaccttgatgttcttgagatccacagaggtttccttgccgggatccgtaaccttcagcacggcatccacggcaatgggggccagcaggctgctctgctgcgacaccaccttggagttcaacgaggtggaggcgctcttgatcagcgtctcgcggtcgtccagctcgatgggagtggacatctgtttaagaatctcgacggccttgttcgagcagcgctggaacgagtccgaaatggccgtgggatgcagacccttctgcagcaacttctcgcacgcctcaagcagagctccggcaatgacaaccacggaggtggtgccgtcaccagcggccacatcctgggcacgcgacagctccaccagcatcttggcagccgggtgcagtacattcatctgcttcaggatggtggcgccatcgttggtgatggacacctcgccgttgccggcctggatcatcttgtccatgccgcgggggcccaaactggtgcggatagcatcggaaacggctggaaaacagaattatttcaataggttataaatgtattttaatatttcgttaaaacttaatgagaaactcagataagtggaattcgtgtggttagttttacacagcagcatgactaatttacatacatacatacaaaaagacatatggtgttttatgtgttaattcaaaaaatctactgtaacttatcttaagagataaacaataaaatccttgtagcggataaaagggtattgggaatagagtattaaaaatcctcaatttttaggttgtttcaattcatcacatgagtaatgcgcgctcttcttcttcttccgcccaagaagtttccagacagccggcatccaactgctttttcaataggccatttggccggaaattctgatgcaccactgctcggaattcagtcacctcggttcttagctcaataaatagcacatacgccaacattttgatacaaaaatgtgtttaattttgttaatttcctcgctttttctcacctttggccgcctggatgttggacaaacgcacatcggtgggcttcgacttgtccttgaaggccttggccgttggcttgatgttgacagctgctgccttgggcgccattgtagggttaagttatagttttttaacaaaacacagttattctacaataaattcacagcgatttacacagaacacgttgctgcgaaatgttaaggaaagtgtggccgcactcgctgagctcaaatataccgccaacttatcggcatcgataacatcatcccttgtgaatggcaaattggtgtgaccgtattttgcgttgtgactcggctgctttatttacattgaatttttgttcgatttttgaatttaaaataaaaataatgccgcacggacactctcacgatcacggcggctgcagccacgaggcctcggacgtggaccacgccctagaaatgggcatcgagtacagcttgtacaccaaaatcgatctggacaatgtggagtgcctgaacgaggagacggatggccagggaaaaagtgtctttaagccgtacgagaagcgccaggatctgtccaagtacgtggagagcgatgcggatgaagagctcctcttcaacattcccttcaccggcaacatcaagctcaagggcatcatcataagtggggccaatgatgactcccatccaaacatggtcaaaatgtaaggaacaaaagtcaaggctgctttaatattactatattcatcatatatcttatttttcagcttcaagaaccgacccaggatgacctttgatgatgccagagcaaagcccgaccaggagttccagctgacccgcgatgcccgcggagaaatcgagtactcacccaaagtggtcaccttctcctccgtgcaccatctctccctctactttcccagcaattttggcgaagacataacacgcatttactatataggtaagctcacaacaatctatgttttatctgtgttcccaactaaaaccaagtcactattcaaaggtcttcgaggagagttcacagaagctcattaccatggcgtaaccatatgcaactacgaatcccgtgccaatgcagcggatcacaaggaaaaggctttcgatggagtcggcagagccatccaatagggttatagagattaaaatttacaatttaattgagtatctctgtagtgtatatattttgtgatc

SEQ ID NO: 11546 - DNA, 1687 bp, DROSOPHILA
tcgcagcaacgtgttctgtgtaaatcgctgtgaatttattgtagaataactgtgttttgttaaaaaactataacttaaccctacaatggcgcccaaggcagcagctgtcaacatcaagccaacggccaaggccttcaaggacaagtcgaagcccaccgatgtgcgtttgtccaacatccaggcggccaaagccgtttccgatgctatccgcaccagtttgggcccccgcggcatggacaagatgatccaggccggcaacggcgaggtgtccatcaccaacgatggcgccaccatcctgaagcagatgaatgtactgcacccggctgccaagatgctggtggagctgtcgcgtgcccaggatgtggccgctggtgacggcaccacctccgtggttgtcattgccggagctctgcttgaggcgtgcgagaagttgctgcagaagggtctgcatcccacggccatttcggactcgttccagcgctgctcgaacaaggccgtcgagattcttaaacagatgtccactcccatcgagctggacgaccgcgagacgctgatcaagagcgcctccacctcgttgaactccaaggtggtgtcgcagcagagcagcctgctggcccccattgccgtggatgccgtgctgaaggttacggatcccggcaaggaaacctctgtggatctcaagaacatcaaggtcatctccagcctgggtggcactgttgaggacaccgagctggtcgatggattggtcttcacctgccgctctgccggatccaacgctcccaagcgcattgagaaggccaagatcggtcttatccagttctgcatttcggcccccaagaccgatatggatcacaatgtgattgtatcggattacgctgccatggatcgtgtgctcaaggaggagcgttcatacatcctgaacattgtcaagcagatcaagaagtcaggatgcaatgttcttctcgttcagaagtctatcttgcgcgatgctgtctctgatctggctcagcatttcctggacaagatcaagtgcatggtcgttaaggatgtggagcgcgaggatattgagttcgtgtgcaagaccctgcactgccgaccgatcgcttcgctggatcacttcacagccgagaacctttccagtgccgatctggtcgaggaggtggccagtggtaccaacaagtttgtgaagatcaccggcattcagaacatgggacgcactgtctcgatcatctgccgcggatccaacaagctggtgctcgaggaggctgctcgctccctgcacgatgccctctgtgtcgtccgttgcctggtgaagctgcgcgcccagattgtcggcggtggtgcgcccgagattgagatggccctgcagctagccgcattggcacaaaccgtggagggtgtggatgcgtattgcttccgtgcatttgccgatgctttggaggtgattccctccactctggctgagaacgccggtttgaatcccattgccacggtcacggagctacgcaaccgccacgctcagggtgagaagaacgccggtattaatgtgcgcaagggcgccatcacagacattttcgcggagaacgttgtgcagccgctgctggtcagtatttcgtcgatcaccctggccacggagacgattcgatcgatcttgaagatcgacgatattgtcaacaccttcagttaa

SEQ ID NO: 11547 - protein, 533 aa, DROSOPHILA
MAPKAAAVNIKPTAKAFKDKSKPTDVRLSNIQAAKAVSDAIRTSLGPRGMDKMIQAGNGEVSITNDGATILKQMNVLHPAAKMLVELSRAQDVAAGDGTTSVVVIAGALLEACEKLLQKGLHPTAISDSFQRCSNKAVEILKQMSTPIELDDRETLIKSASTSLNSKVVSQQSSLLAPIAVDAVLKVTDPGKETSVDLKNIKVISSLGGTVEDTELVDGLVFTCRSAGSNAPKRIEKAKIGLIQFCISAPKTDMDHNVIVSDYAAMDRVLKEERSYILNIVKQIKKSGCNVLLVQKSILRDAVSDLAQHFLDKIKCMVVKDVEREDIEFVCKTLHCRPIASLDHFTAENLSSADLVEEVASGTNKFVKITGIQNMGRTVSIICRGSNKLVLEEAARSLHDALCVVRCLVKLRAQIVGGGAPEIEMALQLAALAQTVEGVDAYCFRAFADALEVIPSTLAENAGLNPIATVTELRNRHAQGEKNAGINVRKGAITDIFAENVVQPLLVSISSITLATETIRSILKIDDIVNTFS

SEQ ID NO: 11548 - DNA, 3953 bp, DROSOPHILA
tgcatgtactgatagacgtccagcatctgaatggccagtcggtagacagtgccctcgggcagtcgcttgccgttctgttccagaaacttggtcaaatcgctgccgtagcgcggcatgactataaatcgatgcttttcaccattgacctccacggaaccattagccagtatgtagggcatgcccagggacttgagaccgtgcttctgcatgaactgtttgatgtcctccagcttggcgttgcgcaggtagaagtgcatctccacgaacagaggaccattgccatgtggctcctaaaaatacgattataatagcaaatctccacaaaaaaaaaacgagcggcactcacgcatttgaccacagcatcgtagttcttctcacccactttgcaagccgcgtagatctcaccgaatcctccaactccgatcgagggtccaatgcgccactggcctttggctaaatcggtgaaaactgtgccctccttcaccttctccggcatcttgtacagcttgctcttggccttcttggccgacaccaccttcttggccggagcggcggctttcggcttggctacacgcggcattctctgggcaagatcgtcgttaaatagcggccaagtataatattcgcaaattccgctcgaaatgccgggccatcagggttgccaatcggcgcggggagtagcgtccttcagggttgtcaagtgagtgacagcttaaaaaaaaatataacccagtaggactacttgtaaaaacgacgtatttccagggctgttgccgagtcattgaaacataaaaataaaaaaggatgattatgatttcaaggatatattacgatagacagctctgcaaaacggcgccacttggcaatgtgcggccacaaaaggaagctaccatctaggggtgagggcatatcgattggccacacatcgatatattccgttccacccctggcgtccgctgacggcgtcttttccccgaaaaaatttcaagtagtcgaaaccgaattccgtagaaacaactcgcacgctccggtttcgtgttgcaacaaaataggcattcccatcgcggcagttagaatcaccgagtgcccagagtcacgttcgtaagcaggcgcagtttacaggcagcagaaaaatcgattgaacagaaatggtaatattgcggtgaatttttgagcggcagcgcatctcgcttttcccactgcgcgtgccccccgcgaattaaatattgatgcggggattgcggagacgcggacaacaaagtgcacgcaaagtggacaccacgtaggccgcaacaacaaggagcagcgaaatcggcgggcatttgttattgtgctgctgcgggcaatcggccgtaacctcactttggcagcggtgcctccattttgtgttttcttctgcgactcgtgccacattcgctttaattcgttattttaagaaatgcattgtgctgtgtctattcgcaggctggcggtaaagcaggcaaggattcgggcaaggccaaggcgaaggcggtatcgcgttccgcgcgcgcgggtcttcaggtgagttttacaatctgtacctcggtttttggcgccttttcggtacccacctcgccaacgagcatattccaccacactaacagggtgcccgccttcgttggttggttggggttgacaaaaacataaacaagccagccggtcaagccaattaaccagttacctgcctcttatgtcccggacagttccccgtgggtcgcatccatcgtcatctcaagagccgcactacgtcacatggacgcgtcggagccactgcagccgtgtactccgctgccatattggaatacctgaccgccgaggtaagtgtgcttccgccgagttttcccgcttttctctcgtggtactttttctcgcttcaatgtaaacagcatttaccagaaatattcaagggaaacatttttttttccacagttgcattctctccacttttcttattgtgtacagttatttcgaatttccccgttccaattcaaaaacacactttcttattgacatttcgtgtggaatgagaatgatgaaaatgtacatctaattcatgaaatgctcgaggcgcacattatcagttgtttaaatctaaataacagtagtttcgatttaatgtataacgcttttaattttctaagaattatacagttttatagagtttttgcgccattaggcagttacacttttcccgccttttttccgaatataacgtttaccgttgagttttttttttttaatgttgtgatgtttatttaaagaaattttatttaaaagatttcaaagtttgttttggtaatgagcgatacaagtaaataaattgctttagcttttgcttatcctcaattgaaatctttgattaatttctttggttttcccaatcattttaggtcctggagttggcaggcaacgcatcgaaggacttgaaagtgaaacgtatcactcctcgccacttacagctcgccattcgcggagacgaggagctggacagcctgatcaaggcaaccatcgctggtggcggtgtcattccgcacatacacaagtcgctgatcggcaaaaaggaggaaacggtgcaggatccgcagcggaagggcaacgtcattctgtcgcaggcctactaagccagtcggcaatcggacgccttcgaaacatgcaacactaatgtttaattcagatttcagcagagacaagctaaaacaccgacgagttgtaatcatttctgtgcgccagcatatatttcttatatacaacgtaatacataattatgtaattctagcatctccccaacactcacatacatacaaacaaaaaatacaaacacacaaaacgtatttacccgcacgcatccttggcgaggttgagtatgaaacaaaaacaaaacttaatttagagcaaagtaattacacgaataaatttaataaaaaaaactataataaaaacgccaatcatgttatttccaaaaaaaaaaaaaaaaaaaaaaaaaactagacgagatgtttgcgcttgtgtcgatgaatgtaaagaattgcaactacatagatggtaattaatttcagctgtaagaagtacaagtttttcataattgtgagaaaagtgcagtagtatcgcttaaagttcagttttaatcagggcatttagcagctcgaacccaatgtatttgtaagcccaataaacgtgtaaatgcctagagcaaaatatcacaactgtagcttttcatccgaaagataataatgaatagactgacctgacgtttttcaaaatgcgtattatttcaaagaagttgttatatatttcattgaatagcgagcatttacacaattaactgctaaattagacatttttcggattaaggaagcaagtagtaactacctattgcatactacagaagtggatatggaaaatgggctgtgtcctaacccagaagatggggctgagcccgctggacgtcgtcgcaacgctccttgaggtcctcgggatccagctccaggcaggcgccccactccaccagggtgatgcgatggtccttgttggagtcgcaggactcgaggaagggtgcgatgcagtgctcgagactgaccagcggagcacggatggggaagagctcgtggcgcgagacggagcgatcggtatcgccgtccaggtcgcaccacttccacacggcggcgttcgaccagcgacgcgagttgttggtctccgcctccagctccatctgcatgtagtgctcggtcagctcgtcgcgctcggccaggtcgcgcatcacgttgaacagccagtcgcgcatgcgcctggggaagtccttcaggtcctcgccctcgcagctcctgggctcgtggcaagcgccgtagtagtcgatgtgcatgtgcgcgttgtccggattggtgcagccgggctcgccgctgtcgcaccagcagcgctgctgatacacagagcag

SEQ ID NO: 11549 - DNA, 885 bp, DROSOPHILA
gaattccgtagaaacaactcgcacgctccggtttcgtgttgcaacaaaataggcattcccatcgcggcagttagaatcaccgagtgcccagagtcacgttcgtaagcaggcgcagtttacaggcagcagaaaaatcgattgaacagaaatggctggcggtaaagcaggcaaggattcgggcaaggccaaggcgaaggcggtatcgcgttccgcgcgcgcgggtcttcagttccccgtgggtcgcatccatcgtcatctcaagagccgcactacgtcacatggacgcgtcggagccactgcagccgtgtactccgctgccatattggaatacctgaccgccgaggtcctggagttggcaggcaacgcatcgaaggacttgaaagtgaaacgtatcactcctcgccacttacagctcgccattcgcggagacgaggagctggacagcctgatcaaggcaaccatcgctggtggcggtgtcattccgcacatacacaagtcgctgatcggcaaaaaggaggaaacggtgcaggatccgcagcggaagggcaacgtcattctgtcgcaggcctactaagccagtcggcaatcggacgccttcgaaacatgcaacactaatgtttaattcagatttcagcagagacaagctaaaacaccgacgagttgtaatcatttctgtgcgccagcatatatttcttatatacaacgtaatacataattatgtaattctagcatctccccaacactcacatacatacaaacaaaaaatacaaacacacaaaacgtatttacccgcacgcatccttggcgaggttgagtatgaaacaaaaacaaaacttaatttagagcaaagtaattacacgaataaatttaataaaaaaaactata

SEQ ID NO: 11550 - protein, 141 aa, DROSOPHILA
MAGGKAGKDSGKAKAKAVSRSARAGLQFPVGRIHRHLKSRTTSHGRVGATAAVYSAAILEYLTAEVLELAGNASKDLKVKRITPRHLQLAIRGDEELDSLIKATIAGGGVIPHIHKSLIGKKEETVQDPQRKGNVILSQAY

SEQ ID NO: 11551 - DNA, 2705 bp, DROSOPHILA
atgtcctcaataatgtcctgcctgcccgaatggtcccggaattggttagggcccacttcaacacggacgaggctaactttgcgctgaaggcgtcttcatagaaacgctgtagccttcgaaaagagggtgcattctcaaatacgagtacgagtaatacaagtacgagatactgatcaggcaacgccaagtggcttcgttcatgccattcgctctgtaaatacattgtatgtatactgaatgcaagcaaataaaatctataactctttatcagaaaatagtcttttgcgttcttaattgatttatcatgttagataagatgacaactttgatttttatataaggaaaggaaattacatgaatatttcactaagctaattgaaatatataccaacttaaaattttattatatattaaagaagtgcgatataagatattccataggggaaaatgttgattgtatgacacgatctttcgtcttgtaaaacctgtatgtcatgggaaattaaaaaaaattgttctctaatattgttttattcaaaatatattaaagtaaaacttataatttttagtttatttatatcagactaattttgaccaacttgaagagcatacaaacttttttttgattcaaacgagagggatatttcgatggctatgctctttactaatattggttttaaaacaaaagtttttagttgctcattgtatgaacaaacaacaaaataaatatattaaagttcctaattaaatatattttaaatcattttatgtttaacaactaagttatagctcaatattatgaaatgacttagggggattttttctttaaatttctcttactttgaaagggtgcaataaaacaacgatgcgttagtcaccgaaacagatgctatcaataccaatcttttgatagcgataagtgtaattggagtcgaaagataagaagacgactataaaagcagttaagtcactggccagacactcaaagtgaatccagcagtccgtcaagatgtacaaacttgtctgtgtagttttggccctgtttgcagttgcctacgcggttccctcgacttatggtgagaaccaataataatataatatagagggttaactgaatccaattaacatagccatttcgaacagataccgagcacgtgtggaaggctggtaacctgtcctacgttattccctataatgccgttgtgggtggcttcgatccctacggatttaccacctatgttggtcgtgttaagtactccaatagcatcctgccggctcgagttgttgcggaaactggtactgcttacttcaatacggaaaccacatcctcgaagctcctcgtctacgacatcctagtggctgagcgggatgtaaattacgtgtgggtcaggagcttcgatggattctatgaaaagggagccgttgccgtgggcacgacggtcaaaaatgagcgggtgttctgctgccgtgctaagaccgatggaggcatcctaatcggcaccctgctccttagcagccagaaggtgtgcatcatcaagcacgagagcttggccctgcgaaagttcgacaaatatgaagttctggtggcccagcctaaaggcaatggaacatactactaaattctactactagatctttgtctgaattaagttcctttgatatcccggctcccttaaaaaataaataaaacataatttatttcaagtaattatatttattttgtaattcacggaatcgcacttattcaattttttgatatgcatcaaatcttattaacatatatagttcagtaaatggattgactttgaaacacttaatttttataaacagactagttttataaaatatgattctcaggcagatgatgtttttcacaaatttcttaatacattcatatttctggcaaagaaagacgtctcctttcacatcaaaattattaattcgtccccaacaatttttatatcatatttatattccatgacatttatagaaaaattaaaataaaataaaaataaaactgccattaaaataaaactttatgcctaaagcgaaaattgagattggtaattttttaaaaatgcctttttggaaggacaactatttcttaactcgaaatttcttttaaattcatattttattatgaactcatcgtaattttctgttctacatgctgctatggacaagaaaatgtatatacattttaaaggttttaactttcgtacgttttttttactcttagttcattttgacgaacaaagtaagtccataatgtcttttttgatagatagaacagttgattgattatggtatttaatctgtaaccaaagatcttgccttgatttcagtgtcgtaaactattttggttaaatactatgtaagccactttgattggcagaaagctatttggctgtgctttaatttaatttgaagggggttttgcaactatcagttttcgcagaagtaatcgattagataaaaagggagattggccttttgacaccggatcaaattggacagtactcagaaatggttattgataggtagaattgaagtcataaattatcgcatttgttgcagaaaagctatcggtttactatgagttacggccacaagccaattggttaaataataaaatataaaattgtctattttccttagacgaagtttttattaattttttgaatacatgccaactttgctaacaa

SEQ ID NO: 11552 - DNA, 638 bp, DROSOPHILA
tccgtcaagatgtacaaacttgtctgtgtagttttggccctgtttgcagttgcctacgcggttccctcgacttatgataccgagcacgtgtggaaggctggtaacctgtcctacgttattccctataatgccgttgtgggtggcttcgatccctacggatttaccacctatgttggtcgtgttaagtactccaatagcatcctgccggctcgagttgttgcggaaactggtactgcttacttcaatacggaaaccacatcctcgaagctcctcgtctacgacatcctagtggctgagcgggatgtaaattacgtgtgggtcaggagcttcgatggattctatgaaaagggagccgttgccgtgggcacgacggtcaaaaatgagcgggtgttctgctgccgtgctaagaccgatggaggcatcctaatcggcaccctgctccttagcagccagaaggtgtgcatcatcaagcacgagagcttggccctgcgaaagttcgacaaatatgaagttctggtggcccagcctaaaggcaatggaacatactactaaattctactactagatctttgtctgaattaagttcctttgatatcccggctcccttaaaaaataaataaaacataatttatttcaag

SEQ ID NO: 11553 - protein, 180 aa, DROSOPHILA
MYKLVCVVLALFAVAYAVPSTYDTEHVWKAGNLSYVIPYNAVVGGFDPYGFTTYVGRVKYSNSILPARVVAETGTAYFNTETTSSKLLVYDILVAERDVNYVWVRSFDGFYEKGAVAVGTTVKNERVFCCRAKTDGGILIGTLLLSSQKVCIIKHESLALRKFDKYEVLVAQPKGNGTYY

SEQ ID NO: 11554 - DNA, 4102 bp, DROSOPHILA
aagacctccaggtaggacttccatgcctccgtgccgtagtcgagcattagctccaggttgagagagcgcacccactggtgctccagctgggccatcgagttctcaatggcctcctgccaggcggacacctccgacaatttgcccgatggcggcggtggcagttcgtagcgcttcatggagagcgtctccatgggcaggcggttctggatgcgctcgaactcgttggccatcagcggagtctcaaagggcgagctggcgggcagtggcagatggtcaaggtaattttttgtgggcctatagcgccggcattcctcctccaccatggcgagagcctttggaagaagaagatgccatttcaaagtcagtttcaacgtgcaacatggatatccgtatatttaccgattcccggacgcccacatcgtcatagccgtgatctatgtagggcagagcatccacaataacttcgccagccattatttattattaatttctgtgttttgagactgttttttccgcaagtaaacaaatacaattgccgcttcgcactagtgtggcacatttagctactttatagctatataaacggataacagaatgctgttaattaatagccatatatctatttagtaaatttttttgttttaacatgaacatttaagcaaaaaataagcgttgttttctcaccaataaaagttgtgtaagttagtttttaacgtatgtatgtattatgtattgtttgattatttattatgcggttaaattacaacaattgtattcttgttctttaaaaacgcattgctaatttataaatttaactaaaatacgttattgataaattcgaatttagatttgtaatattatagtttaattgcgagaatataaacaaaaacttctcttacgagagaaaaaaaaagctaaaagtgttggacagcgtccaattagccctgtaagcttgacacttgctgctgttagcaaatgcaaccatgcgccgtggaacgcgattggcagccatttccggcagctctctttctttcttcgttcttcttaataaaaagaggacggtatctgcgtttgcagaatatttagcacctttcattgggtttgaaaatcaacgaaaatggtgagaaacgaagcacaaggcactccgcaaccgcagcagaccccaaaacattggatttaacacacgaaacgatgcgaaaatagtgcaaaagtgtcgccctaacctccacgtgtttggaatgtgcggcgatggcgaaatgcgcttgttgtgttttgtgatgtgaaatgatcagtgaactaaacccgaataccatgtgcactttcagagcttaggcaacgccaggccattggtctccgtgtacacggaaaagaacgagccagccaaggacaagaacatatgcctgccggcagtgttcaaggcgcccattcgtccggatgtggtcaacgaggttcaccagctgctccgccgcaacaaccgacaggcctacgccgtcagcgagctggctggtgagtaaactgtttataactcctcttttgtgtgaatctaacccgtttgaattcctgtttgcaggtcaccagacctccgccgagtcctggggtaccggacgtgctgtggcccgtattccccgtgtgcgtggtggcggtacccaccgttccggccagggagccttcggcaacatgtgccgtggtggacgcatgttcgcccccaccaagacgttccgtcgctggcaccgcaaggtgaatgtcaaccagcgtcgctacgccctggtgtcggccatcgccgcctcaggagtgccagctctggtccagtccaagggacatgtcatcgacggcgtctccgagttcccgctggtcgtgtccgatgaggtgcaaaaggtccagaagaccaagcaggctgtcatcttcctgcgtcgcctgaagatctgggctgacatccagaaggtgggtaactttgtacacctatgaagaacttaatccgaagaatgttaggtcacttaactgtgcgtctattcaacttcaacgtatttatttaacaaaacgtgaagttgtgatgttttaattgcaaagttataactttttattggattcctacttttcggatgctttctaaatcttacttggcagcgtgcaagcaactggctactcttctggttgtccgatgcttgcagggatctcctgcgttgccagataaaatgctcttcttggcgttacgattgaaacttgattcacggcttccatcgtggtaacggaagagcaacagctgttgtattcatgttctctatttccgaattcctggaatatacatactcactatcaacttgtttctcattcatttcgcaggtgtacaagtcgcagcgcttccgtgctggccgtggtaccatgcgcgaccgtcgccgcatcgctcgccgtggtcccctggtggtctacgacaaggacgagggtctgcgcaaggccttccgcaacatccccggcattgagaccatcaacgtggacaagctcaatctgctgaagctggcccccggcggtcatgtcggtcgctttgtcatctggaccgagtcggctttcgcccgcctgaacgatctgttcggcacctggaagaagccgtccaccttgaagaagggctacaacctgccccagcccaagatggccaacaccgatctgtcgcgtctgctcaagtctgaggagatccgcaaggtgttgcgcgatccccgcaagcgtgtgttccgcagcgtgcgccgcctgaaccccctgaccaacgtgcgccagctgatcaagcttaacccctatgccgaggtcctcaagcgtcgtgccgccctcgccgccgagaagcgcaccgtggccaaggtgctggccaaggccaagaagcagaacgtcgagctggccaagtcgcacttcgccaatgtggccaccaaggctgcggccaatcgcgccaagctgctggccgcccgcaagaagaaggtcgccgccaagaagccagcggccaagaagtaaacttactttcccccgagtagagctgacacacttttatattataataaaccacaaaagttgtatgaattttattcataatacatagagtgcgcgacagtaatgctcattaaactcttagtcttaggcacatcatttagttggctctctttttggtcgtcttgcctgccgcgctgagcgatcccatcccttatcattctcccgctcgcgctgataacagcggcatggcatctgcatctgtatctgtggcggcggctgtagctttcgttatcgtccgtcgtgctgccgccgatggcgatgccgatcttggtcttcgtacacgttcgcacatccatgggccgcacatatacttattgtcacacgttaattggcatttaattaagcgtcgagcgtcgtcgccgctcttattcgactgcgaacggtcgactggcgcggttctgcgtatcgcgaatataccgaatcccttttgtgcggcaaataaaaggctgggaaacaaaggatatatatttttgattcaattaaccgatgtaatttcgcgacggtaccatagcatagtaggtagcagtcggtaaaccggttccaagcccactttattatatagcagcttgccaaaaataaaggtagatgctatctcgcgcaaaatctgaaagctcggatcatacgatattttctatgtgcgggtcgcgaccaatgtctggttatattgagtagaacgcaataccatatagccaccaccaccactgatcggccaggagagcgagagcggcatcggcatcccgcagagagaacgctggagcggagcggccatcatctccaaccgtctcctccaccattttccatcaacaacatttatatatatttttttttttttgccaccgcagtagatggcagtgcagtagttgtggccgctgccaccaaaagggtcgctctcgcgtctgattattagtcgcgtttaatcgttgcgttcggtacgtttccgagaccacttccgatcacttgcccgccggctgatgccggagcatcactactgactgactagtagcattagcgcgcggaaccagtcccaggtccagggcacagcataatcatcatcatgttgacgaccgtcctgaac

SEQ ID NO: 11555 - DNA, 1434 bp, DROSOPHILA
attggcagccatttccggcagctctctttctttcttcgttcttcttaataaaaagaggacggtatctgcgtttgcagaatatttagcacctttcattgggtttgaaaatcaacgaaaatgagcttaggcaacgccaggccattggtctccgtgtacacggaaaagaacgagccagccaaggacaagaacatatgcctgccggcagtgttcaaggcgcccattcgtccggatgtggtcaacgaggttcaccagctgctccgccgcaacaaccgacaggcctacgccgtcagcgagctggctggtcaccagacctccgccgagtcctggggtaccggacgtgctgtggcccgtattccccgtgtgcgtggtggcggtacccaccgttccggccagggagccttcggcaacatgtgccgtggtggacgcatgttcgcccccaccaagacgttccgtcgctggcaccgcaaggtgaatgtcaaccagcgtcgctacgccctggtgtcggccatcgccgcctcaggagtgccagctctggtccagtccaagggacatgtcatcgacggcgtctccgagttcccgctggtcgtgtccgatgaggtgcaaaaggtccagaagaccaagcaggctgtcatcttcctgcgtcgcctgaagatctgggctgacatccagaaggtgtacaagtcgcagcgcttccgtgctggccgtggtaccatgcgcgaccgtcgccgcatcgctcgccgtggtcccctggtggtctacgacaaggacgagggtctgcgcaaggccttccgcaacatccccggcattgagaccatcaacgtggacaagctcaatctgctgaagctggcccccggcggtcatgtcggtcgctttgtcatctggaccgagtcggctttcgcccgcctgaacgatctgttcggcacctggaagaagccgtccaccttgaagaagggctacaacctgccccagcccaagatggccaacaccgatctgtcgcgtctgctcaagtctgaggagatccgcaaggtgttgcgcgatccccgcaagcgtgtgttccgcagcgtgcgccgcctgaaccccctgaccaacgtgcgccagctgatcaagcttaacccctatgccgaggtcctcaagcgtcgtgccgccctcgccgccgagaagcgcaccgtggccaaggtgctggccaaggccaagaagcagaacgtcgagctggccaagtcgcacttcgccaatgtggccaccaaggctgcggccaatcgcgccaagctgctggccgcccgcaagaagaaggtcgccgccaagaagccagcggccaagaagtaaacttactttcccccgagtagagctgacacacttttatattataataaaccacaaaagttgtatgaattttattcataatacatagagtgcgcgacagtaatgctcattaaa

SEQ ID NO: 11556 - protein, 401 aa, DROSOPHILA
MSLGNARPLVSVYTEKNEPAKDKNICLPAVFKAPIRPDVVNEVHQLLRRNNRQAYAVSELAGHQTSAESWGTGRAVARIPRVRGGGTHRSGQGAFGNMCRGGRMFAPTKTFRRWHRKVNVNQRRYALVSAIAASGVPALVQSKGHVIDGVSEFPLVVSDEVQKVQKTKQAVIFLRRLKIWADIQKVYKSQRFRAGRGTMRDRRRIARRGPLVVYDKDEGLRKAFRNIPGIETINVDKLNLLKLAPGGHVGRFVIWTESAFARLNDLFGTWKKPSTLKKGYNLPQPKMANTDLSRLLKSEEIRKVLRDPRKRVFRSVRRLNPLTNVRQLIKLNPYAEVLKRRAALAAEKRTVAKVLAKAKKQNVELAKSHFANVATKAAANRAKLLAARKKKVAAKKPAAKK

SEQ ID NO: 11557 - DNA, 5677 bp, DROSOPHILA
cagtttgcacgtcgaacggttgaagcgaagtgaaaattgtgctgtcaggaagcgaatcattgattcgatacacccactctctctgtttgttatcgataagttggttaggggtattcttgaaatttctaaagtgccaagtttctttactatcgtaataataaatacatacacgaattggatatgcgatagctgtcaaattgtaatatagtttttcagaagcaaagcgaaaaccgccaacgtatactagcccctttatgcattcaattgagtattcaacttaagttctaatgtcggattcgccccatgaggagcaccgcttgtgcggtctggggaatcacacgctgaggtccccgtaccgcgtaatcagaaatccgcacctgctgaagtttggccagctgataaactcggagctgcggtctcagccactgtgcctctcgtgctacacgcaactgatccagctctaccggctgaagaacaacaatgcgaagagacacctggcaaatagacaggcagccagtgctattctctcgaggagcagtagtgagaaatctcatgagtccgcggctagtgtgtccacaacacaatcctcggaggagcaagaatcaaccactagcgcagcgccggcggcggcggctcaaagagcaggaagccagttggttgagtccaattcttccgacgatacacttttctccgatgactacgatcccagctcgaatctgagtttgaatgccgtgaatggaacgcggctaccgaatgtccaaccaattccgaaaaggcgccagtttgtgcatctaaatcgtgaagctatggccatttatctggcgggaactactgggggataatgtttgtttcatttaggatattttcataaattaaatttgaaataacactgttaccatctatgtaaccatctatcgatagtttccgccatgttattagcagcagaaacagctggctgagcaccagggctgcattattgtttgttagttttgctgtttggtttttaacaaatttcctggttttccctcaaaaaccctctcttatataaataaatcaagtgcaaaatgctgagtccataacaacacacgtaagtttgttggcaagcagtgagtgatttcttcgaaaagtgcaattcctgcaatctgttatgttttcacaatgacttttattcgatcttaatctaaacagtttaaagctcaaataaatgtaatcaattagcaagtattagcaaatgttaataggcgttgttgtttctcgacgtcgctgctgctgctgctgttgttgttgtttttgttgttgctggcgctggaactggtcatcgatgtcgatgaaattggcatcctgcgtgttatccttgggcagcgctgccggcgtcgctgccgcggcatagtagtttaggcccacgcccaccgccacgcccccagtgacgcctccggggggcatggtcgtggcagcctgacccattatagagctcataaaaccattggccacgacaaagtttctgaaaaattgattacatcaatgtacaaaataatttcgagcaaccccctccggcccaaaaaaaaaaaaaaaaaaaaaaaaaaaatatggaaaaaaatgatatcgtctaattgggtctgtgtgcgcataaatgtcgtaaaattaatttcgtgttaatttcatgttggccatcaattaaactagtgacatttcactaaattacttccgtttcgaaaatgcaggtataaatacccagttaaaatcctcttcacgagctattcatcaaccattaatttatgttcatttaatattatttaactcaatcaaaatcgatgatatctttgtacatatgaaacagaaaaaacgattcaaattagctaaaggggaaacccacctgtagtgctgatcgatctgagccttttcaatgcgtttgtccttggccctgcgattctggaaccagatcttgatttgcgtttcggtcaggcgcagcgtttcggccagctcgaagcgacgactcctggagatgtactcgttccgatggaactccacctccaggcgaagcgtctgctctgtgctgaaagtggtcctctggcggcgttgtcttccctccttgcgtcgcctgcgagccactgaaagtcaaatacattgatatccttacaattaatacgtgtataatatctagttggaatcagcttattagttatgtaaaccccgcaccattcagtgtgtacaataacgacatccgtcggatagcatcattttttcacagcccacccactttcgtttatgtccaacacaatggagatgttagagcgaaattaatcttacattaacaaaccatcaagttatgagcgggactaaacgttttcgaatgtggttgcgtgtcgctgcgtcagttaaacaaataattaaccactccgatccgtggtccatccgtcgtcctccctctcttgctctctccgcccgcccacctgccagaattcgtcgtcggtcgcgtttgtggtgcacattaaaagtgcatttaccacgtagtttctgttctctatgtttttttttttaccacgcttttcatttcggcaatctatgctgatccgggaaagttataacaatgccaacagctggctggccatcatcatcatcatcatcctcgtcgaaattctcggcatcatccgctctttcgagttttccattctgtcgtttgattgtttgcattcgcagtgtcgccgacgatgaagctcaaccaagcgcacattatgccccacttcatcctgcaacaacgagcacctgccacccaggaacacccaccacaaacacccacaccatggtgaatgttgcggtttagagtctaattgatgtaacaaggcgaagctgacaagttgctcggtggtgttaggatggtgggggggggggagggggggtttccccgggaaggggttgctttgtgggcgttgtaatctctagcttttgcttgattacccctagtccggatggctctggaggggcttaagctcttccctgatccttgccgaaggtttttttttttttttaaatcacgtgtgtaattcgatagccaagtgtcctttcggacggtttgttgtggctaaaaatgagtcttcctcgcttaaccctcctcgcttgctgtttgtgtttgcttttttaggtttcctgccgagctcaattacaatgctaattttttcagacacttgttatttttttgagattgaccaaaagtttggcttgtaagttagttaatttaaagatcaagtacttatagtaactaccaagctggtttagcattaaatatatcaactgttctgaatctaaaaaatgcttgcatatgtagaatacgtttctgctcgtagaaaaggtttcaaagtgtctttaactttgatttcttgcttacgaatggctaacccattcacccttaacctgcgatcattttcattagccgacgcatttccatgtttcaatatcccctcaacctcatctccgcacctggccaccttggccacctcatcaggagcaaacgaaaaagccgcaagtaaacgaaaactttcacggctcaatgcgttttaattttttcttggcattcggttattttttttccttggctaatttctttgcatttgggggtcagcagcagcagcagcagcagcagctcattgtgtggcattgcttggttgccccaccttagtttcgtttatttttttccaactgattttacataatcctggccagcgcactcggtgcgaagatgtgggggatattcaatattgcagcactgacgattaatcagtttttttttgcgtatccgactttttttttttgcagttcctgcggaaccaagttcatctgggctgcacctgcgcaggcgtgtgaaatgctcatcacttcctctgggccttttcaatcgtaactttcgaactctttcggggatcgggcggaaatgttggctcccctgggcttcagctgtccgcgatgcttgctcctgcgacgtggcgccgagcgttgggcctcactggcccgccaattgtcgggcagcagctcccaggatgatgccagcagcaaggatgcggccgcccaggaggcagcaagtggctgtccgcccaatagcacaacgacgggcactgacactcccaaagccaaagataaaaccaccaagggaaggaagcggctcagaaacatagaggtaatgttgtaagctagttgttatcattgctattataggttaaatatcagttggtaagattgtagttcattagaaagaaaggatcatcgatctagtattgtaacacaaaacttagtgtagttctatgaacttctaaaactattgagcagtattatcgaaggatccaattgttatcacaatactgaaataactttctatcctaagaggaaagtggctcaagagattgcatattatataatcgtttgcagatacctcccgagcccaccacctgctgcatgtcgggctgcgccaactgcgtttggctggactacgcacagacgctggccaagctgctgggcgacaacgatgaggaggcgcgagagattgtgctgagcaagatcaccgacccgaacctgaagatgttcctcagcctggagctgcgccagatggctaagcagcgggaggagaaggcggcggcggagaaagcagcgaagcagggaaagccaaagaaatcctcgcccccgccgtagtacaaatccccgctcacctaaatatctagttaggaccaaattcgtagtagctcaaatttactcttgtacttagtgtgtaagaactaagaaacctcaaaataaacatgtaagagttaaggttctgaagaagttattttcgtagttctaaagattctgcatagctttgcaaatattctacacattgttagaaaccattcttttttaaatgtaagtactcacgaaatgcggaaaagccggcgctgaagtgcgggtcacttgggaagccggctgggaatgcgtgtggcaggacaggattcgcagctccaccggcggcaattgctggcggcgggctcacgtagctgagtttctggtgcaccagctgcggcggatgatggtgatgatgatgatgctgctggtgctgctggctaggatgctgcggatagtccttggcgtgaccatagaaatcgtaggcgggatatgcggctagcgaggtgcgttcatcgctgatggaaatgtctggcgaggagacgcttcctccatcgctgtgatagggcgtgtcacagggcggcggcttgtgggcgtgtgttccgacgtcgatttccccattttccgaggagcgcgtttccaaatgcccgtacagacgttcgaaaaactgtcgcggcgacgagggacgttgcggcacggatagaatcgtagtgttcgctatgggatctaagctgtcactccttttgatgcccggcgagccgtcgggtgagccaatctcaactttgtgacgttgcatttcgtttgaggatgtgccgcgttagctgtccaaactaatcacttgggtaatcggcgagcgactgaagtgccacaaataattctacttccgctggtcaagcgacgcttatcctgacgtcgacgtcggcagaggaactgggtgaaaaaaaaaaacaaagcaaattacgcggcacatcagaaaattaacagcagcagcgggggcgcctaaaatgctgcttactaataataataataaaaaaaa

SEQ ID NO: 11558 - DNA, 706 bp, DROSOPHILA
tttttaacaaatttcctggttttccctcaaaaaccctctcttatataaataaatcaagtgcaaaatgctgagtccataacaacacacttcctgcggaaccaagttcatctgggctgcacctgcgcaggcgtgtgaaatgctcatcacttcctctgggccttttcaatcgtaactttcgaactctttcggggatcgggcggaaatgttggctcccctgggcttcagctgtccgcgatgcttgctcctgcgacgtggcgccgagcgttgggcctcactggcccgccaattgtcgggcagcagctcccaggatgatgccagcagcaaggatgcggccgcccaggaggcagcaagtggctgtccgcccaatagcacaacgacgggcactgacactcccaaagccaaagataaaaccaccaagggaaggaagcggctcagaaacatagagatacctcccgagcccaccacctgctgcatgtcgggctgcgccaactgcgtttggctggactacgcacagacgctggccaagctgctgggcgacaacgatgaggaggcgcgagagattgtgctgagcaagatcaccgacccgaacctgaagatgttcctcagcctggagctgcgccagatggctaagcagcgggaggagaaggcggcggcggagaaagcagcgaagcagggaaagccaaagaaatcctcgcccccgccgtag

SEQ ID NO: 11559 - protein, 167 aa, DROSOPHILA
MLAPLGFSCPRCLLLRRGAERWASLARQLSGSSSQDDASSKDAAAQEAASGCPPNSTTTGTDTPKAKDKTTKGRKRLRNIEIPPEPTTCCMSGCANCVWLDYAQTLAKLLGDNDEEAREIVLSKITDPNLKMFLSLELRQMAKQREEKAAAEKAAKQGKPKKSSPPP

SEQ ID NO: 11560 - DNA, 5733 bp, DROSOPHILA
tggatgtgcatgtgcttgaggatgatgctagtgccaggaaaaatctaaatagctgaaaaccggtagccgcaacgtgggccgcgcagttttgtcttaaaaagttaattgcctgatttgctcagcctctctacgccgggaagtgagatgtatgggctgttaggatgttaggctgttgcgctgttgggttgttagccaaatgtgctaagagataatcacataaacagtggccttaatgaagtttggccaagacgaagacgaagcgaggcattcacactcgcgcgtatggagttgcagatgcctggtattttttatatttatatttttagaagccacatatagaatgcgataccggcttgaactgcaatttgcaggccatcattaaaagtgcctgcatgcaccattgactgttgactgacgcgatctgtaatttatggatcaagttccccctgtcgataatgttattaaatccgcagttgtgagcgcatttgattaattgaaccgtttgtgagaaatgatgagcgagccacggaatgttcatgccaattgccgttgactcgggtcgttgttctgccatgttgcagcagttgctgcctgccgcctgcctcatgttgcctcatgttgcttgttgcctgttgccgcttgctagttgccttgcggttttagccatgttgcgttggcatatcaattcacatgtcaggccgccaggcaggcgaacagcagcaacctacttatttatgcagcagaccaggccaagtaactccagctacagttccaggtccagctccgaggcgaagctttagctccaacttcgtttcggacggagccagaatgcacacactctgactgatggccacgttctgactgggtctcgttggccatgcatcctggggctaaacaactcaatacatcagctatccccaatgccgcaccgtccgctgtttgccccggcataaatcattttatgcaacaaaattatggcaaatatcgggggattacgagcatgtgtgccgcgcaggcccatcaacattgcagcacctcggtcgccggggatcgattgttgggttgggtctccagaatggctggggtgggggcattagacaccgcccactagccacgtgcttacgaggttaagaactcgacgagacttatcatccaaattagtcatcacgctgtttgcttgctttcatataaaaattgcgttctaaattcattggaaacttgttctcgtataaattatagtaccttctaaggaaacggatttttgtttgtttatttctagatttaagtgtacagttttttaagaatgtgcactaaagttcccattaccttattttcgaattgcaggcagctccaccgaattggcaccctcgctgctgggcatctacgacacattgacaaacagctttgccgcggggggcgtggcagctgctcccactgcgacatctcacgaatcgaaggcatccagcagcggcgactcgacgcccaagaggagcaacagtaactgcagcagcagcagcagcactggctcatcgactggcagctgttcgagtgtccccaccagcgatgaccagtctgctagctacacgctagccagctccagcactcatttgggccaccaggagccgcccgctccactggtggttgcgggcctgcgggacgaaccggatggcgctcagttgagcaggttggtgcagcgcagaagccaggagtcgcagattcacggcagcagcagcagcatagcctcgagtgggagcagtcgacggggcagcaacatccgcatcctttcgcccaatgttcatagaatcatcacgcactcggatattcaaccagtggaggcggtgtccgcggaggcactgaaacagcatcagcagcaatcccagaggagtcccacccagggcaggtatataaagaccggtcatagcggaacaccaccagccgctggttccgcacccaagctgaagctctcgcacataccgctgtccaagatcaccggcaagttgtccacccagtctggcagcgaactggtgtcgaccttcgattccagcaacgagtatttgaactcggtggccttcgccgctttcgagaaatccaagccgcaggacgaggatcggacgccaacgaacaaatcggtaccaggcactcccttccatttcgatgggcatccgtttcaggggcgaaaactaaccctaccacggtacgattcacagcagagcatcaagctgatcgaaatggagcagctggcggccaccagtgcgcaactgttgcatgccaagcctgccacgcccggaactccggccacgcccactcccagtgcaaccaaagccaaggagtttgtgtgcagtgagccactgagtcccgtggatatagtggacaccattaacttcgatctggttgcgcagcatatggaaagattgactctggcggatccaggagatttggatcccagggcggagctaatagaagcggttaacaaaacactggttaacaagccactggttaggagctcctccgccgcctgtgcctccacaatatgcagttcaccgctgttgacctatgcccgcaccaagagtttgggcgccaaggccagcactttgggcggtggagtgcctattaagctgcccactgccgaacagctggccgagctggaggaggccaacaagttgtcggcggaaagtctggacaggctcaccgatatcaagcccaagtttgcagctcgcctaagtgagctggctaggctgaataaccgcccactgtcctcctcctccatttgctccacctcctccagttccagttccggttcggaccaactgctcaatggaaaactgatggccacttcctacttggctagcgtagaaagtctggcggagagtgagaacgagctgggcgatcaacaccatccgccggcgatgagtgtcctcgagaaaacctgcctagagatcgtagactcggagcgaagcttcgtcgaggatttgggtcaggtcatcaaggggtaagtacaccactagcttcacttttcgttcaagtaccttacatttaattttttttttagatacctgcaggactggaaggagcgtgcgtgcctgcgcgtagacgaattgcaaatactcttcgccaacattgaagagatttatgaattcaactcaatgcttctgcagcgacttatcaacacgggaagggatcccgggaggatcgccaggtgcttcattgacctgcgcgatggctttgatgtgtacacaacctactggtgagtggatggtagagtatatcggtatatctcaacaaatccctgggagcagtttaaggagtccctataaatgaaatcctggaaacttacctaatatttattgaagtgaatagtgatagtggcctactcctgacctagttgagtattctgggtgagatcttcgctctggcttggcgtgttcgctccatcttcgatactgtttttgtgaccatagccgtttgccaagaacggtaacgacggccaaaacgatctcgataggctaggagttagctagcagcatgacacgaaacaaaacgccgcaaaacgccagcgatggtgatgtcgatggcgatggcgatggcgtctcttggcaatccaagcacgccatgttccatttaaacgcgaacgtttacctggttgcgatgccaatttggagagcgggatgcgatggcagcggtttgatttgtcgcctccaatgacacgccgcattcatcatcgtgcctcccactgcccaaaaactgaccacactgctcccagcgacttatttgaaattcagatttaatgccgaccatgatgaagacctaaagcacatgtcataaatcccgattccccacagcacaagctacccggaagccatatcgttgctgaccaagttgctgcaggccacgcacacgtactctctgcttgcctccacgcagaagctactccaacatcgcctgcccctgggatcctacctcctgaaaccggtgcagcgcatcctcaagtaccatctgctgctggacgtaagtgggaagagtgggtgatccaagtgacagtccttaaccatattcttttccatccaaacagagcctgcgcaagcactgcgatgtgaaggaggtggtcgaggcccatgtgatcatgcgccaggtggcgcacaacattgaccaggtgaagcgaaagcaggagcagcagagtcgcgtcaaggagctgtccggcattctggacggctggctggggccaggtaagtgtgggagccacttaagcatcttcctggccaccaaactaaaccctttacccttaccaactatagagctcactgttctgggagagttgcgccaagagggcctgctgatggagcagcacaataaacagcgcctggtactgctattcgccaccatgctgatcatcaccaagcaaaaggaggacggacgccttcagttcaagacttacatttcggtaagtttgaatgcttctccgatccatgagtcattttcgtaatgcaacaatctttcagcaaaacaatctgatgctgagcgaacacttgcccggtgaaccgaccagcttctatgtcatccccttcgacgagccgcgccatcaaatcaaactgacggctcggaatcgtgaccagaagcgcatctggacgcagcacatcaaaggtgtcatgctggagaagttagacattccgatgcgcgccaaggagctggtctatcagctgggcaacgaggaaggtgagtgcttcccacttggctaacttggatagcacggcttagccgcggcttggctctagggctcttgctgttttagttttttgtttttactttgttttacttttcgttttaccccctcttcccaccgtttgtgttgtgttttttgtcatgtggccaaaacacttaacgatttggattggggactgcacgagatgatgaagtgcctaacagttatgcacatgcgggtacttgttatagttgggtaatgcctgtcggcctggaagaaggagagccacgctgagaaaagtgcagcgaaatcgagtcgtttataagaaatctttccactaacctaaactaatatctgaataactaattggacgtagtttgaaagtagaagctcaaattatttgaacaagaatgaagtgttcttcaagcacaactagttaatagttgaaataagaaacattttctctcactgcatcgtttgtcgaggctctccttaatcgaccgaccacatggaggactttcgcgcggtgcacttatgattcgcacgctccagctgcgaccaagtgacataaccaagtggcaagcgagtcgctagcgagtcgctagcctttcgccaaaatcgtgccagatctgtcgacgcctcggcggcggactgatttattacttgggagcgatgtaggcgcattttaattgcggacctcgggcgcccactttcctggatcgttaggaggttttggcccacaaactaccgcgcttagttggtgtcctactcttgtactaattcaaattgatctaactttactctacgaaatgctatatgtttaccgttgtagtactaccagtgatgcattctaaaactaaacaccccaaaacaaagaaacgaaaaaactttgactagtgcttaaggcgttctaaggctaaatccccacacccagagactgataacccaccaaaaaaaaaaaaacaataaaatccgatcagacagaaaagaagggctaaatagacaactgtaagcccccgtacatctagttgttaaac

SEQ ID NO: 11561 - DNA, 2604 bp, DROSOPHILA
atgtgtgccgcgcaggcccatcaacattgcagcacctcggtcgccggggatcgattgttgggcagctccaccgaattggcaccctcgctgctgggcatctacgacacattgacaaacagctttgccgcggggggcgtggcagctgctcccactgcgacatctcacgaatcgaaggcatccagcagcggcgactcgacgcccaagaggagcaacagtaactgcagcagcagcagcagcactggctcatcgactggcagctgttcgagtgtccccaccagcgatgaccagtctgctagctacacgctagccagctccagcactcatttgggccaccaggagccgcccgctccactggtggttgcgggcctgcgggacgaaccggatggcgctcagttgagcaggttggtgcagcgcagaagccaggagtcgcagattcacggcagcagcagcagcatagcctcgagtgggagcagtcgacggggcagcaacatccgcatcctttcgcccaatgttcatagaatcatcacgcactcggatattcaaccagtggaggcggtgtccgcggaggcactgaaacagcatcagcagcaatcccagaggagtcccacccagggcaggtatataaagaccggtcatagcggaacaccaccagccgctggttccgcacccaagctgaagctctcgcacataccgctgtccaagatcaccggcaagttgtccacccagtctggcagcgaactggtgtcgaccttcgattccagcaacgagtatttgaactcggtggccttcgccgctttcgagaaatccaagccgcaggacgaggatcggacgccaacgaacaaatcggtaccaggcactcccttccatttcgatgggcatccgtttcaggggcgaaaactaaccctaccacggtacgattcacagcagagcatcaagctgatcgaaatggagcagctggcggccaccagtgcgcaactgttgcatgccaagcctgccacgcccggaactccggccacgcccactcccagtgcaaccaaagccaaggagtttgtgtgcagtgagccactgagtcccgtggatatagtggacaccattaacttcgatctggttgcgcagcatatggaaagattgactctggcggatccaggagatttggatcccagggcggagctaatagaagcggttaacaaaacactggttaacaagccactggttaggagctcctccgccgcctgtgcctccacaatatgcagttcaccgctgttgacctatgcccgcaccaagagtttgggcgccaaggccagcactttgggcggtggagtgcctattaagctgcccactgccgaacagctggccgagctggaggaggccaacaagttgtcggcggaaagtctggacaggctcaccgatatcaagcccaagtttgcagctcgcctaagtgagctggctaggctgaataaccgcccactgtcctcctcctccatttgctccacctcctccagttccagttccggttcggaccaactgctcaatggaaaactgatggccacttcctacttggctagcgtagaaagtctggcggagagtgagaacgagctgggcgatcaacaccatccgccggcgatgagtgtcctcgagaaaacctgcctagagatcgtagactcggagcgaagcttcgtcgaggatttgggtcaggtcatcaagggatacctgcaggactggaaggagcgtgcgtgcctgcgcgtagacgaattgcaaatactcttcgccaacattgaagagatttatgaattcaactcaatgcttctgcagcgacttatcaacacgggaagggatcccgggaggatcgccaggtgcttcattgacctgcgcgatggctttgatgtgtacacaacctactgcacaagctacccggaagccatatcgttgctgaccaagttgctgcaggccacgcacacgtactctctgcttgcctccacgcagaagctactccaacatcgcctgcccctgggatcctacctcctgaaaccggtgcagcgcatcctcaagtaccatctgctgctggacagcctgcgcaagcactgcgatgtgaaggaggtggtcgaggcccatgtgatcatgcgccaggtggcgcacaacattgaccaggtgaagcgaaagcaggagcagcagagtcgcgtcaaggagctgtccggcattctggacggctggctggggccagagctcactgttctgggagagttgcgccaagagggcctgctgatggagcagcacaataaacagcgcctggtactgctattcgccaccatgctgatcatcaccaagcaaaaggaggacggacgccttcagttcaagacttacatttcgcaaaacaatctgatgctgagcgaacacttgcccggtgaaccgaccagcttctatgtcatccccttcgacgagccgcgccatcaaatcaaactgacggctcggaatcgtgaccagaagcgcatctggacgcagcacatcaaaggtgtcatgctggagaagttagacattccgatgcgcgccaaggagctggtctatcagctgggcaacgaggaaggtgagtgcttcccacttggctaa

SEQ ID NO: 11562 - protein, 867 aa, DROSOPHILA
MCAAQAHQHCSTSVAGDRLLGSSTELAPSLLGIYDTLTNSFAAGGVAAAPTATSHESKASSSGDSTPKRSNSNCSSSSSTGSSTGSCSSVPTSDDQSASYTLASSSTHLGHQEPPAPLVVAGLRDEPDGAQLSRLVQRRSQESQIHGSSSSIASSGSSRRGSNIRILSPNVHRIITHSDIQPVEAVSAEALKQHQQQSQRSPTQGRYIKTGHSGTPPAAGSAPKLKLSHIPLSKITGKLSTQSGSELVSTFDSSNEYLNSVAFAAFEKSKPQDEDRTPTNKSVPGTPFHFDGHPFQGRKLTLPRYDSQQSIKLIEMEQLAATSAQLLHAKPATPGTPATPTPSATKAKEFVCSEPLSPVDIVDTINFDLVAQHMERLTLADPGDLDPRAELIEAVNKTLVNKPLVRSSSAACASTICSSPLLTYARTKSLGAKASTLGGGVPIKLPTAEQLAELEEANKLSAESLDRLTDIKPKFAARLSELARLNNRPLSSSSICSTSSSSSSGSDQLLNGKLMATSYLASVESLAESENELGDQHHPPAMSVLEKTCLEIVDSERSFVEDLGQVIKGYLQDWKERACLRVDELQILFANIEEIYEFNSMLLQRLINTGRDPGRIARCFIDLRDGFDVYTTYCTSYPEAISLLTKLLQATHTYSLLASTQKLLQHRLPLGSYLLKPVQRILKYHLLLDSLRKHCDVKEVVEAHVIMRQVAHNIDQVKRKQEQQSRVKELSGILDGWLGPELTVLGELRQEGLLMEQHNKQRLVLLFATMLIITKQKEDGRLQFKTYISQNNLMLSEHLPGEPTSFYVIPFDEPRHQIKLTARNRDQKRIWTQHIKGVMLEKLDIPMRAKELVYQLGNEEGECFPLG

SEQ ID NO: 11563 - DNA, 8650 bp, DROSOPHILA
aggagcaggctgaccagagcgaggaggacgaagccgaccaggccaataggatacccggcatggatttcgatcccaacgcccgcaaacgtaaacccaagccggaggacgaagaggagccgaaggccacaaagtccaacaactccacgctgccggacatcaagagcaaaaaggatctcgaccgcctgatgaagaccaaaacgctgaagaaaatgcaccagagcaaactgttcaagcagaaggagcgcctggacaagaagaacaaccagaagaaggccaagcgggaccgcaacaacaccatcaagagcgttcccaagcatcagcgcaagcagctcaagtacggaaaggccaaccagaccaaataccgaaagggtcggatggtcaacaaaaaggagctgcggcgcaaacggaatgccgactaaatttagcttttagcatagtttgttttacggtttatttactattactctagttaatcaaataaactgtataattcctggcttgtacaataattttgctaacacgccgatgcgttcgatctttttttttaccgctctccgtcgtattcatcatggtacatattacatccaacatactttattttttttgggttattaacattggcaatatcgctgctcgccgccgttcggttatgctctataaataaaaggggggcgccgctaaaattataataaaattttcatgggtcctaaatctagtctcgaaatctatgtacaaagtttgcttgcatgctggttaggcataggttcttaacgtattattgggttgctttatttccattctgcgcagttgtgcagcctgtttagtgtttgcctttacggggttaacattttttaaaaatgaaacattagagcggtaaccttgttgtctgattattggcgtcattaaagcggtatcgccagcacgcgattgatgcaaggataccgattcaatgaaataaaaacgaattcagccaaacacaatctttcatttctttttttttatcgtacttaatgatagccttagtttctaatgggactgtgtgcttcggtgaaggttggggatgattttgggaggcaacaattatgttctagcttatagcttacagtcctacgcctactcctatttctaatatgttcatcatcagcagttaaaaaacgtttacaaaactcatgcgaaattgaaatccaataacaaatgcacacgccgcagtcgcatcggcgtcatctctttctcctgaccctcgcctatccgcatccagttaggtttgctgctgctgctgcgccgacggttgtcgccgactgaagccaccgccggcggacagatgtcgttgcagggctcgctgctgctggaacttggcgctgcctggtcctccgaagcggttgaacttgaacttgttgcgctgctggaagttctggcgatagttctgattgtagaatcgcggaaatcctccacctccgccgttcttgttccagcgcttctggccctcgtactcctggaatggattgtacccgggcgtgctgttgctggcattgtttcccttagccgaaccggacttcaccttccgctgacgtccacgatccatctcgttctcttcgtcgtcgtcgatgtcccgctgccgctgctcacgcgcatccaccagtagctacggaaaacagaatatcaagcattaggctagagttcggaccttgtgaatggggaggcttggctggctggctgacgcatgcgctagttaatggagcttatgcagatgagtacggtcgctcgcgaacaagcactgggaatatgcacattgtattcgaaatgggtgagtggcttacggttcacggttcactgtaacaggttatcaggcaaaacggtaacggcacaacggttgaatttatggcgtatcaggcggttgaaatgaaagaaacaacgtgccggccagcagtcaaatcataagcttcattgcacgggaaaacggatgcggagtcatcgggtgaattacctaggctccggtgcagtcactctctcccgcaatgacttttgcaactctctctacacttttcacgctcgctgaacggaggacgcgttgtggtgaccgcccggttgggaacggataccagcaacgcagccatcacagactattcggggtaatcgtattatttgtatttgttttgtgtggtatgtgcttagtggggaaaaagaagaagcgtcgcctctgccgccgacgcttctacctcctaccggccgtccgtgagacgatccggatcgggtgcgtcagcggtcgtgtctgttaccgccactgcaattacgaccacatctttactgtcactgccactagtcactgccgcgtcgactgcaaccgagccctcgacgatatcgctgccttccacactgccgtgaccagctatccgtttcgcacaaaccaactcaaaagtctaaatgaatggggataatgtggaaacaaatgcaaattacaaacaagttcgtttagtaaatcaactcaatcgaattgcattttatgcaacagctaagcgaacgacatagaaaacaaaaaagaagaccaaagagccagttaaataataaagaattagttaaacccgcaaaaagagaaccaatttatgtacattttcatcgtattaagcccgcaacttgttatttttgaagcacagacccaaagaaagtgttaaccatgcatagatttagtatctacgttagtgacatggtcacaagggatagataagcgcttcaaggtgaatgcctctctaaactcacctccttttcgagctccgcgggcttgccattccaactgagcacgggggagccgtatccacgatacgattgcttcagcagctcattgatggtgctcccattcgaggtggcattgctctggtagccattgcccacccttggctgctggtgcgacttgagcgcactgccgttgagcaacttttggcgcttggcgcctggcgttgcgggcgagtccgtggagggcttgctactcgagaagggattgcgatggttcttgttcggcgtcggaattttcaccggcgatccctccaccaccacgacgtcaacatcatcttcgatggcatcgacctcatcgttacgcgtaactttccagatacccgttttcgatttgatgaccgctggcgagggtggcgtctttggcgatggtggtgctttgctttgagactgtgattgcttctgtgggtgccagccattcgttagctgaatgctgggctcctcctcatcgtcgtcctcatcactgtctgcggacttttttaggctcttgaatatctcgtctatggcatcagtcttttgtttgctgttgttaacgtgaaccgatgacgaggctgagccgttggtgtggctgccattggtcttactgtgaccattggtctggccagactcttggtccgactcgctagaatcctccccacttggacgcttgcggggattcggtagaggcgcctcctcctcctcagatgctgattcgtagggcacaagacttttcagtggcgttttgacgggagtctttacttgaatctttacaggagactttgccttaggctccgtatgattctccgtcatattgggcatgctcggtagctgggctgtcgttggtctgggcttcatctcatcctcgatgtcttcatcatccgaggaaattggcagatattgttgctggtttattgatttatggttgctgctgctgttgctgcttggggaggaacttttgttaccatttgcagtgggagctgaagtagcttcgcctttagcgtgagcgccaaccagtggaggcttcgcagtgtcctgaaactttccggtacccagctggagtccgttctgtggactttgctggttttgttgcttgaactggatggcggttttctgggcatttccattagtgtaaccgtttgctccacccgccggcagttgaggaccaatgaaacgcgttggtgaaggcgaagacacagtcgccgccggcactggcgttgtgctgtgtccgttggtcaaacgcactccattgggcctgttggccgccggactggcagcctgtgagaggtccagttcgaaaaacattatataggcatttgtgttgcacacactgtgcattgcgattggccgcacgtagctgtcgtcgaagttgtaaaagctgcccgtatccgtggagccaatggccgtgtagtgaccgcagtgctgggacgcccccaagtgagtgaccatcgacaccaggcgataggtgagcggttgagcctgagctgcttgtgaacgggctgcgtatttgctcaaatctatgcgtgacttgaaggaaatctgcttggtcagtttgttgccgatcatggagaatcgcttcagctgtatacaaagcgtgattggggcacgctccaaagagaattgctttgtggcagatacctgcaagcgatacgtttaaataaaatgaactacagaacaaaggtcacaaagacctaccttcttcttgcatccctcgcacttgtagcccatatcctctagccgttcgcgagaaaagtgtccctcgaaagcatcctccaaggagtctgccttgcggatgtcgagcaacagatcctggaagtgctgaaacgtaatggacacatggttgcagctcagacagcgcacctcgctgcgcagatagccgccaaagatctgtcccagcggcgtggtctccttaaccaactgatccagctctttgtagttacgaaaccgcatcaaatacgcccgctccatggcctcgaccaggaagcgcaggaactcgtgcgcatcctcttggcgaccaacgaccatgtgtttgcagatctgctttagcttcgagtagatgaggaagggtctgacggccgactgattgctttgggtggccaaaagtgttttggtcatggcgcaaatgatgcaaccgctgccaggttcggccacattgcagtcagccagatgcgcctgctccgaaacgagccaattggccagggcgggtatgtgcaggagcgcctgaagcgttgagttgaggtagcaggtgttgcccacattgatcatgcccgtgcccacctgccatttgcgctccgactgcttccagccaatgcgtatgttctcccgcggatagaggaccctcttcggcttgggcagctcattgggattgcttgtcggatgctgatgattgtggtggttgatgtggtgcgactgattgttcgggtgctccgcttgcttgcgggcgccgttattgtctgcaaaggtaaagaggacggtagacagtttaagcacgtgccacaggagaaggcagcagggagacaggaacagcttgtagagcagccacagggcgaacccgtccaccattatcacagtcataatgcatttattggaagaattcccttctgcagattaagtcacttgatccgcgctgctatgaaatataaataaaacgagcagtgctcgctgtggaaactgctgacacacaatcgcgcttccatcacctgttcgcagtgttggaaagggtacacatttgttgtacctaggcaccggactgtgcagcattaagatagctattctattgaacaaagaaacttgaacacaaagtatacgccgaaaaaaatttccagtactagattttgaaatacaattctttgaacatcgttacagaatgtgatatcaccagattttatctgaaaatattttcacagcatcgtaatttcatatgtaccctgaatatgtatcttgcagttttgtttgggaaagtgtaccaatcgaggtacttatcctggtacacatatctcagatattacccagcactattgtatctttgataacagctagcgtgtgagcgggatggcgactggcagaagaagaaatttaaactgataacagcaagcgaatgagagggatggcgagtggtgaagcagtccaagtgtctgctgccgacgaatacagtggtctcgttctggcgtagggggttggggcggcagtgttgccaactgaatttttggcgcgacctaacagtggttgttgtaggcccaatgctccccccttttattgtctttgtaactgtgttcgaggcattgaccaggccaaaaaaaagaaaagaaaagaaaagtcgaaacatcgtgtaacagctcctggtgctgagctttgtgtccacttcctgctctgtgtgaatcacttctgcgagtctggcctttgtttgtgctctttttatcacgcaaaagcagattgcggcgcatttaccgcatctaaaaaaataaagcaaagccaataaaagcaccgctggggctggccatgtgcgggggaaagagacggaactacggaggggagccctcgtgctttttgtctttttttccttctttcatttgccgctggaaatacagcacgtttttttccgccacaacttctgtgaatcagaagtttggaagaggcggctctgttgttgctgctgctgctgtcacttttccagcttactctttacggcgttgtacttgttttgctttttccgcgtattcctttgcattctgtttacacgtacaccacccaaaaacgccgtcacacacggacacacacgcacgcactcacatacagaagcgcctaaaaagtacaggtatgctgcgctgccgacgtcgactgcactgccgacaaaatgcaggcggagcaataaaaaaaatatgtttgcggaaaaacatcacacgtgatttgtggagggatattcccaaaagatttggcaaaaacaaacgggacgatacataaatacatttaagtatatatacatcttatatatataatatgaagatatagcacatggaaaattgcgcaaaaattgccacacaaagaagaaacacagacgaaggcgcagacggaaaaagccacttttgcaagcaacttttggattttacattttgttgtatctttacacagtgtactcaccatgtccatttgcgcccacaagtttgcctgtattgtttttgccactaaagccattgatggcgcctggatttcccggcttgatgacaatatatttggacttgaggttctccagcaccgattcgtggtagttgggcacctcctcgtattcgattttggccatcaggatgcgtttggcattggccacgatgtgattttgcaggctgccgttggtgtcctcgccgctcttggcctggtcagtcgacgagccggcggaggagttgccgccaagggattcgcgcagcgctgcgttgacgacattcgccgtttcgcatacggccatcgaaacgggcatggcgatgctccggctggggatttgcggtggaattttgaacgggtgtgaggggcgtggtgtggcgtgtgttggtggttttcgccacccagttagctaatgcacatgggcgtgcgatccaaagcagatactagagatccttctgcacagcccacacgtccttcaaaactctcctactgctctacgctcacttttctcctcgcccctctctcgaacacttcttgtttcacacaccgactgcgacaccgacacacgcacactaacgcactcgggagcactcttctttttctggctttttcgcgctgcgatctcgatctgttggcctactgagcattacgattaagaaacgttcgctcacaaattgatctgtttcaatttcgtgcgcggccaggcattttagaacgaaaagtctgctttcgaaaataatggcaattccttccctcgtgtttcttccgactgcggattctcttttcgcttcattttcgtcatttggggatgccaactcgcgagtggccaagtgacgcgataggcctctcgaaatgtcctaaagcatttcacgatatttacaaaaatgtatttcgatgttttcttaacaataaaaaattggtttaaatttaataagacatttgttaccttgaatatgtaagcaatatcttattgaaaggcttgcagcgacattttttatttatgcctactattcaagttataaatttaatttttataacggtatttttacaccttatcagcacatatcgataagtgtgattgggaacgacaacccatcggcacaatgttgatgcaattgttgagctagccttcataattagtcgcaatcaatcgagcagaatggcttcatccacaggtctcctggtggtgtccaacatcaagcaccttggcaaatccctgcgagccatcgagaagtacgtgaattcactgtacatccacctaaatgtggcggggtcaacgtccacgacgtcaccagttccaccgcctccggtttggggtcgtctaatctcgcagctgtacgccaacagcagcagctatgtgggcaagcagttggaccttcgcgtccttgtctctcccctacgaccaggtgccaatggatccctgaagttgcgccagcccgtcgacctaatcttctcggatgcacatcatccggagctgtgcgacaggcttcgcgcggatcttaacatcagcaagccaacaatcttcctggatgactcggtcatctcggatttaagtgcccagcaggatgacacccagccgcctaaggtgtatccctcggttgtcctgggcggaacattcgatcgcatccatctgggacacaagatattcctcacccaggctgtactgcgcacctgcaagcgtttggttgtgggcgtaaccacctccgccatgacgaagggtaagacgggcatgaattgg

SEQ ID NO: 11564 - DNA, 3938 bp, DROSOPHILA
tattttcgaaagcagacttttcgttctaaaatgcctggccgcgcacgaaattgaaacagatcaatttgtgagcgaacgtttcttaatcgtaatgctcagtaggccaacagatcgagatcgcagcgcgaaaaagccagaaaaagaagagtgctcccgagtgcgttagtgtgcgtgtgtcggtgtcgcagtcggtgtgtgaaacaagaagtgttcgagagaggggcgaggagaaaagtgagcgtagagcagtaggagagttttgaaggacgtgtgggctgtgcagaaggatctctagtatctgctttggatcgcacgcccatgtgcattagctaactgggtggcgaaaaccaccaacacacgccacaccacgcccctcacacccgttcaaaattccaccgcaaatccccagccggagcatcgccatgcccgtttcgatggccgtatgcgaaacggcgaatgtcgtcaacgcagcgctgcgcgaatcccttggcggcaactcctccgccggctcgtcgactgaccaggccaagagcggcgaggacaccaacggcagcctgcaaaatcacatcgtggccaatgccaaacgcatcctgatggccaaaatcgaatacgaggaggtgcccaactaccacgaatcggtgctggagaacctcaagtccaaatatattgtcatcaagccgggaaatccaggcgccatcaatggctttagtggcaaaaacaatacaggcaaacttgtgggcgcaaatggacatgacaataacggcgcccgcaagcaagcggagcacccgaacaatcagtcgcaccacatcaaccaccacaatcatcagcatccgacaagcaatcccaatgagctgcccaagccgaagagggtcctctatccgcgggagaacatacgcattggctggaagcagtcggagcgcaaatggcaggtgggcacgggcatgatcaatgtgggcaacacctgctacctcaactcaacgcttcaggcgctcctgcacatacccgccctggccaattggctcgtttcggagcaggcgcatctggctgactgcaatgtggccgaacctggcagcggttgcatcatttgcgccatgaccaaaacacttttggccacccaaagcaatcagtcggccgtcagacccttcctcatctactcgaagctaaagcagatctgcaaacacatggtcgttggtcgccaagaggatgcgcacgagttcctgcgcttcctggtcgaggccatggagcgggcgtatttgatgcggtttcgtaactacaaagagctggatcagttggttaaggagaccacgccgctgggacagatctttggcggctatctgcgcagcgaggtgcgctgtctgagctgcaaccatgtgtccattacgtttcagcacttccaggatctgttgctcgacatccgcaaggcagactccttggaggatgctttcgagggacacttttctcgcgaacggctagaggatatgggctacaagtgcgagggatgcaagaagaaggtatctgccacaaagcaattctctttggagcgtgccccaatcacgctttgtatacagctgaagcgattctccatgatcggcaacaaactgaccaagcagatttccttcaagtcacgcatagatttgagcaaatacgcagcccgttcacaagcagctcaggctcaaccgctcacctatcgcctggtgtcgatggtcactcacttgggggcgtcccagcactgcggtcactacacggccattggctccacggatacgggcagcttttacaacttcgacgacagctacgtgcggccaatcgcaatgcacagtgtgtgcaacacaaatgcctatataatgtttttcgaactggacctctcacaggctgccagtccggcggccaacaggcccaatggagtgcgtttgaccaacggacacagcacaacgccagtgccggcggcgactgtgtcttcgccttcaccaacgcgtttcattggtcctcaactgccggcgggtggagcaaacggttacactaatggaaatgcccagaaaaccgccatccagttcaagcaacaaaaccagcaaagtccacagaacggactccagctgggtaccggaaagtttcaggacactgcgaagcctccactggttggcgctcacgctaaaggcgaagctacttcagctcccactgcaaatggtaacaaaagttcctccccaagcagcaacagcagcagcaaccataaatcaataaaccagcaacaatatctgccaatttcctcggatgatgaagacatcgaggatgagatgaagcccagaccaacgacagcccagctaccgagcatgcccaatatgacggagaatcatacggagcctaaggcaaagtctcctgtaaagattcaagtaaagactcccgtcaaaacgccactgaaaagtcttgtgccctacgaatcagcatctgaggaggaggaggcgcctctaccgaatccccgcaagcgtccaagtggggaggattctagcgagtcggaccaagagtctggccagaccaatggtcacagtaagaccaatggcagccacaccaacggctcagcctcgtcatcggttcacgttaacaacagcaaacaaaagactgatgccatagacgagatattcaagagcctaaaaaagtccgcagacagtgatgaggacgacgatgaggaggagcccagcattcagctaacgaatggctggcacccacagaagcaatcacagtctcaaagcaaagcaccaccatcgccaaagacgccaccctcgccagcggtcatcaaatcgaaaacgggtatctggaaagttacgcgtaacgatgaggtcgatgccatcgaagatgatgttgacgtcgtggtggtggagggatcgccggtgaaaattccgacgccgaacaagaaccatcgcaatcccttctcgagtagcaagccctccacggactcgcccgcaacgccaggcgccaagcgccaaaagttgctcaacggcagtgcgctcaagtcgcaccagcagccaagggtgggcaatggctaccagagcaatgccacctcgaatgggagcaccatcaatgagctgctgaagcaatcgtatcgtggatacggctcccccgtgctcagttggaatggcaagcccgcggagctcgaaaaggagacttttgagttggtttgtgcgaaacggatagctggtcacggcagtgtggaaggcagcgatatcgtcgagggctcggttgcagtcgacgcggcagtgactagtggcagtgacagtaaagatgtggtcgtaattgcagtggcgctactggtggatgcgcgtgagcagcggcagcgggacatcgacgacgacgaagagaacgagatggatcgtggacgtcagcggaaggtgaagtccggttcggctaagggaaacaatgccagcaacagcacgcccgggtacaatccattccaggagtacgagggccagaagcgctggaacaagaacggcggaggtggaggatttccgcgattctacaatcagaactatcgccagaacttccagcagcgcaacaagttcaagttcaaccgcttcggaggaccaggcagcgccaagttccagcagcagcgagccctgcaacgacatctgtccgccggcggtggcttcagtcggcgacaaccgtcggcgcagcagcagcagcaaacctaactggatgcggataggcgagggtcaggagaaagagatgacgccgatgcgactgcggcgtgtgcatttgttattggatttcaatttcgcatgagttttgtaaacgttttttaactgctgatgatgaacatattagaaataggagtaggcgtaggactgtaagctataagctagaacataattgttgcctcccaaaatcatccccaaccttcaccgaagcacacagtcccattagaaactaaggctatcattaagtacgat

SEQ ID NO: 11565 - protein, 1085 aa, DROSOPHILA
MPVSMAVCETANVVNAALRESLGGNSSAGSSTDQAKSGEDTNGSLQNHIVANAKRILMAKIEYEEVPNYHESVLENLKSKYIVIKPGNPGAINGFSGKNNTGKLVGANGHDNNGARKQAEHPNNQSHHINHHNHQHPTSNPNELPKPKRVLYPRENIRIGWKQSERKWQVGTGMINVGNTCYLNSTLQALLHIPALANWLVSEQAHLADCNVAEPGSGCIICAMTKTLLATQSNQSAVRPFLIYSKLKQICKHMVVGRQEDAHEFLRFLVEAMERAYLMRFRNYKELDQLVKETTPLGQIFGGYLRSEVRCLSCNHVSITFQHFQDLLLDIRKADSLEDAFEGHFSRERLEDMGYKCEGCKKKVSATKQFSLERAPITLCIQLKRFSMIGNKLTKQISFKSRIDLSKYAARSQAAQAQPLTYRLVSMVTHLGASQHCGHYTAIGSTDTGSFYNFDDSYVRPIAMHSVCNTNAYIMFFELDLSQAASPAANRPNGVRLTNGHSTTPVPAATVSSPSPTRFIGPQLPAGGANGYTNGNAQKTAIQFKQQNQQSPQNGLQLGTGKFQDTAKPPLVGAHAKGEATSAPTANGNKSSSPSSNSSSNHKSINQQQYLPISSDDEDIEDEMKPRPTTAQLPSMPNMTENHTEPKAKSPVKIQVKTPVKTPLKSLVPYESASEEEEAPLPNPRKRPSGEDSSESDQESGQTNGHSKTNGSHTNGSASSSVHVNNSKQKTDAIDEIFKSLKKSADSDEDDDEEEPSIQLTNGWHPQKQSQSQSKAPPSPKTPPSPAVIKSKTGIWKVTRNDEVDAIEDDVDVVVVEGSPVKIPTPNKNHRNPFSSSKPSTDSPATPGAKRQKLLNGSALKSHQQPRVGNGYQSNATSNGSTINELLKQSYRGYGSPVLSWNGKPAELEKETFELVCAKRIAGHGSVEGSDIVEGSVAVDAAVTSGSDSKDVVVIAVALLVDAREQRQRDIDDDEENEMDRGRQRKVKSGSAKGNNASNSTPGYNPFQEYEGQKRWNKNGGGGGFPRFYNQNYRQNFQQRNKFKFNRFGGPGSAKFQQQRALQRHLSAGGGFSRRQPSAQQQQQT

SEQ ID NO: 11566 - DNA, 3933 bp, DROSOPHILA
tacggcgcaggcgcacgtagctctggaaaaaggtccaagtgggcttggcgaaggccagcaggagcagcagatgcaggcccaaaagcgaaacgtggaaggtgcggttctcgaacagatctctgctcaggaagcgatagttgaccgtccacttgtgctcgaagatgcgtcccaaatcaaagctgccccgcagatactccacaggatgggtgagcaggaaaggagcgcccagcagcagttgtatcactccgcagacagccagctgcaggatcgtccgcagaagtcccaggttggccaagtagaacagcaagagcgcaggcgcaaacagcaggatgttcatcttaacgcccaccgccaagctgaagaaggtgctacccagggtccaccttctgtccaggaacaaattgagtgcggcatagaggagcagcactgccaccggatcgttgaacagtcgcagcacgtatatcgagtggatccgatacgacgtgaaggcactgagcactagcacatacggcggcacctttctgctcttcgagtacagcctcagcaccagggccagctggagcaggtagatcccggcgaagatgtactgcgccaggcgaacgttcgttccgtgggacgtgacgtagtagagagccgagtagatgtacacgaaggcggctggatacacaagaggtcctgtgtcgcctaggaaatcgaaaatcgaagaatttcaattatcataaattagatagaaggaatgcaattagtcattgttttcattcactaagcagttatttcagtctgtttgggcctgggaaaactattatatccattgagttacacttcatatttattttaaaggcaaaactttagttaacttatttaatatacggcttttttaactttaacggtatataacgatatttcattcgctttcacgccggttggtattttcgctcgctacgcacgcggtcacattgagcaagtgcgagtgagagagagagagacagacattcgtaggacagcatggatgttacggcatgttgttgaaaagctgaaaatctgatacttttatggaaaaatgatgatttcgtgtaaaaaattattcgtgttccggcagctgccggcggtgcgccgttgcctagcggcagccgcgttctccacgccacgcgcgacctcctaccgaatcctctccagcgccgggagcggaagtacccgggcagacgcaccccaagtgcgccgcctgcacaccacgcgcgacctcctggccaaggactactacgccacgctgggcgttgccaagaacgccaacggcaaggacatcaagaaagcctactaccagctggccaagaagtaccatccggacacgaacaaggaggatccggatgcgggccgcaagttccaggaggtctccgaggcctacgaagtgctcagcgacgagcagaagcgccgtgagtacgacacctatggccagacggcggaaaacattggtcgccagggcggcggattccctggcggaggagccggtggctttggccccgagggtttctcgcagagctggcagttccgctcgagcatcgaccccgaggagctcttccgcaagatcttcggcgagggcaactttcgaacgaactcgttcgacgacttcgccgactccaagttcggattcggccaggcccaggagatggtcatggacctgacctttgcccaggcggcgcgcggcgttaacaaggatgtcaacgtcaacgtggtggaccagtgccccaagtgcgccggcaccaagtgcgagccgggcaccaagccaggtcgctgtcagtactgcaacggcaccggcttcgaaacggtgtccactgggcccttcgtaatgcgctccacttgccgctactgccagggcacgcggcagcacattaagtatccgtgcagcgagtgcgagggcaagggccgcacggtccagcgccgcaaggtcaccgtgccggtgccggctggcattgagaacgggcaaacggtgcgaatgcaggtgggcagcaaggagctgttcgtcacgttccgcgtggagcggagcgactacttccggcgcgagggcgccgatgtgcacacggacgcggccatatccctggcccaggcggtgctgggcggcactgtgcgtgtccagggcgtatacgaggatcagtggatcaacgtggagccgggcacctcgtcgcaccacaagatcatgctgcgcggcaagggtctgaaacgcgtgaatgcccacggacacggcgatcattacgtgcacgtcaagatcacggtgccatcggcaaagaagctggacaagaagcgactggctctgatcgaggcgtacgccgagctggaggaggacacccccgggcagatccacggaatcgcgaatcgcaaagacggcagtaagcaagcaacgtaaataatctcccgatctaccaatgcaatctctaaatgtaacttggagcttgaattcgtagttgaaatatacgtgcgttctatgtgcgagctttattaaatgatggcgtctttctctccccttccccatctctcgttgcagcgcaggagcgagtgaggagccaggagcgggagcagctgctaaagccagtgcagcagccgccggatcaggagcctccaagccaggaccaggagcagaaaaaagcgaaggcaaagaccagtggacggacaacgagaaaaccaaagcgaaagaaggcggcggatccggatccggacaaggcgacggcggaggcggaggcttcataagcaagatcaagtccatgttcaactgacaggcgttggcaacccgatggccgattctgtttttttagtgtctaagttaacgcacgttattgttgctaatctaagttcgggcgggaaccgggggagtgtattccaaatacgactcggttcgagatgaataaaccaaattgaccgtcagtcgggcaagttctgcgtttaagcgaggctaacttcacttgtcttaatctcacgctgctccgattttcagttgcctaaagttcgtgccgcatttgatgtcgtccaactccccaaatctctgtgtttaacctttgatggtaactgtgttcaaacatttgaaccatatgtcaaactactctcctcgattttgaaaatacttcaaactttaaagtaactgaaatatcaattttataagaattccaactaaaaaagagcataaactatatagctagttggaaataggctatccccttagtaaggtaacctaaaatatcgttataaccacatcatgcgaagaacaacaggtgcacgcatatgtttccgcaaccggaatggggtcacctgtggccaaaaataaaccaggagcggcgcagaaactcaccgcgcaacagactgtagttggtggtgccgttcaggaagccctcgcactcctgcatgtaagccacccagtcgatctctgtgtagggcacccgctggatgaccaccacgttgatgaccagctccgccaggagcacgaagaggccaactatgggcagagcggccggctccaggagcagatacttgaagaagcgcacgttgaggtacttgtccaggatggagtccaccagggtgcccgacttcttgcgccgcaccgccggacggtggctggcggcctttggcggggccatttctgtgataaccggcgaaaattaattaaaattcaacttgaaccgaaaaacaaccagggcggcactatcaaaatcagctgttgcgcctcccatcgatagcagtccaactggattttgcatgctatcgatattttcccaatttaaatttgtagttctaacagcgagcaccagtggcgtcttccgcttccggttgttgcttggttttcaagaaaagaaaatttaattttatcacgctgaaaatgcttttaaatatttgtaatttaatttttaaagtatatttgggttgctacctaaattattgtggccaaaacac

SEQ ID NO: 11567 - DNA, 1773 bp, DROSOPHILA
acagcatggatgttacggcatgttgttgaaaagctgaaaatctgatacttttatggaaaaatgatgatttcgtgtaaaaaattattcgtgttccggcagctgccggcggtgcgccgttgcctagcggcagccgcgttctccacgccacgcgcgacctcctaccgaatcctctccagcgccgggagcggaagtacccgggcagacgcaccccaagtgcgccgcctgcacaccacgcgcgacctcctggccaaggactactacgccacgctgggcgttgccaagaacgccaacggcaaggacatcaagaaagcctactaccagctggccaagaagtaccatccggacacgaacaaggaggatccggatgcgggccgcaagttccaggaggtctccgaggcctacgaagtgctcagcgacgagcagaagcgccgtgagtacgacacctatggccagacggcggaaaacattggtcgccagggcggcggattccctggcggaggagccggtggctttggccccgagggtttctcgcagagctggcagttccgctcgagcatcgaccccgaggagctcttccgcaagatcttcggcgagggcaactttcgaacgaactcgttcgacgacttcgccgactccaagttcggattcggccaggcccaggagatggtcatggacctgacctttgcccaggcggcgcgcggcgttaacaaggatgtcaacgtcaacgtggtggaccagtgccccaagtgcgccggcaccaagtgcgagccgggcaccaagccaggtcgctgtcagtactgcaacggcaccggcttcgaaacggtgtccactgggcccttcgtaatgcgctccacttgccgctactgccagggcacgcggcagcacattaagtatccgtgcagcgagtgcgagggcaagggccgcacggtccagcgccgcaaggtcaccgtgccggtgccggctggcattgagaacgggcaaacggtgcgaatgcaggtgggcagcaaggagctgttcgtcacgttccgcgtggagcggagcgactacttccggcgcgagggcgccgatgtgcacacggacgcggccatatccctggcccaggcggtgctgggcggcactgtgcgtgtccagggcgtatacgaggatcagtggatcaacgtggagccgggcacctcgtcgcaccacaagatcatgctgcgcggcaagggtctgaaacgcgtgaatgcccacggacacggcgatcattacgtgcacgtcaagatcacggtgccatcggcaaagaagctggacaagaagcgactggctctgatcgaggcgtacgccgagctggaggaggacacccccgggcagatccacggaatcgcgaatcgcaaagacggcagagcgagtgaggagccaggagcgggagcagctgctaaagccagtgcagcagccgccggatcaggagcctccaagccaggaccaggagcagaaaaaagcgaaggcaaagaccagtggacggacaacgagaaaaccaaagcgaaagaaggcggcggatccggatccggacaaggcgacggcggaggcggaggcttcataagcaagatcaagtccatgttcaactgacaggcgttggcaacccgatggccgattctgtttttttagtgtctaagttaacgcacgttattgttgctaatctaagttcgggcgggaaccgggggagtgtattccaaatacgactcggttcgagatgaataaaccaaattgaccgtcagtcgggcaagttctgcgttt

SEQ ID NO: 11568 - protein, 513 aa, DROSOPHILA
MISCKKLFVFRQLPAVRRCLAAAAFSTPRATSYRILSSAGSGSTRADAPQVRRLHTTRDLLAKDYYATLGVAKNANGKDIKKAYYQLAKKYHPDTNKEDPDAGRKFQEVSEAYEVLSDEQKRREYDTYGQTAENIGRQGGGFPGGGAGGFGPEGFSQSWQFRSSIDPEELFRKIFGEGNFRTNSFDDFADSKFGFGQAQEMVMDLTFAQAARGVNKDVNVNVVDQCPKCAGTKCEPGTKPGRCQYCNGTGFETVSTGPFVMRSTCRYCQGTRQHIKYPCSECEGKGRTVQRRKVTVPVPAGIENGQTVRMQVGSKELFVTFRVERSDYFRREGADVHTDAAISLAQAVLGGTVRVQGVYEDQWINVEPGTSSHHKIMLRGKGLKRVNAHGHGDHYVHVKITVPSAKKLDKKRLALIEAYAELEEDTPGQIHGIANRKDGRASEEPGAGAAAKASAAAAGSGASKPGPGAEKSEGKDQWTDNEKTKAKEGGGSGSGQGDGGGGGFISKIKSMFN

SEQ ID NO: 11569 - DNA, 32100 bp, DROSOPHILA
ctgctggtgctgctggctaggatgctgcggatagtccttggcgtgaccatagaaatcgtaggcgggatatgcggctagcgaggtgcgttcatcgctgatggaaatgtctggcgaggagacgcttcctccatcgctgtgatagggcgtgtcacagggcggcggcttgtgggcgtgtgttccgacgtcgatttccccattttccgaggagcgcgtttccaaatgcccgtacagacgttcgaaaaactgtcgcggcgacgagggacgttgcggcacggatagaatcgtagtgttcgctatgggatctaagctgtcactccttttgatgcccggcgagccgtcgggtgagccaatctcaactttgtgacgttgcatttcgtttgaggatgtgccgcgttagctgtccaaactaatcacttgggtaatcggcgagcgactgaagtgccacaaataattctacttccgctggtcaagcgacgcttatcctgacgtcgacgtcggcagaggaactgggtgaaaaaaaaaaacaaagcaaattacgcggcacatcagaaaattaacagcagcagcgggggcgcctaaaatgctgcttactaataataataataaaaaaaaaggacccccttcccactaaacacctgaagtgtggcctgaaacccggtttgattggctgaagtgccgtgcaattaacccctaattttacttccggccaaagtttcacttaagggtggcaagcagtgtgcctaaataagctccgcccactcttaagcaagcagtactcacgtcttcatacaagcagtgtgtgcgtacagtccctggtttagccaagtttcttacctcgccagtgctttgcgaggacaacaaccttaagagcgagatccctagaggtgggcaatcagcatttgcttcttcaatgtatttcatgcatttttcaaactaccataaacggtccgtctaaatggcaaaaagtctatataagcaaccgaatcgcgccactatctgtaattttacatagcgcgcgcgagggatcgaatcaaatcgaatcgagtcgagtcgagttcgtggattatatcagcatggataatgtgttcccaaaacttcggtgcgtaaacgtgtgctgttttgggaaagaagtatcgatgaagtgatagtgatcgaaagaacgaaaacaaaaacaaacgattacggttatgttgccaatccgtctgcgctgcgcaaccgatttgcacgtaccgttagttcgcgcagctgtcgcagccaccgaaagtgccaataaagaataataacaataaacaaagaccaacaagtggtgacgaaaataagaaaaaaaaaggtacatcccttcgattttggccaatttcgattttgtttatcgaattcccatatcccctcaaacaccacaaaatgggagcagtgcaaaacaaataaaaccagaaaaattgcagcgacttttgtttgttgttttctgtccggatattaattgaatggcttttatttggccccggcgtgcatttgtgtttgtttctctgacggctctgagctgcgtttgagcaatgcaaaaatattttgttaaaactcgtttcgtttcgtttagagcttatttggcttaagcccgcgagtgtgtgtttttcagtcgccgacttttttccatccatcaatttcggttttttgttacactgacatatgcaaattttttgaacatttttcgtgcgttttatttttttgagctcaatttataaataccttctggttgcacagaaaaatgaaattcagacatgaacctcgacttaaaaagtaatcaaactggattggaatcaattgcaaaacaatcatatttaatgaattacaaacagtaaccttaaatttatacatcaatacatcacatcattgtgctgaaagaccttaaaataaatttgcaaatatttaagcatagtgttttgagtctttagaatgtttgtatattttttgtcgtgtgtagagcctcttcggcatttcctcctccaggcgatgtttaataaagcgaaacccacatgttgttcattctgttttccatccaaaaacaaacgaaaaaaaacaataacatcagccttttcatttccattgacatttatgagcggcgctaagggtgcacgctgcctctcgctcgcacgcagaacttcctgcctctggccatcccgcttgcacatgcagaggcgtgggcggaggcattcgcgaggggcttattgtgggatttcttttgattccctaattcccaccgcgggatttctcgtgggctcgttttcattatcctgcgcatgcgcagcatattacgggaaaattgttatggaaatgaacgcggacttttatgtttgattgatagaaatgtcgcgtacttaccaattaacagcgcaacaacaacgactaacagctgttggcaatgtgtgttgtccggttaccgttagaaattcgagtgtagaatagtaatgcaagtggtagcaaacaaaatagtgacgaatgcacatgggtattagaatgctttgagacaggaaatgtttggaacccaaatagtttaagatcgatatattatatgtgtttagaaacattctacgatttgtatacctttacatttcttaagatgttgtgtttatttttattttactgcgataagaatgttaaacttgtagtattccttatattccgatatgcatttctcttgaacttgataaaaaaaaaacccgcttggaaatcggaatcgcttgctcccttgggaaagctaaaaatacttgcaaacccattccaaatctgttttatagcctttccctactgccactccaaagtgataaagattggcacacatatgcgaacttctgaatcgcaccgtactaatcgcactgtttatgctcccttatctttgcagtgccaaaaacgtctgacacactttagtgacttggacggacgatcgtttcactaattgccgacacacatcatttgcctaattggcggtggaaaagagtaacaagtgcgagacgagagcaaacgtcgagcgcaaattgaatttacggtgccccatcaaagtcaagtcggccgactccaactaatttaatgatcaaaagtaacacatttttttcgcattcggcggcagccgctgagcggtgttaattgaaagtgtcacgcttcgtcacaataataaatataattcccatcgactactggctttcgtctatgtgaagtgagtgcccgagtgaaatgcggtcggtggaagtggcccaaagcggcccatctgccatcttctggctcgtccaagtgctaatcgtgggggcggcacaggctgccacgcccttcgcgaaagagtaccgcaacgcgggactctacaatggcaacacactcgtcgatctggacggttccaccaccctggacatgggccaggagaagcccaccagcagcagcagcggtctcagtggaggcttcaagtcggagtcgtcggtggtgctgcccggcatgctgcaaaattcaggtgggttttaaattatacttaagatatatatttatatttcaaatatattaagattttgttcattatttagttattttagttgcatagcatttgatttcatgggtgctttctacttagtttctctgtttccatctgccctgctaatggactaagtgtagtcatcatctcagttcttcccagaattatacgaacacaaactcattcatgcttgccttatcagacccaaaaagagccccaaataaagcgtgtgtgctccaacgcggaaagaaggaagtgttcacttggccgccgcttcaggtatacaagcattcatatacatatgtgccggcgcttatctaaccttatcgcacaactcttcctgggacccttttgtgtccaccgatcgtgtcttcggtttgtttgcgacctgcgccttggcggcatcatatttccgaaatggggaggagggcacacaagagtggggaacagattactcgaacaagtgtatctgctgtctgccgcttgtctctgccttttgcattgtgtctgtcccggtttgagatggtcctccccaggtttttttccctggtaattcaatctcagctgcactcgagagagaaagagagctagatgagtgctgcccagctggcaaccaggatgtcaaccacagctccaggttccatatacccatccatgtacccataccaattgcaatcccaatccaatcccattcccattcccgttcccattcccgttcccgtttcgggcacgctcggcacatccgccaagcaattttcctgcctcattataacgagattaaagcgtaatcacggggagaaactgaagaagacgtgtgctggactggtagagacccagttggggtttctttatagttttaatttccattgctcatttttgggttcttcgatctttgccaaagtgcgaacttcctgtccctgtccagtgaaagggatcttcggtctcgagtgtttacctttccatactgtgtcgcctgtctttttggccaaccgaattctgtttcttcactccccttttccgcgttcggtatttcgactgatttaaatgtcatttaagccgcttaacttggcccgctgttagctgctacgtttctgatttttaagtttttacgacggcatttttaagtttaatggtagtcccattttatgagcgtgaaaatgaaagtactttcgtcaagttacactcactgtctccgtctccgtctcctttctccaaaccctatctccctgcgtcggccttttcttttggagttttgtggccctcgactcgacttatgactcgacagcaatttaggtgcttgggtgaacttaaggccgtagtatatttgtggctttcttaaatgtgtcataattaaaggcaccactttttcgtgggccgatatgctggttgggattttccataacccttggccagatttagatcagatttggatatggtcgagatctgtgggtggccacaatgcccggagtaatatcgaatttccctagctgaaaacccattaaatcttcacagtccatttcccttataatacgctattttcaggcatttcctgaattcctcgagaactgaatgggagcctaaagaccgttaaaatagttgcacgcctttgtgaatacattttaatgcatcattaatgccgtgttcttatttccctcgaccactccattcatcgcaattcctggacattggccaaaaatatggaatgcccaaggcggactacctgaatgttctgtgagctgaaagagagtttttcgttttcgggtgccgggaaccagcgtaaaaatttcagcaaagcacgcaaactttggcccagggaccagtttttggtagactgggtcttttcttggtcttggctttggctttggtgtcttggtcttggttttggttttggttttggtcttgctccgagtgctgagttcccaagttccccagtttccgagtacagtacgcaggcgcagagatcttggcaggaggctgttgtcgctgccgtttctttggcttggggtccctggcacttcaactcttcagcatgtatttagatagaccaacgtcgaaagatacaagcggcgtgtatctgtgagttcgtgttgcgctgtgtgtgctagtgcttacagccggggtcagaattatagcacaattagaagttctcaagatcaactggtaatctaaagaatccaacagaattctatactattaatataataataatatttaagatgacttttgcgtcactttatttatacatagtttattgaaatagtaaactgattgtcttctgtggcttaacagataagaaaccgtagtgagatagatacatttgccaaggccttccgagtgctattatcttgcccccagttgtgtgtgcctcggccaaacaaagccagccgacaatcgtaaaaactaaacgacgagagaatttatgaggcctcagccgtagtggagtctctacagtattcagtattctgcattcagcattcggcttcatcttgagcggtatatatggtagatcaagtgccaaagtcagagggaacgggcattcctcctcgagttagataacagtgcaccggccaggttgtgtgtcatgcaaatgcagatacagataaaaaccgaatgcagttttgcagtaagcatatatatatatataaatcaaggcagcaggtagcacagacagggcaaacgacccaaacgactctagctgaacaaaacaaaaaaaaaaaaagaaagaagaatgtgaggcgcaaagtgcgaaatatcccacagagaaggtgcatctgttagatgcattttgcgctcagcatcccgagcatcgttccctctaggctcattctgaatcacacatccctccatcggttaacgctgccacgctaatttgacgaaagcccatttcatggcatttttccagcacggccagcgatttcatgctccgaaatcggactctccgcatcgtacaggtagtttttaacacctgaaaaccgaatcgtttagtgtgcgcaagtgtctagcctccatccacgtccacatacacgtccacgtccacgtcctcggccacgttcacgtccacttccacatggtctacccacccacctcaggggcctcgtgtttacaccttttgcgaaaagtcagggaaaatgaaacggtttcttcgcattttatggcccgaacctgttgtgttgcaccctccctccctctgtgatttttcattggtttttttttttttttttgattatcccattgtttgttttaccagtcgtttgttgttgctatttatttgtttttaattttacattcaaaaagagaacaaacgcgcatacggttaatggataaattgtgcaaggcgcttgaggagtatatacatatatacgagtatattctattcgatttgtttatccaaaaggggggaaaacttttcggtgcagtgcagacacggactttctatataggcaaatttggtagatttttatctacagacagcattgtttgctgttttggccacgggacaagcggacaacccaactaacaacacaaccgaagcaaagtgcaacaatttgcggccataaaccagccacctacgttgaatttaacccagctagcaaccaacatacccctcccccccactgaaattgcattggctaacaaaagacagcactacgtaaacaggtgtctcgaaatgttttcctttctgcgcttttctctctctccccttttgtttttaatttgaagagtaaccaaaacttttttttgtttttggttttggcagcgaccaacgcatttccctcccattaaaatggggaaaaaaaaaaacaaaaatctcctcccacacattcacgcagctaagcagcaactttcgattagaaagaaagtgccaaacaaaaagtgaatgttatccaatgagtggaagacaacggaggtttaaacgaaacccaaaagtgccataaaaatatgccataaacgcaacaaaatctcagaaatcaattgtgatctagtcgcgtctctttcgcccgccttcattccgtctctttcgcccgctttcagtccgtctctttcgccacagaattccggcaaaaagggcagtgagtggaggcgatatatactcgtgacgtaggcgtttcgatccggcgccgatctcttgcgatcgtgtcgccttcaatgctaataagatttaacacagagccaaaaacttgggattgatatattctgggtaaatgaatcacactgctctcaattaatttcagattgcgaaataagatatatcattattttactgctaacttatagattgaagtgccattaactaaatatatcatattgttaacaggcaccaatttgaattcccttttggaatcattttgttcgaatccaaacactcaaaattcaatctttttttttgtgtttcaatatttagctttcgagtgtaatttgattgtgtctctgttggtttatttggctcgctgatagccgggctggctgtttgccataaacatctcgtaaattgaaaagcgaagtcattaaatttgaatctcgcggcacagcagttgaagttcatttggaaacttgacgagaatacagctgcagatgcgggcagatgcagatgcagatgcacatatatgtatgtagatgcagagcatgtgcagcctcaacgaaatataaaaaaaagaagcaacgaactaaacagaaaattaacaacattattgtgtattcattatggttcggttctgacgtcccacatgcagcagtttgtctaattgaaatagaaatctctgcctctccagccagcagttgcacagatgttttatttcaagttttgacttatgttctggcccactccatccatccctgtctgccgccctccctctctctttctttcacttgacatttgaacttcggcgtgcaaccgcaacattcaagttgcataaataacttttgttccagcgaagacgtcgctttttgtctgctgttcgctggcttgtttgtttgtttttggccttttccttttttggcttcttatacaatgacctagaaatttggctttctttttttcggcctttgtatgcacatgctcaagaagatccataaattaatggtacaacctcaagatatggttaaatgcacaaacagtgacattgctttatggtggttctcaaagcggaggtactaaatcaagagaacgaggaaatatctttggaatttgtcatcgattcaattcaattgtagatactataatctgatgcattcaaaactaatttcaacttgatctttgttttagcgcggttatattataaatgtcagcctaaacatcatattaatgataagctttattagttattcaactactttttgcggtttttaaaagtaaaatacccatgcccacccttcccaaactatccccgtttaacgttcaaaaattttctacatttattttagcaatttcgcaatcgtttaacatcgctttgacctccacccgaggcgccagccatctctttgcttttctttcgctttttttttgtgcctggcacccacacggaaatcaaagtcaaagccacaattattggctataaaaatacaagagggagaaaaattaccaatttcgcagctgaaatgcttagcagaaattgcttccgcactgagcaatttgtcacggcaacacaccttcagggatcttggatcgaagtgccgccatatgacagaataggcaggcagtgcgaattataaaccgactgatccgataaatgatcaaaaagcgcagcgccgacatcgacggcctgttgccaataaacagtcaattattgcagacagtcgagtgcataaaattaaattcgaatgggctgggggcacatccgtcagtcagtcagtcactcagtcagtcagtcagttagtaactaactcagtcagttacgcaaatctcgccaacaggcgcgacagcaattggccaacactaaaaaaatatgatcgtaaatttattgcattaattttaagtacctcgttagcgtcttattcaaactatctgtaatcagctaatatgatgctactttcccgagcagagctattggaatttgcactttctttgttaattttataataaaatttgtttgaatagcatattttttttccggtgcagcaaagatttgcattgctgctgtttactgtttgctgggctcgcttaccttgcttcgactaattcgacgacgactggctaatttatgccaatttatggcatgtggccccaccccttggggcgtctgcctgcccactttcccacccaactgtgggtcgtgagtggtgcagggccatatcttatcggccgataaggccattgttggtaagtggacaaggagatctgtggcaacacaacactgcctgttgtggtggaatcttctctaagccgcttacaaggtaatctctgcgttgtagtgatggcaatattttgatcagcatttaaatgccttcgaacgttcgcattcagaaataacccaaatatttgtggctattaaaaacttttctttcaattgaatatggctctgagcttttgcgtttgatttcgtttggcgccaatgaaaatttcatcatcggcgacatggcgacaaatgttgttggcattatttttggggattttcttttggccgctctcttcgcggcgacattaaaattagttatttaaacgactttttagttgcacaccgagaaggtcgggggtgtcccatggctgagtcataaaatcgttatttaattgccgcgtttacatgcttacacaaaagtatgcaatggcgcttcattaaaatgtagtaacatttaacatatgcgtgtgtgcagtgaattttcattgttttgctcgtatattcataaacattcctcaaaagttgatgacaaccaatggttcttgctatatgaatgtgctcactttaaatggtgtaatatttaagattgcatctatctatttgtcgcaaagctttatgtttttaatggagatttcattttttttttatggcatctgcaatacatgcctcatcaatttaaatgcaataacacttaagctatgcatttatgaaatgaattttcatcattcaattcgtagatttcgaaatatttccatgaatctgttctatctttgatatgcaaatgaaaactttccacagctttatctaatggcttatcggacttgggatcgcgttcaaagaaattcggtttcgagtggcatcgattgatattgatggggatcaagaacttatccacttgatatgtacattgttacacacttctcgctgtgttttgtcataattttaaccaatttatgcacatttttccacatgtaccgttggtcgccgaatggcttatcacgtttctaacggtacccggtctctggtactactacccaactccaagaactccccgtagtatccccgcctgcccctcgggcgcttttcttgctctttgttcgcatacgattatcgactgtcttcggagggacaggtgaacgaacctcatttctggcatgactatacgaaatgatcgatttcattgtttttcgccagctgtctatttcacaaatacaatcatttttgaaatatgcatatcacataatttatgcacgaaaacttttagctaatgaaccagactcccgaaagagttcgctttaaatggttgataattaaggcaaatttatggcaagagttccctgaaccccttccgaaatataagatcattctgaactttcaccgcagccaatttgacgtttgatgtcccatgaaaacgaatttataagcgtgccgctctctgccatcgccccatttttaccatttttccccgcccactatttatttaacaagaaacaaaagtgttaagacccgaaaagaaatgtgttcacattcaggctacaagttaattagccacagaaatagacagcgaaggagcgcgagaacagatgaaaagaaaccaatatgaaagctatagatagatagatacaagatacacgggcatccatgagatagccaaccgaccgtccatgtcaacaaacagttcgacacgctcgatcgaccattaaaattgttttgcccggcgatcggtgaagtgaatgtgaatttcatgttccattggccagaactctttcgatcccgctcaagatcggcccattcccgccatatctgtcacagatctgaaggggcctttggcaatcataaatctctcaacacctcgctgagatttgatctaaatttacgcttaataataaacgctcggttcctgccaaaagtgatgaagaaaaacaaagacacaaacacattattcgcaggtcaaagacttgtctgactaatggaccctcattcgcagcgctctctacttttaaataattgcaataaccaaggcccacattcaacttgaccaagtgcttcaaaatgagacatgaccacaacagattttgggccatagtccggtgattgatcgttcgtgcgccactctaacaaaacgagaagctcccaatccaagggatgggaaaaccacttcagtacgctcatgtttggtaggcttgtttgctgtctttctcgttttattgtctttgcgatcgttgacatttgattgcttcaccacggtcagcaatcgattgaaatcgtatacatgtgtgttgcacagtgcgtttcaaaagttgttggataagatagcatttgcagcagattataagaagttacttgatctaaaaccaagaaatataaattcaacaccttgcaattaacccacttaattagttaattggtctttcaaaaatcaccattcacaagctcataacagctgcagctaatgagcattgaaattcaatattttcgaggcgcactgttgcgttcgcgtatctgaatgtttcgatctaaatatagcgggcgccgtgacacttgactatatcttgtatcttgtatctcgaacgcttgaccatgtgcggttagtgcgaccagtttgtgggcgtgtcgtcgaacgaacgatcaatgagcgaccaagacagaggttaatgctaaggcgaccaaggctagtgcatcgtggaattatggatcaattgagtgtcgcggctttttcaggggcttttctgtttttgtagtccagtgttcacagttacataccgtatctatgccttaaaaggcggctgtctttgagcctcgtgtgtcattgccggccggaggggctgaacgcacattagcggtacagaaaggcacaaacccatcatagccatatcaaatttcgcggctaggccaagataattgattggttgagtcggtcggtcggagctgtggctatagttggaacttggctttcggctttgggtttggctcaaagtcaaagccgcacgcccgcaagtgctgacatttgttcggtgtcacgactcggcaaactggcagccagaagacaactcctggcatcttgaaggcacaaacagtttgtgttctaagtcggtcgcattgtcagttagtcagctagtcagctagtcagtctggctgttagtcactcacgaactgtggaaactttcttccgtgccgcagaatgacagcggcagaagttgcacagctcaaaggaggcccagcatccacccagatgctcatcatggtgtcattgatcccgtgccatctcttcccagttgcaacataacaggcatggagcattgttctgcaggaggcagaagtcgacgtcttcgtgggttttatcgccttttgctgatcggctgcagcttgcggtacttgctcggttcaagagtcagcactttctagccacagtggtggtcaaagaaatatctcacaggatatttttatttaccgcaaaaagttgtatgccttcaaaatcatatttaaagtgtgattagagcatcttaacagtcgcttgttatcattagtaaccacttgctgacagacattgtatctttacctttgcactactctttgcatttaagatacatctgtgtagtagagctactttcttgaccgcttctgtatgtgccacatgcagttgcagtcgcaatggcagtggcagatgcaaccaacagtaactggctgcaacatttttgcgaaaattaatttaacaagaactgacgactaattttgtgtgccgccgtgccccccaatcgcctttaagaagcccacaaaatttcattatatagaaattttcgattttgggtaaattttctttatgacttcatatggcttcggacagctgcaaagttggcggcatcgctttaatagcctcaacttttggcaacaaaatacgaaaatcgaaaaagaaaataacgaacccaaaacttgttttggccacagaaactggttctcttggccaaagaagaagtcttctgttgttattcttttttttcttttcggatttttcgtgaatttgtttctaagttgggcaaacgcgaaataatctttgggccggcggcgcaggcccagtcgaagctaagaggctaagagaagatattaactaaatgataatgcttagcaggtagttaagggcttggtccggccagaaattgcctctacgtccacgagcttaagccagcttcctccttccccgatcttctcaagcggaagttaccatttgggctttggcttctatggtactttttaactacgtgcttttgaccaagtcgctgctattacagttcgccggctttacttggcgatttccgcttctgtttccacaaaactctgattgacacagcgcaaactcattgaagcaacaagatcagaacgtgaaaatccacttggaaaaccgtcagtctgtctgtctgtctaactgacggtttgagtgctgcccccaatggaaattcattttcatcgcctcaatcaacaatttaattcaattaagttttgaaatgtttgcggcacgtcggccaaaactgcatggaaaaaataacaaacaccaatgcaaacgaaaacaaagcagcagcaaagaatgcaactgcaaggcgcaccaaatgtgtttaattatcagaaacggaattttcatgaaccaccaactaaaacaaatgccaataaaaaaatgtgcataaatttgaagacaggtctctgctgccggcagaacgtgcaattggccactatggaaaatcgtttgggaatgttggccgaaaacgttgcgctgtgctcactctggtactggctagtacgccaatcttggccagcagttcgtttttccaggcaagttcacaaggcaaattgtggttcagctgaaaggaaaaaaaaactgctacagctagtattaaacgttacattttgttattatacaaaatcttatagagtgcataaataattccaatagcgaattggcaggggaacattggtggaacaacagcatcattgacctcttaaggaatcatccataaatattgccaaatatgaacagcactcatttgcataatcgttttgccactcgagagcgggattcttttgcgttgattaatgaatgtattaatatagcgttaatgacttggaccggagacattcattccagaattagctcagattataccaatctgttgaaatctggttcctgagtgctcagtgcttcactttaagctgcttaatcccaaactagtttgattatttatgctacttgattatttacgcgggtatacgttttaatttcgccaactgtactcggcggaagctagcggaatctctgccgggacctggctggataagccaaggcagattgagatacagatatatgtatctggtatgtgaaaactaatgttaaacacttgccgcatgaccttgaacggcagacggacggcggaatactctccgtttcctccataaattttggtcagttttgtaatattttggccataaacaaaaagtactaaaaaatggtttctcttcgccgtgtaaatgtatatattcctttgtttcgaccaaaagtaattaaaagtctcattgagagcctgaataaatcaatttcgcttggcttcacacttagagagaagggagcagaaccagcgtagaatgcaatgccaaaggcagcgatttgcaataatgctgatgatatgatgatatcatatgcgggaggagtgtttctgcttcttggcaattagccgatctgggtgttttagcattcactgggtagtcaagctgcctattacatatgtacatatgtatgtatgtatgtatgtagaaccccgcctgccgattgcaaatgcgatgactttgggggccgggcgggcttcagacgatcttatataaccagctgaatcgtgactaatggcaacagctttgcgtttgctaatatgcatggcggcttatcactcacttctacttctgagtatctcatgcaaaagggggtcagcaaaatggatactaagcccatttgaaatattagatactctacaaccatttctcgttaggattaagattgttttattcttacatacattatcttaacaaccttaactacactcagcttatctattgttgttacaagtcttagcattgacctgaatgcaaaaccatttatagatctttctgtgtaattgcacttttgataacagagatgcttctaagcattatcttttattgatatttaatcacatcattgagctaagtaacaaagtcgacaggtcaatggaattaactactaaaagataataatattgaatgacgaaatagttttcaggaacttttaatttgtcatcagatctttagacactcatgaaatcagaagcgtgagagagcattgaacctgtaaacttatgttgtatttctacatttttatgacttttggaagtttccatttgaagaatgttgaatagtttttacacatgcccagcgtaacaagtggaattttaagtatgggagaagaaaagcaatgggaaaggtgtctggaaaataattatataataaaaagtatctctgaggtgtatatacattaatttaaatgccatttaaaacaaggcaaacacgttgaatcatcgccattaaaacccatgatgacaatgagaaaactaataaaacttccccgaaagattctcattatcttagctttaaaattatattctaccgctatgctttgggattcatactgaatacgatttgtagtagctggtgaactagctggtttaattgattaataatgaacatttttacacaatttattcacgcatgattccatgatttgatgggccagttgaacccaagttcaagttcacttggcacagttggcgacaggaataaataaatataattaaatattattatgtcacgcaatgtttacgagtgtttgtcggctcattgcgcaatttaagcgaacgcttcgatttctatacacacaatcgatgaaaatccgaaattgacgtaatgcgtttttgattgaacattttggggcacgtttcaataccgattggggggcgccgcataagttgccaaatcaaaactacgaacagtttgtgaatgaatagctttaaattggcgtgttaatgacaacaacaacaacaacaacaacaacaacaacagcagcagcagcaaaactgtaaacttaatttttcaacaatatttttcgcaatacggtttggttatttcagccgattttgccatcgcaaaagtcagcgcgcgcttgaccccaaaaatgaaacttttaaattgatttttattatttcttcaacttgttgaactcaatcaattagccagagataactcgatgtgggtgtcagcaatggcaaattgtcgccgaacgagaattgtttgaaatttttcatcgctgacctttgctcttcaaatctagtatatgcttttcagccagcttttctgcttccttcataaaaactaatgtttatctttctttctctcttgcaggtaaataaacattttccacatgaagttactcgccataatagcatgcacacttatagccacaaggaaaagttgaaaagctgaaaagactgaataattattcattagccaagtgccaaaagcgtattcaaatgaagttgcccatgcgaaaagccaaaaccgaaacatgtgtcagccgtgtcaatgcgtttggcccaaaccgaaaagccaaagtcgcggctcgagtgcatttgtgctcttttggccaaatgcggttttttttttcgttttttcttaaacggcggctccaagttgcttaggatgattttcgccttttacctggcaaacgctggcaaatttgccggcggaaatttcataatcatggtaaaatgaaaatgttacattttatgaaaatgtattattatgtccgtcataaaaatgtcattgaatgacacttgcgcttgtccgctgcactccaaaaaccacctccacggaatattttgacagcagcaatttcccccggaaaatacaaataaagccccccgcttcctctttggatttcccaacattgccacagccctctgctaatttttgttgattcaagcaacttgcattttattttcaattcggtcgcggcgccaacgcagttacctacattcatatatacgtagatagagaaaccaacaaattaataatagagaaaatcaacgaaaattgaattaagtaatttttttggtttctgggtgaactgcaatcgacgtgcgatcgcaattattgccacgatttgcggccatttccgcttggctgctgccactgtgcatgtgccacttattgtgggctgcaaaacgaggggattgggtagcggaaataccttccagttaaacagtggggccaatctctaaaatggaagtgcttaattataattttggataaattgcttataaatgggaagacgaataagatgatcacacccaaagaaataatttggaattacaattattcttgagcttatattaatttttaaaaaattcataaatttatacatttaaaaagttgatttttagccaaatctacttaaagtgtttttgaatccgtatagtttttaatgatgtttgttgcagactctacttaacactgtggataacagtctacgtagtgacaaagcgcaccagctagacatcttaaaaatgaaatatcacttaagacacattttgtttatccattccaatgtttccattgtcgttgggcatttaatcaaaaagtgcaacatttgcttcgcccatggtgcatttgaactttttgctgggcaccccgttcactttataagctcgatttcttcgctttccgtacttagcgtactttgggggcctttggttctttatttcaacagtgctgcggtctctttttgtttttgggtaattaaaagcagcgttcaaagtgcaacggctgtgggttgcatttgcatagacatgtgttcaaacatttgcgttgcgctttcttggctgacaagtgttgctgttgctttgctgcggcttttcgagtcgcgtgggcgtttcaatttaaacaaaatttccagtctacgggccacggtttaatggcattaacaatatagacaagacacgcccaagacaccaagtggctgactgagtgacctactgcactcaaacgatcggcgacatgttgcagtcacagcagcgacaacaacgtgtacaacatgtttctcggctgaaacaaattctgacacccaaatttgctacgcattttcagggagtcattaattagtcaaagttggaaagttttcatacactcttgttttttcgatatatatacatttattttggtgaaagtttcgcttctgaggagatgggaattgaattgagttcgggtcaggcctagattcatttttcataattacaaaatcgaatcgtacattaccttgagctcaaactgccaaatggcaacggaatggaatggaaaatgttgatgcatctctcgagtatttttcatattcaatgctctgaagagctttcaagcctttgtggaccatatttttgtgagatgtgatgccctggaaaaagttaagtgcgtgctgctggggaatgatgattttgtaatcatgttcttgtgcctaaataacttgacgaactgcaatgctagttaaatattttattttttattttatactttttactttgtcattgtagtttattaaacgaaacattgggtatcttccattcgatacacccttttttcccgacagcattcctttactcattttctttgtctttttctcaaaatgcacttcaagctgcaagttttgaaggctcaagtggcactggagttgtcagctgttgttgccgcattgtcgctgtgtggctttaaatgcagctgcggtttcttggaggtggcccgatccggcttggcctgctccgctctgctccaatccatctatccgaatccgagcgggctctcgagccattagaagcgcatgtctgtggccgtgtcgacaacaatcaattgccggtgagcgcattttattggcgtcatcaaattggctttccatggaaatccgcattgccggagcgtgcaagccatcgactttcccaatagaacctcccaagccaaaatggtcatcatcataatcgtgatggccagccagggcgatgatcatctgggacatggccgatgagatgctccgattgttgtccgaaagccataaatacgagctgacattgcttggcatcttttagtggcaatgcagctcggctgggctgcccgcattctgtggccaggagttttcatctgtaaaagagtacccaactcccagagatgtgagtatgtgagtcgagtcgaaaaggcagtattaattgttcaaacattactcgaacacacgagcgcacacactcgcgcacacctttcaaggaagcattttccgagcttttcacatatgtgtgcatgcaatgtgcgcctgcttcattttcctttatttgcacgatttttgccatatttctctccacattggagcacgatcctcggcgcggaccgccctctttcccccaaaatggtggcgacattgtgacgtcgtcgtgttcgctggcagattatgatcaacatatatacatatatatatatttgtttgtaagtacgaacatcttgtgtctttgctgtaaccatgacagcgaaatattttctgtttgcgccgagctgacatgtgtgaaaatatttattttccatctgctcatgcgggccagcaatgggaatgcatttactgaggagggagggaaattgtctaaagctctcgatgcaaccaaattcggaatcggaacaaacaaatctcagtggatgggcttttgtgggttctgaagtgcatttgggcaagacctcaaatggcctgtacggtttcaaagccatcgaatcaattgaagaggcttttctcaagtgaagctttaaagagctctgtgaactagattttttacaagctcgaattgggatcaataaatattagaggaatttaagtaggcaacagtcggagtcaactaacttggcatgatcaatgatcataaagtaatacactctgctaaagaattattaaataaataaaactttcgtttagggatcatttcgatctgtatcagacttactcattgccgcttaaactctggcatttaatatttcgaagtttagaaaacataattgaatatcgtgtccaaattggactttgtttgattttcagactgcagtctttgcactgccattaagccaagttctttggatagaggaggggctctgcgttcccatgttgcagcataattatgctgctgttgcaagctgcaggttcttatagaggcggttttttgttacccgatttttatttattttgtctggctctttggctgtttagctgctcattcgtctttttttgtctgtctgttggtttcttgtctgtgcggaattcggtcaagtactcttggctggttttgttcgatttgatttgtgtgacatgtggaagctgtcggctgccgcattatattgacaccttatagggcgtgaaaattcaaagccccctcttcgatgattatgcatgagtggaattcacaaaatatacaaaaatataaaaaaaaaaccatgtgtggtaaatgttgctttctacgcatttgttacactgcaaagtagcgcctatcatttgctcggaaatttaattatttcgcctgtcaggcggcaaagtcccccccgaaaaaaaagaaagaaacataaacgtaaagcattttttaatgagccgctaccgaccttaaaaagaaagtcaggcgacatgtctgggctaccttggataagtttggacttcgtgccaacatgtttctgctgtttgtattgtactccgtattttgtattttttgtattttctgaggtctccccctggagtcccttgttcgatgactctgctcatttgtggatggatctcttgtcggcccagggttttttcattcgcattttttttttttttttcaaaaagatacatacggaagccgtcgctgtcgaagttgttacactcatttttttggtgaaagaaaacctccagctaccgtttgtcaaacaatttctatggccgcagcaaagaaaggataaccatcataattgattgaaccaagttttgtgagcgcaaacaatggcaaaccttggctggtgtataaatcaacctcatatcagcacttcttcatcagctggtgctgcttccttacaaaataactaattatatttcgcacacaagtatgtaaatagaccccctcccccttgggttaatattcgaattcggccagctttcatttcgccggtgtgcaatttattttttggctaattgaacgactcgctgacattatcattggccactttccccgccaaactgtgaacagcgaagctaccgaacagccaacgggctgtcaacttcattagatttgattgcgacgagaaatatcatggaaaacattaaacgcctctgaataaattcgaattaattgataaacacactgaaaccggaataaagagagaaataaaactatcggccaaagaggcagtcagcgtttagctggccaatttgcaggccaaaaactgcaaccgtttggaaaacaaaaaagtcaaaaataaaacgcaagttggtggctgcgcatgcgtcgacggattgcgcaagtccactcggtggtgcagtggtgcagtgtggtgctgcagtggctgcaaccagttggcagagttttgcgtggcgtgtgtttaagttttgagcagattttgtcgcatttttttctcttcgccgtgcaggcaggtatttgttttcacaactcccctcaactgtccctcttttcggcaacttggctccatccaatgactctatttgatgtagaccgactaactggctggccggcactttgaaccatttgaacttttggcttttgtctgatttcggtatgggtttgggtatctgtttctgtttcggcattgcttgccccattcacccaccaccccatggggcatgttttatttgatatttcttttttccacttaccaaatgctacgacatttcgtcatgctaatcagcatgaagtcactcgctggctaattggcttagacgggccaactggctaactggctgctttggatatggcttacgatttgtgagtgtgcgtggctatcagattacttgacatattgcaaaattagatttatatatgtacggtcagatgggctgaggaatggggaaacgtacgctagagtgatgcgggctcgttgcagctgacaaataatataatgcggttatccaatggaacttgatttagcccagagcaagttttactttctacaaaaccaaccctttgaataaaataccttgaagatcagtgtactttctgccatttcttgtttatcataatcacttaagaagactaaatggcttcaaaaggtgctttaatgatcgtctctaatgagcaaagtacccattatacataataaaatatcccagggctaaggctataaattgaattaaggccgcttagggccaattttactaatgatgcagaaatatctaaagcttcaaagattgattctctgtttagtactatttgcatccggttgtaacatacttggatactggtttgtttttatgggttataaataaataataaattggatgttaaaactttattttcataatagagctgcttatatgtatgttcttttttttttggcgcgacagcctataacatatatggctatctgatcttaaaacggtaatgtaattgtaattgtgatttgattgagtggaggattagctacgcaaaatatttcctacaaagattgtaactgttctcgatcgagataccgccccatttcctccccattctgattgagctgattgaatttcgatgtagtttacacaatcaagtacaatgccaaagtcaagttgcttattattaccccatttgcatatactaatttatttatttacttgtctgtctgcctatcggtactgtatctttttcttatgcaaatgcaggtgatgtgtgtgtgtgtgtctgtgtatctggaaattatgcaaatgccagtgggccgattgcgccttttgtgacgtgcaagccaatttaatttgtgacatttgcttagacaattttctctataagaatttcaaacttacttggactgtgagtgtgcaagtgttcctccacatccctccatctcagcatatacatatgtatgtacatatatatatccaattcgctcaagattttccgctgcgtgtgtgggcctggttaccccaaggaactagcgactacatgaaacaattaaactcaacatgcatttatgtcaagttattcgcgctgcgccggcaattagagagcaaacgaactcgaagtgggcaaaaagctgatcactgggcagtaaattaagccgcacttccactaccacatccatatggttacggccacagtccgacagctgcagttgtaaatttgatttttatggcctgaaacatgttgccaattggcagccaactggcctggcctggccagtccgaaaagagcctggaaaattgcgagaaaaaatcagttttcccgatatctgtcaccagtcatcgaaatggaaaccttgccgacttttgaggtgttaatttggccacatgccgaaagctttggccataaattcaagtcgtgttcacgtcgcgtgcaattagccggtccaaaatcgttgcgtttccgattcttgatctatggaagctgatgaagaatctttggtatggattgtgagaggttgttattactaaatttggatttaagattagctgttagctgtttcaaatcttattcttatagcttattcctataagtatacataactcattttgaacacgtaatagtagtggacaaactttgtttggtcagctgaatgttaattgctgctcgaacagccaaagtcaaaataaagaaataataaaaatcaaattcgaaaatacccacagtctgagtcaaagcatctgactgaatcccagtcgaagtctttttctttttgtccagcaagtaaatcgtgacaatcatgacaaaaatcgaacggatgtttgaaacgagcaaatgcaaaaagcctttttgctttgtttggctgatttttggtttggcaatttatcacaaaacagcgaacaaaatctaaagaaaataaacgatttcaagactataatttttgagacagccaacaatgatacataataaattgtcatttgacgtgtttgaaatgtattggcaattaaaaacgcaattgaggcgaatggagtgagttgaaagggcgggacagatccggcgctccttgctgcagtgaatccaactgggtatatttcgtatataaatatgagtagtagcaatttttggagttcatgaaccaaactctgggtgtgtggagctgggtcatgatactcgcgaatcaaagcaaatcaaatcaaaggcaaggcaactcaagtcaacaatgcactaaagtttttcgctgatattcgagttgatttaaaacaaaaacgatggttataaacaaagccataaaactccaacgaattcttagcaatttgtttatatctcttctttttttttaatttgcttatttgacacccaatttccatagaagaacacaaacgcttcttttgcttaatatttttttgctctcatattttccacaaaaatgctgattaaaggtctttgttctgtcgattttgttgcttttgctgcccgttgtcccaggtccgcccaatctcaatttattttgccttattttttattttggccccttatttcggtttttttttgtgagttgcatgtcttggggtctgcagttgagtgcagtttgcttagggcgtacttaagtgccgttattttaataaacgccgcttgcgcatgcgcagcctcagttggccctgtttttttccgggtttttttggtctcatttttttttttgtttgtttggcccatcatactttcttcacataaaagaaattgaattactgctgatggcaaaaagctaatttcagttgcttaagcaaaatgtcggaatgtgcgaggggtgggtgggtgtaagtgtctcataaagtatgccatttgtttttcgtaatatttatttactctggccattgcatagaggcattgtttgtttattttcgctgcgttctgtttgacgctttttgcataaacatttatgcaaatgtcaaatgcctaattgacagacaagagtgccaagtgcttgccgcgccttttcccttaaaaaaatgtatgagcctgtattgagtttttgaatgtctaccgactatctaatatctagggtttctacgatttggattagatatttcgtgcttaaacgtggtttttctaatcgaactcttgttatagaattcaagatgttaaaatgtttcatatatatgttgagtccacgaatgattctatcactccaaatagctcatacccttgagttcatccagtaccgcgtataaaatccatgacagtgaccaggcattgtctatgctggcggcagcaaattacaatttacgatcaacgatcagcgaatcgagcgacagctccacattttgtcagctccacattctgtcggcggaaacctctgatttggaacgaccttgagccttttgtgcggcccaatggagccggagaacccaccctgcactccactcccctcgcttgatactcaattatctagatctacgcgttataaagtgatctaatgaatttactttatgcgtgtttcatttgatgttgattgtccgataaacattttatttcgctttttatggccctagctggctgctggctgctggcgtctgtcttgtttgttttgagtgaaagtaatttgtcgattatatgttttttatttgtgctgtttttggaggctgtgtctatatctactgcgagtagatggctgacacgcctagatacttggcacgtcatgtgctaagagctcaaaatccaagagctcgtccacagattctctgactcatccaaagaaagtttaaacaatgcctttcggcctgttaattctttgcctttcccaaacaccagaaactgatgatcatgatcatggtgatggacgtaaatatagttgtagtcatcatcggagttttatggttgctcgaatgcctacaaccacttatttagtcgatcattttgcagcaggtgaggagaaatttaagtttgggcgtggtcgaagatgggctggtcctgaattataaatgtcgaatttgatgagattgtttaatcatggcataatttaagaccgaacttcgaatggcggcgactaaaaatcgattgtattgagatttaccgagatttatgcggcaaataggcacatctgccttctctatctttgatctgatctcctcgagaattgcttgaactcaactcatagcaatggacaaattgatttgccatatatgggctgtatcattggggtctatccacgggcccaaccagtcgatatcattatttatatcgcttcaagatcacagcagtctgcaattccagaacatttacatgatcacctgaagaagatgcacgcccatcgaattggaattgtaagtcggcgacgacgacaggcggactaaaggcaatcatccatttaataaccaattatcattgatcaactgcacgcccagtccccagagacccgagctggaataccaaaagacagaacactggccaactgaccactgagcaatatcaattacgaattacatctgattatccgcctctgcctgggaattggccatttccattgccaatgccattgccattgctattgccattgccatggtcgcgatcatgggcacagctctcaggattgaagatgccagattcaagattcaagatccatgccagatctggggtatgggagtgcagttccaactcccgcctgggggatgtgtgtgtctgattagcgcataaacaagttaatgccattgatgatgacgatgctgaaccacctggacagacgccaagtgcattgcaatgggccgaccgacgggatctggatgcgtacgtggtgcgatgttattgttttccttggcaatccagtatcaagatatattgggcaggggctccttcagataagacgcaacttctggcctgtttgggagtcgcggtgcgtctcctcgtcttcgtcgtcgttgtcgtggtcggttgacaacagaaactggcggcggcttggcaagcttttgatcttgacgaagttttagccgccgaagccgccgctggcatcagcctgtgctggtattatcatgttgaactttcccagttttcgtcgtcttcctagaatatgtatatgtatctcctcctctgtttgcccaacacttttttcagggcggacagggggtggtgatatgctaatgttgtttgggtttgggcagccaaaagtcaaacactgtttgttgacgttaccttgaattcgtagggaaacaagcgacggcacaaaagccccagcagagctatgcgaagatctatggcaaacaaagatgtttaagatatgtcatgtgttcagagcggacggatcttgacatcatagttagagttcaattgctctggcttcgctagggatcgtcgtcttattgactggcataaattgcagttcatgagaatgtagaatatgtgttctattccttggctttatgaataccaattcattggggaaatttatggaatataaccagactctaatcttagaaatgtttgcttagtgtagtttgggaattaccctcccgaaaagtctgggaatgatttaattcgtcggcattagcgtggacaattgcctgtgggagtgctgtgacttgtgtgcttctatgcaaatgaggggacaattatgctgatcagcgctaattgagggagccataatgacccacagagtgactaacccagttccctttgcttcgttctcttccccaggctgcccgctgacgacgagttcccactgcctgcgctgcaacaaggtgggctgcatcaagtgcccaatgtacctggtgacggacacgaggcagtgcgtggatcagtgccccgccggctacttggaccagtggtccgcccacacggagttcatgggtcgggtgtgtgtacccaccggctattctgggccactgatggccgcactggccggacttctcggtggcttcctcgtttgcctgtcccttctggctgtcgccgtgatgctggtcaagaggaagaggcggcgaaagtccatcaaacagaagctcatcaacgagaacaccatggatcgggcggacttcatgaggcagctaaacgagatgcgtccgaatgcggagtactttctggccatgctgaacgatacccggcggcagatcaggaagctctatttgtcgggtgaagtggcggctgccaactcgtacaggcccatcgtccgggatctggcaaagctgctgattctgctaaacaggcccattgaactgattcccgccccgccgccagattggtccaggctttatgcctggtcggagcaggccctggagcgttacaagccgcaggtgggccagcttatcgacttctttcaggcctcacacggtcacagtgctggccaccacgaggtgctctacgctgcgccgaacaagaagaagcaactgcagcagcccagcatcttccggcaacaggtgacgcccacggcgacgccgcagggagtgggcgaactgatggccggcgatcggagcagcagtgcctcggcgcagcagaagctacacctgtttggctcgctgatcagcctgcacgagttcgaggagccgcgggcttcggatcctttcggcagcagtttcaacacgctgaagagcggcaatctcatctctgatctcaacgccagctcgctgtggctggaggacgagttctacaagctgggctttcgaccgcaggacgagatcaccacggagctgtaaccgcatcacaaaactcatactcaaaacttaatgcaaactaagtattaccccggctggcggcgctagccgttcgagtctagcgccagttcagctgggggaatggagcatttgcgtgcacattccgacaggccatcatcgacttcgacaagctaactgggaggccgtttagccggagccgctaaatgcccacgcttagagcttagttagatcagttaagcaagcaaactagtcacgtaaaatcacaaacaaaaccatcaacacacaacgatgccgaggagaaggagctaatgcaaatgcaaatggaaatcgcgtggaaatgaatttagttttatggattttacaaaaatcgcaacaatcatgtaacgaacaatattcaatatacacactatagaaatactattcagataataactaagatgattagcagtataaacgcgatacttatagctatagcttatgtagacagagattataaaccttagcgaatacgaaatggataataaaatcgtgtgccttaggattgtaaaatatgtaacaatttgtattattaaccaggcgccgtcatccgaccaagtcagccaacgctaaggctcctcgtacttccagagtatgtcgggttcctccttgagcttcagctcgccatgtcacgtgtcttctgtaattgtttccgttgcggctacgcgctcgggcgccgttttcccctcgctgaccagcgtggatagctcattcgcatcatagccgatcaatagcttcaaatcgcagtcaaatttgtatgcgaatcgcttgccggacaccttggagatcatatccccatcgtaatagtagcggagagcccttgatagcttttcgtagttcatagcgggtttgtttttcttctcgccccaaaggcgtgccactcgatccgggtcagtgagcttaaattctccctcggtgcccacccactcaataacgtccgtgtgctcgcagtcggtgagtatttcgagtaggaactgccatagctgcacttgtccattattcccggaaccgatggtagtgtagtttgatggattcatggatgacgtagtactttcaacggctgtgaacgaagtagatattgttagctcatgctttggtgtaacattcacacgtctacttacaatcagagctcttgactgactgataggatttccgcataatccgctgttcaagcgaaaggctgccccctgaattggtcgatatggaattggccgacatgattcttggttgcttgggcttacgctgctcctccgctcgtttgtgcactacggacacgaaattacattcttttagcagctggaggtgggtccagaagatgttgcctggatcacggggcagcttctgattgaattcctcgtgcgtcattgcgcagagttcctggccattcatttgccagtcgctcatgttgatgccaactagttcgaactgcttgacggcccactccagccagtacgtcacgtgtgcgtgtgtccattcgttggccgcctcgggtatcttcaggcgtatttgttctcgcttaaacttgctgtccaggacccaattcaagactggcttgacatccttgccctcgacggattcctcttcggagtcttccttgtgcatgcgcttgagtggggttttgatggggctttcgctggaggaactcttctggctggccgtttccggcggcgagagctggcccaccacctcctcggccaaggcagccagtgcggcctccgtgggcttcaggacgtcggcgatgttaatgcgcttgcgaatagtttgtatctgcacgttgatctggaccaggccttctcccttgacgcattggtccacgagattcttgtgcgattccagctgcaggagagtgggggcttaggtaaacattttattacgccgcagatagactcacctcctgcgcgtcctgcagccaaaacgtgtagtaattcaggcacactcctatcttttgctcaacaagtgatctgtgggtagaaatgagggttatttgcatgactaatgggggccagtcttcgccagactcacttgagcatgctgagcggctcccggatgtccatgtgcacgatgatgatgtcgtccggctccgcctccgtctccacatcgatgctatcctcgaacatttcgctggcaatcacttcttctgcaaattgtttacaattaataattcggtgtaacaacaggtgcgtcccaattgggaaatggcatcattccacttacccagggcaccgccaacgctgaggcggcgtattagctcgtccgacaagtcattgctgctgttcatcgcggcttaaaatcgcaaataactgcctatattaacaaaatgtttttaacaaatttgtctcgtggatttattg

SEQ ID NO: 11570 - DNA, 3284 bp, DROSOPHILA
aattttacatagcgcgcgcgagggatcgaatcaaatcgaatcgagtcgagtcgagttcgtggattatatcagcatggataatgtgttcccaaaacttcggtgcgtaaacgtgtgctgttttgggaaagaagtatcgatgaagtgatagtgatcgaaagaacgaaaacaaaaacaaacgattacggttatgttgccaatccgtctgcgctgcgcaaccgatttgcacgtaccgttagttcgcgcagctgtcgcagccaccgaaagtgccaataaagaataataacaataaacaaagaccaacaagtggtgacgaaaataagaaaaaaaaatgccaaaaacgtctgacacactttagtgacttggacggacgatcgtttcactaattgccgacacacatcatttgcctaattggcggtggaaaagagtaacaagtgcgagacgagagcaaacgtcgagcgcaaattgaatttacggtgccccatcaaagtcaagtcggccgactccaactaatttaatgatcaaaagtaacacatttttttcgcattcggcggcagccgctgagcggtgttaattgaaagtgtcacgcttcgtcacaataataaatataattcccatcgactactggctttcgtctatgtgaagtgagtgcccgagtgaaatgcggtcggtggaagtggcccaaagcggcccatctgccatcttctggctcgtccaagtgctaatcgtgggggcggcacaggctgccacgcccttcgcgaaagagtaccgcaacgcgggactctacaatggcaacacactcgtcgatctggacggttccaccaccctggacatgggccaggagaagcccaccagcagcagcagcggtctcagtggaggcttcaagtcggagtcgtcggtggtgctgcccggcatgctgcaaaattcaggctgcccgctgacgacgagttcccactgcctgcgctgcaacaaggtgggctgcatcaagtgcccaatgtacctggtgacggacacgaggcagtgcgtggatcagtgccccgccggctacttggaccagtggtccgcccacacggagttcatgggtcgggtgtgtgtacccaccggctattctgggccactgatggccgcactggccggacttctcggtggcttcctcgtttgcctgtcccttctggctgtcgccgtgatgctggtcaagaggaagaggcggcgaaagtccatcaaacagaagctcatcaacgagaacaccatggatcgggcggacttcatgaggcagctaaacgagatgcgtccgaatgcggagtactttctggccatgctgaacgatacccggcggcagatcaggaagctctatttgtcgggtgaagtggcggctgccaactcgtacaggcccatcgtccgggatctggcaaagctgctgattctgctaaacaggcccattgaactgattcccgccccgccgccagattggtccaggctttatgcctggtcggagcaggccctggagcgttacaagccgcaggtgggccagcttatcgacttctttcaggcctcacacggtcacagtgctggccaccacgaggtgctctacgctgcgccgaacaagaagaagcaactgcagcagcccagcatcttccggcaacaggtgacgcccacggcgacgccgcagggagtgggcgaactgatggccggcgatcggagcagcagtgcctcggcgcagcagaagctacacctgtttggctcgctgatcagcctgcacgagttcgaggagccgcgggcttcggatcctttcggcagcagtttcaacacgctgaagagcggcaatctcatctctgatctcaacgccagctcgctgtggctggaggacgagttctacaagctgggctttcgaccgcaggacgagatcaccacggagctgtaaccgcatcacaaaactcatactcaaaacttaatgcaaactaagtattaccccggctggcggcgctagccgttcgagtctagcgccagttcagctgggggaatggagcatttgcgtgcacattccgacaggccatcatcgacttcgacaagctaactgggaggccgtttagccggagccgctaaatgcccacgcttagagcttagttagatcagttaagcaagcaaactagtcacgtaaaatcacaaacaaaaccatcaacacacaacgatgccgaggagaaggagctaatgcaaatgcaaatggaaatcgcgtggaaatgaatttagttttatggattttacaaaaatcgcaacaatcatgtaacgaacaatattcaatatacacactatagaaatactattcagataataactaagatgattagcagtataaacgcgatacttatagctatagcttatgtagacagagattataaaccttagcgaatacgaaatggataataaaatcgtgtgccttaggattgtaaaatatgtaacaatttgtattattaaccaggcgccgtcatccgaccaagtcagccaacgctaaggctcctcgtacttccagagtatgtcgggttcctccttgagcttcagctcgccatgtcacgtgtcttctgtaattgtttccgttgcggctacgcgctcgggcgccgttttcccctcgctgaccagcgtggatagctcattcgcatcatagccgatcaatagcttcaaatcgcagtcaaatttgtatgcgaatcgcttgccggacaccttggagatcatatccccatcgtaatagtagcggagagcccttgatagcttttcgtagttcatagcgggtttgtttttcttctcgccccaaaggcgtgccactcgatccgggtcagtgagcttaaattctccctcggtgcccacccactcaataacgtccgtgtgctcgcagtcggtgagtatttcgagtaggaactgccatagctgcacttgtccattattcccggaaccgatggtagtgtagtttgatggattcatggatgacgtagtactttcaacggctgtgaacgaagtagatattgttagctcatgctttggtgtaacattcacacgtctacttacaatcagagctcttgactgactgataggatttccgcataatccgctgttcaagcgaaaggctgccccctgaattggtcgatatggaattggccgacatgattcttggttgcttgggcttacgctgctcctccgctcgtttgtgcactacggacacgaaattacattcttttagcagctggaggtgggtccagaagatgttgcctggatcacggggcagcttctgattgaat

SEQ ID NO: 11571 - protein, 419 aa, DROSOPHILA
MRSVEVAQSGPSAIFWLVQVLIVGAAQAATPFAKEYRNAGLYNGNTLVDLDGSTTLDMGQEKPTSSSSGLSGGFKSESSVVLPGMLQNSGCPLTTSSHCLRCNKVGCIKCPMYLVTDTRQCVDQCPAGYLDQWSAHTEFMGRVCVPTGYSGPLMAALAGLLGGFLVCLSLLAVAVMLVKRKRRRKSIKQKLINENTMDRADFMRQLNEMRPNAEYFLAMLNDTRRQIRKLYLSGEVAAANSYRPIVRDLAKLLILLNRPIELIPAPPPDWSRLYAWSEQALERYKPQVGQLIDFFQASHGHSAGHHEVLYAAPNKKKQLQQPSIFRQQVTPTATPQGVGELMAGDRSSSASAQQKLHLFGSLISLHEFEEPRASDPFGSSFNTLKSGNLISDLNASSLWLEDEFYKLGFRPQDEITTEL

SEQ ID NO: 11572 - DNA, 9676 bp, DROSOPHILA
ccgtggtcccctggtggtctacgacaaggacgagggtctgcgcaaggccttccgcaacatccccggcattgagaccatcaacgtggacaagctcaatctgctgaagctggcccccggcggtcatgtcggtcgctttgtcatctggaccgagtcggctttcgcccgcctgaacgatctgttcggcacctggaagaagccgtccaccttgaagaagggctacaacctgccccagcccaagatggccaacaccgatctgtcgcgtctgctcaagtctgaggagatccgcaaggtgttgcgcgatccccgcaagcgtgtgttccgcagcgtgcgccgcctgaaccccctgaccaacgtgcgccagctgatcaagcttaacccctatgccgaggtcctcaagcgtcgtgccgccctcgccgccgagaagcgcaccgtggccaaggtgctggccaaggccaagaagcagaacgtcgagctggccaagtcgcacttcgccaatgtggccaccaaggctgcggccaatcgcgccaagctgctggccgcccgcaagaagaaggtcgccgccaagaagccagcggccaagaagtaaacttactttcccccgagtagagctgacacacttttatattataataaaccacaaaagttgtatgaattttattcataatacatagagtgcgcgacagtaatgctcattaaactcttagtcttaggcacatcatttagttggctctctttttggtcgtcttgcctgccgcgctgagcgatcccatcccttatcattctcccgctcgcgctgataacagcggcatggcatctgcatctgtatctgtggcggcggctgtagctttcgttatcgtccgtcgtgctgccgccgatggcgatgccgatcttggtcttcgtacacgttcgcacatccatgggccgcacatatacttattgtcacacgttaattggcatttaattaagcgtcgagcgtcgtcgccgctcttattcgactgcgaacggtcgactggcgcggttctgcgtatcgcgaatataccgaatcccttttgtgcggcaaataaaaggctgggaaacaaaggatatatatttttgattcaattaaccgatgtaatttcgcgacggtaccatagcatagtaggtagcagtcggtaaaccggttccaagcccactttattatatagcagcttgccaaaaataaaggtagatgctatctcgcgcaaaatctgaaagctcggatcatacgatattttctatgtgcgggtcgcgaccaatgtctggttatattgagtagaacgcaataccatatagccaccaccaccactgatcggccaggagagcgagagcggcatcggcatcccgcagagagaacgctggagcggagcggccatcatctccaaccgtctcctccaccattttccatcaacaacatttatatatatttttttttttttgccaccgcagtagatggcagtgcagtagttgtggccgctgccaccaaaagggtcgctctcgcgtctgattattagtcgcgtttaatcgttgcgttcggtacgtttccgagaccacttccgatcacttgcccgccggctgatgccggagcatcactactgactgactagtagcattagcgcgcggaaccagtcccaggtccagggcacagcataatcatcatcatgttgacgaccgtcctgaactttgcccagcgcgtcgccgagatttctttgctcggcggcatcgagattgcatcagttgcccttattgtctactatatattcgccaagacgaggtgagtgcaaatgggctcagatggaagccaaataaatcctataagccatctacatgtgtgcacatatcgcaagtggtgtggttggtataggtgctgtgggtaatatgtgtatcgcccccaacctccaagttcaagtaatgctggcgagtaagaagcgccgttatttttagaggcgcactcgcaggttatccaatgcatgctaaatgaagcacagtgggacatggctacataggtcgaaagtccacagctcgaaagtttcgcctagtttcagtgggttttcacttcttatcgacatgggctgttgttttggcttaaacttttacggtctagattagtttaattgcttactaatggcatgaaaaaagacggattgcactcctcaaagttcaaagatccagtttaaaaacaacaaaaatgtatcaaattaattatttttatattttctatagattagtgcacatatatgatttcgattagctgataaaatatttgtttaaacaaaggttagatgagataaagaactgatattttaagcgctctccgatgaatttacttataaaaaattataaaatctataatcaaaaacgaacactaagaaaacaagctttgatgataagaaatactttgtatttccattgttttaaaccaaatcaagttatttcctatcggcgcgatgaaacgaactcgtaggtagtgcatacatagttgtttcctttgtcgatgctccactgtagttatgttttgttttggtttcgagcgcacaacaggtggttgctccattggccatgactcacaatgcccctttgtccagttggccctccgtagaatgcaaattgcaaggcttccgcctatcgtccacgtgctaactggcactgggaggctgccctgggtcattggtcaccgattgacgtcacccgggcgtaaatagtgttgtttgctccggcacaaacactttctcccgccctcagcagctcccctctctcctgccgcccactgcccatcgagtactctctttgcaaggcgcaattggcgatggtgcactcgcagtgatagccaacgaatcccccacccacatttcgcccccaaatcattcttggcaacaattatcggaacgattgccgctgttaaattcgtacccaattatctgattaagattgcacaatggctattctcgcaatcttgctggatttcgaccagctttgggggccacaaagaaagcgtggcattcatctcgtatcggtgggcaataaaagtaaagtaataatccaaagtggtgatccacttgtcctagacctctaaaaaaaagaaattttccacagctcgagatgattgtgaagtccactctaagattagcgcaaagattgctgatactggatttaaatttatgttatggtatcatcgatctctgcttaaagttctcctggcaccaattttaatattacttacactgtaatgatcttaataatctagttgtagttaaggaaaacttgtggaaagaagtgattatatgtgaaaatctttgatgtttccgttaaaggttttcttgacgtatcggcggggttcgtcttcttcaaggcaatctatgtccgagtccaggcagaaggttgtcatgtgctcatccgactgggtattatccgatgtggtcacagagggtgtcctgggccgcaggccacgtgcctggttgctccagggcttctcaacccccgtggcgtgtggccactccttgagaccctcctcttcgtggtactttatgtaggcgcgaagttcggcgatccgttccttctccttttggatctgctggttgaactgcgcctccatcttgcagaagccctttaagcggctctcgttcttctcgtgctcctgcatctggcgatagaatcccaggttgtccgatgcccgctggtcggcctggaacttgctgatcttgcggtagagctgctggaatcgaagcggatcctcaaagtattgggccacgtttggaggcaagtttttgtcgatcggaatcgctcgcagatcccgtttgcacagtgggcacttcttatctgtcgaggattcgctcagacaggaggcgcagaggacgtgttggcactgggtcatgtggaagatcaacgttggctcgacgttgcggcgtcgaaagcatttgttgcagtggattcgaaacattccaaaaaccaattgtttttctttgtaaactaagagtttgttgaactttaatcagctgctttggagcgtctgtaatctaacggtttttatccttttcagtctggccactacggtggctgcgcttctggcagcactgtcccccaattgaaatgcagtgaagactctttataatgaacttatttctttgaaaggtgcaggaaatacagacttctttgttttattgtttagatttggcaccataattccaaatttggctttcgattccaaaattgaataaatttctattcttaagcgtataaatggtggaatttgtatacgaatttgctttacaatcgagtagtcgtctaatcaagaaaaggttccgtgacaaaataattaagcgtaaacagattggggtatttaaaaacttgatgagaggaaaacgtgctttttaacgtaatgcgaccgtaaaagcgaacgctgatgttattatttgtgatttactcaggcatccgtctggttttgatagttgaagtatggtttcaagttcacctaaagattaagagcccgttaaccactccctttattgttcaaataaattagaattatatttggaattataaacaagccgtcagaagttcgtcatatagcatttgagaaacatatgttaaaaaaaaagatcgtttttacacaatagcgaacaaatgtttagcctctgaacatgtcagctgattttcaatcaaatataatgatattattgtatgtataaaagccatacaaagcgcgctcaaagttcagttctgcgccatattttatgaacaactaaacacttatcaatagcggcactactcaaaaacatacacgactttccatataaaaatatatacccgctgatgactgcgctgggctaatgaactctggcgaagttggactgtagaccgctcaagtagccgaataataatcgaagaggtgttgtattgttaattgcgtgctcctgatttgattgcagcaccacccgcgttggtgctactttattttatttattgataatgattgattgtaacgccatccgaatccatccgattacgattgcagggcaccggtaatcatcgctagcctgtttcccaatctgaatctgagctaccggacgagctacctcagcaagatcaacaccatacgcagcgatcttctggtcactttgcgatcatccaatgtaagtttccccgcttatcaagcacccatcctccaataaagttaaccccaccacgtagtacacgccgtgacgcaattgcagggagtgtctagtatcgcagataagcaaacatttccactcaatgaattgtaaataccgtatccgtattgcaattcagtcaaagtccgcagagtgattaatatatttgccaaaaaattaccttaaaaacatttacttgacatcaaaacattgatttttaaatctattgatgtacaaatacaaattacaaatacaatttgtaactaaatttaaatgttcaaaacaaacgtttttctaaaagtttgcactattttaaattaaatactcgtggcgttgccacatcatcctgccaatcgataacaatcctgaaagctgagaaggacttatcggccgtcgatttcctgcaaaaaaagccgggcgcatgggtaaatgcgtaaattataaatttacaatttgaaagtgctgtagaacggtagaatctcttggctggaatgcccatggaggagtttcacgctcgcggctggttcgaggtaccaattgacccgcctgcatgacgtctatatgcatgccagttgcatcacaatcacagaattgttccgatcgtttcattgcaggagcccaagacgcagaattcggtggctcatggcattgggacgcagaatatgttggagctgaccccgcattcgggtcagaagccttttaagaagctattcgactggggcgtgctcttcccatatgttgcccaggtggtgcgcagcgagaagttcgagtaccgacaggtgggtgaccccttaaagctcataaaacctgtagttaccttgaactgcatccccttaggtcaccgagatcgtgcacaacgatgctgtactgaagcatgcaattaaacaggccgccgagcagacgctaagggagcagagatatgctaaaaatggtcatcgtctgctcacgcgcagtgctagtggagatcaggaggcgcaggaggaggaggacgagaagaggggtatatcctatcaggccattctgcgtaagcaggagcagcgcgccattagcatactgaaggacatgggctccactctgaacaatggccttttggccttcacttcctggatcctgtacaagttgctgccctgcttcctctccggagtcgttacgaacacgaagcagatcgagatgctcaaaacagccacagagcgttcgccgggcactccgctgatatttgttccgctgcatcgcagccacttggactacatcatggtcacatggatactcacgaacaacgatatacgcagtcctctggtagccgctggcaacaacctgcaaattccggtctttggtgggctcctacgtggtttgggtgctttcttcatcaaacgcaagattgatcctgtggagggcaagaaggacgtgctttatcgcgctgctctacacctgtatctgacccacgccttgaagcagggccacaacgtcgagttcttcatcgagggcggacgaacgcgcactggcaagccgtgcatgcccaagggcggcattctttctgtgattgtgaacgccttcatggacggcagcataccggacgcactgctggtacccgtttccgtaaactacgagcgtctcgtcgacggaaactttgtgcgcgaacaaaagggcgagaagaagatacccgaatcattcggcaaggccatttcgggcatttggaaggccctgaaatcaaactacggcctcatgcgcatcgactttaacgagccctactccatacgtgagctggtcaattcgtacaacaagatagcccgagaagatggaaacattgccaaggtctacaagccatctgccaggtaggctgctgaagatgatttgatatgagtagtcgtatgttctaatgttcaaagatatgcttcttatgtgattgaatatggttctgaatataaatatatatttattactcttttatttcagggtcctacagcacaatcagtccacctcctccttgtacggcaccgatgttgtgtgcgaggagcaccgcaatctcatcgaaagcatctcgcgccaggtggtctttgactgcgcagcagccacctctgtgatgtccaccaatgcgttagcctttttgctgctcacccgctttaggaacggtgccgaggagcagattctgtcggaggctctggacgacttgcgaaactcgttgtcgggctgcaaggacattggtttttccggggaatcctcgcaaattgtggcatatgcctgtgacctactcggctcaggtaggctgaccgtcgtcttttttatcgtctggcatacaggctaatttaattttaattgtttaggtcttgtgactcgctctcgggatgagaacgggcgtttggtgattaaggctgtgaattcagtggaaagctttattgagctggcttactattcgaacatgctgacgccgcactttgccctcagctcgatattgttgaccaccttccactcactgcttccggaaacggagaataagaaagaagccgccgtgtcgcgcaaaaagctgatagacaccgcgctggaaaactgccagatctatcgctacgaatttattctgaacaaaccgacgcaggtgctggaaaatttgctgtaccagcagttggacgacctcttgattagtggttgcgttttgaccgaaaaggtagcgtctatcaaacttcacttttcttgccattcgagtaaattctaatttcaatgctctatagctccatgacgatttgccgaatggcgctgagggcaggcgcttggccaacgtcctggcagagtgcctggacgaggacggctacgaagacgtgcgcgatggcgaggcggatgagcccaaactgctgttcgccagcgaaaccccgtcgcagcagcgctacatttgcgaggtgctggcgcccttcgcctggacgtatgtgacggtggcgcagtccctgcaaatactgcacaagaactccatgctggagtctgaatttataagctttgtgattaacgatctgagcagcaaggtcaagcgcggcagctgcatctatggtaagtcgcgctttatgcatcaagagttacacctaatgtgcaaccccaaaactcactttcagccgaaagcatatccaccgactccgtgcgcaactgcctgaagctgttggagaaatggtctgtgatcgaggtttgcaaccagcagggcatgcgcctgatctcactcaacacgctctacgagatgtctcgtgagtcgctcaactcgatcgtgaagaagatcgacgcaattgtaccaaaattcaactcgggctacttcagtgtaacgccttaacaatggtcgctcgctttatttttggcactcatgttttatccttgtatagtgcatatccacttaagtttaaagtgcgtactcctagatcttagacttagctatgtctagttttatagtcatacgagtttatatatgccaaagtgctagctttactgtaactaagcgacaaacagtgaaatatgaacaaatttctaatgtataatttaaaaaccttttctatatgcggcctctgtgcggcaggacaaccgaaaacaatatcaactatactgaactgattgattaaacttcataactttataatagaacatcttacataataatcgtctcactttattttcacaacatccatctgttcagcacaatctccactagattgtctctaaaaaacatacgtcataacttttaggaaataaatacatgtggtagataaaaatattcattcataatacaacaaaaatgtaatgttaaaaaattttcttgagtttaagcgatttctatataattggcatccattactcgtccttcgcatccattggctcatcgtccgcacttatgtgtttcaccttgggagtcttcttaggcttcacatggatacgaacggcggatgcttttgcccgccgcatctgcttcaacttggcatgggcctttaaaagaataataggtttataactccataaatagggtatttcttgaacagcttaccttaactgcatcatccttgagtttgccgcctatctcgccggaacaccgctttgctccgcagaagcaggccttcttgctgttgttcattaagtcgtcccacaagtagttgaaggtgagctccgagttctaaaaagagcagttttatcagttataccatgatcgccatgtgatcagtgccactttaacgtaccactggaatgtctttgattgcaaatatgcccacacgatggatgcaattgacggtccacttctgagtctcgcagttgggctcgcacgaatggttcatgaagcgagccaagttgcccttcggtcccgcatcgattataaagtccttttccacacccaagaagtagtagttctcgtcgcgatcacgctgcttctgctccatgcgccgctggaactcggcatggttgatcacctcgcccacgtactcgatgacaaagtcacccacggctatgggctcacggttgacgaggccaaatcctcgctcgttcatgtagaccacctc

SEQ ID NO: 11573 - DNA, 3439 bp, DROSOPHILA
aacggtcgactggcgcggttctgcgtatcgcgaatataccgaatcccttttgtgcggcaaataaaaggctgggaaacaaaggatatatatttttgattcaattaaccgatgtaatttcgcgacggtaccatagcatagtaggtagcagtcggtaaaccggttccaagcccactttattatatagcagcttgccaaaaataaaggtagatgctatctcgcgcaaaatctgaaagctcggatcatacgatattttctatgtgcgggtcgcgaccaatgtctggttatattgagtagaacgcaataccatatagccaccaccaccactgatcggccaggagagcgagagcggcatcggcatcccgcagagagaacgctggagcggagcggccatcatctccaaccgtctcctccaccattttccatcaacaacatttatatatatttttttttttttgccaccgcagtagatggcagtgcagtagttgtggccgctgccaccaaaagggtcgctctcgcgtctgattattagtcgcgtttaatcgttgcgttcggtacgtttccgagaccacttccgatcacttgcccgccggctgatgccggagcatcactactgactgactagtagcattagcgcgcggaaccagtcccaggtccagggcacagcataatcatcatcatgttgacgaccgtcctgaactttgcccagcgcgtcgccgagatttctttgctcggcggcatcgagattgcatcagttgcccttattgtctactatatattcgccaagacgagggcaccggtaatcatcgctagcctgtttcccaatctgaatctgagctaccggacgagctacctcagcaagatcaacaccatacgcagcgatcttctggtcactttgcgatcatccaatgagcccaagacgcagaattcggtggctcatggcattgggacgcagaatatgttggagctgaccccgcattcgggtcagaagccttttaagaagctattcgactggggcgtgctcttcccatatgttgcccaggtggtgcgcagcgagaagttcgagtaccgacaggtcaccgagatcgtgcacaacgatgctgtactgaagcatgcaattaaacaggccgccgagcagacgctaagggagcagagatatgctaaaaatggtcatcgtctgctcacgcgcagtgctagtggagatcaggaggcgcaggaggaggaggacgagaagaggggtatatcctatcaggccattctgcgtaagcaggagcagcgcgccattagcatactgaaggacatgggctccactctgaacaatggccttttggccttcacttcctggatcctgtacaagttgctgccctgcttcctctccggagtcgttacgaacacgaagcagatcgagatgctcaaaacagccacagagcgttcgccgggcactccgctgatatttgttccgctgcatcgcagccacttggactacatcatggtcacatggatactcacgaacaacgatatacgcagtcctctggtagccgctggcaacaacctgcaaattccggtctttggtgggctcctacgtggtttgggtgctttcttcatcaaacgcaagattgatcctgtggagggcaagaaggacgtgctttatcgcgctgctctacacctgtatctgacccacgccttgaagcagggccacaacgtcgagttcttcatcgagggcggacgaacgcgcactggcaagccgtgcatgcccaagggcggcattctttctgtgattgtgaacgccttcatggacggcagcataccggacgcactgctggtacccgtttccgtaaactacgagcgtctcgtcgacggaaactttgtgcgcgaacaaaagggcgagaagaagatacccgaatcattcggcaaggccatttcgggcatttggaaggccctgaaatcaaactacggcctcatgcgcatcgactttaacgagccctactccatacgtgagctggtcaattcgtacaacaagatagcccgagaagatggaaacattgccaaggtctacaagccatctgccagggtcctacagcacaatcagtccacctcctccttgtacggcaccgatgttgtgtgcgaggagcaccgcaatctcatcgaaagcatctcgcgccaggtggtctttgactgcgcagcagccacctctgtgatgtccaccaatgcgttagcctttttgctgctcacccgctttaggaacggtgccgaggagcagattctgtcggaggctctggacgacttgcgaaactcgttgtcgggctgcaaggacattggtttttccggggaatcctcgcaaattgtggcatatgcctgtgacctactcggctcaggtcttgtgactcgctctcgggatgagaacgggcgtttggtgattaaggctgtgaattcagtggaaagctttattgagctggcttactattcgaacatgctgacgccgcactttgccctcagctcgatattgttgaccaccttccactcactgcttccggaaacggagaataagaaagaagccgccgtgtcgcgcaaaaagctgatagacaccgcgctggaaaactgccagatctatcgctacgaatttattctgaacaaaccgacgcaggtgctggaaaatttgctgtaccagcagttggacgacctcttgattagtggttgcgttttgaccgaaaagctccatgacgatttgccgaatggcgctgagggcaggcgcttggccaacgtcctggcagagtgcctggacgaggacggctacgaagacgtgcgcgatggcgaggcggatgagcccaaactgctgttcgccagcgaaaccccgtcgcagcagcgctacatttgcgaggtgctggcgcccttcgcctggacgtatgtgacggtggcgcagtccctgcaaatactgcacaagaactccatgctggagtctgaatttataagctttgtgattaacgatctgagcagcaaggtcaagcgcggcagctgcatctatgccgaaagcatatccaccgactccgtgcgcaactgcctgaagctgttggagaaatggtctgtgatcgaggtttgcaaccagcagggcatgcgcctgatctcactcaacacgctctacgagatgtctcgtgagtcgctcaactcgatcgtgaagaagatcgacgcaattgtaccaaaattcaactcgggctacttcagtgtaacgccttaacaatggtcgctcgctttatttttggcactcatgttttatccttgtatagtgcatatccacttaagtttaaagtgcgtactcctagatcttagacttagctatgtctagttttatagtcatacgagtttatatatgccaaagtgctagctttactgtaactaagcgacaaacagtgaaatatgaacaaatttctaatgtataatttaaaaa

SEQ ID NO: 11574 - protein, 850 aa, DROSOPHILA
MLTTVLNFAQRVAEISLLGGIEIASVALIVYYIFAKTRAPVIIASLFPNLNLSYRTSYLSKINTIRSDLLVTLRSSNEPKTQNSVAHGIGTQNMLELTPHSGQKPFKKLFDWGVLFPYVAQVVRSEKFEYRQVTEIVHNDAVLKHAIKQAAEQTLREQRYAKNGHRLLTRSASGDQEAQEEEDEKRGISYQAILRKQEQRAISILKDMGSTLNNGLLAFTSWILYKLLPCFLSGVVTNTKQIEMLKTATERSPGTPLIFVPLHRSHLDYIMVTWILTNNDIRSPLVAAGNNLQIPVFGGLLRGLGAFFIKRKIDPVEGKKDVLYRAALHLYLTHALKQGHNVEFFIEGGRTRTGKPCMPKGGILSVIVNAFMDGSIPDALLVPVSVNYERLVDGNFVREQKGEKKIPESFGKAISGIWKALKSNYGLMRIDFNEPYSIRELVNSYNKIAREDGNIAKVYKPSARVLQHNQSTSSLYGTDVVCEEHRNLIESISRQVVFDCAAATSVMSTNALAFLLLTRFRNGAEEQILSEALDDLRNSLSGCKDIGFSGESSQIVAYACDLLGSGLVTRSRDENGRLVIKAVNSVESFIELAYYSNMLTPHFALSSILLTTFHSLLPETENKKEAAVSRKKLIDTALENCQIYRYEFILNKPTQVLENLLYQQLDDLLISGCVLTEKLHDDLPNGAEGRRLANVLAECLDEDGYEDVRDGEADEPKLLFASETPSQQRYICEVLAPFAWTYVTVAQSLQILHKNSMLESEFISFVINDLSSKVKRGSCIYAESISTDSVRNCLKLLEKWSVIEVCNQQGMRLISLNTLYEMSRESLNSIVKKIDAIVPKFNSGYFSVTP

SEQ ID NO: 11575 - DNA, 3581 bp, DROSOPHILA
ggactgcagaagaggctcaggcacccaaacttcctcccagacgtagtgccgttcaaggagatgcggagccacgcttaccgccgaagaaaagcgactcactgagctcattgtccatggactcggatgacgactgtaatcttctaagtcaggtgagaaaaggatacttcattcaaaacacttgatatatttcaccatataaacattttgtgagagactcactcaaaaataagtgtctttgtagatttagcaatcggaatgttgatatttcacaaaagttaaatttaaaatgcagtcagaaaattctcgctaaaatcagaaatattaaagttgttccctctttttataggccattgctgcgggaagttgtcgacctcagcccagcggtgccagtaccagctccagcctggcgaacgctagtaccagcactctatgcagggaaaatgggcagtcaaagaagcaggtggagcatggcgataagccgaactacagctcagatgactcgctagacgacgacgacgatgatgcacggtccaagtcgctatttgagcagtgcattctgagcggcatgcataagtccaacgacgccttggagtcggagggtgagccgccggggcagcgccaggagatcagtgcccgggatcgatttgtcagtaaccaggtgcgccagattgagtccatgttggctgggcgtcagcactagaagcggatggttggttaattgagaagcgcatgcatttgtttagtggcttttaatcttgtctacgcaataatattctcacggtctcaattttcctatagttcagattaaaaatttgcacttaaatttaactctccaacacgtgtaatattatgtttaccctctcactaaacaattaaggaaactaaaaagggtgataagaaatgggatacagtcgcggtataaatataaataaaagttgcgatcaactgaggtccgggtaactcctaacatgatgctactgtgatgaactagctagagagctcagtagaaacgttttcgcgcgttgcgatccttgaagtaggagatggcgaagatggccactgcagccgccacgacaaccacgaagagaaggatgaagaagatcttggcgttggacattcccggcttgggatcttctttgtgctcgcgcgggggctcgaatgtcttggcattcggtatgatattggagcgccggataatctcatcgtgctgcgaacaagaaagaaagtaaaaagatggttattgcaacaagaaagtaaaactggttttcagtaatatgatataaatattataacacacggcttataaagataaacatgattaggcatcaaacaatgtgtttaaagccagctgcttaattattacaagttgcagcaattaaaaacaagttcactcttttttctttatacgtatacgcagttattgaaacttaagtccgcttttgggttccttgcactccttatcgcgttagccaaatagcagacagctgagtaatgcttacttcgcttccgaagtttggcaaacaaaagtgaacttacatttacgttcaagtccaggtcatagaacttgaaactgtgaatatcgtgattgtcggacagatcacccgtcgtcgcagacatgccgaagtggtagcccgtgggtagctcaacgttggccactacaaagcagttcttccattcgttgcggttctccagatctgtggaaaccgacagaatgtcgttttcgtatcgaatgctaaccagcgtctcgtactccacattgcggaaacgaacttcgcagccggccagctgagtgtgcgttccatcgcgatcgtggtcgtagctccagctgccattgttcaccatggcgctgagatatggatgttggtgctacaaatataatgttaatacatttacattcaatgccttgcgtaatgacatacgttgtgtggaccattgtgattgctataggtgtccagaatgatggccagtccggagaagtgatccttgctgccaaagaccggcccggtttgcatgcgctcctttgtgtaccaaatggcaaatccgtcgccgaacagttcagttcccttgccgtgcaccttaaagccaacgtgcacttcccaattgcgagtcatcacgggctttggattaaacattaaacatcaataactattgaactgcaaaaagtcgctgagagagaccaactctcctgcttaccgagtagttccaaagtgcaccgctcttggactgtaagtccggcgtcagtcttatatagttgctggtcaccatcgtgttacccaggaagtcccagtgtggcaggatcacgcctacgcctgcaatagagcccaagccatgttagagatacacgtacactccgtatcatcagtgaccaattaccaaccttggaatggacgcaccaaactgtgctcccgcttcatgtagtccggctccctgggcatatcctcaccgagcaccacgaacggggcgacgagaagcgccagcagggccagggaacagtgttcgcgcgtcggtttggtcatggctgcattcggtggcccacttggatgaaactacatacacggaaaataatatttgcagacaaattttttttcgccggcctattagtggtgggcaattgtgagtcacttactgtgactagcaactatcggtgggcaatcgattttaagtcaccccacgcagctgaactgttatcgaaactgactgtcaaccgttatcggagttgaccatcaaatttaaatcgttaaatttatctatagataataatgtttcttttttggtatagggaataacaaattaagtagttcctttatatgtgtatgtatgggtctctacttttacttttatacctttccgtgcggtataattgttaacaaatgtatttgaaaataaataccttgatattatttcaggtttcaattgtatgtgacaataaatgtagcacaattttgcagatttcaaatgcgctgcggaagtgcagctaaattgctaaattgatgaatgcaaattattgttttggacagtttccccccatttttggcgcataattcgcgcgtccaaccagtttgcatattaatagctttcgatcggattacaacgccaacaaccacgagcagcccgtttgtcatggtgcgagacatttttatggattattgcacacgcacattggcgccttcacgcctcgggtcttgcggcacatggatctcagctgttggaaatcgggcaggaaaaccagttccagcgcgccaagagttttcctcctcggcgtgcgttaggcgccgcctttgggggtcattgtcaaggtcgctggtcgtgagagaatgtgcaactaataatgcaaatgcggcaggaactttggcatgcagctgcattggattcggattcggattccaatacggatcggaattataatgatgcgattcaaatgcacatttgggcacaattagccgtgtgcggctaacggtgcaagatgtgtcacctgtgaaaggcggcagaggttgcttcctcaacacgccgctaattggcatataacgtgcctaattatatcagtcatttatgaaatcatttcacttttcacctccctcgag

SEQ ID NO: 11576 - DNA, 1055 bp, DROSOPHILA
aatttgtctgcaaatattattttccgtgtatgtagtttcatccaagtgggccaccgaatgcagccatgaccaaaccgacgcgcgaacactgttccctggccctgctggcgcttctcgtcgccccgttcgtggtgctcggtgaggatatgcccagggagccggactacatgaagcgggagcacagtttggtgcgtccattccaaggcgtaggcgtgatcctgccacactgggacttcctgggtaacacgatggtgaccagcaactatataagactgacgccggacttacagtccaagagcggtgcactttggaactactcgcccgtgatgactcgcaattgggaagtgcacgttggctttaaggtgcacggcaagggaactgaactgttcggcgacggatttgccatttggtacacaaaggagcgcatgcaaaccgggccggtctttggcagcaaggatcacttctccggactggccatcattctggacacctatagcaatcacaatggtccacacaaccaccaacatccatatctcagcgccatggtgaacaatggcagctggagctacgaccacgatcgcgatggaacgcacactcagctggccggctgcgaagttcgtttccgcaatgtggagtacgagacgctggttagcattcgatacgaaaacgacattctgtcggtttccacagatctggagaaccgcaacgaatggaagaactgctttgtagtggccaacgttgagctacccacgggctaccacttcggcatgtctgcgacgacgggtgatctgtccgacaatcacgatattcacagtttcaagttctatgacctggacttgaacgtaaatcacgatgagattatccggcgctccaatatcataccgaatgccaagacattcgagcccccgcgcgagcacaaagaagatcccaagccgggaatgtccaacgccaagatcttcttcatccttctcttcgtggttgtcgtggcggctgcagtggccatcttcgccatctcctacttcaaggatcgcaacgcgcgaaaacgtttctactga

SEQ ID NO: 11577 - protein, 329 aa, DROSOPHILA
MTKPTREHCSLALLALLVAPFVVLGEDMPREPDYMKREHSLVRPFQGVGVILPHWDFLGNTMVTSNYIRLTPDLQSKSGALWNYSPVMTRNWEVHVGFKVHGKGTELFGDGFAIWYTKERMQTGPVFGSKDHFSGLAIILDTYSNHNGPHNHQHPYLSAMVNNGSWSYDHDRDGTHTQLAGCEVRFRNVEYETLVSIRYENDILSVSTDLENRNEWKNCFVVANVELPTGYHFGMSATTGDLSDNHDIHSFKFYDLDLNVNHDEIIRRSNIIPNAKTFEPPREHKEDPKPGMSNAKIFFILLFVVVVAAAVAIFAISYFKDRNARKRFY

SEQ ID NO: 11578 - DNA, 15827 bp, DROSOPHILA
ccaaggctcgccactatttttttcccccatttcccatttccttgtagctcattaaacgaatgtgtgccaatcgatcaaggaacatacatatacatacatatgggctttgctttattgtgtacgtgaaacacacacgcataccaacacacttatcaggagcattcattgtcaatgctttccgcaaacttttctcattagacagtgcaaacaaaatggctgcgtctgcggttttatccaccccaaccaactctaaccaactaaccatctaaccacccatatcacccaacccggccacgatgcggatgcctgctgatgcggacgcttttggctgttgtttgacgtgggcttggcaaatggtgtcataatggccggagaactgcaaacaaacaatagctggcgacattgggacagatgggccgaataatgaagagtgctgtagctgtaagtcatgcataatgaaacaggcgaaactgaattaattgttggcaactcgatgcatgtgacttcgcatgaaccttgaaccgcaagccattcttttggattttcaatagaacataatggaaggaaatctgtttcagagtatttaaacaaatatatagtatatatgatattaaggattgaggattttaaataaaaagtgcctctctttcgttctccagtaaagttgagtttaatttcgatttaatagacattgacagggggtgtacattgctgagtgtttttgtgtttttctatgtttagatatcgctatccgattccgtggccatatcctttgatcgtccgtgttcgtatccaggtgcaaagttcctcgggagatgcgcgtggctcagctacagagatgtggacactacactacgctacatagaaatagatttcttagtttaacgaagtttcacttgcggcatgcatggaaatatccagtgtagaaatatcattatgtcgttctcagtttaaagttgatttgcggttgcatattattattttttttttatttttatttggtttttcgttccaggctagaacctctgattgtcagaaagttattgaagttatattcgagggaagtgcaagcccgtgacccgaaaaagtgcaattcaaactaattctacagcgaacatattagcttagtatatatacattcaattgcttagtttcctagttaaccatcaatgttctcagtgtatctgtgtgcatgtgtgggtgtgtggatttcattaagtaatgttgtttcacttgtgtttttaagcatagttacgctttttacccctttagagagctcgtatctgcatatcgcatttgatcagattctaagttattgcgttattgggtcaatacaattaacatttagctctggcttggtaggtacataaaacactctacaacaataaaatttgtaaatgttaaagggcttacttaactctagaattcctacaaagtctgagacggtggtttatcagatttaactacattcatttcattcgtttacatctactcgtacacagagagaaatgggagatgggttatttgttatgatcgtctgccccattattgcttggcattttggataagtattccatttaattgctgaatcaggtcttatcccttgtggtatcctcctcctcctgaagcgaaatgatctgcataaattgacaacaaattcggaatgtactttagaatgtctgagattatatgggcaattgcattctagactctaggcgctatactctatatactctatactgtagtatagtgtggcatgccccaaacatcgaattaattgccggcatctacaattgctgccaaataaacgttacttgcacgagacatcaaagcaaagggctttcgctgcggccttttggccaaattaagatggttaagctctagtggcatggctaaggaatttgtatctatacctggtatattgcatacttacttgcggatatccagccgaatgtgcatgggttgttttgtcgattatacatatgtatgctattatacgaatacgttataaactgtgtagaattctcaaaagtatttcttgttcagcatttgcatttgaggtataggtatgcccgtattactctactcgaaagctaagtgtgttctaatccctatgactaataactaatgcaataacattgtaatatcttatcctaacgtcctagccccactgaaagaaatcgtcgaagtcatctagaagacgaaatttaaccaataaattagccaatttgggttagtcaattttttggatggtgccgttcggtgtttggtttcttgcaaagtgctctgtacggtggactagcttcgaattgcggaaaaacactggagttggatatagcatgccaatcgaatgggtaaacttatctaaatggttttcatttcatcatttcttttcttgtttattatatttagtatttattcagagtgctggccgttcctactgctccggatgcacttgtctatgggagcagtgagctgcgggaactggttttcgaactgtgggcggtggctgttggttgtggtggtggtggttggtggtggtgatggtcgttcggtcggagttgtggttcggatagttggaatggaaaatgggaacttcattttcatctgttatttggttttttttttgtttttattggattagcagcagaaacgtggccaaactggacaacaacttttaaaacggaacgagtactcaaaaatatgcaggaagctatataaatatttatatatatatatatgtacacatcgagagagcgtaaaatcgttataaaatccagagaagtcgaaagtgataacaaatacttagtgagatcgaacggtagaaggaacatttaaggatatggtacacaggctcaagttgcgggccatatttccacatttccacgattgattcgccgatcaaaatgtttgaactgaacgtaaagctggaagaacgagctgcttacctctgaggacactaatccctgaccccgttccatatcattcaatttggattcgattccgctcgagtggaattgattggttttaattcgctcaattcattacccggccagcgatgcactggtctcttgtttgcttatcgagttaatcgcgttgcgaatttattgattgccattttctgcattgaccaatgcgaaatgagcacgaccaacggtcggatgagcacttaatattcatgatgcagccatttactcgaaagccattacagtcgaaaacacgcagagttggcttgtcattacctgggctaaaactaattactattaacaatgggaaatggcattcgcagtctcattattgcagcgatttcgtatctttttcccatagccatttgcatttttaatcctcggatttcttgttttcttgccttgagtcgccttcgattgaattccatatttgcctcaagggttatcaagcagtttaattaaacaaatgaagaatgccgaaggacttttacctatacttttaactgatagcatgtttttactaaaatgtttaggaccaattattttttaacatcttgccgattgataccacatatcatacaagtatactattaaattaagtttttgatctatgaatattcgtgaaatttttccacgaatccagaaggtgattgttttccagagtgtacttacctgaaacacagtttccgggcaatttgaccatagataattgggtataattgaacgagtaataaaaataaaacgaaatgaaccttgtggaaatttattaaaataaatacgtttaagttgactactgggaaacaactaggcatggccaaaactacgtaaaaagagtggcaaaaaggggtgctggaaatcggaagtggtgcacagtgttggtggtggtgtggctgttcgatgtggtcgatgtttgggtctttgccagtcattgggccacacaatcgttgcaattggccgtgggatcgggggtgctgttattcgaatgggaattcatggaatcccgatgtgggtgactagactctgaacggctggtggtggtggtggtggtgctggcggccttgtggcgcagaagatgccagcggcgctgccagtagttggcctttttggctagaagatgttcgctgccggccacctcgatgtgacccactgaggccctactcgtctgcggatgcagaatgagatccgtgcggagttgctgcacacggcggacatcgtagttctccaccacaatgatgggtgtcggccggagtctttccggtggattgagccggatgttcggctgcagggactgacagttacgctggcggcgccatattcgagatttcagacttggccagtggagcaactgccgcagggagatcctttgaggtgactcgacggtcggtggcacggacaggagatccctgaccagatcaggagccaccacaccatccgtaaactgtccgggtacgtgcgagtccagccgtaggctgctgctgttctgcgagttctgtggtggtggtgtgctcacatagaacttggtgcgggcggagcgactgggcacccgcagactgttggtcttccatgcatcgtgcagggatcggagcccgggcaaacgtgcaaggtggtggatgttatcgtaggaggcggacaacatacctgcgcgctcgtcctggtactcgtcgtcgtccgacgattcgagtcggtcctccaccagcgaggtttgcctcgagagaccctgttaaatgggttcagattgcaggtgttgcaggttgcacatagcatgttgcacgttgcatattgcatgttgcacattggtgtataagcaaacagttacgaagcggaaatgaaacgaaaagaagagacgaaacgaaaccaaaatggtgagcgcatctactacgagtaccaaaggagtacacacactaaagccaactgcagctaagatccttccaggtcctccttcaaaaagagagagtaaggtgctcagtggaggcccttcacttaccgcattgtgacgccttcttggcggcgagcgcttattccacagcgcctccagttgatcaaagtgctgggattgggccagagccgcctgctccggtcccagattggcctgggaagctcctgtctttgtctcggcaatcttcgagatctcctccatgctggccgaaacactgaagcgccgcttcagacgttcatccacctgggccatcatcactgaggacgtcaggtggccgtacttcttctgccaggtgtacgtgtccagcgaaacctccttcttcagcaaccgcttcatttgacgcttgggaccctgaggtcttagatctgcggagatatcataataataactgcatagttccgatttgtaagtgaaaaggaaataattcttaccttcaacatccttgctgggacccgaatacgtaggcagtttcacatactgcgctggcgtgttatgcaagcaaatcacgggaagattatagctgtccaccagctggaccaggactcgagacacctccagactaatgtcgaagtgcgtgaagggcacgtgcatttggagcgaggttagagctagtccgcgctttgtttcccatacgatcagggtcttgtcatcgcttccagaaacggcagtggaacctgtaagatcaggatcaatcggcatggcatagaaatatgtatttctatgcaatactcaccatctgccgaaactttgactccaatcacaggacccagatgtcctgccagcgtgtgcacctcctcgccggtgagcaagtcccaaaggatgagattcatgtccttcgagccggacaggacctgagtcttgttagttaccgaaacggctacgcaagtgaccgcatcactgtgccccaccagcacctggcttagcttaccgcccgtcgcttgccacaccttcaaggacatgtcccgagatccgctgatgatgtgcacactatcggcgctgatctcaaagcatgtgatttcatccgagtgcgaaacggaatacttctcgtcctcctgagtcagtgaccagatcttgagtgtgttatcgccattcgtggagacggcaaagcgcatgttgttggttacggatagacttttgtatggaccctggatggtctgcaacaaattgcccgaatgggccatccaaacgagcagcatggaatcgcgatccgtggaaattactcgcaacgaatccattagcaccaccaccttgaccaccggtgcagtgtggcccttaaaggagttgcagatctcacccagagccaggttccaaatgtgcaccaaacgatcctcggagccggtggccagaaactcaccattcggcgcaaacttgagacaagatacaccagctgtgtgcccctccaatgtgcactggtattccggagtattgattctcatgaggtggacatgacgcccggaggcgatggccatttgctgggagtcgcgggacaaatcgaagcaggtgatgggtggcaatgtggtcgatggcgatcgctgcgcctgcgcatgacgcttcaggctgcgtttgcgacgtggatgccgggagtagggattcacatagagctcctcgttgcggaacgaatagaaggtgatcttgttgccgcccacggtgaccaggaaatcgtcattatccattgcatgaacggcggtgactggacccggattcggaggcagcgatcttaccagttttccggcgtgcatatcatagatcagcgctcgtgtatcatcacagcccaccacacaacgctggctgtccttgccaatggaaatgcttcggatctgccgattttaaattaagaattagcatgcagtatggggatcaagcgtttcactcaccttcgacttgtgtcctttgagagtatgcaactccttgccggtggccagtgtgcggacatatagcgcattgtcctcacacaaagccagcaaaaagacctgaaaattaatgaaatggggatttcagtttttcagttaaaaatgcggaattcaaaataaattttggttgaatttttaatttggaagtgatgattgcaattttattgcaccattcagtattattcattgtgcatttttcatttaattgtgtatcgaattctgtgtcgttaagggccgttgacgaggtaatcgaaaattaataaattgcattttgccaggtcagactcacaggctgaaacatttcaatttaaggacagcccacaggaagcttttctccgcgagtgagggtggcttggggatggcagggtcactgacgtgccacgaagccatcaggatgcaggccaaagagcaagaaagttgatttccttttaccattttccttggctaagaatacggcccaaggggctactccccccataaagtgaaatgttcgtgtatgtgttagtgtctgtgtatgggtgtccatggaatacgaatatgtatgcatgtattcgcgtgtctgtgtaaaattacatttcaatttggcgaaggcggaaagtcccgcccattcggatatgtccttgttatcgcgaaacaatttttccgcctgcttataggcaattttccctcaattttcaccagcacttttgtttaatgtgcgaaattgtattttcggttgcggcaaaggacatcatgagtgttggatctgaaggagccccaccaaagtccaatggtaattgaatcgctccctctgactatctttttggtttgtctctgacttttcagtacgttttttacgttgcctgaaatgcgaggaagctggaggcacatggaaaaattgatatttttaatatgaaacgtagtttttgaagccatttacttaacattttatgttgcagatattaaaagtattaaagtaaaagtattaaaagtattaaaagtattaaagtatttcaaagtatgaaccaccgaaaaggtacacggtaaaatttaaatataaaatctcgaaatgtattactgttactttactctcttaaattaaatttttctaagtgcacaagctggtgactggtatgtgccatccgaggagatccccttgagccaggagctgcagacttggcgcaccttgaattacagtggctctatcctgttgtctgtctattgtggatttgccggctgggcgctgatggatagggggaacttgaggagcgagtggcaagtggaagcacgcatcaattgccagacgatgggatgggatatgaggaggaataagatgagatggggagcgagcacagttgccattgacaaaggacaacagtgtcttccagggagccggaagatccccgccggtatcttgatattattttgcgtgccaaattgctgctaagtatgcaatacttattgatagaggaaggcacgaacacacgcatacacagatatacaaatacatacgcatatacgcacacattgggtttttttgtcaagctgattgacaacaaaggatttggcgcgtaatgcgtacccaagccggaatcacttattagaatttcagcagaaaaatctccgagatgccaagtcacccagttttttgtgacacatctcgggtgaatctatgcggtcgtccatctattgtgtttcgctttaaacttgctggatttcagttttatttttcacgttgtctctggcgtttatgtgtccttaaattgcgcttttcgttattgggttacttggagcgcttcactcaagtggaatatggcttaaagcttggcattcttctccatctttttattacatttttttttctgtctcgaacgaaggaattgcttttaaagcttttcagctgtgcatggtgagcagggaaatccccttaaggaatcaacttttgtctttgccagaagtttgtttcgttaaatttgagaagccacataaagtgcaagtgtgagtgcatggggaattcgcacacgatgcacttgccgcgcatgggaatatccttaaaataaaatgtctcttacaattaattctggtagccttaacttaccgaattccatgaaatatcaatgcgcagtacagcactcgtcatctgcatagtgttcagcagggtaaagttgtccagatcccacacgcaaatcgtcctatcgagaccacccgagatgaggacatcgcaagctccagccaccacgattccactcactggaccgcgatgatgagtgatgcggtgtctctggagggaaaaaaaatccatatacaaattatttagagaaaagtttatatgcccacttaaaatagagattaaatttaatgtttgaatggcttcagttgcacaaaatttgatttggaaaaggacagcaactttatcattcctgcccatcgaaagccatttgtttttaataccaactaaacgatcggattttaaatattaatcctaggtagtgtaagggtagctttatggccaacagacgaacttaacttgacttggcttgcgtgtcccatgtgctaccctcaagtttgccgtaacttccgctcactcgtgtttgcctttgtttgtcacatttcgtatgcattaagttaattaccacctagcatgcgagtttcccctttccaggaagcgactgcggaaaatgccaaaagtttgataaattacctggactttaaaaatggaagagaaggcagcaacgatggcgacatgaatggaagtgccggcatgacacggcgtatacgtaatattgtaattaattcaataagtgcgcgtaattgcaggtgtgtgctagtatgtgtggcacttccggtcgccgtagcagggcactgcagccttgtctacagacgcgtttaaaatcgtaaagagcttgtgtagcaggcgactcagcgaaattgactttaaaatatgcccggggccaaccgagtggcaataaatctaatttctatatgtgtgtcaacaggacgacgacaaggacgagaacaaggacacgggcacatacacacacgcacacacaaacgcctgatatgcaaacatggcgcattgtgggtaatcacagtttaatgtgtgtgtgcgtctctgaaatatcaacttagtatgacttatggcggggcggaagtgggaaatgtggcataggaacatggggcaggacaccagtggcaccatctcctgccacggttcatttgccaggccgcggaacgtgtaaacccatgttcaacgagcagcacactcgtgtcagccagatggcaacaattcagccccgcataagaaccatacacccaaatccaacccattcccacacccatcccccccccgcagtgaccttgcctgctgtgtttgatgaaaggcactgttggctggttaggcggaatttatttggcccagagaaattatgcaaatgcattcggtatgtttgatctggtttgcggcgagatttcgcaattagcctcagaaaatgcgtttttcattgcatcgaaatgaaatgcgttcgatgcatttcgaatgggactcaaataataatttataaaatcaaacagagtgctatttgattttcatttacatgacgataaacaaatcgatttcgatttgtataaatgtaaataaatgtctgaaattgaaaggtgttatttaaggccataaactagctgctgccagttcatcgagtgtgcgcacttaagttctcaaataatttgctaagggtaataaacaaaaggcaatttaactgggttaagacaatgagatatttgcctgtctgcatttaaacaacaatttaaatgctgttgttcttatttaaatggtcaggtgtctggtaattctgacatatagataaagcctttcatttatagaacaaaaaggtgcagtaatataagaaaattgcaaaaatgataaaaactcaagcgtagctatttctaaactctcttattatgtatatatatatacataaccactggcttttggtggaccaaacttcagacttatagtctcaacaaaaatctgtttggccaccgcacaaaatgttttcaaattagcttatggacatgcatgaaatccctccaaaagttatatagtctgcattgtcccgcttttaattcgctgaaagtgaccattatggcagccattagcatccccagcgaatgccagtacccccattgccacatgtggctgccaccccattgtgctcgtgctcgctcaccagtttgccgctggccaggtccgtgatggcgatgcttgcatcctcgctgctgcttatgatgagcgtgttattggcgccggctgccacgcccgtaatcggagccgtgtgggcgttcctgggataaatggagaagcgaaggatgtttagataaattgcgcctgcagagatttacaaattacgcccgaggcggcgaatggtgaaaatggtaacgatagagagacgaaggagaccgtcacacagaaatatattgggtctataaatcaaggaattactgcggatattgaaaacataatggcagcattctgtaactgtaagttatttgtaagccgaaaatttaaagaagtgaaaccgtttttttctaacagaagtcacactcttctcttctctcagtgtactcactttatgtgcgcccgtcgctcgcgcagccctacgtgccacacaagaacagtggcatcctcagagccggtcagcagcagctccgaatccgactggggagccaccaggaggcacgtgactgccgcagtgtgtcctagaaagcaagccgcgttgggcaattagctcgtctaatggaaggaatacgaatgctctccacttacccttaaatatgtgatctagtgagttgctcatgatgtgccactgctgtacgtcgcccgagctggtggccaggataaggtgctgcttcgacggagccagccacacggctcgaatgcatcccgttcccgacaccgtcatcgtgcgaatctgcgagggcagcggcgcgggcagccagccggtgagcggtacgagtagcggtaccgcatagccgtcgcaccaggctgtcgccgagcggaccgtcatgctcagcagcgagttgtcgtcgtcgtcgtgctcgctgatcggacgcagccaggatatcagctgggaacccagctgcatgggatcgcgggtgaggacgtcgctcgatttccggatcgtgtagtagatcagctcgatgtccctgtccaggatgtagcagcgtacgtgctcgatcaggcagcgtaggtagctgatcgacacggtttgcacctgggattcgaaaagttaatggtttcgtttaactaaataatccacatatcaattattcctaataaggaaaccattttcatactcaataaagttttcattccgttaagtatctgataaagtgtcaactataaatggttgtttgcattacctatctatatatctattatcgtttagtgtcaactagcttgctattaatcattattcattattcttgaactcaagcgacattaaggatttaattaattgctaaagaaaacttctatacttttcggttcaaatttaattaggattatctaaataccctaaacttttatttcttctagcatgtattgaagaagtgttaaatcgattggaatggaccatttctaattttatttagctgtgcgttaatcatatgcaaaattattcatattttattcatgttctgtgtcgcttagtcaatgaatggattccatgctcgccgctgggaatgcaaatattggcagttcaaaatatatcagcgaattgaatattctcacagagcaaaaatttaacaaacaaaatcgttaatttgattggctcgcatccgcaaaaacttccgcacacaaacaccagcgcaagcacacactcacacacacgcgcgagggaaacaaaagtttaattgcatactttccagagccgaataatgagttttccgcactgaatgaaaccaaatggaatgaaattaaagtagcttcatggctcaaatgcgggaatcggagggatcagggaatggcagcaaatggccaactgcagcgaaacaattaggcgaccgaattaaaagagccaacatctgtacgagctttgcttgaattttgcattttcggaagggagatgccaggggcatgctccgaatatccatcctaatttgattatcacattatacttttgtgaggcttttattgagctagacttcagctgtccattcgcctgtctatctcaattaaaattatcaaacagtttggcagctttggggaattgttgcagttgcatgttgttttctgcactgagcaagtttgccaaagcttcttggtttaatttcacttaaagtaggagtggctacctaaacgtgtctataaattgcattaattacacgttagctaagtttgtttaaagatttcctacacttttaactaccactataaatgccaaaaaatccaactttattttccactcaacaattttattgctctctctgaccaacagcacaatcaatagcatgtaaatcatttttgcccataatttagtttccctcggagcttttacttcatcagctttcgctttgaatgtacaaattaactttgtgcccattggatggtgctaaattttgacatgtaaacggaagactgtctgtttgattgccaaattaccaggcaattaagagcagccaaacgctgagctccactgattgccttccccacgcccctgccagcgaactaggaaactaattgggaagcttaccgccgccagcaggaagtcgaagttgcagacagcgatctgcttgaaccgggtggtgtcatcggatcgcatcaggtggtgccagctctcctccacgtggcgcatgctgtagcttacatccgctgcaatgggattgtagaaggtggatgtgtcgtcgttgtgatgcgtggacgatgacttccggccggcggaaacggctgacaccgccgacagggagtccttctcgcggtccctgtcctttaggctgatcaccgacttgctctcgctgcgattcgactcgttctccagcgtgctttcgtcctcgtcctgcggaaagaacaaattggccagctcgcagtgcaggctacgcgtcctctggacgtccatatacctccgcttggccaccgaggcgcagtagttgtgccgccactggattagcaccttgccggacattattttgtcgtgcaggagcagtagtaggtctgcaggatataagccatcaattaattaattaaatgtttgaaaagattgaaagagttaaatcatttttaaaataaattgatcccacgtaaaatatttgacttacccatttcgcgatggatcttcttgaaggtggcgaagctaaagtgtccgttcttggtctcgattagcgactccggatcgtcggtgggcatgagcagctccagcagctccgtctcactcaatccgtactccgagcaggtgatgtaggaggctagatcgcccaccgcctgccttccgtaatggcgttccaactggtcgaactgctgctccacgtagagagcaaagctcacgtcgcccggaatgcattgtggcggtatctttagctttgtggcatagtcacccatattcagatcgaactgatattcgatggacttgaagcgatcccgctgcattggtgtgaacttgagctgctccacgggcgtagtagagctgcaaatgatctgcacattccagggcagcgatgtgggcagccatgaaagagccgtaacaatatcgcaatccagtggattcagcaagtgcaagtcatcgataaacaggaagaggacatcattgcccatatcctcaactctacgcagcaggttctggaaccaagtgttgatatacagcggatcaaaggaggcgtccttcggcagatagccttctggtatgttaaaaatgattgagatctgctggcaaatcacgcgaagcagctccagattgtaggcggaacggggcgtggccttggcaaagcgaatcacccggtggacgcgagtggatccaaaccaactgcccacctggccgtacaggtggcacagtatggcgctcttgccactcccatccgcaccgcagagaaagtacggcgcatgccgactgccgttccggaagttggccatcagattctggcggagctgttgcggcacccgcgattccaccagagcgtcgctgtccgtgtgctcccgcaggattcgcaggtgcgtggcgtgctcgtgaaagatttcctgaaattcatagtaaatatatcatctttcaaattaactaaaattacaaatagtgcggaaaaagttgtcaagcaatattcattgctatcttgcgtccttatagggcgctttttgaatattaataactcgatttatatattaatttcagtttttcaagctgctattatcaaaaaattcagttgtgtcgctttgtttgacaaatggcacaacgaaatgcgaatttaatgtcctgtttaattaccatatgatgccatctgcaattatcaattatgtgcgacaggtattaaattaaatcagtacattttttcaatgctcacataaaaaatgatttctgaagttaaagcgacttctgtttaaataattattatgtgctttaaatatgtttcaaagttatcatttgagtgccgcgaacaaggtcaacagtgtgcaatttacttttttttttttgagcagaatgtaattatttttgattgcgggcatatggaaatcatttgcatagaaatacactttgaatgttttcaaaaccggtagctgttttggtttgcccgtaattggatttgccacctgccacatgtcaccgacagccataatcccagaccagtgtcatttccatccgcatccttcaggcattcatctcggaccagcttccgtttgtgaggtgacctctaagaggtccttctccatatcctttcctccccccctgccactcccaccttctcgcagctgtgaataaataaaatagagtcgcacatgtatggccaagtgtcgcccgcctccgttcgtagttaccgagaccagagcacgtcatcggc

SEQ ID NO: 11579 - DNA, 4551 bp, DROSOPHILA
ccacctgtacggccaggtgggcagttggtttggatccactcgcgtccaccgggtgattcgctttgccaaggccacgccccgttccgcctacaatctggagctgcttcgcgtgatttgccagcagatctcaatcatttttaacataccagaaggctatctgccgaaggacgcctcctttgatccgctgtatatcaacacttggttccagaacctgctgcgtagagttgaggatatgggcaatgatgtcctcttcctgtttatcgatgacttgcacttgctgaatccactggattgcgatattgttacggctctttcatggctgcccacatcgctgccctggaatgtgcagatcatttgcagctctactacgcccgtggagcagctcaagttcacaccaatgcagcgggatcgcttcaagtccatcgaatatcagttcgatctgaatatgggtgactatgccacaaagctaaagataccgccacaatgcattccgggcgacgtgagctttgctctctacgtggagcagcagttcgaccagttggaacgccattacggaaggcaggcggtgggcgatctagcctcctacatcacctgctcggagtacggattgagtgagacggagctgctggagctgctcatgcccaccgacgatccggagtcgctaatcgagaccaagaacggacactttagcttcgccaccttcaagaagatccatcgcgaaatggacctactactgctcctgcacgacaaaataatgtccggcaaggtgctaatccagtggcggcacaactactgcgcctcggtggccaagcggaggtatatggacgtccagaggacgcgtagcctgcactgcgagctggccaatttgttctttccgcaggacgaggacgaaagcacgctggagaacgagtcgaatcgcagcgagagcaagtcggtgatcagcctaaaggacagggaccgcgagaaggactccctgtcggcggtgtcagccgtttccgccggccggaagtcatcgtccacgcatcacaacgacgacacatccaccttctacaatcccattgcagcggatgtaagctacagcatgcgccacgtggaggagagctggcaccacctgatgcgatccgatgacaccacccggttcaagcagatcgctgtctgcaacttcgacttcctgctggcggcggtgcaaaccgtgtcgatcagctacctacgctgcctgatcgagcacgtacgctgctacatcctggacagggacatcgagctgatctactacacgatccggaaatcgagcgacgtcctcacccgcgatcccatgcagctgggttcccagctgatatcctggctgcgtccgatcagcgagcacgacgacgacgacaactcgctgctgagcatgacggtccgctcggcgacagcctggtgcgacggctatgcggtaccgctactcgtaccgctcaccggctggctgcccgcgccgctgccctcgcagattcgcacgatgacggtgtcgggaacgggatgcattcgagccgtgtggctggctccgtcgaagcagcaccttatcctggccaccagctcgggcgacgtacagcagtggcacatcatgagcaactcactagatcacatatttaagggacacactgcggcagtcacgtgcctcctggtggctccccagtcggattcggagctgctgctgaccggctctgaggatgccactgttcttgtgtggcacgtagggctgcgcgagcgacgggcgcacataaagaacgcccacacggctccgattacgggcgtggcagccggcgccaataacacgctcatcataagcagcagcgaggatgcaagcatcgccatcacggacctggccagcggcaaactgagacaccgcatcactcatcatcgcggtccagtgagtggaatcgtggtggctggagcttgcgatgtcctcatctcgggtggtctcgataggacgatttgcgtgtgggatctggacaactttaccctgctgaacactatgcagatgacgagtgctgtactgcgcattgatatttcatggaattcggtctttttgctggctttgtgtgaggacaatgcgctatatgtccgcacactggccaccggcaaggagttgcatactctcaaaggacacaagtcgaagatccgaagcatttccattggcaaggacagccagcgttgtgtggtgggctgtgatgatacacgagcgctgatctatgatatgcacgccggaaaactggtaagatcgctgcctccgaatccgggtccagtcaccgccgttcatgcaatggataatgacgatttcctggtcaccgtgggcggcaacaagatcaccttctattcgttccgcaacgaggagctctatgtgaatccctactcccggcatccacgtcgcaaacgcagcctgaagcgtcatgcgcaggcgcagcgatcgccatcgaccacattgccacccatcacctgcttcgatttgtcccgcgactcccagcaaatggccatcgcctccgggcgtcatgtccacctcatgagaatcaatactccggaataccagtgcacattggaggggcacacagctggtgtatcttgtctcaagtttgcgccgaatggtgagtttctggccaccggctccgaggatcgtttggtgcacatttggaacctggctctgggtgagatctgcaactcctttaagggccacactgcaccggtggtcaaggtggtggtgctaatggattcgttgcgagtaatttccacggatcgcgattccatgctgctcgtttggatggcccattcgggcaatttgttgcagaccatccagggtccatacaaaagtctatccgtaaccaacaacatgcgctttgccgtctccacgaatggcgataacacactcaagatctggtcactgactcaggaggacgagaagtattccgtttcgcactcggatgaaatcacatgctttgagatcagcgccgatagtgtgcacatcatcagcggatctcgggacatgtccttgaaggtgtggcaagcgacgggcggtaagctaagccaggtgctggtggggcacagtgatgcggtcacttgcgtagccgtttcggtaactaacaagactcaggtcctgtccggctcgaaggacatgaatctcatcctttgggacttgctcaccggcgaggaggtgcacacgctggcaggacatctgggtcctgtgattggagtcaaagtttcggcagatggttccactgccgtttctggaagcgatgacaagaccctgatcgtatgggaaacaaagcgcggactagctctaacctcgctccaaatgcacgtgcccttcacgcacttcgacattagtctggaggtgtctcgagtcctggtccagctggtggacagctataatcttcccgtgatttgcttgcataacacgccagcgcagtatgtgaaactgcctacgtattcgggtcccagcaaggatgttgaagatctaagacctcagggtcccaagcgtcaaatgaagcggttgctgaagaaggaggtttcgctggacacgtacacctggcagaagaagtacggccacctgacgtcctcagtgatgatggcccaggtggatgaacgtctgaagcggcgcttcagtgtttcggccagcatggaggagatctcgaagattgccgagacaaagacaggagcttcccaggccaatctgggaccggagcaggcggctctggcccaatcccagcactttgatcaactggaggcgctgtggaataagcgctcgccgccaagaaggcgtcacaatgcgggtctctcgaggcaaacctcgctggtggaggaccgactcgaatcgtcggacgacgacgagtaccaggacgagcgcgcaggtatgttgtccgcctcctacgataacatccacgcagatcatttcgcttcaggaggaggaggataccacaagggataagacctgattcagcaattaaatggaatacttatccaaaatgccaagcaataatggggcagacgatcataacaaataacccatctcccatttctctctgtgtacgagtagatgtaaacgaatgaaatgaatgtagttaaatctgataaaccaccgtctcagactttgtaggaattctagagttaagtaagccctttaacatttacaaattttattgttgtagagtgttttatgtacctaccaagccagagctaaatgttaattgtattgacccaataacgcaataacttagaatctgatcaaatgcgatatgcagatacgagctctctaaaggggtaaaaagcgtaactatgcttaaaaacacaagtgaaacaacattacttaatgaaatccacacacccacacatgcacacagatacactgagaacattgatggttaactaggaaactaagcaattgaatgtatatatactaagctaatatgttcgctgtagaattagtttgaattgcactttttcgggtcacgggcttgcacttccctcgaatataacttcaataactttctgacaatcagaggttctagcctggaacgaaaaacc

SEQ ID NO: 11580 - protein, 1240 aa, DROSOPHILA
MGNDVLFLFIDDLHLLNPLDCDIVTALSWLPTSLPWNVQIICSSTTPVEQLKFTPMQRDRFKSIEYQFDLNMGDYATKLKIPPQCIPGDVSFALYVEQQFDQLERHYGRQAVGDLASYITCSEYGLSETELLELLMPTDDPESLIETKNGHFSFATFKKIHREMDLLLLLHDKIMSGKVLIQWRHNYCASVAKRRYMDVQRTRSLHCELANLFFPQDEDESTLENESNRSESKSVISLKDRDREKDSLSAVSAVSAGRKSSSTHHNDDTSTFYNPIAADVSYSMRHVEESWHHLMRSDDTTRFKQIAVCNFDFLLAAVQTVSISYLRCLIEHVRCYILDRDIELIYYTIRKSSDVLTRDPMQLGSQLISWLRPISEHDDDDNSLLSMTVRSATAWCDGYAVPLLVPLTGWLPAPLPSQIRTMTVSGTGCIRAVWLAPSKQHLILATSSGDVQQWHIMSNSLDHIFKGHTAAVTCLLVAPQSDSELLLTGSEDATVLVWHVGLRERRAHIKNAHTAPITGVAAGANNTLIISSSEDASIAITDLASGKLRHRITHHRGPVSGIVVAGACDVLISGGLDRTICVWDLDNFTLLNTMQMTSAVLRIDISWNSVFLLALCEDNALYVRTLATGKELHTLKGHKSKIRSISIGKDSQRCVVGCDDTRALIYDMHAGKLVRSLPPNPGPVTAVHAMDNDDFLVTVGGNKITFYSFRNEELYVNPYSRHPRRKRSLKRHAQAQRSPSTTLPPITCFDLSRDSQQMAIASGRHVHLMRINTPEYQCTLEGHTAGVSCLKFAPNGEFLATGSEDRLVHIWNLALGEICNSFKGHTAPVVKVVVLMDSLRVISTDRDSMLLVWMAHSGNLLQTIQGPYKSLSVTNNMRFAVSTNGDNTLKIWSLTQEDEKYSVSHSDEITCFEISADSVHIISGSRDMSLKVWQATGGKLSQVLVGHSDAVTCVAVSVTNKTQVLSGSKDMNLILWDLLTGEEVHTLAGHLGPVIGVKVSADGSTAVSGSDDKTLIVWETKRGLALTSLQMHVPFTHFDISLEVSRVLVQLVDSYNLPVICLHNTPAQYVKLPTYSGPSKDVEDLRPQGPKRQMKRLLKKEVSLDTYTWQKKYGHLTSSVMMAQVDERLKRRFSVSASMEEISKIAETKTGASQANLGPEQAALAQSQHFDQLEALWNKRSPPRRRHNAGLSRQTSLVEDRLESSDDDEYQDERAGMLSASYDNIHADHFASGGGGYHKG

SEQ ID NO: 11581 - DNA, 12081 bp, DROSOPHILA
gcggaggtccttggcaaggactcgttgccaaactgcgtaactttaagctcgacgatacgaaaaacatacgaaaacgtttccatttcgattacatttcaaaggacagatttttgggtatgtttcaaaattattagaactgtttaaatactaatgtaaaagagatcgaagaggtacaaaatatttcccactataatgtagagtagaatatctttgtagctttttaaaaatctttcaaaacttgtataaaaacaagccaatgaatgacttgtagaaattaaggcaactttataggtctcgcaccataaagagaacatttttgtacgccgatcgctccagaagatcccgacttttaatcaaaacgaattagcattttcattaaccatgttcgttaaactttacgcgttcggcattcccacattaaagacaaactgccccaaaaactcagccggtgggcgttcccattttttggtggcgcctcacgcttgcgcccacacaatttcaccgcattgaacaaaaggcgggaaaacggcttaatttgaatatgttttattgccgcttgacgctacttaaacttcgacttgtgcatattaaatcgacattcgggtggggcatgctgcgatgctaatgaagtaacaacgaacaccagccatagcggatattgtggttcatcatgtgttcatcagaatcagatttggttccacctcctacaccctacacggcgaagaacagcagagccaaacaaacaataaatttggggtaaatggaaaagtcggaaaagctttcagggcactgctatcactgagctatgcttcttgacaactgatttatcagtggcacacgcgatccgtgtgcccccccttcaatcagcttgcagctgcaggtggtgcagttgctgtttttattttcggctgcaccacataaattccaacgcaccaccgtggtcgaagatcaaagtcggaggatgccggtaatgtggagcatatgttgggaaagatgccccatgcccctcaccaccaacgagatgaactgcagatacattgcaacaggtgggaaaaaaggtggaaaatcgatgagagtgcacgttagaaagttaccgcaacctttccacgaaacacggtccgcagtatctgagtgaaatttaattaaaacacactggcataccgatgcctttcctatagaagtgccatgcgcacacatcataaaaagtttgaggcctcctcctccacctcctcctcctcctgctggaaaatggtaatggcaattgaaaattcgcagcacgtgcttctgtttctgctcccgttcccgttgacactctgggcacagtgagtgcggaaagtatgcccacttcatgtcatctgataagctcccagcgaacttattttccacttttttctatcttcttccgcgagcgttggcatttctgcttatcacgatcacggctaactgcttatctgatgatcacgcacttgtttatttttagcgcaaggttttaagataagactaccatgaaaaacgcacttttccggcgaataaagtggtgcagttcttagtcatcttaaatggagttaacctattctatagcaaattatttgttccttactttagtcatgctatttaattcaagtgatcgcatacttttttgtaccactgttctatgcgttttggcgcaggtccaacaagtttggtacttcttggtttgttcaacagactgtgttgcccttataatgagccaaacattaattttcacttgagttaatttttcgccataaagagcgagtttaacgatcggtttaggccagcaactcagtggggtggctggaaaacgaggggtgaaggggattggtttttcacatgtcgttctcgacacttcgctaaatggtccgctaacattctgtatttttcaaagcattcgagccttggctaaattatgctataaatcagtttgatgttgttgccatcaattgtttacatggacggaatgtatgcatataatgcattggcattccacgaatttcgaaacaataattcgaagcgatgatctataaacaaattttgaatgcagtgaaaacaatcaattaattggacaaagcataaactttatgggcccagttgtaaaactctagatatgtgggtgtgataatttcgtgttctttggagggaaatacatatgtataaaaaaagggaaagaaaacttcttgatttataagcgcttaaatttctcaatcagaattgaattgttattaaagtgtgttttatatattttccaggcggtcagctgaagaccaaaaatggccaaaagtatgttttcaatggacctccatcgggggtttatgtctccaaagcctgcctgatcatcgctgccttcatcactgttctggccctactcttcaccattgccataacctattttgtgaccaggcagggattgaatcccaaggaggtgactccccccaggtgagtgctggtgcacccgatccatgttaaataaacgggtgtggtttgcctattaagtttggccgggtatttgctttatttcgcgtttccgttttgcatttttgctaaacgttttggcaagcgtgctaattggcactcgaaggctatacgtatgacctcattcggaaagtgaaagcagtttatgcttttccaccgacgcatttcgaggtgtggaaaagggtcaaacgaatgggaattgggtgtgaccctagtagcactttgcatacaacaagtccaaactgatttgtatcctgccacgcagttgcatcaccgccgatcatcccgatgtgaatgcgacgcccattcaaacagccggctgggtgagcatgaattccccgccacctctgcaggcggccacgcccactccgatggcaagtcccacgcctacaaacacacccaccgtaaccacaaccttggccatgcctgcatcgagtgagaagcccgaaataaggatggttgatccgaaagtgggtgacattccggtagtggagccagcagcaggagaagtggaagataacacgaccaagcccatcaatcgtccacttaaactctacgaaggatggcgtccacttcactataggtaagtgaatcactgaccaacaattgctcttaatgaatattaaaccaaacacgcgccaaaagaaactcattctgctgaaattgctttgcatgctcgcctttcaatttcagcgaagatgcagttgacatctaaattgctcacttaaattctccacaatttccggttttttttttttgctgccattgcaaatgccggaattgatcttattcttatcacgctgacacttgatagaaaactggattaattagtctagcttaaacgttttgatcaatatgtgttttgacaagctaagatattagtttaataacttaaacgtttaacgagagataattgggattaaaccatcaaaagtttagacaaggcaattacggcctatcaactggtgataatgcattttatttaagaaattataggcaattaaagatttgttcagaaatttgtaaactagcatcacatttttattccagggggtagaaacttatagcaatgctgaaaacaggattgaaataaacttagcagtagttgtacaaaagttttccaaagggtgtgctattaaatgggaaatacatgctaatggagtaaacttattcgaagcccatctcataaatacgcacacacagccgccgagcccttatccttatccttggcaactactccactggcatccaccccaaaccaaatcagccccattgacgtcacttttctgtgctcgcgagtacacatttacttttctatttctatgtaaggaagtgggtcaaggattgagccgttgcagttcagtagtcgccgtgtaccaaaatggagagcccaccagccagccacttgcagtcgggctaacaacttgtttaggccaccgcaggagatggccagttaggagccaaggagatgaatagtcagtgggaaatcggttaggcctatgccatccatccatcggtcacacttcgcagaagaggcggcagagatctaagaaaagaattgaggcacgccgacaatcgactgacataatgcgccaaatagatggccagatagaaagatacgaagatagaaagatactttgctcaatgaagatgcgcggcaccccggtagccgcatgcattaatataattgacacagaaagcccaagctgggcattaatttgtgcaccgcacgcagcctaaaaaaaacaaaaaaaaaactccagatgtggggaaagtccagggcaatccggtggatggagtcgattcttgatggatggcggcaagtgcagcacagttttgccactcgaacggatcgatggcaagtgattttgcagctgccgatcaaagcgcacaacagtgttgaccagctgtatctctgtatccgtatcttcgtctgtgtggcagatactatctgaaagctcgcttcctggttgcccccagaacacgcattgtaagccaatcggctcaattaattgcaactaggcgcaaagcccgcacccaggggattccagtttgtcaaggggttgggttggaggactcggtattggagttcgaggcgatggatgggggctccaactggctggctgcatctgccagcgggtttgcggcattcttggcattcgtgtgtgaacgaatgagccaggggaattgatattcaatctttgtgaagtactctcgtagccaggggttagtcaactttttgaagatactttatgtatttaaaataatttcgagaaatgacaattattgttacgtcgtcttctgaagtatgttttattgcaaatcactgtacttaaataccacttacattaggttcttcaaacgaacttgatcaataattgacgataggtgtgttaaatatagaaaagttaagcaaccatagagcattgcatatttgtggtagccagctagccaattattgcgcttcttgtttgctttgatttgatcgccgatgcggcttttgatggcatgcatttcatttgccgccattccgaactaatggcggcgtccgaagttcgaggcagactgcaatgcccccgaatggcgacggatgggtgccaaacatatgtttgtttgtggtcggtcccctctaatttgccctcttggctggcgattgattgattggcacttttgatggcagcgacctggcgtttttggccaacatttgcatttcacctgcaaatgcagagcatttccctatttgaatctatttatatgataccttctcaactatatgatactcctcctcttgcagccttttgattgagccaagtgtggcaacatctatcagcaacggcagcctgaccatcgagatcgaacgggatgtgtccaaggtgaccagctgggagcccatcgtgctcgacgtgcacaacgtgagcatctccaatgtccgggtgatccgtgcccttgcagatggcgccagcaatgccagcgaggagcaagacttggatttcgacagcgactacggggaggataatgccacgttcgtgatcaatttgagcaagactttggcggtggagacccagctgagagtgctgctaagtctggatttcgtcagccaggtaacggatacactgcagggcatctacaagaccagctacaccaatccggacaccaagaatgaagagtaagtccagaaccacatgtccacgaaagttccccttctaaagttccccttacttttagatggatgataagcactcagttctcgcccgtcgatgcccgtcgcgcctttccctgcttcgatcgtccggacatgaaagccaacttctcgatcagcatcgtcagacccatgcagttcaagatggccctttccaacatgcccaagtcgggcagccgtcgcttccgccgtggtttcataagagacgatttcgagaccacgccgaagatgcccacttacctggtggctttcatcgtgtccaacatggtggattcgcggcttgccagtcaggacagtgggttgacgccgcgagtggagatctggacgcgaccccagtttgtgggtatgactcactatgcgtacaagatggtgcgaaaattcttgccctactacgaggacttcttcggtatcaagaataagctgcccaaaattgatttggtgtccgtgccggactttggattcgctgccatggaaaactggggactcataacgttccgcgattcggcgctactggtgcccgaggatctgcagctggcgtcctcatcggaacatatgcaggtggtggccggaatcattgcacacgagttggcccatcagtggttcggcaatctagtgaccccgaagtggtgggatgatctctggctgaaggaaggcttcgcctgctacatgagctacaaggcactggagcacgcccatccggagttccagagcatggacactctgaccatgctggagttcaaggagtcgatggagcacgatgcggacaacacctcgcatgccatatcctttgatgtgcgctccaccaacgatgtcaggcggattttcgatcccatcagctactcaaagggcaccattctgctgcgcatgctcaattcgatcgtgggtgatgtggccttccggtcggccactcgtgatcttctaaagaagttcgcctatggaaacatggacagagatgatctgtgggccatgctcacgcgccatggtcacgaacagggtactctgcccaaggatctgagtgtcaagcagatcatggactcgtggatcacccagcccggttatccggtagtcaatgtggagcgccgtggtgctgatctcgtgctgcgccaggaacgctatctgctgccctccaagaacactgcggatcagagcacctggtttatacccatcaccttcgagacggatgagttgcgcaagggcgacaacatacccacccactggatgagaagcgaggacgaagaggagctcatcgtgggcaatgtcttcgcgcatagcagcaacagcgataacgtgatctatctgaatctcaaccggcagggttactatcgtgtcaactacgatatgacctcttggctggcgctcaagaagaactttagcacattgcccaggatcacaagggcccagttgctggatgatgcactgcatctgtcgcaagcggaataccttacctacgacataccgtaagtttgagaagtaagacaagtaaatgaaattattaacataaaaatacgtttgcctttagattgaccttcctcatggagctgttcgatgctgtggatgatgagctgctgtggattgccgccaaacctggtctcaactatctgatctacaacctgaagagggagcctgcctatgagactttcagggtagggaatccagtaaaactagtaaattttagagtgttttataatatattttgtttaaccaggccttcatgaaattcatcgtacgtcccgcctttgatcattatggcctgcatgagccggacaatgagtcccacttgcaactgaagcaccgcgccttggtggcctactttgcctgcaagttcaactacgatcgctgcacccaaaaggcgcagatgaagttccgcgagtggatgcgtgatcccaaaaacaatccgtaagcttgtaactgaaatacaatacaaaaacttattaaaaacgatgcaatcataaatcaacagcattaagccaaacctcaagtctgtgatctactgcacctccttggcggagggctcgtcaccggaatggtatttcgcctacaaacagtacaagacaaccacgagtgcttccgagaaggaggagatactgacctcactgggctgcaccaccaaaccctggctgctgtccaagtgagtaactacaacagtttgatccatcaaagaccaaagactgatgtgcaacaactttgtaggtacctcaacatgaccatcaatccaacatcgggcatactaaaacaggatggcgccttggccttccgtgctgtggcctccaatgccattggtcatgagatagcctttgattttctgcagggcaacataaaggagattgtcgaatagtaagtgatactttgtgtgataggttgaatgtatatattaatttagttatgttcaattgcaccatagctatggcgatggcttctccacgctgtccgagatgatcaaatcgctgaccatctacatgaacaaggactaccataagcaccagcttctggacttggccgctacctgccgcaaactgggactccatgccgtggaatcggccatcgagttggcgctggagcaggtgaacaacaacatctattggcgcagccactcgtaccacagcctgaagaacttccttgaggggatcgtcagcgagttccagatcaatatcttttaggagaacacatggaagttggaaatgggggagaactcaaattgatttcaaccaaaaaatgcgatttagttattgtaactattaccattatttgtattcgtgcaaaggcctcaaattaatttaatcaaacgaattatttgcgaaaagtgatataaacgtgtaagttagccagcataatttaggtaaacgatttactttttgcaattgtatatttatttatttgtaagtctcgcttcttttgctttgcggcattgctctgcaacgttcctactaaaaaatagaaagcaatcggaaaatgcatagttcgaataactcccattcatcacttcaggcaacagtttaagtccacaacacaatatctgccacgaaatatctaaagtttaaaacctgtattatctatatctatatctatacttatgattgtcaagtactttgtgttgttcgcacacctttagatcctaagtgaatcaatctagcactaagtgaaccaaaaatctattttgtagtcgatccaatcaagggacttaatggtcctggaaggaaactgagcatgggaagataatgaaactgagtgtccttagtacatggtttaaattgtttgctaaagcaagagtagtacacaacacacaacacacaagtaatatatttattcatgtacgcgtgtaactattatgtattttgtaaagcccaacacaaaaatacttgtattgctgctgcacaaccatgtaaataagttttaaagcttacactaaacacttaaataaactatgtatttacgtaattttattcaaaactcttctttaattactgcttataaactttgatttattttgggagttttgaatttggcggttaagaagaaattaaatcaactgcttatgcggccctgaaattcagtattttcaacagaatggtcacactttataaatatatgaataaattgcacttgatggcaaccctaaacattggttttcaagaattttctgggtttcataaaacggtcttactatcaactaaatttttgtaaacaaatattaacacagcttgtatatttgaaaaagtaagtatataacgaaattagcaacaaaataagacaaattaggttacctaataaatagcagacctcatctttgacttttgtggtatcaatcagtcgaatactttggtgttttcctgacacccgagatactaggctttgttttgaaatccctagttcaaactcaaactttatgcaatttcatctagtgagcagaaggaaatgggacgcttccgaagaggacagattcatcgacatctggatccacaacttgcatctgtttgagcctggcaagaaactgacagaaacctatgcggaactggagccctattttcgagatgttggcgtagagatcaatgttcaaggcataaagtcgaaaatggaatccctgaagcggaagtatttcaagtcagtacacaactttcagatgaagaatcggtttgataatctctgggatttcagtttgttacactccgaccaggaagaccaagctatcacctggaggcacttcgatgcgatggctttggtggtgagagcatctgccaacgaggggaaggattcggaatggaaggactatacgcagccatcaaagacgcctcgtaagagtccattgaattccaacaaggaaaatgtatctaatcaaagacttcgaaatttcagataaaacgcgctcttctgtttatatgaacaatcccgcacaacgtatcaaatatggttcgaaattcataaaagtttaaattgtatacattctaagcggttttcatttctttatagagacaccattcaaaaccgtcttcgtggatgaaagtgctgtgaactattttgacgatgaggaaatgcccaacgccaaaagagttaggaaaagattcggcaaaaccagcaatgtcagagtaaaggcgcgaagagtttggcagccggcggaggaatgcatattcgttgatgtgtgggaaaagttcgccagtcacatacagagtgataggaaaaaaatggatgtctacaaggatatgcataatgaactgcagctgcgtggtgttggcatattaccgggcgatatcaaatccaaaattgaatcacttatgcgcacgtttaggtaagaactttataagcttattatgctgttataatacattaccaataattgcagagcacagcgagattcggtgggagataagtccgagtggattcattattcgaagattttaaagatccagactcctattgatttcaccaagctggatgtattttccgagcacagtagcagctacgaagacgatgcgtcctggttcaaagaattggagccgaaaccggatcccgatcctatcagccatccaccgagctctagcgattccgttgtcaatcagtttgacaataaaactcagccgagctctcccgcgtgcagtgaagactgtttttggtctgatactgaacctagccactgcaaggtgtctattgaagtgttggaccaagatgaatcgacaaagccgttcgaatctccctccattgaaaagcataaggctgctgaagaatttagtcaatttgtaacaaaagagctagccgtcttgaatgatgatttgctaatcgaagcaaaacgccaaatatacaatatcatatgtgtcttgcagaagaaacagaatgaagtaaataaaaaagcatagtgaccaattaaacgtatcttttttcgtacttgaaattaaaaaaaaaatcaaaggttctaccgagatttgaactcggatcgctggattcaaagtccagagtgctaaccattacaccatagaaccgcgttggcagcctggcgcaaaacaaaacatttactgccgccagataacacgaaacaattatcctattttggacactaaaattttaaataaacatttatccgtgatatttatttttaaagaaaagtttctaagcatcaaatctttatatgaaaaaaaaaaataaaaattaattcgagcaggttctaccgagatttgaactcggatcgctggattcaaagtccagagtgctaaccattacaccatagaaccttgatacgagccacgctgctaaatgacacttttgtgctgcgggcacacttatctttggttctttggtgtgtcaagaagggggttgaagataaggaaacgatagttgattcaaaatagagtgttttaatttggttcaatacgttcagttaagtatttagaacatttttaaaacaagctaaaccttaaacttacattggcattttaagggtatcgaatgagcacagatgtttgttgccaagcaagccggtaaaagtttgtttgatcgatatacacaatattgaattaaaacatcgagctgctcctttatttatttgatattgtaaagccgaaaaatggaaaaggaaaaaaagaaatctcttttggaaagatacaacataccaattcactatttggacttcgcccacgtggaaaagtgcacaaatgctcgcgaaatggagaaaatcgtccaaatcctgcgctccggcgaggaaggacattatccggacttgcaacgctgtgcggaggaaaaactgaaggcactgaaaccggatagcaagctatttcgctatgaggaacagataaagcaaagcactgacctggacaaaaccgaactaaagcccattctggtaggttgtctacttcatttcaaataaatatttatggattaacctgtatttataccttaggattggactg

SEQ ID NO: 11582 - DNA, 4037 bp, DROSOPHILA
atgcccctcaccaccaacgagatgaactgcagatacattgcaacaggcggtcagctgaagaccaaaaatggccaaaagtatgttttcaatggacctccatcgggggtttatgtctccaaagcctgcctgatcatcgctgccttcatcactgttctggccctactcttcaccattgccataacctattttgtgaccaggcagggattgaatcccaaggaggtgactccccccagttgcatcaccgccgatcatcccgatgtgaatgcgacgcccattcaaacagccggctgggtgagcatgaattccccgccacctctgcaggcggccacgcccactccgatggcaagtcccacgcctacaaacacacccaccgtaaccacaaccttggccatgcctgcatcgagtgagaagcccgaaataaggatggttgatccgaaagtgggtgacattccggtagtggagccagcagcaggagaagtggaagataacacgaccaagcccatcaatcgtccacttaaactctacgaaggatggcgtccacttcactatagccttttgattgagccaagtgtggcaacatctatcagcaacggcagcctgaccatcgagatcgaacgggatgtgtccaaggtgaccagctgggagcccatcgtgctcgacgtgcacaacgtgagcatctccaatgtccgggtgatccgtgcccttgcagatggcgccagcaatgccagcgaggagcaagacttggatttcgacagcgactacggggaggataatgccacgttcgtgatcaatttgagcaagactttggcggtggagacccagctgagagtgctgctaagtctggatttcgtcagccaggtaacggatacactgcagggcatctacaagaccagctacaccaatccggacaccaagaatgaagaatggatgataagcactcagttctcgcccgtcgatgcccgtcgcgcctttccctgcttcgatcgtccggacatgaaagccaacttctcgatcagcatcgtcagacccatgcagttcaagatggccctttccaacatgcccaagtcgggcagccgtcgcttccgccgtggtttcataagagacgatttcgagaccacgccgaagatgcccacttacctggtggctttcatcgtgtccaacatggtggattcgcggcttgccagtcaggacagtgggttgacgccgcgagtggagatctggacgcgaccccagtttgtgggtatgactcactatgcgtacaagatggtgcgaaaattcttgccctactacgaggacttcttcggtatcaagaataagctgcccaaaattgatttggtgtccgtgccggactttggattcgctgccatggaaaactggggactcataacgttccgcgattcggcgctactggtgcccgaggatctgcagctggcgtcctcatcggaacatatgcaggtggtggccggaatcattgcacacgagttggcccatcagtggttcggcaatctagtgaccccgaagtggtgggatgatctctggctgaaggaaggcttcgcctgctacatgagctacaaggcactggagcacgcccatccggagttccagagcatggacactctgaccatgctggagttcaaggagtcgatggagcacgatgcggacaacacctcgcatgccatatcctttgatgtgcgctccaccaacgatgtcaggcggattttcgatcccatcagctactcaaagggcaccattctgctgcgcatgctcaattcgatcgtgggtgatgtggccttccggtcggccactcgtgatcttctaaagaagttcgcctatggaaacatggacagagatgatctgtgggccatgctcacgcgccatggtcacgaacagggtactctgcccaaggatctgagtgtcaagcagatcatggactcgtggatcacccagcccggttatccggtagtcaatgtggagcgccgtggtgctgatctcgtgctgcgccaggaacgctatctgctgccctccaagaacactgcggatcagagcacctggtttatacccatcaccttcgagacggatgagttgcgcaagggcgacaacatacccacccactggatgagaagcgaggacgaagaggagctcatcgtgggcaatgtcttcgcgcatagcagcaacagcgataacgtgatctatctgaatctcaaccggcagggttactatcgtgtcaactacgatatgacctcttggctggcgctcaagaagaactttagcacattgcccaggatcacaagggcccagttgctggatgatgcactgcatctgtcgcaagcggaataccttacctacgacataccattgaccttcctcatggagctgttcgatgctgtggatgatgagctgctgtggattgccgccaaacctggtctcaactatctgatctacaacctgaagagggagcctgcctatgagactttcagggccttcatgaaattcatcgtacgtcccgcctttgatcattatggcctgcatgagccggacaatgagtcccacttgcaactgaagcaccgcgccttggtggcctactttgcctgcaagttcaactacgatcgctgcacccaaaaggcgcagatgaagttccgcgagtggatgcgtgatcccaaaaacaatcccattaagccaaacctcaagtctgtgatctactgcacctccttggcggagggctcgtcaccggaatggtatttcgcctacaaacagtacaagacaaccacgagtgcttccgagaaggaggagatactgacctcactgggctgcaccaccaaaccctggctgctgtccaagtacctcaacatgaccatcaatccaacatcgggcatactaaaacaggatggcgccttggccttccgtgctgtggcctccaatgccattggtcatgagatagcctttgattttctgcagggcaacataaaggagattgtcgaatactatggcgatggcttctccacgctgtccgagatgatcaaatcgctgaccatctacatgaacaaggactaccataagcaccagcttctggacttggccgctacctgccgcaaactgggactccatgccgtggaatcggccatcgagttggcgctggagcaggtgaacaacaacatctattggcgcagccactcgtaccacagcctgaagaacttccttgaggggatcgtcagcgagttccagatcaatatcttttaggagaacacatggaagttggaaatgggggagaactcaaattgatttcaaccaaaaaatgcgatttagttattgtaactattaccattatttgtattcgtgcaaaggcctcaaattaatttaatcaaacgaattatttgcgaaaagtgatataaacgtgtaagttagccagcataatttaggtaaacgatttactttttgcaattgtatatttatttatttgtaagtctcgcttcttttgctttgcggcattgctctgcaacgttcctactaaaaaatagaaagcaatcggaaaatgcatagttcgaataactcccattcatcacttcaggcaacagtttaagtccacaacacaatatctgccacgaaatatctaaagtttaaaacctgtattatctatatctatatctatacttatgattgtcaagtactttgtgttgttcgcacacctttagatcctaagtgaatcaatctagcactaagtgaaccaaaaatctattttgtagtcgatccaatcaagggacttaatggtcctggaaggaaactgagcatgggaagataatgaaactgagtgtccttagtacatggtttaaattgtttgctaaagcaagagtagtacacaacacacaacacacaagtaatatatttattcatgtacgcgtgtaactattatgtattttgtaaagcccaacacaaaaatacttgtattgctgctgcacaaccatgtaaataagttttaaagcttacactaaacacttaaataaactatgtatttacgtaattttattcaaaaaaaaaaaaaa

SEQ ID NO: 11583 - protein, 1078 aa, DROSOPHILA
MPLTTNEMNCRYIATGGQLKTKNGQKYVFNGPPSGVYVSKACLIIAAFITVLALLFTIAITYFVTRQGLNPKEVTPPSCITADHPDVNATPIQTAGWVSMNSPPPLQAATPTPMASPTPTNTPTVTTTLAMPASSEKPEIRMVDPKVGDIPVVEPAAGEVEDNTTKPINRPLKLYEGWRPLHYSLLIEPSVATSISNGSLTIEIERDVSKVTSWEPIVLDVHNVSISNVRVIRALADGASNASEEQDLDFDSDYGEDNATFVINLSKTLAVETQLRVLLSLDFVSQVTDTLQGIYKTSYTNPDTKNEEWMISTQFSPVDARRAFPCFDRPDMKANFSISIVRPMQFKMALSNMPKSGSRRFRRGFIRDDFETTPKMPTYLVAFIVSNMVDSRLASQDSGLTPRVEIWTRPQFVGMTHYAYKMVRKFLPYYEDFFGIKNKLPKIDLVSVPDFGFAAMENWGLITFRDSALLVPEDLQLASSSEHMQVVAGIIAHELAHQWFGNLVTPKWWDDLWLKEGFACYMSYKALEHAHPEFQSMDTLTMLEFKESMEHDADNTSHAISFDVRSTNDVRRIFDPISYSKGTILLRMLNSIVGDVAFRSATRDLLKKFAYGNMDRDDLWAMLTRHGHEQGTLPKDLSVKQIMDSWITQPGYPVVNVERRGADLVLRQERYLLPSKNTADQSTWFIPITFETDELRKGDNIPTHWMRSEDEEELIVGNVFAHSSNSDNVIYLNLNRQGYYRVNYDMTSWLALKKNFSTLPRITRAQLLDDALHLSQAEYLTYDIPLTFLMELFDAVDDELLWIAAKPGLNYLIYNLKREPAYETFRAFMKFIVRPAFDHYGLHEPDNESHLQLKHRALVAYFACKFNYDRCTQKAQMKFREWMRDPKNNPIKPNLKSVIYCTSLAEGSSPEWYFAYKQYKTTTSASEKEEILTSLGCTTKPWLLSKYLNMTINPTSGILKQDGALAFRAVASNAIGHEIAFDFLQGNIKEIVEYYGDGFSTLSEMIKSLTIYMNKDYHKHQLLDLAATCRKLGLHAVESAIELALEQVNNNIYWRSHSYHSLKNFLEGIVSEFQINIF

SEQ ID NO: 11584 - DNA, 6161 bp, DROSOPHILA
ctcggaatttcgacatcatcgccttcggtggccaccgactcgtcgttgcccgcagccacttcgtcggtggcggtcagggaatcggacgcggagttgcacagcacattgccgtgggcagcgtcgccctcgatctcggagtgcgcgtccgtgctcagcttcattctgcggtccagtttaatcgcgctctcgtcaattaaacactaccgttaattcgacaatttctaagaacacagaggcttcgcttgcgccaaaacttcgactgcaaccgtgggcatcgcggtagctatcgatccatcgatacgatcgctgaaagataggcgtcacacattcctatcgattatacttagccaagattcgcaccgtaatgcacagtgaggcgaagtgttttcttttacttatagtatagttatataattaataataatttttataataatttttgaactaaatcataagcgccgcggggtgttcttttattcgctctcaggcacgtcatccaatacaaatttctaactacaggtttctaaaccttctatataaattttttgaaaaggttccttagccacgactgaggtactacactggccaggggacttcgttacagattgtttttataatagttattcggagttaacagatactgccatgtattgttgttttccaaaactaaatattttaactttaactcaattctttcaccttaccgaaaacaacgtgaatacctgaattttacattaatatgaacatttaagttcttaatgtatagctgattaaatgcaacttggctttaaaggtaaaaactcggtggcacaaatatttctatactttattattctttcattcataactcaaaagtaaaaatgtatctgtatctgcaattcgtcaaatttggctagtaaaactgagaagttggcatagctaccgctcacgcacgacgcccggatccaatcagggcgaaactcacgtggggcggccatccctagcgtaaacatatgtacatacatgtaaacgcatgtaaagacaaactcgacgtttatcctggatttcctcggcactcacgggtgttgcggcaagcaaaagcacacgaataacaagggccaaggagcatggacgactttatcaagacactgattgccgaggtgaagtcgcagggcgtcttcgacgaattccgattcaactgctgcctggcggacgtggacacgaagcccgcctaccagaatgtgcgcacccaggtggagacggcggtcaacgattttctggccaagcagcaatggacgcccgagaccaacaaggtccagctgcgagagaggctgcgcaagcaccttatggagtgagtatgcttctggcggggcttgggtaacctggggtaatcacatcgactgtttcagctccgatgtcctggacaagggagtggaccaaatcgtggaccaggtggtcaatcccaaggtggctaccatattcgagccaaagatcgagagcattgtctacaagtacctgggcatcacaccacctgcgcgacccactatgctgtcagctccgcctttgccgccatttggtgcccacttgaacggcagcagcctgctcaatgtggagaccacggttggtctgctgcccacggacctggagcagataagtccagactccgatcgggctaccgtcaagtcggagtcgagggatgacgaacttccgcccggtgtagacgacgaggacacttcgccatcctacgagctagtgagcgagcggaaaacacttgccatcaaggaggagctgaacaacgtttcgttgaataactcggattcggtgaacggcgtctcccaggcgtcgcaactttcgcaggtttccagtgacagccgcctgaccatggcgtcgtccacggagtccatggttgatagccaccagcacacagcagctcacaacagtggggagccagagaacatttgcgaggaagcgcaaatgccaaagttcagcgaaaactcttgggatgctagtgcgggaacaggccgaagcgaaggtcgacagcttcacttcgacatcaaacaggatgccattaccttcgaaggtgggtttgccgggcgccacgatgggttatttaacttctacgatttctttttcgtgcaggtactgagcgaaagaactcggtgtcggagacgactagcacaggcctccaaattctttccatcgaggatgagatcatgtcggaggtgaaggcaaacatagacgacgccaacaatgccagtattgagtctatagcaccggagcctgtacaagtgccagcaccgccgaaagttaatccgcctcctcctccgcggccagcctcgccaaaagtagagcctcctccgccggcaccaccaggagttgagtcgccgccagggccccaaccaccagcgtcacctcgttttgatccacctccaccacatacaattgagccaccgccaccaccagcaccaccaacacttgtgccaccgccaccaccagcaccaccaacaattaagccaccgccacccccagcaccacctacagttgagccaccgccaccaccaccaccagcaccacctacagttgaaccgccgccaccaccaccaccagcaccaactaaagttgaaccacctcctccaccggcaccagctgaagttgaaccacctcctccaccggcacccacagaacttgaaccacctcctcctccagcaccaccgaaagtcgagcttcctcctccgccagccccaccaaaagctgaggcagctataacgccccgaagggcgaaaggtagtaatggattcatcacagagctggccgtgacacccaaggagtcggaaactcgggataaaccacacaatgtaaacacggatgtcaaagaagatgagcaaccagcaacaactgaagacaagcaagataaacccctagagcttggattggatgcaccaaaagacgctgttagcacagcgtctgagtccacggagtcgccaacatccacgtcctcgcaatcaaaaagccattcgaagtctagggataaggaaaaggaaaaggatcggcgacaccacaggcactcagatgacaaacaccggcgaaggagcacagatcgggaccgcgatcgtagtcgcgacaaatcgcacagcaagcattcctcgagttccagctcgaagcactcctcatcgaactcctccagctcgaagcataagagtagtagctccaagaacgataagagctcctcaagttcatctagccggagtaatcgagagtcgtcgtcatccaagcgctcgggaaccacttcttcatcacgccacgaatcttcctcacacaaaaaacacaagtccagttcatcatcctcgcgatcggaacgagataaaggcaaggagaaggataaggaaagggaaaaggacagccaaagtcgcagccaccacagcagtagcagttcctcgtcgtcgtcaaggagaaaagatcacgaccgaggccgcgatcgtgatcgtaacaaatcaaacacttctggcagtgcagagaacaaggctatccacgatgatcatagcgagagcaaagaaaagtataagcagcgtcggggttccgactcaaacgacgaggggaagcctccaagttctggtggtccggccaagaactcccagccggaggattcagcagctacaatgaaatcagatgcgcccgtggagaatgctaacggcacgaatggaaactccaacggcagcaccaatggtgcttgcgacaatgtcagcggtgttgtcatcgtgagcgacatcctgcagcaatcgacgagcagttttgttgaactgaccgctggatcccaatcgcatgacagagcggagagcagtaagcatgaacccgaagatatagacggaaaagaggcggataatcagccggaaaaaacagaattggaggcaaggcaagacgagtgtgcttcgcagaatgaagtgccaactgtagaacctcaaactttagctgactccgttcccgatttgccagccaaggaaagcatggatacattggaagacgaaaaggtagagaccaatgtcgaagagaataagtcagaagaggagagcaaaccggaaaatcctcccgaagagtgcgtcgacgaacctgctcaagtcggcgatgtggaggatccaccgcaagatgctgacaaacccgccacaccagtcccaatctcgaatgagcaaagcgacgaatttagtgccgactttgtgacccacttcgaagaaaacacagacgagtttaggacgcgtctgcagctcatcaatcaactgatagaggatcgaaagaatttgcttaacaggttaagtgaggatggaacacaggaggaggcagtggatatacgtgccttgcgacgcagcctctccaagcgaagacggagcagcatgcaggagcagcatcgagtggagcgggaaacgacaccgccgcagcctagaagtccgagcagcagcagcaccgccggcagtccggcaaagagactgcgacaggacgagcccaagtcatcgccaacaccatctgacgccagcataaactcgaaggagaacgaggcactggagaagcaggagcatggtgcgtactgtatcattgctaagtttcatttggtgtagcatttgttcctcgaatctctcttttgctaactctcacaaagggtggatcgatgcaattgaattgtcgtatgtcttaacgtttagtgaaaatcaagtaaaaattgataataaagtctataattaacacaaatcgatccaccctgcgaatgtgatctacatacatacatctctgttctcatgctcatcctcaatattcttctttaccgcctctattttctcccccacacgcatccgcattgttaactaatatacataatatgtagctgtatgaagccaccactagtagtcctaaccaaaccgcaatggagctgggtaagcggttcccgcgcgattctctgtcctttgcccgccgattgttgatgcttcgagcgattcccgtgaatgcgtgtgactaaagtgcttgtttttatcagcagacgccctgtccgccaggcgactcagcaagaagctctgccagcagcagcggtacaccaacgatgatctctacaagccccgtccaatcctgtcgcagcgctctcgtcgccggggcctggactccattctctagccaacggataacctgttatcggaaacaataaaaggcaattgttgttaatgcatttgacataaaacaagtcttcgtttctttcatccgtttaatgggccatttcgcttgccaatggttttgcttccgcttgtttttttttcgtttgaattctttaacaataaaattgtaatttagcgctacaccttacagtttaatagtcgccggtgcagcatatccatatatattatgcatatatataaacaaaaataacagtgaacgtaataatatgatgcattattgtatattttgggcgatccactagccttgatccccggcactcaactgcgtctgctactcaaggatgtggaactctagcactgagacgaggataatgtgtgatgatagatcgaaacagtcgagtgcgtggagcaaggacaatggacatagctaggctacggctctctacatggggctggttagttatagtaccgggtgtagattatggggcattgtaggtctgggggagacgtagttctctgggagctgttttctgctgtatctgctgttccttatattttgtaacatctcagtttgaagatttcggctgtaatttgattacaaattattgaatttttccttctgccgcgcgagcgtgtgctttacatttttgctcttgattactttacaacgatcaacataaatatatgtatgtatatgcgtatatcatttgaaaattgtttaaaaaaaatatatatataattgttgtaaatcaaaggttgtaatacataggtaatagtattttacaagaaggttatctcatttcaaagtaacatagatacagtatcatcattagcatatacttttaacaagaatttcgcactttgcctaaaaatgtcatattgtgtgtgtatagggtgtgtgtgtgtgtgtgtttgcgtgttgtgtgtgagagcgagagttttgtgcagaacaacaactacgatttaacctccgactatggagtgataaaactctctcaccgactcctcgcagagtattcatacaagcagctg

SEQ ID NO: 11585 - DNA, 3593 bp, DROSOPHILA
acatgtaaacgcatgtaaagacaaactcgacgtttatcctggatttcctcggcactcacgggtgttgcggcaagcaaaagcacacgaataacaagggccaaggagcatggacgactttatcaagacactgattgccgaggtgaagtcgcagggcgtcttcgacgaattccgattcaactgctgcctggcggacgtggacacgaagcccgcctaccagaatgtgcgcacccaggtggagacggcggtcaacgattttctggccaagcagcaatggacgcccgagaccaacaaggtccagctgcgagagaggctgcgcaagcaccttatggactccgatgtcctggacaagggagtggaccaaatcgtggaccaggtggtcaatcccaaggtggctaccatattcgagccaaagatcgagagcattgtctacaagtacctgggcatcacaccacctgcgcgacccactatgctgtcagctccgcctttgccgccatttggtgcccacttgaacggcagcagcctgctcaatgtggagaccacggttggtctgctgcccacggacctggagcagataagtccagactccgatcgggctaccgtcaagtcggagtcgagggatgacgaacttccgcccggtgtagacgacgaggacacttcgccatcctacgagctagtgagcgagcggaaaacacttgccatcaaggaggagctgaacaacgtttcgttgaataactcggattcggtgaacggcgtctcccaggcgtcgcaactttcgcaggtttccagtgacagccgcctgaccatggcgtcgtccacggagtccatggttgatagccaccagcacacagcagctcacaacagtggggagccagagaacatttgcgaggaagcgcaaatgccaaagttcagcgaaaactcttgggatgctagtgcgggaacaggccgaagcgaaggtcgacagcttcacttcgacatcaaacaggatgccattaccttcgaaggtactgagcgaaagaactcggtgtcggagacgactagcacaggcctccaaattctttccatcgaggatgagatcatgtcggaggtgaaggcaaacatagacgacgccaacaatgccagtattgagtctatagcaccggagcctgtacaagtgccagcaccgccgaaagttaatccgcctcctcctccgcggccagcctcgccaaaagtagagcctcctccgccggcaccaccaggagttgagtcgccgccagggccccaaccaccagcgtcacctcgttttgatccacctccaccacatacaattgagccaccgccaccaccagcaccaccaacacttgtgccaccgccaccaccagcaccaccaacaattaagccaccgccacccccagcaccacctacagttgagccaccgccaccaccaccaccagcaccacctacagttgaaccgccgccaccaccaccaccagcaccaactaaagttgaaccacctcctccaccggcaccagctgaagttgaaccacctcctccaccggcacccacagaacttgaaccacctcctcctccagcaccaccgaaagtcgagcttcctcctccgccagccccaccaaaagctgaggcagctataacgccccgaagggcgaaaggtagtaatggattcatcacagagctggccgtgacacccaaggagtcggaaactcgggataaaccacacaatgtaaacacggatgtcaaagaagatgagcaaccagcaacaactgaagacaagcaagataaacccctagagcttggattggatgcaccaaaagacgctgttagcacagcgtctgagtccacggagtcgccaacatccacgtcctcgcaatcaaaaagccattcgaagtctagggataaggaaaaggaaaaggatcggcgacaccacaggcactcagatgacaaacaccggcgaaggagcacagatcgggaccgcgatcgtagtcgcgacaaatcgcacagcaagcattcctcgagttccagctcgaagcactcctcatcgaactcctccagctcgaagcataagagtagtagctccaagaacgataagagctcctcaagttcatctagccggagtaatcgagagtcgtcgtcatccaagcgctcgggaaccacttcttcatcacgccacgaatcttcctcacacaaaaaacacaagtccagttcatcatcctcgcgatcggaacgagataaaggcaaggagaaggataaggaaagggaaaaggacagccaaagtcgcagccaccacagcagtagcagttcctcgtcgtcgtcaaggagaaaagatcacgaccgaggccgcgatcgtgatcgtaacaaatcaaacacttctggcagtgcagagaacaaggctatccacgatgatcatagcgagagcaaagaaaagtataagcagcgtcggggttccgactcaaacgacgaggggaagcctccaagttctggtggtccggccaagaactcccagccggaggattcagcagctacaatgaaatcagatgcgcccgtggagaatgctaacggcacgaatggaaactccaacggcagcaccaatggtgcttgcgacaatgtcagcggtgttgtcatcgtgagcgacatcctgcagcaatcgacgagcagttttgttgaactgaccgctggatcccaatcgcatgacagagcggagagcagtaagcatgaacccgaagatatagacggaaaagaggcggataatcagccggaaaaaacagaattggaggcaaggcaagacgagtgtgcttcgcagaatgaagtgccaactgtagaacctcaaactttagctgactccgttcccgatttgccagccaaggaaagcatggatacattggaagacgaaaaggtagagaccaatgtcgaagagaataagtcagaagaggagagcaaaccggaaaatcctcccgaagagtgcgtcgacgaacctgctcaagtcggcgatgtggaggatccaccgcaagatgctgacaaacccgccacaccagtcccaatctcgaatgagcaaagcgacgaatttagtgccgactttgtgacccacttcgaagaaaacacagacgagtttaggacgcgtctgcagctcatcaatcaactgatagaggatcgaaagaatttgcttaacaggttaagtgaggatggaacacaggaggaggcagtggatatacgtgccttgcgacgcagcctctccaagcgaagacggagcagcatgcaggagcagcatcgagtggagcgggaaacgacaccgccgcagcctagaagtccgagcagcagcagcaccgccggcagtccggcaaagagactgcgacaggacgagcccaagtcatcgccaacaccatctgacgccagcataaactcgaaggagaacgaggcactggagaagcaggagcatgcagacgccctgtccgccaggcgactcagcaagaagctctgccagcagcagcggtacaccaacgatgatctctacaagccccgtccaatcctgtcgcagcgctctcgtcgccggggcctggactccattctctagccaacggataacctgttatcggaaacaataa

SEQ ID NO: 11586 - protein, 1151 aa, DROSOPHILA
MDDFIKTLIAEVKSQGVFDEFRFNCCLADVDTKPAYQNVRTQVETAVNDFLAKQQWTPETNKVQLRERLRKHLMDSDVLDKGVDQIVDQVVNPKVATIFEPKIESIVYKYLGITPPARPTMLSAPPLPPFGAHLNGSSLLNVETTVGLLPTDLEQISPDSDRATVKSESRDDELPPGVDDEDTSPSYELVSERKTLAIKEELNNVSLNNSDSVNGVSQASQLSQVSSDSRLTMASSTESMVDSHQHTAAHNSGEPENICEEAQMPKFSENSWDASAGTGRSEGRQLHFDIKQDAITFEGTERKNSVSETTSTGLQILSIEDEIMSEVKANIDDANNASIESIAPEPVQVPAPPKVNPPPPPRPASPKVEPPPPAPPGVESPPGPQPPASPRFDPPPPHTIEPPPPPAPPTLVPPPPPAPPTIKPPPPPAPPTVEPPPPPPPAPPTVEPPPPPPPAPTKVEPPPPPAPAEVEPPPPPAPTELEPPPPPAPPKVELPPPPAPPKAEAAITPRRAKGSNGFITELAVTPKESETRDKPHNVNTDVKEDEQPATTEDKQDKPLELGLDAPKDAVSTASESTESPTSTSSQSKSHSKSRDKEKEKDRRHHRHSDDKHRRRSTDRDRDRSRDKSHSKHSSSSSSKHSSSNSSSSKHKSSSSKNDKSSSSSSSRSNRESSSSKRSGTTSSSRHESSSHKKHKSSSSSSRSERDKGKEKDKEREKDSQSRSHHSSSSSSSSSRRKDHDRGRDRDRNKSNTSGSAENKAIHDDHSESKEKYKQRRGSDSNDEGKPPSSGGPAKNSQPEDSAATMKSDAPVENANGTNGNSNGSTNGACDNVSGVVIVSDILQQSTSSFVELTAGSQSHDRAESSKHEPEDIDGKEADNQPEKTELEARQDECASQNEVPTVEPQTLADSVPDLPAKESMDTLEDEKVETNVEENKSEEESKPENPPEECVDEPAQVGDVEDPPQDADKPATPVPISNEQSDEFSADFVTHFEENTDEFRTRLQLINQLIEDRKNLLNRLSEDGTQEEAVDIRALRRSLSKRRRSSMQEQHRVERETTPPQPRSPSSSSTAGSPAKRLRQDEPKSSPTPSDASINSKENEALEKQEHADALSARRLSKKLCQQQRYTNDDLYKPRPILSQRSRRRGLDSIL

SEQ ID NO: 11587 - DNA, 2851 bp, DROSOPHILA
gcacccatccgggaagccctgccgcgtccgcccattgattcgccgctaaccgttatacagcccaccgtggctcctgccctgaaagacatggtttttgcagtcaaaacgccggctgctcaaaagtccagcgacgccattgaggtgggaaccacttgcaagaataacggctgcacctactcctttacgggtaacagcagcgactttggcgagtgcacctaccatccgggcgtgccaatctttcacgagggcatgaaattctggtcctgctgccagaaacgaacctcggacttttcccagtttatggcgcaaaagggctgtacctacggtgagcacaaatgggtcaaggaggtgagtgccctaaaaagcaaagagacttggaacacacaagaagaatttttaaaaactcccctattatagaacgacgacaaaaaggttgtgcaatgtcgctacgactggcaccagacggccaccaatgtggtgatggccatttatgctaaaaaatacgattacagtcagagcgtgatagagctgaaccccatcaggctgcacgtcaacctggtatttcccgagcaggacaacgccaggtttgacctggacctggaattgcgcggagtaagtcccaagtccaactgaatttcatggtaaacagactaatcgtatccccttgcagattgtgaatgtgagcaatgcaagcgcgcatatgtatggcaccaaagtggagattaaactgcccaagctggagcccggctcttggtccaacctaaattttcccaacaagaaactgccagtggttaagaaaagccaggtggaagagaagaaaaagcaggaggagagcgatgaggagttcttcgacctggatgacattaaagcggagaccagtttccgtctttccgaaatgagcatgcaaagcccaaacaacttagattaataaagaagttggcatttaatgttatataaaatacacgaatttgcctttgagtagtttgacacagtttgtagcttaatcgtcgtcgtcgtccgccccgggcacccaatcctcatcatcatcgtcatccaaatccaattcgccaatatcctggaacagcgtctcatcgattttgacattttcaatgttttcacccgcctccaggaggaacttgatatccgaatcgttgagcgtgttgtcgcacataaagagttcgcgtccggtctgcttcttggacacattgttcttctcccgcttggcggcaatgccggtgctctcctcgaattcgagcttccatttgaggaaggactccaccgtcacacgggtgccctcaaacttcttgcgttcctcctcttcgatttcccgcagcttctgctctcgcagttcctcctggtggaacttgtgttcatcccaccgctcgttcagccactcctgggcgctgcttaccagcgaaaagatcatctccatgcccaggttctcctcaattgtcttttgcaggtgttccaggaggcgcgtttcaaacatgtcctcaaagttttctggctcctcgatttccaccacgggtgctccatccggataggtagctgtgaatgtgaagaccagtttgcaggcaagacctttctcgggctcctccgaactgtactcctccgtggcaattggaatctggaatttgtggtgcggctccgtggcgagaactgaacagaagcaattattggatatggatttcaaggaagtgccgtggtacttactctccatatcgccacagtatatggagtccaacgcctcgacctcgttggtctgatcttccttgtagttgcggctcattttgcaaatttaatagctttaacaatttcaacaaacaaataagacaaatccggtcgccgccgcgttgaggttacttacagctgagaggcgctgcacggtcagactgcttgatgagttcagttcaatagagaaatatatctttaaccaagtctgtcagacttaaaacctgaataaaaatgggtttcaaaaacattgggaacctaagttaagacaaatcacttttttaacaatgaaatcataccactttacgcagcttaaacatgcagccaacatatgattcgcaagggttgccaccctgcacttagcaatgctgccacacaaaggaacacccttaatatttcggatattaaatatttgagggcgcgtttgaaatcctttcaaaattcaaataatttcaatataaatattgaacaatattttattcgaaaaacaaacatcacataacttaaaatttaattcgtcaatataaatctggttttcattaactctgataaatacagtttgtgttgatgcttcgtcgcccgcaacttttaagttaatacactattttaaaatgttaccgttcaggagcctcaagtctgcaaataaattgaatgcaattaatgtggtgctcaatttcgactaattagttttcatacttgtgcacagtgatcagattgctagcctcgaccttcgtatcctggggcgtcagaaaacaatactgacgcgataaccactccaaaccctcgccgattagaatttccgtaataaacttccggttcacttcatcctgaaagaaggtacattgtctcggtatactcaaagaagtggcgaatataaaacgaactcactgtaaacacatcgtattcgtccaaaaagtagaacggatgatctgaagtgctccaaagtcctttcagcaaggaaactgtcgtgaacgatcgttcaccgcccgataaactcctggtattggaagtctcattcccactgggcggaaatacgttaatcttccacgtcttctccttgtcactggtctcgaaactaactttaaattgtcgcatagcaagagcttgctgtgaaaagtaa

SEQ ID NO: 11588 - DNA, 797 bp, DROSOPHILA
cggcggcgaccggatttgtcttatttgtttgttgaaattgttaaagctattaaatttgcaaaatgagccgcaactacaaggaagatcagaccaacgaggtcgaggcgttggactccatatactgtggcgatatggagattctcgccacggagccgcaccacaaattccagattccaattgccacggaggagtacagttcggaggagcccgagaaaggtcttgcctgcaaactggtcttcacattcacagctacctatccggatggagcacccgtggtggaaatcgaggagccagaaaactttgaggacatgtttgaaacgcgcctcctggaacacctgcaaaagacaattgaggagaacctgggcatggagatgatcttttcgctggtaagcagcgcccaggagtggctgaacgagcggtgggatgaacacaagttccaccaggaggaactgcgagagcagaagctgcgggaaatcgaagaggaggaacgcaagaagtttgagggcacccgtgtgacggtggagtccttcctcaaatggaagctcgaattcgaggagagcaccggcattgccgccaagcgggagaagaacaatgtgtccaagaagcagaccggacgcgaactctttatgtgcgacaacacgctcaacgattcggatatcaagttcctcctggaggcgggtgaaaacattgaaaatgtcaaaatcgatgagacgctgttccaggatattggcgaattggatttggatgacgatgatgatgaggattgggtgcccggggcggacgacgacgacgattaa

SEQ ID NO: 11589 - protein, 244 aa, DROSOPHILA
MSRNYKEDQTNEVEALDSIYCGDMEILATEPHHKFQIPIATEEYSSEEPEKGLACKLVFTFTATYPDGAPVVEIEEPENFEDMFETRLLEHLQKTIEENLGMEMIFSLVSSAQEWLNERWDEHKFHQEELREQKLREIEEEERKKFEGTRVTVESFLKWKLEFEESTGIAAKREKNNVSKKQTGRELFMCDNTLNDSDIKFLLEAGENIENVKIDETLFQDIGELDLDDDDDEDWVPGADDDDD

SEQ ID NO: 11590 - DNA, 5699 bp, DROSOPHILA
aagttacgaaaccaaagaaaaaaaatgaatgtttcctatttcccaaccgaaaacatataataataaatattgattacaaaaacgaatcatcttaatttgaaaaattcatttgtttatatactttaaatcgtcatatagatggcgctacatttgccattgtcactcacagcgcaacgcgcacaccttatcagctgaatttgttgccattcagaatgcagtgtttgtgaaggcgtagttctgttgttttttatattttccctctttaaaaatacacaaaatgttgaaacccaaagctttgacgcaggttctcagccaggcgaacaccggcggagtggagaacaccctgtaggatagtcccttaccatgccattccttcaaatatcacttatccctgcatccacagcctgctcagccaggagggagctctattggcctactccggttatggcgataaggatgccaggataacggcggccatagccagcaacatatgggcggcctacgagaagcatggacgcaacgcctttcgcgaaggtcgcctcactttcgtgctcatcgattgtgaaaacggtcatgtggccatcacacaggtgggtgatcctcttttttttagcagggattcgttctataaaatcttaactatattcctttttacaggttgccagtgtccttttgtgcctgtacgccaagcaaacggtgggattgggtcttctgaagcaaaaggccatgtcactggcctcctatttggagcgaccgcttaagcagatctcggcctcataaggataaaacaatgatgtaccaagttccgaaatgaataagttaataagtgtatgcatcaaaagtgaatcaaatgaatatgaatagtctgcggaaaagtttaaacgataatatattagtacttgaaattatgaatctttaaggattttgttagtatttaaggaaaaacttgtctgctggtttccaaaagtaacccaaagatatttcgtattctgaattatttggatagagggtcaggtttattattctgcaagatttgttcaagaaaacacacaatcattagggaatattgtataagaaaattttggacttaattactaagtgtggacttattcgatggcgtagagcttcagggtgcggtccatgctggtggatgccagatactgggcgtgcttgccgaatctcacgcccgttgccagggccgtgtggtcgttgaataccttcagttcctgccactgcttgcacaggtaaaccctgtaaataaaacgaagcaaccgtcagaatttgtatttgtaccgtggcaaccaaataaacaagttaactaagggaatcttctttggcgaatttaacttaacaatgcgaaagtttaaaagaaaagtttaccgcgaatatgaaagtaagtattatattctaatatgcgaagacttaaaaatgcatgctgctcttcaagatttcgtgcgacccaagacccatgtggaaccggagcctccaaagcccataaacttatcgattgaggacttcaatgcggtgcgaaataattaatttttatatttccaaagttaagttttattaatattcctcagcgcggagagatcgccaatccccgtgctccttgtgtggtcaccaccatcgatcccgattatattaaggacgccagtgcgcaacgtttggccagaaaatttcgcatgaaaacgtaaggaatcaaatgaattatgtgctggtgcaatttcacagctttttcagggacatcctactcttgagggagattacccgcaatcgctttatgtactatgctacgcaagaactttttttggaccgaaaacgcgagaaggaataccaagacaatgtatacgaaaaggccgaggagtttcacaagtttgcagaggagtcgctcaagaaaatggaagcggaggagtttaagaaaatgttagaggcccaagaaaagctgaagacactgaaggaaagcaaactgagcgaagagctgaacgaggtgaagctggagcatcagcgagtgctgatggaagtgcaggaggtctacggtcgctttcagtatttactcaaactgatcagctactttgatgacacagttgaggaggagcaaaccgagggagacgatgccagcaataggcttagcatgccgcaggaaatcgtagccatggagatcaccgaacgacatccagcgggtctcgagcaagtgcgtcaagtccaagactacatggagaagatagtgcgtccgtatttggcaaagcggaatcatctcaatgcagagatttggatacgtggctatgagagaaatcgcttaaaggtgtccaactacaacaggcgcttttctcagttggcaatcttgaaccacatcgtagccatcctccatgacaaggcccagaagacgtacgagcgtcaggtgaaagccaatgtgttcctcaaggatcccgagttcctgcagcgacgggtggcaggtcttcaggagcgtgccaagggtctattaaatgacttcgagcagagatactgcaaggagtgagttgggatgcgtacatatttgaatcaactattttatattcttaatttccagcaagctgaatatcaagctaaatgctattgtaccaattattctcaagcaaatccaaaacaaagttaagccggagcaaaagcgagaggttacgcagccgccatccaagccagcagcccagaagtcgtccaagcaatggcgaacactggaagacatgcagcctccaccaccgccacccaagtctacatacgcggacgaacaggacacgactcttgccaaggtggagaaaatccagggctacgttttggagctcttggctaaactggaccacatcgaaccgagcaagctgcgaagtgtcgagcagcaggttcgacgtcgcatggcagcggagaaggaaatgtctcgccgtgcgttagtcaagcagaaccggctacacaactggatggcgcatttcaagaagcatcatgatcagcaggttgagcaacgatggaaaaataaagtctaagctagacaacaacaccatacttaaaacattaaatgaatacaatttaaaacttattttaacctcattctgaatgatttcaataagaaaagtacaattcacttacctgacatcgctgccggcgatagccagataggttccgctttggtcgaagcacagatccttgacctcgtagccgtcatcaagctggattgtcttaaagttcttcagctttcgcagatcccacagcttaacgcaggcatcatctgcagcggtggccaggtagtaaccgttctccgagaaggagatggccgaaatgggaccggtatgaccagggaagttggccacattgctctgctccttcaaatcccagatcttaacctgcgagtccacggtgcccgtaccgaagatcagaccatcaggatggaattgcgctgtcgtcagcccgacttcggcggtatcgattaccttggtgagcaggcgtcctgtgcggatatcggagaatgcccagtgtttgtcggatgatgtggacagcaagtagtcgccagtggggtgcagcgaaaggccagtaacaggtccttcgtggcagcgcaggagaagctgcgtctgcgaagtgggcacgtgccagatgcgtatgttcatgtcgggcgagccggttatgactgtatcctcgttaggatgatatatgactttggtgatcttcttggtgtgtcccttcaggatggccaccatctgctctgtgtccttgttgaacacggtggcgtttttatcgttgcctccggtcagaatcttactgtgatcagcactgttgatgtccaaggccagaatgccgggaacggaggccgagtgtaggccgggatgggatgccacagtaaggaagttcttaacctgatccgttgtaaccagatcctcgggcacagtgcgtccgcgcttcttacgctcctgcgtcagcaccgtggccttgtcctgcagtttctgtatgacctcggcgctcatgcccgcctgctccatgggatgggcagcagctccgccagcctcagaggccagggccggttgtggtattgccgtgggtgcgttggcaatgcccgcctgcggtttcaacgtggccagagcttcgcgagcggcggccacctccttattgaggcgggcaatcacacgacaggcggcatcgtgctgatacagcgcatgggacaactcctggcgcgtcgtttgcagctgctggcgttgtgtgaacgagtgaatcatgagggcgtcccactcgtcctgcatcgttttcaaagtggccggaatgctggtggcacttggcggtttcggtttcaccacagccggcgtcttgatctcgatcagctcctccggcttcagctccttgccgctaatgggatcgcagccattctctaacagatacttctcaatcacccgcttttcgaaaacggctcccgagtgcggggaaaccacgggcgtctcggggacttcgtttgtcacttggaatggaaagtgcgattcataatggcccaattcaaatcaaaatctaaattattcacttacgtgcgcaaaccaaagccattgctgtttgtgattatgtcgcttttcgcgtagtcttgttggtaaattaaatgttttacacgtttttcccgagccaagcgcaaaattgtcggcaaagccgcttcttcttattatgccagttactcggcgacgcgggagtttcgagcacagggctgccagatcaaatggattttggctagaaatttgcacagaaaaaactagctagaatttaaacaatttattttattgataacacaacacattcaataagtatttaatccataacaatagtttttatagataaatgacatttactgatagagaagtgagtaacatatcttaaatcaatcagctatctcaccgttttgccaatcacagttccgcacgcacaatccataattgctggcaaccctagcacgttgtttctgttattcaattcacgatctagttttataacatagtttactgccattaaggtatatttttaaaatgctgaagcattttgcacgatggcgtctgggcagccagttgctaaagggatgtgccgcaccagtgaggcaagcctccaaaacctccagcgcagagaacctgatagccggcacagaggaaccccaaaaaaagttcgtcaatccgttttcccagcccgctcctgcgttaagtaatgatacgatatcagagaacaaggaggaacgggataagcgactcaaggtgctgcagctggaggcggacattgcccaccaggagggtcggcgggtgccgtcactggaattctttaaggatcatcattgggagcacgtgctgacgctacccacaaaatcagctaggatcaagtactttggctatctctggcaaatcgagatgaagaaggaggcggatcaacgcaagaaggcagagcgagcgaaggaagccgagcggcgggttgcggagatgcgaaaggagcgcgaggagaatacgcacattatctatggcctgggacacacatcgttgtttctgcgtatctatgataccactattaatcactggcagaacaaccgactcacacgggccatgcagtttgcccccaaaatggttttggattgctcctacgatgagcacatgaacaatcgggaggctacctatgcagcaaagcaattgatgatgtgctttgcggagaaccggatgaatgatgagccc

SEQ ID NO: 11591 - DNA, 1775 bp, DROSOPHILA
ccctgtgctcgaaactcccgcgtcgccgagtaactggcataataagaagaagcggctttgccgacaattttgcgcttggctcgggaaaaacgtgtaaaacatttaatttaccaacaagactacgcgaaaagcgacataatcacaaacagcaatggctttggtttgcgcactgacaaacgaagtccccgagacgcccgtggtttccccgcactcgggagccgttttcgaaaagcgggtgattgagaagtatctgttagagaatggctgcgatcccattagcggcaaggagctgaagccggaggagctgatcgagatcaagacgccggctgtggtgaaaccgaaaccgccaagtgccaccagcattccggccactttgaaaacgatgcaggacgagtgggacgccctcatgattcactcgttcacacaacgccagcagctgcaaacgacgcgccaggagttgtcccatgcgctgtatcagcacgatgccgcctgtcgtgtgattgcccgcctcaataaggaggtggccgccgctcgcgaagctctggccacgttgaaaccgcaggcgggcattgccaacgcacccacggcaataccacaaccggccctggcctctgaggctggcggagctgctgcccatcccatggagcaggcgggcatgagcgccgaggtcatacagaaactgcaggacaaggccacggtgctgacgcaggagcgtaagaagcgcggacgcactgtgcccgaggatctggttacaacggatcaggttaagaacttccttactgtggcatcccatcccggcctacactcggcctccgttcccggcattctggccttggacatcaacagtgctgatcacagtaagattctgaccggaggcaacgataaaaacgccaccgtgttcaacaaggacacagagcagatggtggccatcctgaagggacacaccaagaagatcaccaaagtcatatatcatcctaacgaggatacagtcataaccggctcgcccgacatgaacatacgcatctggcacgtgcccacttcgcagacgcagcttctcctgcgctgccacgaaggacctgttactggcctttcgctgcaccccactggcgactacttgctgtccacatcatccgacaaacactgggcattctccgatatccgcacaggacgcctgctcaccaaggtaatcgataccgccgaagtcgggctgacgacagcgcaattccatcctgatggtctgatcttcggtacgggcaccgtggactcgcaggttaagatctgggatttgaaggagcagagcaatgtggccaacttccctggtcataccggtcccatttcggccatctccttctcggagaacggttactacctggccaccgctgcagatgatgcctgcgttaagctgtgggatctgcgaaagctgaagaactttaagacaatccagcttgatgacggctacgaggtcaaggatctgtgcttcgaccaaagcggaacctatctggctatcgccggcagcgatgtcagggtttacctgtgcaagcagtggcaggaactgaaggtattcaacgaccacacggccctggcaacgggcgtgagattcggcaagcacgcccagtatctggcatccaccagcatggaccgcaccctgaagctctacgccatcgaataagtccacacttagtaattaagtccaaaattttcttatacaatattccctaatgattgtgtgttttcttgaacaaatcttgcagaataataaacctgaccctctatcc

SEQ ID NO: 11592 - protein, 505 aa, DROSOPHILA
MALVCALTNEVPETPVVSPHSGAVFEKRVIEKYLLENGCDPISGKELKPEELIEIKTPAVVKPKPPSATSIPATLKTMQDEWDALMIHSFTQRQQLQTTRQELSHALYQHDAACRVIARLNKEVAAAREALATLKPQAGIANAPTAIPQPALASEAGGAAAHPMEQAGMSAEVIQKLQDKATVLTQERKKRGRTVPEDLVTTDQVKNFLTVASHPGLHSASVPGILALDINSADHSKILTGGNDKNATVFNKDTEQMVAILKGHTKKITKVIYHPNEDTVITGSPDMNIRIWHVPTSQTQLLLRCHEGPVTGLSLHPTGDYLLSTSSDKHWAFSDIRTGRLLTKVIDTAEVGLTTAQFHPDGLIFGTGTVDSQVKIWDLKEQSNVANFPGHTGPISAISFSENGYYLATAADDACVKLWDLRKLKNFKTIQLDDGYEVKDLCFDQSGTYLAIAGSDVRVYLCKQWQELKVFNDHTALATGVRFGKHAQYLASTSMDRTLKLYAIE

SEQ ID NO: 11593 - DNA, 5133 bp, DROSOPHILA
cgagcagacgctgctcaagtacctgaacatcaggaggacgttcccgcacatgagcacccagctggactatctggagccgcgtctcggcgacctcatcgatcagggatacatatttgcggtgccacagcgtgacaagcacggtcgccgcgtggtggtcatcaatgccaaggggctaaatccgaagatccacacaagctgcgaccaggccaaggcgcacttcctcacctacgagtgcttgatggaggatcaggaaacacagatcactgggctaacgcatgtgggcgacttcgccggcgtgaccacggcgcatgtgaccaactggaatcccacggagtttgcccgcatcttcaagtggggtgagcaatcgctgcccatgcgtcacaaggagatccacctgatcaatgtaccatccacactcaagtggcttattgatttcgtgaagaaccgcgtcagttccaagatgaagaaccgcctgatcatctacggcagcgagaaggagctgatgaagagcgtggaccagggctgtctgccgctggaaatgggtggcaaggtgcccatgcgcgagatgatcgagctgtggaagcaggagctggcgaccaagcgcgacctgattctcggtctggacaagagcatactgcgctccgatcgcggcatccagcggcgcagcagcttcaatgccggaaaggcctccaccggcggacccaacttcgtttcacaaatcgagtccatcgagggtagctttcggaaactggagttcgactaaccgatcgccagttgtagtttaagtttatagtccttagtcttaggcaacatccaatcaattaacccaatgcgcaacgcttcgccggtcccccgatcctggccagcgcccgatcctggggatccctgattcgcttatcggtggcaaccgctttactcatcctgcgcttctttgtatactgtgtttgtgtttggcgtacaataaacgagaggaataatttggaatcatctctttgttgcttcacttggacgtttggtggctcgcgtagtgcggccagtgcctcagttcccgctgcagtgcgtccgtatagctgcccaacacgaagagttggtaaattggctgcagaatccgacgctttaaagactcaaggatcagagcctgggcggccatcaactggcaatcgatgggtggtctgccgctgaagttacccacaaaggccatcaccaacgagtctattccatttagatcccttggatactggctccgatagtgccatccttgtgcctcgaaaacctgacaatcaccggcgaccagaaagttgtagggcagctcccccacatgcgacctctaaggagatgaatgaatttagctttgattacaatgtactacacatacttatgtccgattaactcacttccagcttatgcaatacatccgggcaatcatcgtggcattcattgcttccagtgtgggtaaaaatcactgtgccgacaccgatcggatcgaaaagagttccccgaccctgaagttccatatccgaccatatgccatgacccacgatactgagtcgatagccaaagtccggcgtttgggctgcaagcagtgcaaagtgattcagtcattaagtggctttgtccacctataaaggcgaatttagaaaaatttaacaatgagtcatatgcatgcatacgaaaaataaaacgaatcttaagttaaacaaaaaaaaaaaatgagggatggctttaaaatgttttactatacaaatttaatgccagatacattatattatgagtatagatcgatttttctttgaatactttcgcctgcccatcaaaacgcacatgagcagcttatcataactcacagctaattgagatttatttattatgcatatatgtaacaataacgatttgagcacgtactcgtgcacgtccaccatcagcgggcaaactcactttgtctccagagcaaataggcggccagtgccaaggcggatgcacacatgaccagcagtcccaccgagcgccaattgaagcagtcttcgtggagcgtcgggttccttcggcaattcgaaggcgtcgtggaggaggctgagactgaggctgtgagggatgaggacgtcttgatggaccgctgagcagctgccagcaagggagtggattcgcttgcaacgccttccttgtccactcgaatgtgtatatcttggctggaacccaggctgccgtacgacgactgagagacggcggccggcgagggactacgacgtgctatcgtagcgaaatatagagcaaacaacaaattatggagtttagccaagataaaggcgaccagatgattagtcaagtggcacagtttgtccaggccactctgatcttggtgggcatagtatttgctgatggcacgcagactgtaggcgctcacaaagatcggcatcttgccactaactgagctgggatatccagccgagatgcacgcattcgtatatctcacccatttaactatatcttatcaagacaagggcttatctatcgtcggacttacccactcgcacggctatgtggctggagtccatggctagaccgctctggctgcagcctcggcatcaaggtggtgctgtgagtgggtcagctccttaccggatcgcactggaacacaccactcgatcgatcggagtcgccgctgtcaaccactgccagcagaatgcacaaaacgactgagacgagaacaagggagagaaccagcccgcatgaagcacaacatttccattaaatcatcagctacgaatttcgaaggggtctcttatcgcactcactcttagactctcttagctatggagtaactttaaagccgggagtaacattcgcatcgcgtttacttgactttcgtttgctgatatcttcaactagactctaataacaatcataaatgggtttcgctttatacacagaggttggctttgcttaatttacagtgcagaggctgctcctcccttaagactaacttgggcttggggaccgtaataagttatgagcatgctagccagtgcaagtggcagccacgggaacactggacatggacactggtttatgggaacatttaaaagtttcacgaaagacaatacattgtgttaaaatcgttcgaaaatctaaaagaaatgcattcgcctatgtgcctaaacttaacttattaggtattacgcgtccgcgagacaggggacaggcctaatccagcacctggacatttcagagctcctgcaaatcccttacttgtaggacctccaaatctgccaggcgcacagggcagccgagagcaaggatacgctacggtgcaagtatttggtttttgagttgggcgagtagcccaaaatcacaggcgaggagacatctgtcagtggcagtttctccaacacggtgtcattattttccacctgaaaaacacaaccaaagtgagcttctcaatcttggatatctagaacttttcctttcatacctgatattgacaacatggatcgtagttccaggaaaccgtgtacagtcctgtgcaaaaaatcgagagtgcacaagcgggagctgcaatgatggggcgatcccgccacagcaagctggccaccagggaaaccactccagtggccaccgccgtcttgtgcaggcaattgcccacccaaatccaacgacctgtggagatatgaaattaatactgtgctttaaaaggaagcacttccaagtgcttaccagtttcgtcgcccagccgaggcggctctataacgatgaagtccaacttggcttccagcgccttgtccagctcagcctcgaatctttcatgggcattggagctgtcgtagacctcgcggatgacatggaaagtgggcaccttactcgtgctgcacaattagaacaacaatacacgaatcaatcatggttatcttgatgtggaactcaaggttaaggtcaagatcaagcgctcagaacaaccgaagcagagaagccattgtgcagacgagataaatgaagaagccgcctagtaaattgcataaccagggcaggtgcacttgggaactgggatttggctgcacccaggtggaatgtgttgcgtaatcccactgcattcacgtaactaggcgccgtatttacctttctatatttctgctaaccattttgctaataaatttgttgttttctatgttgttcataaactcagtgcggccgcagctggaccgttaaaatataccaggtacctaagggcataatactgcaaatagcaatcttccaaaaaaataccgcagttgggcggcacttttgaattatatcgtattcgcaaataccattctcctttaaagagcggcctatatataaaggcttaattccactatttagcaatttatttgcttatttacctatattcataaagacaattagattagattaaagtttttaaaaatatttcagtatttctattgttcttccaactactcaactctcccatctctatttacgataattgaggcatttaagaggcaaatcatgtaaaatctgtatacgattataggagcttaacttaattgaaatcaataattatactcccaataaagatcaaaaatataagatacatgtgttaaatgaattagccggctcttattgtcccaagcgaagaagccaggatttcgccggctgtccgatatggtcacactcgcccactcataagaaaagacacccaaaattgaaaatggaaaagcatcatcgcctgcccctcccggaattgcacgacgacaaacacagacacaaacagtgcaatggggagaacagcaatcgcttccggccgcccaagtacaagacgcgtggctacgtcgccgtggacaacaacaatctgaaccgaagccaatcgctgggctcctgtagcaccaacagttcccagatcgcgcacgcgatctccttccgggacgccggatgttcggattccagtacgctgccctcgtcaccagtccaggccgagctgagcaccctctccctgtcacacttcgagcagtgcttcgaaaggctggccaaactgggcgaaggatccttcggcgaggtattccaggtgcgcgatcgctccgacggccagttatatgccgtcaagatctccaagcaactgttccgcggcgaacagtaccgcgc

SEQ ID NO: 11594 - DNA, 1518 bp, DROSOPHILA
atggttagcagaaatatagaaagcacgagtaaggtgcccactttccatgtcatccgcgaggtctacgacagctccaatgcccatgaaagattcgaggctgagctggacaaggcgctggaagccaagttggacttcatcgttatagagccgcctcggctgggcgacgaaactggtcgttggatttgggtgggcaattgcctgcacaagacggcggtggccactggagtggtttccctggtggccagcttgctgtggcgggatcgccccatcattgcagctcccgcttgtgcactctcgattttttgcacaggactgtacacggtttcctggaactacgatccatgttgtcaatatcaggtggaaaataatgacaccgtgttggagaaactgccactgacagatgtctcctcgcctgtgattttgggctactcgcccaactcaaaaaccaaatacttgcaccgtagcgtatccttgctctcggctgccctgtgcgcctggcagatttggaggtcctacaactcagttagtggcaagatgccgatctttgtgagcgcctacagtctgcgtgccatcagcaaatactatgcccaccaagatcagagtggcctggacaaactgtgccacttgactaatcatctggtcgcctttatcttggctaaactccataatttgttgtttgctctatatttcgctacgatagcacgtcgtagtccctcgccggccgccgtctctcagtcgtcgtacggcagcctgggttccagccaagatatacacattcgagtggacaaggaaggcgttgcaagcgaatccactcccttgctggcagctgctcagcggtccatcaagacgtcctcatccctcacagcctcagtctcagcctcctccacgacgccttcgaattgccgaaggaacccgacgctccacgaagactgcttcaattggcgctcggtgggactgctggtcatgtgtgcatccgccttggcactggccgcctatttgctctggagacaaacccaaacgccggactttggctatcgactcagtatcgtgggtcatggcatatggtcggatatggaacttcagggtcggggaactcttttcgatccgatcggtgtcggcacagtgatttttacccacactggaagcaatgaatgccacgatgattgcccggatgtattgcataagctggaaaggtcgcatgtgggggagctgccctacaactttctggtcgccggtgattgtcaggttttcgaggcacaaggatggcactatcggagccagtatccaagggatctaaatggaatagactcgttggtgatggcctttgtgggtaacttcagcggcagaccacccatcgattgccagttgatggccgcccaggctctgatccttgagtctttaaagcgtcggattctgcagccaatttaccaactcttcgtgttgggcagctatacggacgcactgcagcgggaactgaggcactggccgcactacgcgagccaccaaacgtccaagtga

SEQ ID NO: 11595 - protein, 505 aa, DROSOPHILA
MVSRNIESTSKVPTFHVIREVYDSSNAHERFEAELDKALEAKLDFIVIEPPRLGDETGRWIWVGNCLHKTAVATGVVSLVASLLWRDRPIIAAPACALSIFCTGLYTVSWNYDPCCQYQVENNDTVLEKLPLTDVSSPVILGYSPNSKTKYLHRSVSLLSAALCAWQIWRSYNSVSGKMPIFVSAYSLRAISKYYAHQDQSGLDKLCHLTNHLVAFILAKLHNLLFALYFATIARRSPSPAAVSQSSYGSLGSSQDIHIRVDKEGVASESTPLLAAAQRSIKTSSSLTASVSASSTTPSNCRRNPTLHEDCFNWRSVGLLVMCASALALAAYLLWRQTQTPDFGYRLSIVGHGIWSDMELQGRGTLFDPIGVGTVIFTHTGSNECHDDCPDVLHKLERSHVGELPYNFLVAGDCQVFEAQGWHYRSQYPRDLNGIDSLVMAFVGNFSGRPPIDCQLMAAQALILESLKRRILQPIYQLFVLGSYTDALQRELRHWPHYASHQTSK

SEQ ID NO: 11596 - DNA, 6910 bp, DROSOPHILA
aattgcatttgttcatcccgctccgcttcccttcctgcaattagtcctggactaacatgtggccaccgaaacaacccaaaggtgagcctaaccaccgggctattggcgtgaaattttaattgccatcttgttgtctgagagcgtggaatcgaaaaaagcgacgcccaaatgtcgggcgtataaggtttttcgactcaaaaatcgaacaatttggtgttaattgaagttctaatatataaagcaaacacatttaaggagctcttaaaatatgtcaagccaaatgggactaagattatttttaataaatcaatgataaaacatgattgataaaattgtttactggcttgacgttattcgcagatttctaagcgaatatatataaaagtattataatattcttatgtgatgggaaagacagatgttttgacatttcggaattgaaaagttttggtaatttatgtcttaatggtctaattgttaaagcagtgaacataaagcagagttaatatttttggaataatattttgttcacaaagaagagtactcttcacatagtaatgcagtagcatcgtctccatctctcagatccaactaacttcctcgtagcgccattttaggcctttttcaaggccctgaagagctcaagagcgtttgaccgacatttggtgctataaaaaccgagaaaccggggagagactttatttcaccacgccgtggtggattcaccacggtgccggcaacatggcgctgcgcgagagagtgacagccgatgagacggcgagagccgtggaagcgagaggcagcgaaagcgagcgactggccatccccctccggccttcggtagcatatgcggcccaaccaccgcctatgacaaagtggcaaaattgttgccacagccgccgctcgagcctcagccgcagtcggcgtcggcagcagcgttggcagcggcggatcgggcaggtgcgtttcataaacgttcagtctcgttttggcagccaagccgctcacgacgtcgctgggtgaaaagttgagataaggccaagaaaacaaaaaaacaaacaaatagaagacaacttgacatctataggaaactccagtgaatgtgaatttttttagtgaagtgttgaaagcaaatataattcgtataaataatcggcaagaaaagggagaaagagtgaaaccccctaagtcctatgaaagactcgatgagcatactcacccaaacgcccagcgagccaaacgcagcgcatccccagctgcaccaccacctcagtacgctgcagcagcagcaccaccagcaccacctccactacggcctgcagccaccggcggtggctcacagcatccatagcaccaccaccatgtcctccggcggcagcaccaccaccgcctcgggcatcggtaagcccaatcggtcccgcttcatgatcaacgacattctggcgggcagtgcggcggccgctttctacaagcagcagcagcatcaccagcagttgcaccaccacaacaacaacaacaattcgggctccagcggcggcagcagtcccgctcacagcaacaacaacaacaacattaatggcgataactgtgaggcatccaatgttgctggcgtcggtgtgctgccatctgccctgcaccacccacaaccacatccgcccacgcatccgcacacacatccgcatgcgctaatgcatccgcacggcaagctggggcactttccacccaccgccggcggcaatgggttaaacgtggctcaatatgcggcggccatgcaacagcactatgccgctgctgctgccgcggctgctgcgcgcaacaatgcagctgctgctgcagccgccgctgctgccgctgcagctgctggtgtagccgcaccacccgtcgacgggggagtggatggcggggtggggctggcgccaccggcgggcggcgatctggacgacagcagcgattaccacgaggagaacgaggactgcgacagcggcaacatggacgatcacagcgtttgtagcaatggtgaggtgagcctctgtactatgcggggggtggggtgttggcggcattagagggtggtgggtcagtatagcattctcgctaattctcgaaaatgcattttcaagcaggaattttcttcattcaaaacaagttcgcaatgttttataaacaaatattgggtcgaaatagaaccaattatcaacaaatctgattaatgttgagccttatgataaaaaatattcaatattcaaattatccaagtcattttaaaataaagctatcactgcctggtgctaagcttataaagtacatatcagatatttttacaactctacgaccacttgcctttttttttaaacagttgtccagattgttttgtaaagctagacacaaaacatgcagatctgataagtttaatattttttaatttgaacgcaaattttttattaatgatattgatattgcgttttagtaacatattccctttaggtgatattaaatatatttgcacttaaccaattctcaaatgtagtgagtgtaaaggcagtcgtaaaataaaattactcaaattcccctttaaatcgtgttaatggttctgttgtgaaacgcatttcatcatagccaattgaaaaagtaattcaattaggtaaaaaataagtaagtccgttgtgcagcagtcaagttcgttgcctaagtcttttgtattgaagcgtgcgcctgaaatgggggctaaagtgtggagcgcgggggtggggcggcggccctcgtcgatgtcgctttgcaaaacaaactgtaaaaattattgcatgaccattttacattctcgttcttgttgcttctatttgttgtggttttagttgaaaaaaaaaaatactttttcacgctttgtttccgtcattgcgaagcttctaaagtccccttgcctcctcgcccctcctcaaacttgggggcatgcacctgcgaatctgagagctattatggcagaatggaggcgtggctcgcagtgggcggggggttggcggaagaagaggatctgcctgaaatgcaacaacaaaatgcagtttaaaactgccgcagccgcagaaaaaatctcaaataattacacacatcgcactcactgttccccgcttcgccgctcgctctgcttcctcctcctatctcacgcacctgcccccttcgcaatcatttaattgtggaaattgttataaaaatgcatttaacccgctttaatagacgccccatggcaatggcagccgggcagcagcaaacgaaaaaatgttgcagtctgtttgctcatctcatcgccactcggttcgttttacttcgcttttggccagcttctcatgcgctccactccatctgggccctgttttgtgccatttattgccgcaatttcctgttgccaattgcacttttataaacggtagtcgcgtcggccagctcttttgggatgacagccagcgggcagggaaggcggcaatccgtcaattcattggaatttcacaattgcgatcagcttcagttacaaaaaaaccaaaatgaatattgatcactagattttatttataaatttaatgaaaaatcataattataataataaaatcagataggaaagttaacttttaaagcttatatttgaattataaatttgtaaaaaaaaaaacaaattaggtttttttttaacaacactgtcgcccaattttatttggcacataattcttgatttttggttttgccttttttttaacgctccacaaattatcgcccgcaaatcgataattcagcaagtcggcgccaacattcgtgagtaattttctttaattgcaaattaattttattcaattgcggcattatcgctcatttatcgctgccattaatcatttatcgtttacgttttatatggtaaacaactttcgccttggcggcaaaataagctcttgattagcgatgattaatagaaataattagcaatgcatctttatttgcttcatatttcaaagttcaattagaggcatagctggattttcaataaataaaataatattgacttcttggtatctcattatcaataacaaagattgagtccacttatttaatggatcgtgcaaaattaaaatcttgaaaagattttattattgtttgtctgcttcctgataaatttatatgcttaaaacaacaaaaatatgctaagattgttaatttccccgtttctaggccttattagaccaaatttaaatgcggcacttggcaagttttcgctttaaataatttaacgcttgagagtttacttagcccgcgtcaaccccttaaccccctcgtgcccatgggccaaaaactcgctctcgcttatcgggtaaccaccatcggttgaatttacataaattttatgtactaaatggctggccagaaaaggtggaaaagcggccttttctggccaagaacacttttcgcaaaaaggggtgctttggcctggtcagcttgcctatctctcttgcggctttttgtggcaagtttagacattttgcggcacgtttttattacactcacacacacacgaaccgctttgtgagcggaagcggcaattgcgtggccataaacgagcctctaactgtatctgcaactgttttaatagatcgcacagagatctaaatcgaattagccttatgggcataccaaatcaccaacaaatagtgattttcggtaaaccatctcggcaaatgttaaaaactagtttttaggcatttaaagttttatagaaatgtaactaatataccttcgttttaagtttaaaagggggaagtgaatattatagtatgtattataaacaaacttcatattttatgataataaaaagttttggagttttacgcatatcctactttgccaaatgtggtattagattagacataatggactttttgcccttagtttcttaatatttctaaaattgaaattctcttttctttcaggcggtaaagatgacgatggcaacagtgtcaagagcggctccaccagcgacatgagcggtctgagcaagaagcagcgaaaggcgcgtaccgccttcacggatcaccagctgcagacgctcgagaagtccttcgagcggcagaagtaccttagcgttcaggagcgccaggagctggcccacaagttggatctgagcgattgccaggtgaaaacttggtaccaaaaccgcaggtgggttttaactttaatgattttttaatttgtattagttttcaaagatgaacttaagaaaatacaataaaatctatacacatatattcttattgaaagtatactaaagtttggtatctattatcattttgcagaaccaaatggaagcgccaaacagcagtgggcctggaactcctcgcagaggctggaaacttcgcggcctttcagcgactttacggcggatcgccttacctgggcgcctggccgtatgcggccgctgccggcgccgcccacggagccacgccccacacgaacatagacatctattaccgtcaagcggccgctgcggccgccatgcagaagccactgccctacaacctatacgccggcgttccgtccgtcggagtgggcgtcggggtgggcgtgggtccggcacccttctcccacctgtccgcctccagttcgctgtcctcgctgagcagctactatcagagtgccgctgcggctgcctccgctgccaatccgggcggaccgcatccggtagcgccaccaccttcggtgggcggaggatctccgcccagtggcctggtcaaaccgattccggcccattccgcatccgcctcgccgccaccaaggccaccatcgacgccgagtccaacgctgaatccgggcagtccgccaggacgatccgttgacagctgttcccagtcggacgacgaggatcagatccaggtgtgagcggtacgccggagtgcggcgattgtgtgcgtgtgctaatcatcgggtttgggcggtctcaaaagtgcgatttccaaggggatacataaactacatagttggtttcacgaatttaagttacatatcactcattttgtaaatcagtcggatcgatgattttattgttccataaaacataaaagtttacatggcatttaggttatttagatgaatcagcagttgcattattcgtgcaccatatcacaacatcgtttttatggttcaaactttagtacaaaggtattttgtttaaatttaaccaaaatatatttggaggcatttataaacttacgatctaaacaaattattgtttaaggtcataaaaagcagcacaaatgagttcagtattcaaaacaaaatcatggaaccgaaaatttgaatggaacatgcatattaaaaaaaaaaacatttgtcaaagatcaatatccacaagaattcgcgtttttgaatctccccttaagccccgcttgtgtgtgtgtgtgcctgcgtgtgtatatatatattaatatccctgtgaatctgtgtgtgtgcttaatttatttgatttgctcttagtaacttattcgaaatgttttttaaagagtttttttttttcaatataagataatgaagtaaaattaagcaaatatttatttaaatgttgtaaaaactagcagccaaaaaagcaaaataattttgtatagttaagcctaaccacgaaatgtattatcgaataaacaattttttttttgtcggtagcctagacctataaacgttgtaactgtaaaatgtaaagtacatttaaccgcatatttttttgtctaaataaaaaataacagaatgtgagaatagagcaatcgttctgcgggatttcgttgggagtgggggaggttggacgtgtcccggggcaattaatataatgaccaacagaaacaatttacaaacgatgtgtgcggggaggggtggcgggaaagggggtttt

SEQ ID NO: 11597 - DNA, 1828 bp, DROSOPHILA
ccgctcacgacgtcgctgggtgaaaagttgagataaggccaagaaaacaaaaaaacaaacaaatagaagacaacttgacatctataggaaactccagtgaatgtgaatttttttagtgaagtgttgaaagcaaatataattcgtataaataatcggcaagaaaagggagaaagagtgaaaccccctaagtcctatgaaagactcgatgagcatactcacccaaacgcccagcgagccaaacgcagcgcatccccagctgcaccaccacctcagtacgctgcagcagcagcaccaccagcaccacctccactacggcctgcagccaccggcggtggctcacagcatccatagcaccaccaccatgtcctccggcggcagcaccaccaccgcctcgggcatcggtaagcccaatcggtcccgcttcatgatcaacgacattctggcgggcagtgcggcggccgctttctacaagcagcagcagcatcaccagcagttgcaccaccacaacaacaacaacaattcgggctccagcggcggcagcagtcccgctcacagcaacaacaacaacaacattaatggcgataactgtgaggcatccaatgttgctggcgtcggtgtgctgccatctgccctgcaccacccacaaccacatccgcccacgcatccgcacacacatccgcatgcgctaatgcatccgcacggcaagctggggcactttccacccaccgccggcggcaatgggttaaacgtggctcaatatgcggcggccatgcaacagcactatgccgctgctgctgccgcggctgctgcgcgcaacaatgcagctgctgctgcagccgccgctgctgccgctgcagctgctggtgtagccgcaccacccgtcgacgggggagtggatggcggggtggggctggcgccaccggcgggcggcgatctggacgacagcagcgattaccacgaggagaacgaggactgcgacagcggcaacatggacgatcacagcgtttgtagcaatggcggtaaagatgacgatggcaacagtgtcaagagcggctccaccagcgacatgagcggtctgagcaagaagcagcgaaaggcgcgtaccgccttcacggatcaccagctgcagacgctcgagaagtccttcgagcggcagaagtaccttagcgttcaggagcgccaggagctggcccacaagttggatctgagcgattgccaggtgaaaacttggtaccaaaaccgcagaaccaaatggaagcgccaaacagcagtgggcctggaactcctcgcagaggctggaaacttcgcggcctttcagcgactttacggcggatcgccttacctgggcgcctggccgtatgcggccgctgccggcgccgcccacggagccacgccccacacgaacatagacatctattaccgtcaagcggccgctgcggccgccatgcagaagccactgccctacaacctatacgccggcgttccgtccgtcggagtgggcgtcggggtgggcgtgggtccggcacccttctcccacctgtccgcctccagttcgctgtcctcgctgagcagctactatcagagtgccgctgcggctgcctccgctgccaatccgggcggaccgcatccggtagcgccaccaccttcggtgggcggaggatctccgcccagtggcctggtcaaaccgattccggcccattccgcatccgcctcgccgccaccaaggccaccatcgacgccgagtccaacgctgaatccgggcagtccgccaggacgatccgttgacagctgttcccagtcggacgacgaggatcagatccaggtgtga

SEQ ID NO: 11598 - protein, 544 aa, DROSOPHILA
MKDSMSILTQTPSEPNAAHPQLHHHLSTLQQQHHQHHLHYGLQPPAVAHSIHSTTTMSSGGSTTTASGIGKPNRSRFMINDILAGSAAAAFYKQQQHHQQLHHHNNNNNSGSSGGSSPAHSNNNNNINGDNCEASNVAGVGVLPSALHHPQPHPPTHPHTHPHALMHPHGKLGHFPPTAGGNGLNVAQYAAAMQQHYAAAAAAAAARNNAAAAAAAAAAAAAAGVAAPPVDGGVDGGVGLAPPAGGDLDDSSDYHEENEDCDSGNMDDHSVCSNGGKDDDGNSVKSGSTSDMSGLSKKQRKARTAFTDHQLQTLEKSFERQKYLSVQERQELAHKLDLSDCQVKTWYQNRRTKWKRQTAVGLELLAEAGNFAAFQRLYGGSPYLGAWPYAAAAGAAHGATPHTNIDIYYRQAAAAAAMQKPLPYNLYAGVPSVGVGVGVGVGPAPFSHLSASSSLSSLSSYYQSAAAAASAANPGGPHPVAPPPSVGGGSPPSGLVKPIPAHSASASPPPRPPSTPSPTLNPGSPPGRSVDSCSQSDDEDQIQV

SEQ ID NO: 11599 - DNA, 5395 bp, DROSOPHILA
gctaattgacactgctgttgcacgactagcatacagacgacatagagacgattccccgattcaacgattcacgcgaggaagcaatttctggtttagttgctcgcggctaagctgctgctgctggagtggcggctgcggatcggttgttttatgaatatataagagtcggtttgtggccgaagcggaattttggctgggtcggtgtttggcaactgacgcaaatgttgtatgattacagcgaatcattaaatttcgcccaataaacaagcctcgtgcccagagtgaccgcagcgggaacgtcgcaaaataccaaaatggctcgggtgaaaataccagcacaagtccacccacatgtgggtgcggaaccttaacgccatggcaaataaaaataccaacattaaaatatttaacttaacattgtaaaataaaccgaacggtacaaaatcatatgttatatattctaaaacgaaatggatttccttgatctctgtcaggaatttatattttatttcaattcatatttttatcattactttgctatatcaataagttctcagttatctattttggcagcttaaaaattgtatatacacgaagttgttgtgcaaccgaccgaagaatttattattttaaagcttagttgttgtatacatgaaaagatactaatttgtttcaaatataaatcatatatctaccggcctaagtgttcccttttgtaaactattgatataagaatgtaaattatcaaattaaatatatttaacagtagagttttgacactacatcctcttgtaaactaaatcccaaatagattctatgaatgtatgggctttcaaataagcaaacattaaatttatttaaattacactattttcgtgctctgtgctgtatatatatcctatttccagtgcagcccctggtatttccttccaatgcgcttagaatgttccagcgccggaatacggtcactctgcgaggcatttaaaggccttccagccgcttgtcggcgtcagtaaaaaaaaatcaaagcaggcgacgcaagtgcggactaatttattgcatctgttattcgtgacgtggcctttcgccggacgaaccgatagctcgagctccgtaaatcaagctaccaaagatcatgaagtactttttgctggtgggcctgctgctcctagcaggtaagtgtgcacatttgccacgccgcattgaaccggtgttttaacctaattattaattggcgtctgattcgcgtctgattaggcatcaatcaaatagccgccgatgacgaggccgccacaacggagaccatcgaccttgatctgggctccttcaaggagggctcccgcaccggtacgtagacacgcccccctctcgcgacgacgagttttgtttggtacacgtcagcgttgcgataaccgccccctttttctaattcccaatcccccagatgccgagaccctgaagcgcgaggaggaggccatccagctggacggcctgaacgtggcgcagctgaaggaaattcgcgagaaggtgggttcattgccaggtcatttggaaggtacacgtatgaccgggatttcctttcccttttttctttgtcttttgtctgtgcgtgcaggcgaagaagtttactttccaaacggaggtcaaccgcatgatgaagctgattatcaactcgctttaccgcaacaaggagatcttcctgcgtgaattgatatccaacgcctccgatgccatcgacaagatccgcctattggctctgtccaacagcaaggagctggaaacgaatccggagctgcacatccgcattaaggccgacaaggagaacaaggcgttgcacatcatggactcgggtatcggcatgactcaccaggatctgatcaataacctgggtacaattgccaagtccggcactgccgattttctggccaagatgcaggatcccagcaagtcggagggactcgatatgaacgacatgattggacagttcggtgtgggcttttactccgctttcttggtcgccgatcgtgtagtggtgaccaccaagcacaacgacgacaaacagtacatctgggagtcggatgccaacagcttcagcatcaccgaggatccccgtggcgatactctgaagcgaggatccgtgatctcgctgtatctgaaggaagaagcccaggacttcctggaggaggacaccgtgcgcgagctcatccgcaagtactcgcagttcatcaacttccccatccgcatgtggtccagcaagaccgtcgaggaggaggtgcccgtggaggaggaggccaagcccgagaagagcgaggatgacgtggaggatgaggacgccaaggtcgaggaggccgaagatgagaagcccaagaccaaaaaggtttcgaagaccacctgggactggaccctgatcaacgacagcaagcccatctggacgcgcaagcccgccgaagtgaccgaggatgagtacactagcttctacaagagcctgaccaaggactccagcgagcccctgacccagacgcacttcatcgccgagggcgaggtgaccttcaagagtttgctctacgtgcccaaggtgcagccatcggagtccttcaaccgctacggcaccaagtccgacaacattaagctgtacgtgcgccgtgttttcatcaccgacgagttcaacgacatgatgcccaactacctgagcttcattcgtggcgtcgtcgactccgacgatctgcccctgaacgtttcccgcgaaactctgcagcagcacaagctcatcaaggtgatcaagaagaagctggtccgcaaggttctcgatatgctgaagaagatcgacaaggaggcgtatgagaagttctggaaggagttctccaccaagtaagtgtcgctttctaggaattaagaaacgttctttgcctgttcaaataattagttatttatgataagcatttccgcagaatccattataatatggagaatagaatgacgtgtattattttttgccaacaaattaatatatttagtttgttgctttaaagaattccgcgctgataagataaggaaatccacgtagtattataatattggcactggtgacgtgtagagtttatacttaaatattttattttagttaaataagcatttccattagctataacctcgaattcttggattttcgttgcttatcaagacttaattgactcatttcagcatcaaattgggcgtgatggaggatcccagcaaccgatcgcgtctcgccaagctgctccgcttccagacctccaacggcaagggcgtcacctcgctggcggagtacaaggagcgcatgaaggccaagcaggagcacatctactacatcgctggtgccaaccgcgctgaggtcgagaagtcgccgttcgtcgagcgtctgctgagcaagggatacgaggtgctgtatctggtggaggccgtcgacgagtactgcatctccgcgctgcccgagttcgatggcaagaagttccagaacgtggccaaggagggattccagctgaacgagtccgagaagagcaagaagaacttcgagtcgctaaagagcaccttcgagccgctggtcaagtggctgaacgatgtggcactcaaggatcagatctccaaggcccaggtttccgagcgtctgagcaactcgccatgcgccctcgtggccggcgtcttcggctggaccggcaacatggagcgtctggccatgtccaacgcccaccagaagtccgacgatcctcagcgcacctactacctcaaccagaagaaaacgctcgagatcaatcccaggcatccgctgatgcgcgagctgctgcgccgcgtggaggccgacgaggccgatgacaccgccaaggacatggctgtgatgatgttccgcaccgccaccctgcggtctggatacatgctccaggagacttcgcagttcgccgacagtattgagcagatgatgcgccagaccttgggtgtctcccaagacgagcaggtggagttcgacgaggaggaggaggatgatgccgaggagaccgccaccggcagccaggagagcggcaacgccgatgatgaggaggaggagcagcagcacgacgagctgtaaactacttcacctcacccactgtccaaatagattgtacataagagtgtgaagttcagactgagttttaaaccgccaccgggtggccgggcgggcactccatcaacattacacgctagattctaagtaaaataatttcgtagtccttcgcccacgccgtcatcaccgccagtcgcccagagagcactccaccatttcagccagcacacttggttgctcaagcgttttcttttttcgaaagcaagtgaattatgtatttatacaatgtaatatgcttagtacacaacagattccaatcaaaacaaataaagacaaatgaatttaaaactaaaacaactgcctatttaatatggcgcgcaatgtaaaatttccgcaatcggataccaaaaaatagttaaaaagtgaattgattgctcgatcagtcaagatcggaactcagcggctcatcgttcagggccctcaagtaggtgttgtacttcatctggtcgcggatctgctgcacggcctccgattgggacagcgtgtatgtgtccataaagaggcgcactatccacagcgggagcagtccgttcaccagcagcgacgtgtggttctggtaatcgggacatgttaggatggatatgtgtgtcactccaggacgccccaaacttacgcttcgactgctgtagacctcgcccagtttcttgagcatctgctggtgaatgctcttgctcagtatgtcgatgacgtccatgtgggcaatgttcatgtagtgactggtgcgcggcttgaactcgcgctccttgaacagcttatcgaagtcgctgcgatagttttcgaacgtattcagcacctcgtcctcgcccattttttccaagagtctgagccaatcaaaagaacgcaagttgaaggcacattcgtgttcgctttatttgcatctagtcgagtcacttacaaaatcttaacctcgcgcggcttgggcgtgtccagcatgctgtccagccgctgcaatgcattgaaccgccctccgtccatgtgttccaccttgaaatctttggccggcactggcgatactcgtttcactttgggcttgggtcctctgctcttgccgctcctggtctcgctgaaaatggcagccagggaaatgatgaatgaaactgatcgctatagcaccatatttctatggcttacccaactacgaagtttttgaatcgactcgggcgtatgggcgatcggccggagcggcgtgcaggcttggcctcaacggagctggatctggaattcctgcgaatagatcaataggctcttagttctctcaca

SEQ ID NO: 11600 - DNA, 2795 bp, DROSOPHILA
ttgtcggcgtcagtaaaaaaaaatcaaagcaggcgacgcaagtgcggactaatttattgcatctgttattcgtgacgtggcctttcgccggacgaaccgatagctcgagctccgtaaatcaagctaccaaagatcatgaagtactttttgctggtgggcctgctgctcctagcaggcatcaatcaaatagccgccgatgacgaggccgccacaacggagaccatcgaccttgatctgggctccttcaaggagggctcccgcaccgatgccgagaccctgaagcgcgaggaggaggccatccagctggacggcctgaacgtggcgcagctgaaggaaattcgcgagaaggcgaagaagtttactttccaaacggaggtcaaccgcatgatgaagctgattatcaactcgctttaccgcaacaaggagatcttcctgcgtgaattgatatccaacgcctccgatgccatcgacaagatccgcctattggctctgtccaacagcaaggagctggaaacgaatccggagctgcacatccgcattaaggccgacaaggagaacaaggcgttgcacatcatggactcgggtatcggcatgactcaccaggatctgatcaataacctgggtacaattgccaagtccggcactgccgattttctggccaagatgcaggatcccagcaagtcggagggactcgatatgaacgacatgattggacagttcggtgtgggcttttactccgctttcttggtcgccgatcgtgtagtggtgaccaccaagcacaacgacgacaaacagtacatctgggagtcggatgccaacagcttcagcatcaccgaggatccccgtggcgatactctgaagcgaggatccgtgatctcgctgtatctgaaggaagaagcccaggacttcctggaggaggacaccgtgcgcgagctcatccgcaagtactcgcagttcatcaacttccccatccgcatgtggtccagcaagaccgtcgaggaggaggtgcccgtggaggaggaggccaagcccgagaagagcgaggatgacgtggaggatgaggacgccaaggtcgaggaggccgaagatgagaagcccaagaccaaaaaggtttcgaagaccacctgggactggaccctgatcaacgacagcaagcccatctggacgcgcaagcccgccgaagtgaccgaggatgagtacactagcttctacaagagcctgaccaaggactccagcgagcccctgacccagacgcacttcatcgccgagggcgaggtgaccttcaagagtttgctctacgtgcccaaggtgcagccatcggagtccttcaaccgctacggcaccaagtccgacaacattaagctgtacgtgcgccgtgttttcatcaccgacgagttcaacgacatgatgcccaactacctgagcttcattcgtggcgtcgtcgactccgacgatctgcccctgaacgtttcccgcgaaactctgcagcagcacaagctcatcaaggtgatcaagaagaagctggtccgcaaggttctcgatatgctgaagaagatcgacaaggaggcgtatgagaagttctggaaggagttctccaccaacatcaaattgggcgtgatggaggatcccagcaaccgatcgcgtctcgccaagctgctccgcttccagacctccaacggcaagggcgtcacctcgctggcggagtacaaggagcgcatgaaggccaagcaggagcacatctactacatcgctggtgccaaccgcgctgaggtcgagaagtcgccgttcgtcgagcgtctgctgagcaagggatacgaggtgctgtatctggtggaggccgtcgacgagtactgcatctccgcgctgcccgagttcgatggcaagaagttccagaacgtggccaaggagggattccagctgaacgagtccgagaagagcaagaagaacttcgagtcgctaaagagcaccttcgagccgctggtcaagtggctgaacgatgtggcactcaaggatcagatctccaaggcccaggtttccgagcgtctgagcaactcgccatgcgccctcgtggccggcgtcttcggctggaccggcaacatggagcgtctggccatgtccaacgcccaccagaagtccgacgatcctcagcgcacctactacctcaaccagaagaaaacgctcgagatcaatcccaggcatccgctgatgcgcgagctgctgcgccgcgtggaggccgacgaggccgatgacaccgccaaggacatggctgtgatgatgttccgcaccgccaccctgcggtctggatacatgctccaggagacttcgcagttcgccgacagtattgagcagatgatgcgccagaccttgggtgtctcccaagacgagcaggtggagttcgacgaggaggaggaggatgatgccgaggagaccgccaccggcagccaggagagcggcaacgccgatgatgaggaggaggagcagcagcacgacgagctgtaaactacttcacctcacccactgtccaaatagattgtacataagagtgtgaagttcagactgagttttaaaccgccaccgggtggccgggcgggcactccatcaacattacacgctagattctaagtaaaataatttcgtagtccttcgcccacgccgtcatcaccgccagtcgcccagagagcactccaccatttcagccagcacacttggttgctcaagcgttttcttttttcgaaagcaagtgaattatgtatttatacaatgtaatatgcttagtacacaacagattccaatca

SEQ ID NO: 11601 - protein, 787 aa, DROSOPHILA
MKYFLLVGLLLLAGINQIAADDEAATTETIDLDLGSFKEGSRTDAETLKREEEAIQLDGLNVAQLKEIREKAKKFTFQTEVNRMMKLIINSLYRNKEIFLRELISNASDAIDKIRLLALSNSKELETNPELHIRIKADKENKALHIMDSGIGMTHQDLINNLGTIAKSGTADFLAKMQDPSKSEGLDMNDMIGQFGVGFYSAFLVADRVVVTTKHNDDKQYIWESDANSFSITEDPRGDTLKRGSVISLYLKEEAQDFLEEDTVRELIRKYSQFINFPIRMWSSKTVEEEVPVEEEAKPEKSEDDVEDEDAKVEEAEDEKPKTKKVSKTTWDWTLINDSKPIWTRKPAEVTEDEYTSFYKSLTKDSSEPLTQTHFIAEGEVTFKSLLYVPKVQPSESFNRYGTKSDNIKLYVRRVFITDEFNDMMPNYLSFIRGVVDSDDLPLNVSRETLQQHKLIKVIKKKLVRKVLDMLKKIDKEAYEKFWKEFSTNIKLGVMEDPSNRSRLAKLLRFQTSNGKGVTSLAEYKERMKAKQEHIYYIAGANRAEVEKSPFVERLLSKGYEVLYLVEAVDEYCISALPEFDGKKFQNVAKEGFQLNESEKSKKNFESLKSTFEPLVKWLNDVALKDQISKAQVSERLSNSPCALVAGVFGWTGNMERLAMSNAHQKSDDPQRTYYLNQKKTLEINPRHPLMRELLRRVEADEADDTAKDMAVMMFRTATLRSGYMLQETSQFADSIEQMMRQTLGVSQDEQVEFDEEEEDDAEETATGSQESGNADDEEEEQQHDEL

SEQ ID NO: 11602 - DNA, 6086 bp, DROSOPHILA
cagttcctcctggtggaacttgtgttcatcccaccgctcgttcagccactcctgggcgctgcttaccagcgaaaagatcatctccatgcccaggttctcctcaattgtcttttgcaggtgttccaggaggcgcgtttcaaacatgtcctcaaagttttctggctcctcgatttccaccacgggtgctccatccggataggtagctgtgaatgtgaagaccagtttgcaggcaagacctttctcgggctcctccgaactgtactcctccgtggcaattggaatctggaatttgtggtgcggctccgtggcgagaactgaacagaagcaattattggatatggatttcaaggaagtgccgtggtacttactctccatatcgccacagtatatggagtccaacgcctcgacctcgttggtctgatcttccttgtagttgcggctcattttgcaaatttaatagctttaacaatttcaacaaacaaataagacaaatccggtcgccgccgcgttgaggttacttacagctgagaggcgctgcacggtcagactgcttgatgagttcagttcaatagagaaatatatctttaaccaagtctgtcagacttaaaacctgaataaaaatgggtttcaaaaacattgggaacctaagttaagacaaatcacttttttaacaatgaaatcataccactttacgcagcttaaacatgcagccaacatatgattcgcaagggttgccaccctgcacttagcaatgctgccacacaaaggaacacccttaatatttcggatattaaatatttgagggcgcgtttgaaatcctttcaaaattcaaataatttcaatataaatattgaacaatattttattcgaaaaacaaacatcacataacttaaaatttaattcgtcaatataaatctggttttcattaactctgataaatacagtttgtgttgatgcttcgtcgcccgcaacttttaagttaatacactattttaaaatgttaccgttcaggagcctcaagtctgcaaataaattgaatgcaattaatgtggtgctcaatttcgactaattagttttcatacttgtgcacagtgatcagattgctagcctcgaccttcgtatcctggggcgtcagaaaacaatactgacgcgataaccactccaaaccctcgccgattagaatttccgtaataaacttccggttcacttcatcctgaaagaaggtacattgtctcggtatactcaaagaagtggcgaatataaaacgaactcactgtaaacacatcgtattcgtccaaaaagtagaacggatgatctgaagtgctccaaagtcctttcagcaaggaaactgtcgtgaacgatcgttcaccgcccgataaactcctggtattggaagtctcattcccactgggcggaaatacgttaatcttccacgtcttctccttgtcactggtctcgaaactaactttaaattgtcgcatagcaagagcttgctgtgaaaagtaaataaaagcattggtaagaatgtaataggtttccaacaacccaatatatacctcaaactgaaactgaaccattgtgaagtaatggtgtcgcgatcgctggaaaagttgagctcgctgatggtaggccatgcgcagcttcttgaccacggagtcaaccacggccaggtgccgagattgaagttccaattcgtctcgcaattccgccagccctctctccagctcttcaggattgtagttcagctcctccacctgtttgatctttgatttgtagcgactgattgcctcgcgtattttctcctccgtttgcgtcgtcgctatgaactctcccaatttctcggcctcggtgcgagccttttccaattcgcttagcacggtttccttctcgccaagcattttcctctccaactgcaacgttttctggaatctacgtgtgttttcttcatagtggaggtccaggcttcgcatcttgctttcgacttcgccagcttcggtgtccagtgcggtaagctttttgttaataccttcaagggctcgcctctcttcggcttcagttgactcaagttctgtctggcgatgttggatgctaagaagtttttcctgcagcatttcccgttctagcctacatttctcaattttctcgccgctatcagctaaatgagatttctacaaaagcaataaaataaataactaataaaaggatatgtgagaaatagtcattaccaaacgatcatactccggtagctcttgatagtcaaaattttgcagctccattatcttctgcatcgccttctgattccttgattgatgctgaccaatcatagtactcttctgcgaaatcactttttgggtgttttccagtacctttttgtgttgcatgtagtctatttctaaagaaggctccttttcctgaagatcgctttgctccatttgaagctgtcgtatccgatcatcaacgtttttctgaatatagcgggcgggtgttattctagtcgagtagacggcatagttgggagatggtatgtactccagtcccaggtttggcactagcacacgcgttagattgggcggcacattctcagtgtcggaggtgagaaattcggcaatttccttggactccgtcacaagaaccgtttcgatacgcagaatatcaataaggtagttcattaccacaggatcatcgcagctgaatgtttcgaatatttagaatatttatagtgaaatgaattgcatacatcaattgcaaatgtatttacctgatttcatcgattagaactgtggtatttggagtagtgggttgcaccttattcctagacacgtcgtaaacccgatccgtaaacggactggttataatagtgggcatattgccaccttggaacttgttttgcagcaacgcccgcagcgactggcgctcgcggtctgagccaacgataaaggaacgcaggcagtgcatgagctggttctcgatgaggtcgcggtactttggattgggcgcactgatatactggcccagcgggccgcgaggcattctatgcatattggagccggcatactgagttcgcagtgcatgaacaacctgtattgtttgctcaccgtacacggacagtttgttggacttgttacgggacagagcttctatctcccaactgatgttttctgtagaaattgaaaaatatataatagattctattagaaagaagatatccactcacgctttgatttatgcagctgtattcttccattttttacagcgtccaacctttcctggactgaggttatatctcgtttaatctcctgctgctctgctcgcaactgggcgatgatctcctcgcttttgactacttgtttctttaacatctcaatcttgttagcgttttcttcccgctgctcattaacccgattaaagtcggcatgatagtttcctatcagcttttcacattcatcatacgaacgctgatcctctcgcatgcgccgttctgcgttccctatcttggctttgacttggctggcttctagaagcagatcctgtactgctttcttagcggttttaagcctttcatcctggaacttttgggttgctaatatttgatttttagaagcctcaaactctctgatgacaaaataaaatgattgtatatgattattgtattatttagtaatcttacttcaatttttggttcatggtggcttgcgtactctcctttttggatgttgtctgctccagactggccttcttgttttcaatcagtttaattgaatgctctagattattgagctcattttggtaactagtcacggccatccatgccagctttgttttgcactgctgtaggttttcctgattaagtatagcgatgttaggtgttaccgtgattacaagaagttaaatttcctaccttgaccatttccttatcctcaagaatcgacagcttttcctcctccgcggcaatgtgctttatcatcatttcttttttctgttaaattaaaacaacaaaaaacatatgtagagacaggaaatattaaatgttaaactatttccaccttttccaattgttccagttcttgggtgaaatgacgtcgcagggcatggcactcagttagactgctggtgcaaacatccagttgagttgctttcatcaacagtttgtaattcgatgctggctccaatctgtaaacaataaaacatgcttaagaggcatgtctgaaggctattgcaaatcttcttactcttttagaaactccctcgccgcctcctgattcagcacaaaaatcggattctccacattgatgccgaagcagagcagcatgcgcctaatatcggacactttcttcgagacgcttttacctcgagcgtcctgaagatcgtacgtcgaggaggagtggcgtatttgacgcaccacggtaaggtggggcccgaagatgtccgctttgaagggccgcaatcccgaattggacagtgttatggagatggtggcactaacttcgccgttcttgattaactctgaaatgcatatatcataattgcctgatttgtattgccctttctcctacctactctgtatactgctggccctgttggttgccctagcgctgctggtcagacccaaagccagtgccgtgattacagcgctcttgccactgccattattgccaaccaggaagttaatattgggcccaaactcaataaacagattggagtggcacatgaagttcgtgagacgcatggaaattactttgccgcagcgatcgaaggcgttcggtatcgatagctctgactatggataatatgggttagataaactgggtctaaatggtttatctctcagtgctaccgtcagattaaagttcacggagcgctgggacatgtttaaagttgtttggcgcgcctgcttgttccgagaccttgccgtctgcgaagtagacgcgttcgcatatttctctgtctcttcttcgacaaaatccggctccgcctccgccacgaactgctgtttgctcctcttgcgagtgggttctgccgttgagccatcgctttcagatccgggcgaaggcatccgccgaatccttcctctgcgactccgctccatttggttttgttctacgcgaggcaaaaagcgcgggctgatataaatgtaaacaacttggtttggactgactgaacttactctgcttactagcctagatatgtgcctgtactattgtaattgttgttgattgcaataataagagtgcaaaagaaatctcaagcgcgctatcgtaaacaattttgcgaaataacaccacagccattccattccgttccaggcgcagtgtgaccaggtcggatgcgatttgaagcgtcacagaacaatcacagatttctgccaatgcagtagaaattcattggcatgtaccaccttatatttaaaaatacttaactaattacagtttatagatgcgagtaaactgcaattgtatattgctcaatatttaaagacatatttaaatataaggtgcatatttgtgttttgcatttatgctaaggctaattaattatttttaaataccttaggtccacataagaaatgttcactgtaaattgcgcactttaatttttgaaatttcattttagaggtggagaaacgtcgatgattccttgaaaaacatcgatgtttgtgatatttcgatccatctatgtttctccacctctatttcatttgctatttccacgaaatcaaatatttatttatttccaagaaatcaaaacgaagccccatgtcaagttcagatgacgattggtttgaccaggatgagaacaaactgttgcagggcctggagaagtccttgaagtccctggagctgcagaagaatgaggagtacatcgaatgccccccatctgagcgtaaatgccccccatctgagggtaaataccaccttatggttaagcagccataatattggtactatcaagctttttgatttcagtgggggagtacgtgatgcaacatacacggttctccctgaccgagttaacaaatgccttaaaaatgccagccatcgacatgttcttatactttttgtccgataagcgagatctcttcgagaatc

SEQ ID NO: 11603 - DNA, 3369 bp, DROSOPHILA
atggagcggagtcgcagaggaaggattcggcggatgccttcgcccggatctgaaagcgatggctcaacggcagaacccactcgcaagaggagcaaacagcagttcgtggcggaggcggagccggattttgtcgaagaagagacagagaaatatgcgaacgcgtctacttcgcagacggcaaggtctcggaacaagcaggcgcgccaaacaactttaaacatgtcccagcgctccgtgaactttaatctgacgtcagagctatcgataccgaacgccttcgatcgctgcggcaaagtaatttccatgcgtctcacgaacttcatgtgccactccaatctgtttattgagtttgggcccaatattaacttcctggttggcaataatggcagtggcaagagcgctgtaatcacggcactggctttgggtctgaccagcagcgctagggcaaccaacagggccagcagtatacagaagttaatcaagaacggcgaagttagtgccaccatctccataacactgtccaattcgggattgcggcccttcaaagcggacatcttcgggccccaccttaccgtggtgcgtcaaatacgccactcctcctcgacgtacgatcttcaggacgctcgaggtaaaagcgtctcgaagaaagtgtccgatattaggcgcatgctgctctgcttcggcatcaatgtggagaatccgatttttgtgctgaatcaggaggcggcgagggagtttctaaaagaattggagccagcatcgaattacaaactgttgatgaaagcaactcaactggatgtttgcaccagcagtctaactgagtgccatgccctgcgacgtcatttcacccaagaactggaacaattggaaaagaaaaaagaaatgatgataaagcacattgccgcggaggaggaaaagctgtcgattcttgaggataaggaaatggtcaaggaaaacctacagcagtgcaaaacaaagctggcatggatggccgtgactagttaccaaaatgagctcaataatctagagcattcaattaaactgattgaaaacaagaaggccagtctggagcagacaacatccaaaaaggagagtacgcaagccaccatgaaccaaaaattgaaagagtttgaggcttctaaaaatcaaatattagcaacccaaaagttccaggatgaaaggcttaaaaccgctaagaaagcagtacaggatctgcttctagaagccagccaagtcaaagccaagatagggaacgcagaacggcgcatgcgagaggatcagcgttcgtatgatgaatgtgaaaagctgataggaaactatcatgccgactttaatcgggttaatgagcagcgggaagaaaacgctaacaagattgagatgttaaagaaacaagtagtcaaaagcgaggagatcatcgcccagttgcgagcagagcagcaggagattaaacgagatataacctcagtccaggaaaggttggacgctgtaaaaaatggaagaatacagctgcataaatcaaagcaaaacatcagttgggagatagaagctctgtcccgtaacaagtccaacaaactgtccgtgtacggtgagcaaacaatacaggttgttcatgcactgcgaactcagtatgccggctccaatatgcatagaatgcctcgcggcccgctgggccagtatatcagtgcgcccaatccaaagtaccgcgacctcatcgagaaccagctcatgcactgcctgcgttcctttatcgttggctcagaccgcgagcgccagtcgctgcgggcgttgctgcaaaacaagttccaaggtggcaatatgcccactattataaccagtccgtttacggatcgggtttacgacgtgtctaggaataaggtgcaacccactactccaaataccacagttctaatcgatgaaatcagctgcgatgatcctgtggtaatgaactaccttattgatattctgcgtatcgaaacggttcttgtgacggagtccaaggaaattgccgaatttctcacctccgacactgagaatgtgccgcccaatctaacgcgtgtgctagtgccaaacctgggactggagtacataccatctcccaactatgccgtctactcgactagaataacacccgcccgctatattcagaaaaacgttgatgatcggatacgacagcttcaaatggagcaaagcgatcttcaggaaaaggagccttctttagaaatagactacatgcaacacaaaaaggtactggaaaacacccaaaaagtgatttcgcagaagagtactatgattggtcagcatcaatcaaggaatcagaaggcgatgcagaagataatggagctgcaaaattttgactatcaagagctaccggagtatgatcgtttgaaatctcatttagctgatagcggcgagaaaattgagaaatgtaggctagaacgggaaatgctgcaggaaaaacttcttagcatccaacatcgccagacagaacttgagtcaactgaagccgaagagaggcgagcccttgaaggtattaacaaaaagcttaccgcactggacaccgaagctggcgaagtcgaaagcaagatgcgaagcctggacctccactatgaagaaaacacacgtagattccagaaaacgttgcagttggagaggaaaatgcttggcgagaaggaaaccgtgctaagcgaattggaaaaggctcgcaccgaggccgagaaattgggagagttcatagcgacgacgcaaacggaggagaaaatacgcgaggcaatcagtcgctacaaatcaaagatcaaacaggtggaggagctgaactacaatcctgaagagctggagagagggctggcggaattgcgagacgaattggaacttcaatctcggcacctggccgtggttgactccgtggtcaagaagctgcgcatggcctaccatcagcgagctcaacttttccagcgatcgcgacaccattacttcacaatggttcagtttcagtttgagcaagctcttgctatgcgacaatttaaagttagtttcgagaccagtgacaaggagaagacgtggaagattaacgtatttccgcccagtgggaatgagacttccaataccaggagtttatcgggcggtgaacgatcgttcacgacagtttccttgctgaaaggactttggagcacttcagatcatccgttctactttttggacgaatacgatgtgtttacagatgaagtgaaccggaagtttattacggaaattctaatcggcgagggtttggagtggttatcgcgtcagtattgttttctgacgccccaggatacgaaggtcgaggctagcaatctgatcactgtgcacaaacttgaggctcctgaacggtaa

SEQ ID NO: 11604 - protein, 1122 aa, DROSOPHILA
MERSRRGRIRRMPSPGSESDGSTAEPTRKRSKQQFVAEAEPDFVEEETEKYANASTSQTARSRNKQARQTTLNMSQRSVNFNLTSELSIPNAFDRCGKVISMRLTNFMCHSNLFIEFGPNINFLVGNNGSGKSAVITALALGLTSSARATNRASSIQKLIKNGEVSATISITLSNSGLRPFKADIFGPHLTVVRQIRHSSSTYDLQDARGKSVSKKVSDIRRMLLCFGINVENPIFVLNQEAAREFLKELEPASNYKLLMKATQLDVCTSSLTECHALRRHFTQELEQLEKKKEMMIKHIAAEEEKLSILEDKEMVKENLQQCKTKLAWMAVTSYQNELNNLEHSIKLIENKKASLEQTTSKKESTQATMNQKLKEFEASKNQILATQKFQDERLKTAKKAVQDLLLEASQVKAKIGNAERRMREDQRSYDECEKLIGNYHADFNRVNEQREENANKIEMLKKQVVKSEEIIAQLRAEQQEIKRDITSVQERLDAVKNGRIQLHKSKQNISWEIEALSRNKSNKLSVYGEQTIQVVHALRTQYAGSNMHRMPRGPLGQYISAPNPKYRDLIENQLMHCLRSFIVGSDRERQSLRALLQNKFQGGNMPTIITSPFTDRVYDVSRNKVQPTTPNTTVLIDEISCDDPVVMNYLIDILRIETVLVTESKEIAEFLTSDTENVPPNLTRVLVPNLGLEYIPSPNYAVYSTRITPARYIQKNVDDRIRQLQMEQSDLQEKEPSLEIDYMQHKKVLENTQKVISQKSTMIGQHQSRNQKAMQKIMELQNFDYQELPEYDRLKSHLADSGEKIEKCRLEREMLQEKLLSIQHRQTELESTEAEERRALEGINKKLTALDTEAGEVESKMRSLDLHYEENTRRFQKTLQLERKMLGEKETVLSELEKARTEAEKLGEFIATTQTEEKIREAISRYKSKIKQVEELNYNPEELERGLAELRDELELQSRHLAVVDSVVKKLRMAYHQRAQLFQRSRHHYFTMVQFQFEQALAMRQFKVSFETSDKEKTWKINVFPPSGNETSNTRSLSGGERSFTTVSLLKGLWSTSDHPFYFLDEYDVFTDEVNRKFITEILIGEGLEWLSRQYCFLTPQDTKVEASNLITVHKLEAPER

SEQ ID NO: 11605 - DNA, 2753 bp, DROSOPHILA
gtgcgccgacgactcgatcgcctcttgggcgcagggtccgtaaatgggggcaaattatacatctccggctcgaagtcgtccaggtactcgaagcgcaaggcggccaattcggaccaacagcagggaaggtccttttcggccaacattatgacgggcagtcgagcatcgctcgccgcctgaactcctttgggagtgccatcgaaaaccagggtgcaatcaggtccagcatcccctagcctcgacatggcaatcaggtagacgtcgggctcgggtttgggtgcccgcaactccggatcatccgcacagaccacggtggagaagttctcaaagaagtcctcccggccgcggatcttcgagcagtagttggcctcgttgctggaggtgatcaagcccaattccatgcagctattgcgcaggtgcggaacaagccgctcaatcccatccataaacgggggatttgcaatcaaatgggaggttcgctcgttaagttcataccgaaacgattcccaactcatcggaatatcgagcttccggcaaaaaagttcagacatctctgatatcgtcataggtccactttggacatgtaaaatgtctggtatcctcttatcgtaacaacggaccagttccttgagagccttccggtagacgtggcgagtatctgcggaagacagtgctttataaaggcatttttccagttttaagctcaccaaagacagcactttctagatcgaaaatgcagtagctgatacaaggactgcagcactttggggaacagccctcacaatctggttgagatttgcatgtcctgcagccaaaagtgcacatcttccttttctaccagaagaattctaggactggagaaattttcagcgaatttatatcaacattatctgtatcaaggtctaaaagtatgaaaatttacactagaaacaatggttcctatatttgtatttattgacatggtgtaacatttgatttcaaactacatgatacatatatctcacaaaggtggcagtccaaaatattgtggcttgaatccttccagcgatcgcagtctcaaagtggcgtgagcacttgctcgaaaggataccagaggatcgggcacgaggaccacctgcatgccagcggacagagcagcctccataccaaccaaagaggactcgaagaccagacacttgctcggctccggcgattcctcaaaacgagaggcggtggtgaggaaaacatccggagcgggtttccccctcttgacttcttcgtcggagccgctcaaaaccacgtggtggaagacatcgaagggcctggagtgccgacgcgtctttatcctaaacgaatcccgacagcagccacttgcgatagccatgggaatgttgaacgctttgaggtgatgcagcagacgctccacaccgggcatcagtcgaatgaatcccattttgccacgacactgaagttcctgctggttctcaaactccgtcatgctgaagggcagattgaaggtgtttacgattagagcagcctgctcggaatctggctttcccatgcaccgcatcttcagatcgaagctatacgtgtgaccatagggatccagaatcctttgaacggtttccgttctcaaacgctcgctgtctatcagcagaccatcgagttcgaaaatgcaatgggtaactggctgaaaagagcactgcctagaacccgcctcttccgccgacattttggttcacttgaattttgaattattttttattttatagatagaatactaattttgacggatcaatttagagtgctagggattagccaaactcgaatttggagcaggtgtcaaagggtggtagaccaaagagctcaggcttaaagtccgccatcgattttagaaccatggtggcgccctttttctgctgcttggaaacgttatcagttggaataaagatgacttgggatcccgctgcctttccgcctatgaggcccactggagcatcctcgaatataagacactttttgggatctgcgggcggattgaatcgcgaggcggccaggagatatatatctgggtagggctttcctcttcccggtccaagtgccggatcatcgccacagacaacgtggtgaaaggccaggaatatatccttgaaggactcggccttcactttgaacagtttcctaaacgaacttgtggctatgcagaagggtatgcggtattcgtgcaagtggagaatcagatccctgacccctggcagcagagccacacttcccatgctcttatcaacagctgcctcgaattccttttgaaattccgcaggtgacaacggaagttttagatccttgacgatgtgttgggaaaatgtaccgaccggcattcccatatgctgcgtctgatcgactttggtgtacgttttgccatatttagccaacaagtcttgaaccgttttgaggtagatgccttcgctatctgaaagagcaaaaaaaaaaggtatgaatatagaaccatttattcaattagaatatgttaaatgtaatgcacctatcaaggttccatcgcagtcaaagatgacatgagtgacggggcagtaacacttcttggtgggcatttctacaatggtctaagctcttcatatcacacaccgcatgctccttaatttagagggttcgccttggccagaacggtgcttaattttccaaaaactaactacaacaatttgattcttctgttactgaattttcattaagaattttgagagataattccaagaggt

SEQ ID NO: 11606 - DNA, 699 bp, DROSOPHILA
atctataaaataaaaaataattcaaaattcaagtgaaccaaaatgtcggcggaagaggcgggttctaggcagtacagcgagcgtttgagaacggaaaccgttcaaaggattctggatccctatggtcacacgtatagcttcgatctgaagatgcggtgcatgggaaagccagattccgagcaggctgctctaatcgtaaacaccttcaatctgcccttcagcatgacggagtttgagaaccagcaggaacttcagtgtcgtggcaaaatgggattcattcgactgatgcccggtgtggagcgtctgctgcatcacctcaaagcgttcaacattcccatggctatcgcaagtggctgctgtcgggattcgtttaggataaagacgcgtcggcactccaggcccttcgatgtcttccaccacgtggttttgagcggctccgacgaagaagtcaagagggggaaacccgctccggatgttttcctcaccaccgcctctcgttttgaggaatcgccggagccgagcaagtgtctggtcttcgagtcctctttggttggtatggaggctgctctgtccgctggcatgcaggtggtcctcgtgcccgatcctctggtatcctttcgagcaagtgctcacgccactttgagactgcgatcgctggaaggattcaagccacaatattttggactgccacctttgtga

SEQ ID NO: 11607 - protein, 218 aa, DROSOPHILA
MSAEEAGSRQYSERLRTETVQRILDPYGHTYSFDLKMRCMGKPDSEQAALIVNTFNLPFSMTEFENQQELQCRGKMGFIRLMPGVERLLHHLKAFNIPMAIASGCCRDSFRIKTRRHSRPFDVFHHVVLSGSDEEVKRGKPAPDVFLTTASRFEESPEPSKCLVFESSLVGMEAALSAGMQVVLVPDPLVSFRASAHATLRLRSLEGFKPQYFGLPPL

SEQ ID NO: 11608 - DNA, 11300 bp, DROSOPHILA
gtggccacaaataagctatagatagtgagccctttggaaaacacaaacttcttgcgcctgaaggaaaagcggccgagataaacgccgtaaagtatgttaaggaaaacggtcgcgtaaagacaaatcgtgaccagttgggtatggagttttcctcgccggaaacgaacgggaaggcttcgctgccagatggagcggagtcgacgtgtctgccttcgcaggaatcgcattgtactgaggatgaattggggatgaactcaagctagtcactttggccaaatggctacttaattaccaagcttcttatctgcgattaaataatatattggttcaacgaatcacagaagtattatgtgtgaaacacagacatgccagttaagtgagcctcacataaaaattatattgtttgatatttgatatttttaaagcgtgagattttaatattgaataccttgactatttgtgttgttgtaatgaacttaactagtaatgttttcaaaataaaaaccacaatgattttatttgtacgaaacttgattaaagaacgtcttcttagctgtaatgttaagaaatttgataattcgcactatttgaaatcaacgactggttcatggtgcgaactagttccgtgcagtcaagttgaacctgccagcactgctgcgaaccggaaccacagtcagcgaacggaacctgaaaagaactgaagacgcgacgcaaatggaaaagaaaacataaacgctgaaagctggaaaaatgcgctgtaaatcgccagccgttggattgcaagtgcaaaagcgcgttgccgagtgtgcccgtgaataaatcgcaatggaataagtttaagaaattgcgataaacagcagcgcaaagcgacgaaacccacacacacgcccccgcaccacccctccgcgcgccgagcgggcgttgctaaataatttctccggggcgctccgctggacaataggtgtttttttctttggttttttttcgttggcgtgcgcgtataaataaatagccgaaagagccagagaaaaaacaaggcagagaaaaaaaatcggagaaaaatcagtacaaatcagcgaatagaaagtgtataccgcctgcacttgtgcctgtatgtgcgtgagtgtgtgtgcgagtgtgagtgagcgagtgtgtgtgatgtgtgttagtgcgcggggcgaagaacacaaggtgcaaaatgtttacaaaaaaatcgcatgccgacgtgaagaaatccacggccaagttgcaggactccaagaaggattccgcctcccgactgcgacacctacgcatgatattgggtgagtagaacctaaggtattcccctccagatccgaacatatgctaagtaactcacttaagctaggcatattttacaaacccttttcgaaagtatgtaactattttccaaccactcaccgtggatttgcccattgaaaccaaggtctcgcgttggcggttctgttgactgttaattatttcataatttatttgcattcatagcaataacaatgaaactggttggctttattttttatgcatatacttttttttcggctcggtgggcgtcgttcgcaccattttcgttccacggtggctccgctctcaatgacgttctgcccacaggccgccaaacaacaacagcgaaaagtggatccacagtgctggccatttcctgttgggcaccaaagaacctccacatatgcgatgtgtaccccacataagccccccattctttcagtggaaaaacattaatttatgcaaaaacggaaaaaagattacagaaaaacatctacacatgctccgctatgtggcaagcgaaaatgtgtgaaacacgttaaatgataaagaagcgaacaagtgaagctacagtgtgaactcgctaggtcggacacaatttacaaaaatactcagcttgctttatttgtttattttctgcttatatccgtacgtgttttacattgaaaacagtgactaaacttagcttattcatttgtaaatgaatcaaatctcaaaaaaatataatatataatgaatgtcatttaaatatgtttttacattttatgtaaatacaccctttagtagtcaaaacagcaggcacggcattcttctaatttaaaacgaaatataagatgttacttaggataatgttatcttctctaatgaaacatgcttacaacttttgattcggcttacagaatttggcctgtataaacgaacaatgcacaacaagtactggtttcgatatgagcaatctcctaccttcgccaccttttttcagtggctttctttttgtgtcacctcagcgaacaatttcaaacaggtgccccccgctacagtaaattacaaatacacctggctgccacccttcggcgaactattgttgttattccctattgttgttgctgcccagttgccattgtcccttggcaaattgctcgcattagacattcttaccaatggctgcgttaccaattatagttttctaaccagtacaataggaaaataacaccgaaaaaagctttttattttctgtaataaaaagttaccaaaactcttctcatgtaatggttttaaaatatataattaaaccactttaagaagctgttcattaatgttacattagcttttttcaattatttcaaatgactatctttggatatattaatacaaatatcttaatatacactagaacttcagttctatttaatcgaaatagacttctctattttgttttttttctgtgcaatggtattcgtcttcgctctctgcgttttggccttctgttgaaaccggtttcaaaggtttcttactctgttttacctctttgtttagctttcttctgttttgcagtgtgttttgctgatgacagcaagccggcaatggcagtgaacccccctacacccaaccccccacccttcatctaccagaccccaacttctctctgattcatcacaaatcgctgagcacccatcataacgtgttcttttcgtaactcgacttttaatagctttctggcctccaatttactggttgttagtgggcatattgtcatgcgtggtttgctatatggataagttgggaaaccaacgccatcgtctggataggatttgcgaccttatcaatagtgacatgcacaggtgctgggtttgatgttgcgtcactatcttggttgttgccccctggcgccattttcttatcactgctttacagggaaaaactaagtctacaatttggtaatatttcagtttaattagtttcttatctatgtaacgacatcgtttcaagttaattacttacgaatatcaggtgtatttcaaagagagtgaaatccgttttgtcgatagccctcctctctaatacttattagaaatatattaaaccaatatatgcaactcttatctcaattgttgacctatttatatatatatttcagataatgtggaactagaagaatcgaagtgcctgttcgagaccaactacagtcatgtctacttcatactctacgacacctttattcaagccgaggcgaatctaaaacaaaaaggtaaattaagctattctgcgattagcacagatctgaatatttaatgtgaacccagtacttttgtactcttgcaaatgtggttttctcagcttatttatttgctgcttaaagaggttacactagtataaaaaaaaaaaacttagatcaatgccaaaatgtgattgtgtatgtgtcttatgttgatatttttcattttcgtagatgtaaattgaataattggttaaaaaaacagagtatctgcacttcgttgactcgtagaatacattattgtttttttttttcggcccatttaattttggttaatttgcgcgtatcttttgagaccttttaagttccagcaattaaacaaaaccaacagcgacgacgttaaatcttgtgccttgtttgggtttcggtaatctttatgctttgtcccatttttggtagagctagttataaaaaaacaaacgtgatattctaaattgaaatcctcatctatttctattttacccccttttctctctctatttttgtaaattccctaactggcagaacttccgtttcacattggtaagtttatgtggtttcttattgacttgaattgaccatcaaactgcattcgctttcgccccgcgactttgcttttgaactctgtctaccatacccatatgtgtccacttcccatggtctttcttcttgcgcttgaaatctcagaatcgaatacgaattgcaccatatgcacatctctctcttccactctctctgcatcttgtgcttgtccagacatttcgattgcatcccaaatagctagcaggaatctctaagttgctaatggagtcttttcacctattagagctcttttaatttattaaaacagtgcacaaggcgcatcgcgaggaactggacggttcactatggctgctggagaagatcctgtgccttctgccggaattgttggcccgccggtggcaatgccattccctaagtcgcatcatggccaaactattgcatctgggcaactcgcccaagctgcgacgcgaaggtgtcaggttggtcaatcccttaagtacaatccgaaacgaaatctaatcaagttatccttcctcagatacttcttactgtggtatcagacactaggcgaaaacgcaccaggctacgtgcacgccatgtacgcggaccttatccctggtcttattgtaccccaaaaaggtgtggtcggtccggatacagagttcagtgcctcggactttctcactcatccaaacatgaaggcggacggcgggatggcctccgtttttcacgacaacgcattctcacatcccgtgcagagttcggaggtcgttgccctgttgccaccttcatctagcgaaaaatcagcgccaccagatccacgggatggcctggaggtactgctaaacagcatggtgcacacggcggcctgcctaagatggcgggataatagggcacaaaaggatcatcgggcatttgccttcctgctgcagcgatttatggatgttttcctaccagtattttcacccaacttcgatgtcagttgctccatttacaatccgcgattggatttgcccgtcatgcgatccataaacaaaaaggaagaggtaatggcctcttgcgttgtggtcttaatcaactgggtatcacgtttcacccacgagcgcttgctgagccaccgattggattgcaccttacacatcgaggacgtggaccaagtgcgtctacacggctaccagcagggtctaattgtccgggatgtgttatatgttaaccgcgagaacatcaactttgtgcacgaggtgtatcgtcaggcgtttttgcttaacttcacttcgaagccgcaaatagaagcaattcgcacagccatcgcagtttatcgcgactggatgacaggcgagacgcctccaccgtttctattggagccaaacgatgatccaccgcctccatcgaatgcgggtggaactcccaggagtcaacgacttcgcacaccatcttatgtgggcgctattgcaggctccaaagatcagttggtagttagagctggccgacaaaatgtgttacaggtaagtaaactgttttatcctgactgaattgcctatttaatgttttatattttattctaggtctttgtgaccaatgcggcaaacgtgttcctggtgaacacggccaacctgaacatctgctttcccacccgctcgcgaagttatcgctccacgccactggaagagcagacggagatctgcaagaaggtgctgaatgtgtaccgcacgatggttatgaacacggaaatggacacgcgcacctgggagcaactgcttatggttttactgcaggtgacctcaattgtgctacaccaaaatcagcatacattgccaagtggcaccaacaagagtgccactttgggcgggatcctagggtcagctatattccaaactctcattgtcacatggatacgagcgcacaccaaagtgcctgtcaacgtgctgctgtgggaaaagtttttaaatgtcctgcaatctttgacgcaccgcgaggagctcattattgaatggaataagacgattcaaactctgacgcgtgtgttctcgcgatacacttatggcataaacttgctggatctacctttggatcgagtggctgagagtcgcgcggaaaagagacgtcgcattggcagcgtctggcagggatcgggatcaaacagcgctgctaatggaggaagtgctgcttctgctgcaattagccagaacagacagcgggaatctctggcggagtcgagtagcagtcgctcggaggagacctcgtcgcaggtgcctcttccaaatcaccctcgacctcatcaccagcacacgcaatcccagggaggcactggccatggaacacgaccgatacctttaactcccatgctaagtagaagctacagcgaaggaagcctggcttcagcggctcgtagttcgaggatacgacgtcgacgggcggccactcccaagcccaaggcgctacagccgtcacaactcgcagagaaccgcattaatccgcaggacttgcggcgcgccatgtcccttgattcgttggcgcggaaaggtgatgcagaggaaaccgatagctaccaggaaggagacaatgaaagtggagctggctcgaggagtccgtcacccacagccagcagtggaattgaaggtggctccatcaaggatgcccaactgcagattgatgcgagcttggatgatgcaaattctggtagttacggaagtggcagtaactcgggcagtatttccggacgtcgctgtattattctaggaggctcagcagagggttggcatccagattccacttccattatgtggaaacgcatgcttggcgctctaggagatgttaatcgcattcccaaagctgatttacacgcccaggtgtttatgcatctgctagaaatgacgcaaaatctcatcaagatcaagcagaaccaaggaatatccacggataatcagaacacgcaaccgatgccacctttggtaccacccattggaatcgtggcaccatggtgttacggatccctttctctggatcgctctttcaagaagggcaaactctgggcccttcaattgctctgttcgcttgcgattcaaggtgctgtcaacatgcaacagctgcccttgttctatcatgctctccatcagctgctgactggcgaggatcgcgacttgatttatgcaattcttaagcacctagaagggcctaggctcctaagtttgcttttgccaggacacaccctgctgctgttggacttggtccatgcaagtgctatactgctgacttctctggaggtctctaggagcacaccaagagcggaagttgctgctcttctgggatcactgctatgttatccgtcctcgttgctgacacgttccgttctgcagcccacgccgcagaagtttgagcttatggaatgttcggacttgcaagatcacatcctgaacattgtgctgcgatgcgccaggcgagagccttcagccaaggcacgatgcattgcactctctcagctcggacagtggttgctaatgcgcctgtctcagccactgccggcttcgaattccggaagggctaacctctttcaacaagcggtgccgcatcacaaggatgtgcatcctaaggcgagcagtgtctacaatccgcgcataaaggaggtgctacaagtgctgctccaggcgttgcagtttaagcatcacaccattgccattgtagcggtggattccttaaagttgtgtgccgagcgtggacgccaactggcggctattgaaagagttccccagctaatcatcactgccatctgcaaagctttggaaattcaaagcgtaaccaagcctaaggattccgacaaagtggtgctgacttctctgatgttgtgcctgggcgaattctgtatggctattccggctcctattatgctgacgcccttcaacgaacaaggtgatacgctagtgctccaggtgctcagggtactgttgcaagttgcttccggtgctccgcgtcatgagagagtgaaactgacggccgatgatgactttgatatgcacatcgcacacgacgatcttcaaggcgatggacgcctgccggaagccacctatcagacctccgagaccatccagaagtgcattacagccattaagctgtgtgccaaagcagtgtccatgcatttggtcacccacatcggtcactttccgatgggaatcggagcatctcgtttgagttccatggtcgaggagcaggatgacattggaaatgccgcctatggtggtcaggtggagacgaggcgcgattctgtggagcttccttccgttgtaagtgcccaaaatatgcagcttttcatgctaaattctggtctggtagccagttttattgagctgccaacattaaaactacccggtggaggtataaccgctggcttggttacagccgataagcaagttcgggtcttaatgagggatctcaatggaaaagcttgctgggacgcttctatcttgtattcagaaccgcgcaatgcggaggagcctccaaaaaccacaccaaagattcaacatagccaaccgttggattccatggcgacctccatggtgacacacacaccaagtcctcgacacactttgcgacaccgaccggcgggagtgctgccattggccaaggacatggctccggatctggatcaattggacgatatgttggcctatattggacacaccagtccagagtgtgtggcacccactgtaagccagctgaatgctccaacggccagtcctctgagtggaaaccaagaagctcaggccatttcggtaattctgaatcaacgccttttggagcaggagtttgtgacccactcgactcaggctccatcgccggcattgcgacacgccagctcgaattcctcactgcagcaaccggatcagaggtcactgcactccacaacagcctcctttgattccttaccaacccgcacagagatgccgttccaatattgccggctgctcttttcacatttgggactagctggctgggagcgacggtctaggacgcacttgcttcagaggagcgaaaaactcatgagagaactgcggaacgttgatctccaaaaatgccgggaaacccacaaaatggcggttatttatgtggccgccgggcaggaagataagggaagcatccttaggaatacgagtggaagcagcacctacgagatgttcgtttctgccttgggttgggaaatcgatctggagacacacaacggcttcttgggcggattaccacgccaaggatgcggagctacagctccctattacgctaccccttttctcgaggtggtttaccatgtggccaccaggatgccctcggattcttcggaggccatgctactgaagacgcggcatcttggcaacgatgaggttcacattgtgtggagcgaacacaatcgggattacaggcgggacatattgcccactgagttttgcgatgtgctgattgtggtttatccgctgcggaatggtttgttccgggtgactgtgaacaggaagcctgaagttccatggtttggaccattggccaacgagagcgtggtaagtggcgcctgcttggccactcttattcgggcaaccgcaatcaatgccagtcgaacgaagcgcgctgccctgccgctctaccaacaattgtaagttaaatttatatgctattttattgtatatgctgagtgacttttttctgcagctatgaggagcgcaaccggtcgttggatagcgtatcatctcggtacaaggagagcaccactttcgaagactttgccagccgcatctacaatcccatgccgctgtctacgctgggcacactaagggaatccaatgccagcagctcggccgcacctctggcttctgcattgctggatcacaatcgtgcctccgtcaaaggtaagctgaactgatggcttgtggagagcattactataataacatttctattcatgtaggttgggtacaagcctcgattgattcggggcccataatggggattgcgccatcggcttcagctggatccaccgcggccatggaggcagccaccggaatgtcctccgcttcgccgcgtggccctcgaaaactgggggctccgttcaagagcgtgaccaaaaagcattcgctgcagcatatcgccgtgggaggcggcgcaggagctggcggtgacacgccgcccgagagcccaacattgccgcagcgacgcttcaaataaaacgtgtccctttcctccgattcctggtactacctgcacccattcccttccccaccaatcgggccgcgggccaagccaggcccgaaaagatgcagagagttctaatgcaaacgaaaagtattgcgaaacacgtttcctcctatattagttgttgtaatttatttcggtttccagcttagtcaatcagtgtatttaactatttatttctacggctaccagtcgaaggcttctctctactactatccgctctatttaatttccaatataacactgtgttgtaatgctttgcgaattttacctagttacaatatgatatctttttacgtatttattcaaaagtccgatcgcctgcgatgcggctgtattttgcgtccactcaaacactaatttgaaattatgttatctatgcaatcaattatgttaattcattcgatctattttaagagtatttagttaatgagctttaagcattcgagtgcaaattgattatcagctagctgaacaattgctttttacgcatttactcagttttaatcactgtactgcgctgtttatccaaagcaatctgttattcaatattataaatatatttctttccttttatgtcacattttacgcttggccacaagacgcaaattcaaagaattcgaaaatcgttttaagtgtcacgcacaaaatgcaagaataatcaaaattcgaacatagaaacttgctctgcccattcaaagcaaaacatcaactactagtattatgtaatcgagctatatgtataggtataggtagcctagttgtaggcattctctactatccaaaaccctatcaactgtcgatggcaatcgtcactaggagtgtgagtcttagaaaggaaaacaaaacaacagagtaactaaaattgttcaaacaatcgccttttatttgtgtgtaaaaatgaaattgttacaagatgatttattaaccagtatagggatgttcttcatttgtatttcactgcgaattgttt

SEQ ID NO: 11609 - DNA, 5917 bp, DROSOPHILA
ataaataaatagccgaaagagccagagaaaaaacaaggcaatgtttacaaaaaaatcgcatgccgacgtgaagaaatccacggccaagttgcaggactccaagaaggattccgcctcccgactgcgacacctacgcatgatattggataatgtggaactagaagaatcgaagtgcctgttcgagaccaactacagtcatgtctacttcatactctacgacacctttattcaagccgaggcgaatctaaaacaaaaagtgcacaaggcgcatcgcgaggaactggacggttcactatggctgctggagaagatcctgtgccttctgccggaattgttggcccgccggtggcaatgccattccctaagtcgcatcatggccaaactattgcatctgggcaactcgcccaagctgcgacgcgaaggtgtcagatacttcttactgtggtatcagacactaggcgaaaacgcaccaggctacgtgcacgccatgtacgcggaccttatccctggtcttattgtaccccaaaaaggtgtggtcggtccggatacagagttcagtgcctcggactttctcactcatccaaacatgaaggcggacggcgggatggcctccgtttttcacgacaacgcattctcacatcccgtgcagagttcggaggtcgttgccctgttgccaccttcatctagcgaaaaatcagcgccaccagatccacgggatggcctggaggtactgctaaacagcatggtgcacacggcggcctgcctaagatggcgggataatagggcacaaaaggatcatcgggcatttgccttcctgctgcagcgatttatggatgttttcctaccagtattttcacccaacttcgatgtcagttgctccatttacaatccgcgattggatttgcccgtcatgcgatccataaacaaaaaggaagaggtaatggcctcttgcgttgtggtcttaatcaactgggtatcacgtttcacccacgagcgcttgctgagccaccgattggattgcaccttacacatcgaggacgtggaccaagtgcgtctacacggctaccagcagggtctaattgtccgggatgtgttatatgttaaccgcgagaacatcaactttgtgcacgaggtgtatcgtcaggcgtttttgcttaacttcacttcgaagccgcaaatagaagcaattcgcacagccatcgcagtttatcgcgactggatgacaggcgagacgcctccaccgtttctattggagccaaacgatgatccaccgcctccatcgaatgcgggtggaactcccaggagtcaacgacttcgcacaccatcttatgtgggcgctattgcaggctccaaagatcagttggtagttagagctggccgacaaaatgtgttacaggtctttgtgaccaatgcggcaaacgtgttcctggtgaacacggccaacctgaacatctgctttcccacccgctcgcgaagttatcgctccacgccactggaagagcagacggagatctgcaagaaggtgctgaatgtgtaccgcacgatggttatgaacacggaaatggacacgcgcacctgggagcaactgcttatggttttactgcaggtgacctcaattgtgctacaccaaaatcagcatacattgccaagtggcaccaacaagagtgccactttgggcgggatcctagggtcagctatattccaaactctcattgtcacatggatacgagcgcacaccaaagtgcctgtcaacgtgctgctgtgggaaaagtttttaaatgtcctgcaatctttgacgcaccgcgaggagctcattattgaatggaataagacgattcaaactctgacgcgtgtgttctcgcgatacacttatggcataaacttgctggatctacctttggatcgagtggctgagagtcgcgcggaaaagagacgtcgcattggcagcgtctggcagggatcgggatcaaacagcgctgctaatggaggaagtgctgcttctgctgcaattagccagaacagacagcgggaatctctggcggagtcgagtagcagtcgctcggaggagacctcgtcgcaggtgcctcttccaaatcaccctcgacctcatcaccagcacacgcaatcccagggaggcactggccatggaacacgaccgatacctttaactcccatgctaagtagaagctacagcgaaggaagcctggcttcagcggctcgtagttcgaggatacgacgtcgacgggcggccactcccaagcccaaggcgctacagccgtcacaactcgcagagaaccgcattaatccgcaggacttgcggcgcgccatgtcccttgattcgttggcgcggaaaggtgatgcagaggaaaccgatagctaccaggaaggagacaatgaaagtggagctggctcgaggagtccgtcacccacagccagcagtggaattgaaggtggctccatcaaggatgcccaactgcagattgatgcgagcttggatgatgcaaattctggtagttacggaagtggcagtaactcgggcagtatttccggacgtcgctgtattattctaggaggctcagcagagggttggcatccagattccacttccattatgtggaaacgcatgcttggcgctctaggagatgttaatcgcattcccaaagctgatttacacgcccaggtgtttatgcatctgctagaaatgacgcaaaatctcatcaagatcaagcagaaccaaggaatatccacggataatcagaacacgcaaccgatgccacctttggtaccacccattggaatcgtggcaccatggtgttacggatccctttctctggatcgctctttcaagaagggcaaactctgggcccttcaattgctctgttcgcttgcgattcaaggtgctgtcaacatgcaacagctgcccttgttctatcatgctctccatcagctgctgactggcgaggatcgcgacttgatttatgcaattcttaagcacctagaagggcctaggctcctaagtttgcttttgccaggacacaccctgctgctgttggacttggtccatgcaagtgctatactgctgacttctctggaggtctctaggagcacaccaagagcggaagttgctgctcttctgggatcactgctatgttatccgtcctcgttgctgacacgttccgttctgcagcccacgccgcagaagtttgagcttatggaatgttcggacttgcaagatcacatcctgaacattgtgctgcgatgcgccaggcgagagccttcagccaaggcacgatgcattgcactctctcagctcggacagtggttgctaatgcgcctgtctcagccactgccggcttcgaattccggaagggctaacctctttcaacaagcggtgccgcatcacaaggatgtgcatcctaaggcgagcagtgtctacaatccgcgcataaaggaggtgctacaagtgctgctccaggcgttgcagtttaagcatcacaccattgccattgtagcggtggattccttaaagttgtgtgccgagcgtggacgccaactggcggctattgaaagagttccccagctaatcatcactgccatctgcaaagctttggaaattcaaagcgtaaccaagcctaaggattccgacaaagtggtgctgacttctctgatgttgtgcctgggcgaattctgtatggctattccggctcctattatgctgacgcccttcaacgaacaaggtgatacgctagtgctccaggtgctcagggtactgttgcaagttgcttccggtgctccgcgtcatgagagagtgaaactgacggccgatgatgactttgatatgcacatcgcacacgacgatcttcaaggcgatggacgcctgccggaagccacctatcagacctccgagaccatccagaagtgcattacagccattaagctgtgtgccaaagcagtgtccatgcatttggtcacccacatcggtcactttccgatgggaatcggagcatctcgtttgagttccatggtcgaggagcaggatgacattggaaatgccgcctatggtggtcaggtggagacgaggcgcgattctgtggagcttccttccgttgtaagtgcccaaaatatgcagcttttcatgctaaattctggtctggtagccagttttattgagctgccaacattaaaactacccggtggaggtataaccgctggcttggttacagccgataagcaagttcgggtcttaatgagggatctcaatggaaaagcttgctgggacgcttctatcttgtattcagaaccgcgcaatgcggaggagcctccaaaaaccacaccaaagattcaacatagccaaccgttggattccatggcgacctccatggtgacacacacaccaagtcctcgacacactttgcgacaccgaccggcgggagtgctgccattggccaaggacatggctccggatctggatcaattggacgatatgttggcctatattggacacaccagtccagagtgtgtggcacccactgtaagccagctgaatgctccaacggccagtcctctgagtggaaaccaagaagctcaggccatttcggtaattctgaatcaacgccttttggagcaggagtttgtgacccactcgactcaggctccatcgccggcattgcgacacgccagctcgaattcctcactgcagcaaccggatcagaggtcactgcactccacaacagcctcctttgattccttaccaacccgcacagagatgccgttccaatattgccggctgctcttttcacatttgggactagctggctgggagcgacggtctaggacgcacttgcttcagaggagcgaaaaactcatgagagaactgcggaacgttgatctccaaaaatgccgggaaacccacaaaatggcggttatttatgtggccgccgggcaggaagataagggaagcatccttaggaatacgagtggaagcagcacctacgagatgttcgtttctgccttgggttgggaaatcgatctggagacacacaacggcttcttgggcggattaccacgccaaggatgcggagctacagctccctattacgctaccccttttctcgaggtggtttaccatgtggccaccaggatgccctcggattcttcggaggccatgctactgaagacgcggcatcttggcaacgatgaggttcacattgtgtggagcgaacacaatcgggattacaggcgggacatattgcccactgagttttgcgatgtgctgattgtggtttatccgctgcggaatggtttgttccgggtgactgtgaacaggaagcctgaagttccatggtttggaccattggccaacgagagcgtggtaagtggcgcctgcttggccactcttattcgggcaaccgcaatcaatgccagtcgaacgaagcgcgctgccctgccgctctaccaacaattctatgaggagcgcaaccggtcgttggatagcgtatcatctcggtacaaggagagcaccactttcgaagactttgccagccgcatctacaatcccatgccgctgtctacgctgggcacactaagggaatccaatgccagcagctcggccgcacctctggcttctgcattgctggatcacaatcgtgcctccgtcaaaggttgggtacaagcctcgattgattcggggcccataatggggattgcgccatcggcttcagctggatccaccgcggccatggaggcagccaccggaatgtcctccgcttcgccgcgtggccctcgaaaactgggggctccgttcaagagcgtgaccaaaaagcattcgctgcagcatatcgccgtgggaggcggcgcaggagctggcggtgacacgccgcccgagagcccaacattgccgcagcgacgcttcaaataa

SEQ ID NO: 11610 - protein, 1958 aa, DROSOPHILA
MFTKKSHADVKKSTAKLQDSKKDSASRLRHLRMILDNVELEESKCLFETNYSHVYFILYDTFIQAEANLKQKVHKAHREELDGSLWLLEKILCLLPELLARRWQCHSLSRIMAKLLHLGNSPKLRREGVRYFLLWYQTLGENAPGYVHAMYADLIPGLIVPQKGVVGPDTEFSASDFLTHPNMKADGGMASVFHDNAFSHPVQSSEVVALLPPSSSEKSAPPDPRDGLEVLLNSMVHTAACLRWRDNRAQKDHRAFAFLLQRFMDVFLPVFSPNFDVSCSIYNPRLDLPVMRSINKKEEVMASCVVVLINWVSRFTHERLLSHRLDCTLHIEDVDQVRLHGYQQGLIVRDVLYVNRENINFVHEVYRQAFLLNFTSKPQIEAIRTAIAVYRDWMTGETPPPFLLEPNDDPPPPSNAGGTPRSQRLRTPSYVGAIAGSKDQLVVRAGRQNVLQVFVTNAANVFLVNTANLNICFPTRSRSYRSTPLEEQTEICKKVLNVYRTMVMNTEMDTRTWEQLLMVLLQVTSIVLHQNQHTLPSGTNKSATLGGILGSAIFQTLIVTWIRAHTKVPVNVLLWEKFLNVLQSLTHREELIIEWNKTIQTLTRVFSRYTYGINLLDLPLDRVAESRAEKRRRIGSVWQGSGSNSAANGGSAASAAISQNRQRESLAESSSSRSEETSSQVPLPNHPRPHHQHTQSQGGTGHGTRPIPLTPMLSRSYSEGSLASAARSSRIRRRRAATPKPKALQPSQLAENRINPQDLRRAMSLDSLARKGDAEETDSYQEGDNESGAGSRSPSPTASSGIEGGSIKDAQLQIDASLDDANSGSYGSGSNSGSISGRRCIILGGSAEGWHPDSTSIMWKRMLGALGDVNRIPKADLHAQVFMHLLEMTQNLIKIKQNQGISTDNQNTQPMPPLVPPIGIVAPWCYGSLSLDRSFKKGKLWALQLLCSLAIQGAVNMQQLPLFYHALHQLLTGEDRDLIYAILKHLEGPRLLSLLLPGHTLLLLDLVHASAILLTSLEVSRSTPRAEVAALLGSLLCYPSSLLTRSVLQPTPQKFELMECSDLQDHILNIVLRCARREPSAKARCIALSQLGQWLLMRLSQPLPASNSGRANLFQQAVPHHKDVHPKASSVYNPRIKEVLQVLLQALQFKHHTIAIVAVDSLKLCAERGRQLAAIERVPQLIITAICKALEIQSVTKPKDSDKVVLTSLMLCLGEFCMAIPAPIMLTPFNEQGDTLVLQVLRVLLQVASGAPRHERVKLTADDDFDMHIAHDDLQGDGRLPEATYQTSETIQKCITAIKLCAKAVSMHLVTHIGHFPMGIGASRLSSMVEEQDDIGNAAYGGQVETRRDSVELPSVVSAQNMQLFMLNSGLVASFIELPTLKLPGGGITAGLVTADKQVRVLMRDLNGKACWDASILYSEPRNAEEPPKTTPKIQHSQPLDSMATSMVTHTPSPRHTLRHRPAGVLPLAKDMAPDLDQLDDMLAYIGHTSPECVAPTVSQLNAPTASPLSGNQEAQAISVILNQRLLEQEFVTHSTQAPSPALRHASSNSSLQQPDQRSLHSTTASFDSLPTRTEMPFQYCRLLFSHLGLAGWERRSRTHLLQRSEKLMRELRNVDLQKCRETHKMAVIYVAAGQEDKGSILRNTSGSSTYEMFVSALGWEIDLETHNGFLGGLPRQGCGATAPYYATPFLEVVYHVATRMPSDSSEAMLLKTRHLGNDEVHIVWSEHNRDYRRDILPTEFCDVLIVVYPLRNGLFRVTVNRKPEVPWFGPLANESVVSGACLATLIRATAINASRTKRAALPLYQQFYEERNRSLDSVSSRYKESTTFEDFASRIYNPMPLSTLGTLRESNASSSAAPLASALLDHNRASVKGWVQASIDSGPIMGIAPSASAGSTAAMEAATGMSSASPRGPRKLGAPFKSVTKKHSLQHIAVGGGAGAGGDTPPESPTLPQRRFK

SEQ ID NO: 11611 - DNA, 3289 bp, DROSOPHILA
ctaaatttttaaaaataacactattcactgctttaagcttttgatttggttaaatgggtttggtgcggagttatttttgaaaacttgttatatttatttttttattccgaaaatttcttctctgacctgtgagcttctgcttcgagactatgcacctttatgattttctgatttttagattgtggcaagcagaactcaaattttcgataactttgagaagtgatggaagctgggacgatacatcgatagattcgagaataatatctgttcatggcaattttatgtgcgtcttgttatgtgcgtcaagttagcgtcgatgagttagcggctatgtcggaacggaagaaaatggaacatggcatcgttttttatgtacttattaattttttttcgtattttgaggtgaattccaggcggcatttttaaatgctttaagctcctcccactgcatttttccaggatcattacctaattcggtttaggtaagcaaggcacaagaaatgtcccttaagatgggctagcgtgcaattaggaacaggctctgcgagtggaaatattctccaaagaatggtgaacctgatttttcgattgcgcattttatatactttcttgagtcctataaacttaagtcgtacatatatagttggataattcttatctgaacattctagcatttttattttttggaatactcctctaaacaacgaaaaaataaataataatacacattcgcattgacgcgaatttgatgcaaaactttttaagttagaatcctccagccgggtggcagcaaaacaccgtattgatatagtagccgaacaaatttctgccgcaacgacttgattttacctacaacccatttattgcaacaactgtgtccttatgcagccagaaaaatccattgaaaatctgctagtgaaatatatccagtagctttgataagccgagagcccgccttattttgaatatttctgccgggtggcagcactgctacgtatcgttaagcaaacaaaacaaatttagctgccgcaacaagtagatttgatttgaaaccagtgaaaagaaggtttattatgtcgctctcccgcctgaacactctgatgaaactaacgcccaagcccacgggtaagtatcggggacttcgataatccgacatccagccttctgcgttcgaaatttgggttcggttcaaagtccgaacaccggtgattgaacctttgtctcttcatcgttttaaaagtccaatcaattgcacttcccgtcagccatcggatcccttaagatgcagagaaacctttccgccctcccggaatccggacccaccggctctttcaagacgctggccgtcagttcgcccaagccgttcgtctttcatgtggagctccatcggcccagcaagttcaacgccataagcaagcagatgtggctgtgggttatccaatagcttcccgtttcctgttccgcagactgctaacccaaactgcgttacccatttccagggagatcaaggagtgcttcgacggactggccactaatcccgactgccgggctatcgttttgtccgcctccggaaagcacttcaccgccggcatcgacctcaacgacatgataaacgtgggccaaacgctggccgagaccgatgactacgcccgcaagggcgtctccatggagcgaatgatcaaggtgtaccaggactcaatcagcagcctggagcactgccccaagccggtcatcacggcggtgcacaaggcgtgcatcggcgccggcgtggacctgattaccgccgccgacattcgctactgcaccgaggacgcctttttccaggtcaaggaggtggacatcggcatggccgccgacgtgggcaccctgcagcgtctgcccaaggcagtgggcagtcagtccctcgcccgcgagctgtgcttcactgggcgcaaattcgaggccgccgaggcccactcctcgggcctggtgagtcgcctcttcccagacaaggattccctgctgaccggagccctggccgtggccgagctcatcgctagcaagagtcccgtcgccgtaaagacaaccaaggagagcctcgtgtactccctggagcacaccaatcaagagggcttggatcacattgtgggtatcctaatatctcaacgaatttgcacgagctaaccacgcctcacgcctcacaccttgcagctcctgctgaacaagctcaacctgctgtcggaggacttcgcccaggctgtggccgcccagttgacgaaggacgataagccagtgttcgccaagctgtgatcggtaacctgtaatatgtaatctgcaatctgacagaatttaaaatgtatttgccatgtgtgcatttataaatacagcatctgcctttactttaggacccaaatcagctcataaggttgtcgggagaatgaaaggcttatgactaggaatttggttttcgttgtgagctcttaaaacgcctccgcggatgaggcaccggggttcttctgttgctgtttgcaaagctcctgcagggcgcgtggatccttgacgcacgcctcagttagaacttccacgtggccgttctcgttgatgagcagatcgtcttcgatgcggatgccgatgccccggaactcgggcggcacgtcgccgcaatcctggccaatgtagatgcccggctcaacggtgaagaccatgccgggcacgatgcgtgtgttgcgtggcacgtgcggtgtgtcgtgcacgtccatcccaaggtagtgggagacgtggtgcggacagaagcggtagccctggctgaccagttccttgtactcgctgaacgacttgcccaccagcccgatctcctgcaagtacttgcccagcttgtagcaggtggtctcgaacagctggtcgagcgtctcgccgcccggcttcatcacgttgccaataatctcctcctgcagctggtgcagcatgtcgtacagtgtgcgctgcggctccgtgaaaaccccactcgccggccaggtgcgtgtgatgtcgctggtgtagccgccatactcgcagccggcgtccatcagcacgagatcctgctgacccaacaactggctgttggccacgtagtggatcaccgtggcgtttttaccggcagccaccaccggcgggtaggccaggtagctggcgttgcgcatgcggcacttgtagtcaatcgcggcgaacagatggtgctccgactgacctggccgggtctcggccatcacttcgttgaacgagcgtgaggctatgtcgcaggtgcgccgcattaactgcatctcgtcgcggg

SEQ ID NO: 11612 - DNA, 1012 bp, DROSOPHILA
ttaagcaaacaaaacaaatttagctgccgcaacaagtagatttgatttgaaaccagtgaaaagaaggtttattatgtcgctctcccgcctgaacactctgatgaaactaacgcccaagcccacggccatcggatcccttaagatgcagagaaacctttccgccctcccggaatccggacccaccggctctttcaagacgctggccgtcagttcgcccaagccgttcgtctttcatgtggagctccatcggcccagcaagttcaacgccataagcaagcagatgtggctggagatcaaggagtgcttcgacggactggccactaatcccgactgccgggctatcgttttgtccgcctccggaaagcacttcaccgccggcatcgacctcaacgacatgataaacgtgggccaaacgctggccgagaccgatgactacgcccgcaagggcgtctccatggagcgaatgatcaaggtgtaccaggactcaatcagcagcctggagcactgccccaagccggtcatcacggcggtgcacaaggcgtgcatcggcgccggcgtggacctgattaccgccgccgacattcgctactgcaccgaggacgcctttttccaggtcaaggaggtggacatcggcatggccgccgacgtgggcaccctgcagcgtctgcccaaggcagtgggcagtcagtccctcgcccgcgagctgtgcttcactgggcgcaaattcgaggccgccgaggcccactcctcgggcctggtgagtcgcctcttcccagacaaggattccctgctgaccggagccctggccgtggccgagctcatcgctagcaagagtcccgtcgccgtaaagacaaccaaggagagcctcgtgtactccctggagcacaccaatcaagagggcttggatcacattctcctgctgaacaagctcaacctgctgtcggaggacttcgcccaggctgtggccgcccagttgacgaaggacgataagccagtgttcgccaagctgtga

SEQ ID NO: 11613 - protein, 289 aa, DROSOPHILA
MQRNLSALPESGPTGSFKTLAVSSPKPFVFHVELHRPSKFNAISKQMWLEIKECFDGLATNPDCRAIVLSASGKHFTAGIDLNDMINVGQTLAETDDYARKGVSMERMIKVYQDSISSLEHCPKPVITAVHKACIGAGVDLITAADIRYCTEDAFFQVKEVDIGMAADVGTLQRLPKAVGSQSLARELCFTGRKFEAAEAHSSGLVSRLFPDKDSLLTGALAVAELIASKSPVAVKTTKESLVYSLEHTNQEGLDHILLLNKLNLLSEDFAQAVAAQLTKDDKPVFAKL

SEQ ID NO: 11614 - DNA, 10230 bp, DROSOPHILA
gctgatgctgcatctggtggcatggcaggatgcgcatcggtgtggcatattgatatgccggtggcatgtcgttcgtatctgtaaagaataatggtataggctataaatatgagctgactaaacaaattacaccagttaattacaccaacattgaggggaagtatagttaatatcgatctagtttacgcatacacatagaatactaatctacacatacatacatacatacacagcatacatgtaccaaagttttttatagaaagagagaatttggaatccgtcaccatgtttttgggttgcatttggaaatatttaactacgatctgttttcactacctttgtgggttaatacgttccgcatttgtgagctgcctttttgccattgtgtgtttgtgacactcgactccttgtgttttctttaataataattttgggtggctatacaataatttttgagtgctaaagtgacgtaaatgtgcgagagtaaaatgaggagacaaatagatatatagacttatatcgtatataaatatgatatatagatagatattgtgctatacgtgttagtgttgcggttaagtttatatattcgtatatatttatattattattatatttttttttatagttatgaaaattaggttttcatgaaccaagtttttggtattattcacttaggggcaccttttttatatacagatcaaagtttcgtttagcgtatttcatgtttttttcaataggtatttcataggtgtttcgatattcctgaggatttgggtcagtctctgcaaaggttattttaatgtcattaacaattatcaattccgagaccattttggcgatgtcgctttacatcataaatattgaataatcaatatccgctacatacgtttttaaacatttagggttatatgtaagtacaatattcaattgttatataatataagattcgtgtaacagttagcccagccaagtagagtgaaaagacttgactacactactacaatcgattgggtatcggcagtaggggccgattcggactgggattggattgctcggaagtgtagctctcgttagtgccattgtagttgtagtcattgccgtactcactcatcatattggacggctccgagtacggcggatcctcgtcggaattcagcggcaatgagtacttgtcgtcgatgatcagtcgttgctggtcgagctcttggtagatgggctcactggaatcggtactgggcggcagtggtggtgctgttgcattggctgttaaggcggtgctggcatatgcctcactatcactgggctccatgtgactctgcgatatgtgcctaaacagcaggctttcgatcgcctgattttgcggcatgttgtccactataaagagtatccgatcgttgcactcccccttgctcaaatgaccattgatcagcttcagtatagccttgcgtgtcttattgctctcgctgtgcagtgcgagctggcgcagtgagttgcgaatgtcctcctcgattaggcaattatcagtggactggccaccggcaggagcgcagcttccactgccacagtttttggccaacacacagacaatcgcaacaagcaagagtgttaaaatcacaatctcaagggctatcattccgatggtcaatttgctggagtcgctagaatgatcactgaccgccttggtcacccactggccacccatacagtagcgggtcacattgctgccacatgcctcgttgacataccggcggacatccgtattggtggcattaaagcagttggcatcacgctttgccacctgacacatgatttccgattccagatcatgatcggttagctccgatagccaggacttgttgcacgagcactcggtgcccacgcgcacctggtggacgcgacatgtaaaattgaggctacccgattgcggattctgcagtatattgttgcgaaaactgcagttcgaggagccaatgttcagttcacagcgtccgtagtcctcgaagcgattattcgcaatctccacttgatcggcctggctgacactcaaccaattgggctccacatggctcattgaattgttgcgtatgaacagactaacggcaacaatttgaatggcattcgaacgtatttttgtaattctggtagggcaagaaggagggggggatatgatttagtatgaaagaatccaatcgccatggatgatgaagactcacgtatttccaaacataatcatggtagttataccgctctgactgatcgcctgaccctcaatcgtaccgatcaccgtatccacgatggccaccttatcgctatgcaatttgttggttagcgcctggctctcgatcacctcgatattgcagccctcgataatcagctccttgatgctggtaacgtcaaaggcgttgctcatgatcatgtcgatgtggcagcgcaacaggctcaccttgcccatggacacgccgaatatacccagctgattgatgttcgaatcctcgatgcggagctgtggaatcgattgatttatgtaaatgtattacattttataagattccgcacgaaatcactaaacatattccactggttaaatatccatgtatcataagtgcactcacatttattccatatttggcaaccccaggattgaaagcgttcttcatcagattcagctccttgatccgcttgagagaacagtctagattagtcatctgaagggcattggagaatacggacagctgagtaacatcctccaccagcagcttgtagtccgcacctaaattaatgatttttataatctttatgatctctgatccagttgcaacaacctttgacttaccggtcaggaatttctcacgcagaaaaactcgcaatacatttcgtatttcgatgttgggaaaaccgcctttgttgtggctaaatgcattgctggttatttccacctggtcatctttccccactccgattacaccaaagtagttcacctggttgtcctggaagaagttctcgtacatcacgaactgggtgccaacagtcagtcgcacctcaatatatttgatgttcagcggcaccaatagtttatcgttaaattcgttcgggagctgttggagagatagttaaaaaagatatcaattgttgtgataactaacaattttagcttcccgtgttgattatcgtttgtgattccaatccaaaccattaatatcttatttctacctcgacttctatttatttgaccttttaaggagtctagcttctttacacatgacacattactcagacatgtagatgttttcggtgcactttcagtttgcgctgtgcttatagcaattcttttcattatatatgtatgtatgctttttttttctttttttttttttgatggtctggagctgctgttgttgccgggggtctgtgccgcttgacttacatttcttgcggtctgtatccctctcatcgtagtgttatttttaaacgcatagtctgcgacagcaacaatgggtgatgcggcaacagccactgcaactgcaactgcaaaatcagcaactgcaacagcagcagcagcagcagcaacaatagtaacaacgcacacagcaacgtcagacgacaacaaagtcaacttgaccgcaacgttcattgctccattgaggaactcgaactcacattcgaaccatcacccgagggtgcaattttctcattaaattaagtgaaaatagttgcaacccaaagtaaagtgctggtgatggctgacgagatgtccagcacggcatatggtcggtcgctaatgatgctggatgacgatgacgatggtcggcgttgctgatcacactgtgcaccagcgcccaacatcttgttcattgcgttaatgaatctggattacctcggccctcaagagtgaatggaaagcagcgaagagctgaggatttctcaagaaatcccagggtttccgagattgcttttagttggaacatgtgctttcagattagtttagatcactctgaagtgatgtgattgaataatattatggaaatgcaacgggaaaagaaaagtttaaatacgtacttaatatgtttaatgttaaattcgaaaaaagggaaatatatatgtaatatatagggatgtaatgtagggaatgtatcgttttaccaatcccaattgtatgatcttgttttttatatttaagttacgatgattaatttgcaatcctataaattgataaccaataatgataatgttgttgctaatcgctttgtgatatactggtgaaatacttgttatctgactatatatctatatactaaaggaactagtgaactatctgagccactcgctattatagttttaaattataatgagcaaacttcggctttcagattttcgttcaaaatcatagcgccatttctttcaattgctccagtttcttgtttttttttttctcctcctaaagaggaagtctcaattacgtgtgagttttaatttgcttgtttgtctgacagacagtttttccaaccgcttccttcgcccatttttcccatctctctctctctctctctctctctttttctgtttgtttttcttctcatttcccatcttcttcgacgagaaataacaaacaaatttgtgggtaaaatatctgaaaaagtttatgaagttccatctcgtcaggcgatgttcatatatcgtcaccctttttgaatgtacataatacatccatagcttttacacatatatgcattctatacatttataaaaacccaaagacctttgcttcaatttcaccaatttccttcagatagaaagtatactttataaagattattctctccgtgtagataagcgctatatattgaaatccaggctctatatatagaacctctcactctttaactgatccaaagcgatatatctaagggcgcttttctccaaaagatttcgcctcacaattttcacattttccggtcatttctttttttttttcgtcggcgacaactttaagcgatatatttttggaacggaatcatatagcaaggagtatgggtatggagttttggaagagatacgatggtcggtgggcgaaaggcgtggcagacaagcggaaatagctgccgtcgcctggttggaagtgccaaaaccaacagcagaacataaataaccgaacaaagccaattaaaaataaattatgatccacctctcgctctctttcagtatctgtatctatatctcttcatttctttatatattttgtgcggccaagaaaactgaaaaccgaaaaccgaaattccaatggcatgctggtcacatggctgcaaaatgggaggaaaagaaaggactttcccaaagcatttcccagggcacacatgccctgcagcgagtgcatctgatgtgtgatatctgtatgtattgtatatgcgagataatgcaatcttgacacgttcgtttggaaaactacgactacgtgactcgctggcaaagaattcgtttcttttccgattaatcataatcctcggataagagactacctcagttttcgactaaggctatcaggaaatacttagataacatgaaacagcgatgaagtcaaatgttttcttctctgtagtaccgcattttccaaaatgttttggtcatctgaagtgcagcaaacggcactcccttctaatcaaaatgtactgcgaaaatgtttattcggtcgatcgaatctctggaatatccttctgtttaccaattgcatcgaataatgtggattataaacaacatttactacattacatttacattttacaactaactttgtttatcgtattatgagttgttatgagtataaatctcccttccctcatcttcattttttttttattttttttttttttacatcatatgaattttctaccccgaatacaaatattgtataaattaggcgagaatgacaagataagatttaacttttggttttctctctcaaatgacttggtgggctatatatacatatgtattttatcgattaagtgcatatgttttgtgaatgattcagtgtccatttccatatcgaaatgtataactcggtttccgtggctgtgggttgtgtaaacaatcgaaagttgtttaacgaaaatatttgcaaaattctatagtgtgcacagttctcctcactatttttgtatctgtatctttagttggtgcacattcagatatgtacctcctagagcgctatcttctgattttgagtgttcggctcattgcatttacactcctcttttccgattttccttgtcgtctcactttgttgctggtttattgttgtttttgtgggacgagcattcaatttgtggcaattgatagatttttagcagctcacagccataacattccaagtagttccaagtagttccaagtagtttaagtagccattcgaaatgggaatttaagtaggcgcattccactaaagcagaaacactcgaaaccaaaataagcgcccaacataaattccgttttctttgtacagctagaaaatgttggaaaatattgcagttttcttatttactagaaaaataaagcacttgcaattgtggccaagttgatgtacatttttctcacagtgcagcggtcttttttactgtctatagattgaatacttttgttttgagcagttgtctcggttttttttttccttcgctttcggcttctgtttgttcactttcagcaaataaataaatacgattcctgtatatgcatataagatgacgacacatgcggcatacatactcaaaaccaatcgttcacaaagaagcgataagtggcggagcgagggggtgggtaaagtgtcacccacatccgctggaaaaatcatctaagttcactcaattgctgaggaagtgcagaatccaatgacttggagagcgatataaggcatatctgcatctattataaaactaaaagatatatatttttgaattggagcgcacaaaacacgcttaggtcatatgtcttttctatatatacatacatgtgcatatgtagtatatacatatgtatatgcagagcggaaaagtggagcatttggattattgattactgatttagttcttggaacggccctctgatttgtattctaaacatattggcttaataaataacaaaatcaatttcgaattgtatgtattcattcccctgctcaaataaatctctatgtgcgcgcacgtaggccgaataattaaaatgaccttcaaaattccgttaatcgaaatagcttatagttgctttcaattaaaaatggcaagtataacactaagtggctgcgacggctaagctatgtaaattaattaaagcattatatactgcagccacccccttatcggtgtgcaaactcaattataaatagcaatcacttgcattttcaatattcttattattattgtgaactgtagttcatattgaaagatcggtaaacatacaacgtatgcagtttccctttcagtgcgtgtcattaaataaatagctaagttcataataatataactattaggttggtatatagctatatatgtgtggaacatacaatttaaaaatgtaaaaaaaaagatatacagggtaatatatgtagtttgatatctagtgtctataagaacacgattctgggtgactggccataaattcagtctgtaatcacttgcacttgctctctttgtttttgttttgtcagagagcagcaacaaatgaacacaagcgcacacctgattcattagcataacctgttgaacgggttggtggggcatggaaggcggttggggtggggcgttccacattgtagaagagggggcggcaagcggaagagggcggggcaacggcgccgtcttctttcatttcagtttactctttcattcattttcattacatttcaaaaagtgctgggagagcgcattttctcaagtccggaaaactataattttcgcaaaaaaaaaaaaaaaataccacggtcaaataccttacattttacatattaagcgaaaaaaaatgttttcttttcaaggcgataatatctttgaagtatatggagaatatacagtgaatatcttgtatacacattttgtggtgtgatttggattctttacataattttttgattataattctgctgcgattccacgcatcatataaattttatattattataatgcaatcattccaaaagcacactcaaaatgctaacaattggcaacgttttaagtcagacagtataatgaagtccattcaaaaatgtcacaccaaaacagacaaaagccttccaatttttcgctaattggaaaaacaaggttaacgaatttcagagtggccgaagtagaaggtacaatttcctttaaacctaaccgttatatatataaatgtaaatacatatatgaactcatgtgttttattggaggaagttctacttctaagttgttctagactgttccattttatgtgaatgttcaataatttaatagaattatggagcaataagcaaaactacattagtttcgtacctgttaacccatgctaacccattctcaattagacaacttagtgccaagagtgttattgagacgcaccagtagcgatgactaatcgaatcgatgaccaattaagtgatatttaaaaccgtttagtgcggctgcggttcgatgagttaaacatacatacataggtgtaggtgacatgatatgacacgaaaccaaaaccgaaaccgaaaaactcaccgttttgttaagcttgtaatcacagattgccttgagatgaatgcagaaacagtgccggcacaggtccaccctattctcccttttctcacgattctcccggtgggcggtatccagcagcggcccaccaatttgggaatgaccaccccaagtgggcaggcgatcgaagcgctccggataggttagtgcatcatggccagaaaacgaaacgattatgccgattaggaggaccagagcaatccgtcgcgaattcattctggtcttcttcacctttgcttcacttttatttttgttattttgtttttgtttatatgtgctttaacaaatttgttttcgttttgccaagatagatatttcaaaaccgcttaggtcacttcacactctttttcccttctcacgatcgtcgaactttaggggccgcagaaattaaaaaaaaagagccacaacaaaaaaatatatatatattcaacacaaataacgttgtgagacgtgtttaccggatggcagttcgtttagctctaaagctaccgtctcgtcgatcgggccgtctgatcgcccgtgttccgattccacgattctttctcactctctctcggtatagtacactgcgacctagtattcaactcatgtattaaattgatgaaatgaaaaatatgaaaatgattaaatgtaaatgaaaaatatttaagaataactattgtttaatatttaaacattctaaatattttgtacagaaagtttttgtttaatattcaacgatatttatcctaaagagcatttttaaattaccaacaaaaattaaatcgcatggagcctatatatatttttgtaacaatatcttgggagaatcatatgatcaatagcttttctaactattttaattaattatttattttaaatatctccgaaaaatgactcatttataaaaacctaatcattgtttatttaatgttggggaatagtgaaagtggaatagtttttcgcagtgtatctctcccgacttactctctttctctctctctctctctctttcatacactcgcattcagcttacattcagcagacattcagcagatagctgagctgacttcttcgttcggctgtgttcataaaaaaagagtgctggggacacctgcttaaaacattccctattattcacagttaataacgtagaataaccttgcatcccctacaatagcaaaagaaatgaatttaagcttttgaatgaatataaactgaaatcttgtctaaaactgccaatcaaaaagaatacgtatacgtattctttacagctgtgatcgtaaaagagcagagctttggacctgcgagtttaagataaaaaattccaatgattcacagttttaatggtcaatttttttttttataatatcatttcgtatttaaattcaaacaattcaagaaatgtttcatttttatttcttcaatagtttcgaaaatatagattaaaacaacataatagggagaaattgtggtgttcactgaa

SEQ ID NO: 11615 - DNA, 2352 bp, DROSOPHILA
ccatccggtaaacacgtctcacaacgttatttgtgttgaatatatatatatttttttgttgtggctctttttttttaatttctgcggcccctaaagttcgacgatcgtgagaagggaaaaagagtgtgaagtgacctaagcggttttgaaatatctatcttggcaaaacgaaaacaaatttgttaaagcacatataaacaaaaacaaaataacaaaaataaaagtgaagcaaaggtgaagaagaccagaatgaattcgcgacggattgctctggtcctcctaatcggcataatcgtttcgttttctggccatgatgcactaacctatccggagcgcttcgatcgcctgcccacttggggtggtcattcccaaattggtgggccgctgctggataccgcccaccgggagaatcgtgagaaaagggagaatagggtggacctgtgccggcactgtttctgcattcatctcaaggcaatctgtgattacaagcttaacaaaacgctcccgaacgaatttaacgataaactattggtgccgctgaacatcaaatatattgaggtgcgactgactgttggcacccagttcgtgatgtacgagaacttcttccaggacaaccaggtgaactactttggtgtaatcggagtggggaaagatgaccaggtggaaataaccagcaatgcatttagccacaacaaaggcggttttcccaacatcgaaatacgaaatgtattgcgagtttttctgcgtgagaaattcctgaccggtgcggactacaagctgctggtggaggatgttactcagctgtccgtattctccaatgcccttcagatgactaatctagactgttctctcaagcggatcaaggagctgaatctgatgaagaacgctttcaatcctggggttgccaaatatggaataaatctccgcatcgaggattcgaacatcaatcagctgggtatattcggcgtgtccatgggcaaggtgagcctgttgcgctgccacatcgacatgatcatgagcaacgcctttgacgttaccagcatcaaggagctgattatcgagggctgcaatatcgaggtgatcgagagccaggcgctaaccaacaaattgcatagcgataaggtggccatcgtggatacggtgatcggtacgattgagggtcaggcgatcagtcagagcggtataactaccatgattatgtttggaaatacaattacaaaaatacgttcgaatgccattcaaattgttgccgttagtctgttcatacgcaacaattcaatgagccatgtggagcccaattggttgagtgtcagccaggccgatcaagtggagattgcgaataatcgcttcgaggactacggacgctgtgaactgaacattggctcctcgaactgcagttttcgcaacaatatactgcagaatccgcaatcgggtagcctcaattttacatgtcgcgtccaccaggtgcgcgtgggcaccgagtgctcgtgcaacaagtcctggctatcggagctaaccgatcatgatctggaatcggaaatcatgtgtcaggtggcaaagcgtgatgccaactgctttaatgccaccaatacggatgtccgccggtatgtcaacgaggcatgtggcagcaatgtgacccgctactgtatgggtggccagtgggtgaccaaggcggtcagtgatcattctagcgactccagcaaattgaccatcggaatgatagcccttgagattgtgattttaacactcttgcttgttgcgattgtctgtgtgttggccaaaaactgtggcagtggaagctgcgctcctgccggtggccagtccactgataattgcctaatcgaggaggacattcgcaactcactgcgccagctcgcactgcacagcgagagcaataagacacgcaaggctatactgaagctgatcaatggtcatttgagcaagggggagtgcaacgatcggatactctttatagtggacaacatgccgcaaaatcaggcgatcgaaagcctgctgtttaggcacatatcgcagagtcacatggagcccagtgatagtgaggcatatgccagcaccgccttaacagccaatgcaacagcaccaccactgccgcccagtaccgattccagtgagcccatctaccaagagctcgaccagcaacgactgatcatcgacgacaagtactcattgccgctgaattccgacgaggatccgccgtactcggagccgtccaatatgatgagtgagtacggcaatgactacaactacaatggcactaacgagagctacacttccgagcaatccaatcccagtccgaatcggcccctactgccgatacccaatcgattgtag

SEQ ID NO: 11616 - protein, 700 aa, DROSOPHILA
MNSRRIALVLLIGIIVSFSGHDALTYPERFDRLPTWGGHSQIGGPLLDTAHRENREKRENRVDLCRHCFCIHLKAICDYKLNKTLPNEFNDKLLVPLNIKYIEVRLTVGTQFVMYENFFQDNQVNYFGVIGVGKDDQVEITSNAFSHNKGGFPNIEIRNVLRVFLREKFLTGADYKLLVEDVTQLSVFSNALQMTNLDCSLKRIKELNLMKNAFNPGVAKYGINLRIEDSNINQLGIFGVSMGKVSLLRCHIDMIMSNAFDVTSIKELIIEGCNIEVIESQALTNKLHSDKVAIVDTVIGTIEGQAISQSGITTMIMFGNTITKIRSNAIQIVAVSLFIRNNSMSHVEPNWLSVSQADQVEIANNRFEDYGRCELNIGSSNCSFRNNILQNPQSGSLNFTCRVHQVRVGTECSCNKSWLSELTDHDLESEIMCQVAKRDANCFNATNTDVRRYVNEACGSNVTRYCMGGQWVTKAVSDHSSDSSKLTIGMIALEIVILTLLLVAIVCVLAKNCGSGSCAPAGGQSTDNCLIEEDIRNSLRQLALHSESNKTRKAILKLINGHLSKGECNDRILFIVDNMPQNQAIESLLFRHISQSHMEPSDSEAYASTALTANATAPPLPPSTDSSEPIYQELDQQRLIIDDKYSLPLNSDEDPPYSEPSNMMSEYGNDYNYNGTNESYTSEQSNPSPNRPLLPIPNRL

SEQ ID NO: 11617 - DNA, 4218 bp, DROSOPHILA
agttggcaatcaccgatggcggaaaatgacatttttataaaattgctatgcgtcctgatgtgaccgtagccgctgacaggcacagcaacaacaattcggggcggatctttgggcacactacgagcgctttggtggtctatcgattgtatttttttatcgacgtttgggcggcaaaaaagtatcaacttaagctgaattcaattcataaatattcattatctggagaaaactgcaaaatgtttttttggaacgtgacaagaaatacttttacgttttaccacagagatctctatagaaagtataaaaatagtaattatgcataatgaacatattaagaatccacctgatatatgcatttatttataaaaaaaaacaacaaagataaaaaagtgttaagtgttaattaggacaaaagttcagaacgtgttcacaatgtgcaatcgtgtgacacaagtgacgatgagattttgaaaccaaaactgagaattgtttttactctgaatgaatgaggggcgctatcaatgaatctcccagaacttacaaatccttatcaacagaagcgtgtggcttaggtcaagtctcgccaagagaacagccggactacacagtgcagcaaaatcgttcccattctgcgaaagtggttacctaaaaactaagttggctagagagatagcttggatgcccatgacctcctccttattattcaaagcagtggcttagaatgcgcaccaaagatggtgaaagtgtgcggaacgacgtcatagtaatataattcattataatctctgttgtccagtgctgctggtcaacatgattgcgaaaaaaaagcacacgccgatgggatcggagagatgctgctgcttgctcagttctcaatcgcgttccggattaggtagtcgagcttgttgggtttttcaaataatccgggtcgatcgatcactggccgcactactttattatattatacaaactgcgtgtgtgccctgcgaatcggaccaatatgctctcaatctcgagctactttcgactgcccctatacacgcggctggcagtttgcatcctgatctgcgtgattttgaatgactgcgaggccaggagtattggcgacgagtcccatgagaacgcgattacggatgagacggccgactacctgcgatcccatggcgccatgatgaagtcctatatgaacttcagcgtcgatccgtgcgacgacttctacgagttcgcgtgcggcaactggaagaacgtgaaaacgccgcggcaatcgccccataggcggagcaatattctggacatcagctacacactgatggacgtgacggagcagctgctgaccaggacaaagttggcggaggcactgaacgtgtccgccgagctgctcgttgcacaacgcttctacaattcctgcctggcggccgagctctttccgcggcccgctgccgatcccgcttatctatcggttatcaggtcgctgggtggttttcccgccgtcgacagagacgcctggaacgcctccagcttcagttggttcaacatgagcgcccatctcagcaactacggcgttcgcagtttgatccacgaagaaattctgccgcagcatcccttcaatccgtacttcaagctacccgaactgggctttgaccatgtcgtccacaccgctcacgttgccaatacgagctcgcgggcctaccagctcaacgagcatcgcatgcgtggctacctgaaggaatacaatctcacgaaggatgaaatctctgccgtgatcgaaggcgtctttgctttttggagcgaggcgctcagtattgaggataagttcgagagcgatagggataagtgcgatttgctcagtgagattgaggaggtgccgcgatttggtcagtggaggagctactacgagatagcctggaatggtatagacttttacaacggctcgtccggtggcgaattctgcgacttttactatgtggagctcgacaaggtgtgcgccaagcatacggaggcggtggccaattatctagccatgcggtttctctaccgcatggacgacaagctgaaggagcccaagcagccggaggaccaaaaggttaactgcttgatgatcgtccagatgacgctgccaaatctgttcaacaggctctacatggcggtgagttggatgctgtgaatatgtgaagcttagcttttcaattgatatcaactaactttcataggagcacttcaccgacgagaagcactcggagatctctgacatggtgaccgaaatgcgaaaggcccagcgacagatcctcgagagtgtggagtggttggacgcggagacgcgagcagaggctctgagcaaggaggccggcatcacgccagtaatcggcagttacaaaaacgaagagctgtcggacactctaatccgcgagatcaacaatctgaccattgttgaaggcagctatgcccagagtttgatcaatctgcgagtattgggcacctatcttcatcgctacgctggcttacatgcggacgagctgcccaaggacacaaagccactgacactgctcgtgggaatgcaggtgaacgccttctactacaatctggataactcggtgtacgtgatggcgggagtactgcatccgcctgcgtaccaccgttcatggcccgattccttgaagttcggcaccattggctatctgataggtcacgagttgacccacggcttcgatacggagggctccagtttcgacagcgccggcgaagtacgcgactggtggtccaggaagtcggaggcggtattccaggaacgggcgcagtgctatgtggattacttcaaccaatacttgataccggaaatcaaccagacaattcgcggcaatgagacaagggacgagaacatagcggacgccggtggcttgagggccgcactcaccggctatcgaaaccacatgaagcagctgcaacgaagtggagcggatggggagacgttggctcacaaaaacgagcagatgcccggcctcgacctgtcgccggagcagctcttcttcgtgggattcgcgcagctgtggtgcgccgactacgagccggagcactactgggaggagctcactggcgcacataccgtcgataagtatcgggtgctgggtgccgtttccaacaacgacgattttgctgaggtctacaagtgcccactgggcagtccaatgcatccgaaggctgagagttgtcggatgtggtgaccataagtcgtatataaaggaaaagatgtaaaatactctagatgttcaactacaaaataaatgaaaacaggaaaaataatgcaaatcgacgatatagtcttacacatttctgcaattgagttaactcactcgactttacccatttactcttaatagtctctttatttctaattggttttaatgagcaacgtgctctgaggatttgaaggcgttgggtccccggtaattctcgaccagcagggatttgtagcgcctcaggtggacgctgagtccttcctcgcgctcgctgacggagaggattgagacgcgggccacgaccagatgggaaggattcgattgactaaagcctcggattacgtcgatttcatcgccgacttccagctgtaaatggtaaatcataagattgaattcgatctatatatggactccatacctgggcactctttttgggcagcttctttccattgacgcgtatcttgctctcgtagaaattcagttccactttgctgtgggaggtaagacatcatggttattgggggcatttagaaaaccttcggctgtttcttactttctcgccatgcccaggccagctttcagtaggagatcggcgcgcagtgagttcaccttggtcttgaccaccttggagtccctttcgtccttgaaatcctcatcatcctcgtcgtcgctgtccaagtcatccgatgctcgtgaggatttcttgtcgtacttccacgctgaagcactggtgtgtacaggagcctgcagctctaaggtggttgagagtttaggcagacttttagatggaaatggcgtccttagggatcttcctagtcgggctatttgacgaaaagtccggagcattttgtgtgggcgccttaacaattacgataacaaactgaataacataacctaaaaactacagctgttgcggtggcgttgccaaccatctctaggacttgtttgcctttttgtttcgtttctttttgggtttcttgtcggg

SEQ ID NO: 11618 - DNA, 2154 bp, DROSOPHILA
atgctctcaatctcgagctactttcgactgcccctatacacgcggctggcagtttgcatcctgatctgcgtgattttgaatgactgcgaggccaggagtattggcgacgagtcccatgagaacgcgattacggatgagacggccgactacctgcgatcccatggcgccatgatgaagtcctatatgaacttcagcgtcgatccgtgcgacgacttctacgagttcgcgtgcggcaactggaagaacgtgaaaacgccgcggcaatcgccccataggcggagcaatattctggacatcagctacacactgatggacgtgacggagcagctgctgaccaggacaaagttggcggaggcactgaacgtgtccgccgagctgctcgttgcacaacgcttctacaattcctgcctggcggccgagctctttccgcggcccgctgccgatcccgcttatctatcggttatcaggtcgctgggtggttttcccgccgtcgacagagacgcctggaacgcctccagcttcagttggttcaacatgagcgcccatctcagcaactacggcgttcgcagtttgatccacgaagaaattctgccgcagcatcccttcaatccgtacttcaagctacccgaactgggctttgaccatgtcgtccacaccgctcacgttgccaatacgagctcgcgggcctaccagctcaacgagcatcgcatgcgtggctacctgaaggaatacaatctcacgaaggatgaaatctctgccgtgatcgaaggcgtctttgctttttggagcgaggcgctcagtattgaggataagttcgagagcgatagggataagtgcgatttgctcagtgagattgaggaggtgccgcgatttggtcagtggaggagctactacgagatagcctggaatggtatagacttttacaacggctcgtccggtggcgaattctgcgacttttactatgtggagctcgacaaggtgtgcgccaagcatacggaggcggtggccaattatctagccatgcggtttctctaccgcatggacgacaagctgaaggagcccaagcagccggaggaccaaaaggttaactgcttgatgatcgtccagatgacgctgccaaatctgttcaacaggctctacatggcggagcacttcaccgacgagaagcactcggagatctctgacatggtgaccgaaatgcgaaaggcccagcgacagatcctcgagagtgtggagtggttggacgcggagacgcgagcagaggctctgagcaaggaggccggcatcacgccagtaatcggcagttacaaaaacgaagagctgtcggacactctaatccgcgagatcaacaatctgaccattgttgaaggcagctatgcccagagtttgatcaatctgcgagtattgggcacctatcttcatcgctacgctggcttacatgcggacgagctgcccaaggacacaaagccactgacactgctcgtgggaatgcaggtgaacgccttctactacaatctggataactcggtgtacgtgatggcgggagtactgcatccgcctgcgtaccaccgttcatggcccgattccttgaagttcggcaccattggctatctgataggtcacgagttgacccacggcttcgatacggagggctccagtttcgacagcgccggcgaagtacgcgactggtggtccaggaagtcggaggcggtattccaggaacgggcgcagtgctatgtggattacttcaaccaatacttgataccggaaatcaaccagacaattcgcggcaatgagacaagggacgagaacatagcggacgccggtggcttgagggccgcactcaccggctatcgaaaccacatgaagcagctgcaacgaagtggagcggatggggagacgttggctcacaaaaacgagcagatgcccggcctcgacctgtcgccggagcagctcttcttcgtgggattcgcgcagctgtggtgcgccgactacgagccggagcactactgggaggagctcactggcgcacataccgtcgataagtatcgggtgctgggtgccgtttccaacaacgacgattttgctgaggtctacaagtgcccactgggcagtccaatgcatccgaaggctgagagttgtcggatgtggtga

SEQ ID NO: 11619 - protein, 717 aa, DROSOPHILA
MLSISSYFRLPLYTRLAVCILICVILNDCEARSIGDESHENAITDETADYLRSHGAMMKSYMNFSVDPCDDFYEFACGNWKNVKTPRQSPHRRSNILDISYTLMDVTEQLLTRTKLAEALNVSAELLVAQRFYNSCLAAELFPRPAADPAYLSVIRSLGGFPAVDRDAWNASSFSWFNMSAHLSNYGVRSLIHEEILPQHPFNPYFKLPELGFDHVVHTAHVANTSSRAYQLNEHRMRGYLKEYNLTKDEISAVIEGVFAFWSEALSIEDKFESDRDKCDLLSEIEEVPRFGQWRSYYEIAWNGIDFYNGSSGGEFCDFYYVELDKVCAKHTEAVANYLAMRFLYRMDDKLKEPKQPEDQKVNCLMIVQMTLPNLFNRLYMAEHFTDEKHSEISDMVTEMRKAQRQILESVEWLDAETRAEALSKEAGITPVIGSYKNEELSDTLIREINNLTIVEGSYAQSLINLRVLGTYLHRYAGLHADELPKDTKPLTLLVGMQVNAFYYNLDNSVYVMAGVLHPPAYHRSWPDSLKFGTIGYLIGHELTHGFDTEGSSFDSAGEVRDWWSRKSEAVFQERAQCYVDYFNQYLIPEINQTIRGNETRDENIADAGGLRAALTGYRNHMKQLQRSGADGETLAHKNEQMPGLDLSPEQLFFVGFAQLWCADYEPEHYWEELTGAHTVDKYRVLGAVSNNDDFAEVYKCPLGSPMHPKAESCRMW

SEQ ID NO: 11620 - DNA, 2989 bp, DROSOPHILA
gcggctgcattatcaactagatctattttactttgcacatatggagcatttacttgcctggccaaaatagtttttttacacattagttgtatgtggtaactctgtagttttttttaaccctgacagactcaatttggaaaacgggttgatcagataaatttgcatatgttctttttacttagatatcttttttcttttactttttacacaatgtaatttacttttcacttaatgcataattggtttcggggaactttttacgaacggctgctaaaaatgtggctaaacgaaatcggcttagatttacaatgtggatagatgaatttaagaatttaactgctgacatgtgcatattgtatataatggatttattcgatggtgaaaacgtgcagttcataaatcaaaacgagaagcgcgtaagaggtgtgcagcaagtaaattatattccttcctattacgattacgatcttagttaatgtgttgcattggtgagcacactttgcgatccagcgcacaaagcggcgggacctccacaacgtcgtcagcttataacttagggttcttggggggatggtgggtacaagagctgagggaccggattagaaatcaaagtttgtcgtatctaacttaaactgaattttgatgcgagcagatcgccacgtcagttgggagcgggatggggagcggcggtttgctgcttatccgccggcggcggcgggggaggattcactgcttttcttgccactccgagagcagccgtcagacgatggcatccgctattgctgcagctccgacccctatatccgcccgggatcatgagtgcaccgcctccacttccacttgcagctactccgccactcccgctcccagtcccactcccgcttcctcccccgctggcagccgacgtgcgcgtggccgccgtcgccgtcgtcgtcgtcatcagggtggtactggttgtggtgctgttgctggtggtgggtctgccgcgtctattctattgctaccggcgattgatcagcccgttaggaggcgcctgttggctagccgtatgcatcagctctagctcgaccagcagtgggaagtgatcagagggtatatgcggatgtgggcatccaacaaccttattctcgcgcagccaatcattggagacaggacccagcaggcccagcggcaccatgcccgtcttcgtgtagaaaatgtagtcgatgatgcccttaaaatcgaacgtatagttggtgtgcggcattatgtcctcgttgtaggcggaggctagcttgaacgagtgcgtaaactcgttggtgtcgttcgagagcagccgctgcaggcaggacttgtagcccatgtccttgaagtccaaatgatccatggaaacgcggcccttgccgagaaactccacaacgcctgaatcgggtagcgagttgaagtcaccgcacagcagcagctggacagcattggagtcgttcttgtgaccaggtcggaaactgtggctcgcctcgtcgatgatcgtcttcaactcattgctaagcatcatcgtctggatgagcttgacgtcgcagaactcagggtcccagtgtatgtgcgccgtgcagacgagcagcggctgcgagatctgcgtcacctcggacatcggctcccatgcgttctccttcaccttgagcagtgcggccagaccgatgttatccttaggcattacgcggttcagcatgttgtcggagccctcggcattggccattgccagctgattgaactcgatcaatgattccttgatcagcgtaaacctgtttattaagatcgctgcataagtttatcattgaaatagggattgacatgtgtactcacttggacgccctgaagaatatcgcacagccatcgacgtacttcctctccagctcggacatagtcttagcacgcgacttcggtgagaagattccctcgtacccatcgttcttgagttccggcaggaagaagtgatagaattgctccgtttcgatctcctgcagactgataatgtccgctgcatagtgccgtatctcgtcgataatcgacttttttcggtactcccagcatagcgcccacgacggacagtatccgtacatttgtcgcgtcgcgtacttgtcgcagagcacattatagcacatgaccgtaaaaatgcctacgggtgtggaaaagtattaattaatgctttctatgaaaccagtgcattcttaagcgtaaaatttgaaaggcaacaacttaattggcggaggtatcgcttttgcagaagttattttttaattttaagagcattattaatttaataaacaatctgcttaaattactctcaaatacttattactgctaaaagacttgtcgatggaaaagcgtcttgtttagctatctagggcaactgcaattttgctggctaatagaaaattcttgtcggccattaggctttaattacaacttacaggctggtcgcgttttgttgggcttggccagtggcagccagggcctctggggcggtggattcacggtaactgcaaagataaaacataaaaagagaagcggatgtgcggttagtaagttgcgcgagtgaaaatgccaagtgtcaagagattattatgaaactagcacccgcacacactagcactccgtatcggctaccccactgacacactcattgctgcactggctccatccacgttctcccacaaccacttatctactccccgtagaaatccccatgccgtccgtccactgggtgcagattgcaagcggtgaaagtgacatgcacaagcaatcaaattgcttccgcctttgggttgccccagcgcaaaagcggcaccaccagttcaagtcaggtggttattcgctttttgcataaaccgctgaagtgccgaagtgatgttggttcaaaggtactcgtacttaggatttaggtacacataactaattgttaactttttgatttctttttttatcaccaagccatactctttcatattaggct

SEQ ID NO: 11621 - DNA, 928 bp, DROSOPHILA
cgaaacggagcaattctatcacttcttcctgccggaactcaagaacgatgggtacgagggaatcttctcaccgaagtcgcgtgctaagactatgtccgagctggagaggaagtacgtcgatggctgtgcgatattcttcagggcgtccaagtttacgctgatcaaggaatcattgatcgagttcaatcagctggcaatggccaatgccgagggctccgacaacatgctgaaccgcgtaatgcctaaggataacatcggtctggccgcactgctcaaggtgaaggagaacgcatgggagccgatgtccgaggtgacgcagatctcgcagccgctgctcgtctgcacggcgcacatacactgggaccctgagttctgcgacgtcaagctcatccagacgatgatgcttagcaatgagttgaagacgatcatcgacgaggcgagccacagtttccgacctggtcacaagaacgactccaatgctgtccagctgctgctgtgcggtgacttcaactcgctacccgattcaggcgttgtggagtttctcggcaagggccgcgtttccatggatcatttggacttcaaggacatgggctacaagtcctgcctgcagcggctgctctcgaacgacaccaacgagtttacgcactcgttcaagctagcctccgcctacaacgaggacataatgccgcacaccaactatacgttcgattttaagggcatcatcgactacattttctacacgaagacgggcatggtgccgctgggcctgctgggtcctgtctccaatgattggctgcgcgagaataaggttgttggatgcccacatccgcatataccctctgatcacttcccactgctggtcgagctagagctgatgcatacggctagccaacaggcgcctcctaacgggctgatcaatcgccggtag

SEQ ID NO: 11622 - protein, 278 aa, DROSOPHILA
MSELERKYVDGCAIFFRASKFTLIKESLIEFNQLAMANAEGSDNMLNRVMPKDNIGLAALLKVKENAWEPMSEVTQISQPLLVCTAHIHWDPEFCDVKLIQTMMLSNELKTIIDEASHSFRPGHKNDSNAVQLLLCGDFNSLPDSGVVEFLGKGRVSMDHLDFKDMGYKSCLQRLLSNDTNEFTHSFKLASAYNEDIMPHTNYTFDFKGIIDYIFYTKTGMVPLGLLGPVSNDWLRENKVVGCPHPHIPSDHFPLLVELELMHTASQQAPPNGLINRR

SEQ ID NO: 11623 - DNA, 5065 bp, DROSOPHILA
cgattcgcatgacagcaatggaggagttcgccgagtactatgggtgagttctttgagatgtgaagtgtgtgtgtgtggggcttcaagaacacgcatgcaacaagtgtctaaaattagcgttaaatgcaatcaaacacggtggctaattttagccacgatttagcacccacttctcggccacacgacgtgaatcggctattccctatcagctgagttgcgtataaacaatggccaaatctccatctccacgcggccatgtgaatgaaaagctcaaacaaagcgaaattagtagtgccgtacgaaagcaaaaccatccaggaggtatcaacaccccaactaaaaaatgccctgtggagcgtgtttatccttttcacaaagggacgaaaagttcagctgctggttttggcgcgtaaaaattccatttaaactggacgcaattgagtatttctattactttgtactgggaaataatacttcatttaaaaaataagtcatactaagaatatatagaaaatttaaaaaaaaaacctttgttctcaagtcgcgtttcttatcttgtgaaggttctttaagatatcagcaactttctaatgtgttagatggatggactattaattgacagtgcgtgtcaaagatgtaaagtgaactgatcctaaaatttagctaccctgctacttatttaatgacgacaaacagtttccactattcgaaccgctaatcgaacgcgacaattcattagggcttgtggtaaacttggcccatcgacctgacaagtcatccgatactcgtacttcatattcaggtggagatggaggtgggtaacgggttaccaattagcgttatcagcgtcagaggcgcgattccaccacagttgtgtctgacctgaggattcgagagcttctgtccggctggaactcaccacgatccccggagccgtggaaccgattcgctatttaatggcactggcgtgcttcacaaacgctcagaaataagtggaacgtttcccggcgctatacgcaactcgatacaattccaaactgcgaattcgaatacgcaaactcaattaagaggcaaccagatacagatacgattgttatttgcccactcaagtatttgaaactcgactccacccttggaaacatagaatggctggcagtttgtgatattttgtgaaatatagattcaaaggggataaattacaaaataaaaaaaagtaaatttgtgttaaaggatctgactagttcactaataaacaggtgagaaaacgataaatacaaatataaattttcaaacacattttaatcttttatcgagaattgaaaaagagtttattagttttgaaaaatagtttagattgagatctaaaaataaatgtttttgcttacttgtccgttttttgtttttttctgtttgtgacagttttgtgtgataaaagtaaagaactcattttttaataaactttattttttatattaattattttcacctatgctaacggaaatagatttagaaaacttgaaggattttcattttcaaatttctgaaaccttatcaaatttgcatctgaacagtttgacaaattcctagtttcttgagcgttgtcttagctgaggcactgcaccttggaataactttgtgtggagatatcccctgtgagtcattggtaataatccccgatgatcacaagactccaatttagatcagcttcgactcgacttggcggctgtaaaaccgttgtctacattcgcacattaacggacgcccactaattttcttatggcccgatccataaatccaactccgcacaatttcttagcccacctaccatcacaggcactttccacaaattgcgaacgtgttaatatgtgggttctgtaaacatcgaaaatacggcgggttattattgcacggctcagcagaagccctaagccccaattgcacacttacccattataataattgtttaatgaacatattccagaatgcccagctggagcgtgacgaatgcgtttcgcgtgctcacacgcaaaaagcccctggaggactcaaatgaatccaaattggccaaggtcttatccgccttcgatcttaccgccctgggaatcggatcgacgttgggtgtaggcgtttacgtcctagctggcgaagtgtccaagcaatatgccggtccagccgtggtcgtaagcttcctcatcgctgccatcgcctcgattttcgccgggctgtgctatgcggaattcggagctcgggttccaaaggcgggatcggcgtacatctacagctatgtgaccattggcgagtttatcgccttcctcatcggctggaatctcattctcgaatacgcaattggtaagttttcaattggagacgacgacgtctgattgatttgatttaattgcccaatattcgctctccctaggctctgccagtgtcgtcaagggtttaagcacctatctcgatcagctttgcggcaatccgatgagcagtttcctgggcacccacatgcccctcaacatcgagggaatgggtgcctatccggatctgtttgccttcgtggtgaccatacttttttccctggccattgcagttggagccaaggagtccaccagggtgaacaatgttttcactatgcttaatcttggagtcgtgttgttcgtcattatcgcgggtctttttaaaggtgggttttgaaattgttttacatatttatttacttacacaatccttttttcagtttccagcagcaactggtccattccaaaatctcaggtacccgagggctacggcgatggtggatttatgccctacggagtttcgggcataataaaaggagctgcagtttgcttttacggcttcattggcttcgactgcattgccacagctggagaggaggccaagaaccccaagaagtccattccatttgctgtgattgtctcgctggccatgatcttcctagcctactttggagtgtccacagtgctgaccatgatgctgccctattttgagcaggatgagaaggctccgctgccccatgtcttccggataaatgggtggcatgtggccgagtatgttgtcagtattggagcgatgtttggactgtgctccagcatgatgggagccatgttcccgctgccaaggatcgtgtttgccatgtccaacgatggactgctgttcaaatttctcggagacattagcgagaagtacaagacccctttcaagggaaccatgatcacaggtatgctgactggcattctggcggcagttttcaatcttagccaactggtgaacatgatgtccattggcactttgttggcctattccatggtggccagttgtgtccttatgctgcgctacgaagtggacgatcgacgggagagccgcattgtggcaaacggacgtgccacgggtctggagcaggatcgtccgtgtgctctatggaggcgtatattcaacctaaatggtcagacagtacccacaaagcagacttcaaggatcgtcacctacagtgtcacgctgttctgtgagtgcaaattttagttttaaaattagtattattaatatacccctaataacatttattttgtttcagctctttggtgcatggttttctcgcagattctaaccaagttcgaggaggatctggctaacgtgacgtccttcgatggtattaagctggtgctaggcaccataccccttgcagtactgctcctggtcatctcgcgtcagccaacatcaggggtgaaattgtcgttcaaggtgcccttggttccctggctacccggcatttccattttgatcaacatttacctgatgatcaagttggacattctcacatggattcgcttcagtatatggatcgccataggcctggcaatcttcctggcctatggcatccgtcacagccggctgaggcagcgggaacagcgcaacaattccattgccatgatgcgggactgcagcaattcggcgttgttgggcggccaggagaactcaaagtacagcaacgaggtgcccctgatattgatgcacagtacatcctaaatatatattgatattaaccacactatacatttactttttttgcctgcgaaatgcgcgattagacacgcttctcatcatccacatactcacctatgtaatttacacatgcacttatcctcataccgtaagataggataccaaaaacaaacgagagtacaataagttagctgaaagcaataaacacgaatattcctatgctaaatcagtataaatttatttgggtgcgagatttgcttataatttagcgatgaaatccagccggtcaatgcaatcacatgggattaaacatacaagttcaaaatgtaatcttactgcactctcagtacataacagtaaatataacaataattgtagtgtcagtatccacatatgccatttgattttgatacgtctatattatcttgacttcgtcttctgctgcaaaagctgttcgcgattttcaaaaaaacgacagatttaacagtaatgttacctaagtatacttgtactacacttataacaattgcaatgtttccgagagttaaatctcgactttggtagcttcagtggcgttgcgctcgcctttctccctttcacgttccccggactcctcctcttcagcttcttcgcgttgctcctcagaggaagcagcctgctcttcctcctcgctcgcgacaattatgaactcactgtctcctgccgtagagttagtcttttcgctcgagcgacttgaattggaaagcgattctaaggcagagccgtacaaagcggggttgcaggtaaactcctgcttcttagcagcgtttacttcacgtgcaatggtggataccgcactaggattcacgttctggctgtgcttgtaagagccaccctgcgattgctggccgaagcccaggttgccagtaacgggtttaactgtagcgcgcttgttcttggctagagcaccggtgaccatgctggccgaaaatcctggcggcggtttgaaccctatatgcggagcattgcaggtgtccatctggaatacgtgccgagttcgagtgctacc

SEQ ID NO: 11624 - DNA, 2147 bp, DROSOPHILA
tttcccggcgctatacgcaactcgatacaattccaaactgcgaattcgaatacgcaaactcaattaagaggcaaccagatacagatacgattgttatttgcccactcaagtatttgaaactcgactccacccttggaaacatagaatggctggcagtttgtgatattttgtgaaatatagattcaaaggggataaattacaaaataaaaaaaagtaaatttgtgttaaaggatctgactagttcactaataaacagaatgcccagctggagcgtgacgaatgcgtttcgcgtgctcacacgcaaaaagcccctggaggactcaaatgaatccaaattggccaaggtcttatccgccttcgatcttaccgccctgggaatcggatcgacgttgggtgtaggcgtttacgtcctagctggcgaagtgtccaagcaatatgccggtccagccgtggtcgtaagcttcctcatcgctgccatcgcctcgattttcgccgggctgtgctatgcggaattcggagctcgggttccaaaggcgggatcggcgtacatctacagctatgtgaccattggcgagtttatcgccttcctcatcggctggaatctcattctcgaatacgcaattggctctgccagtgtcgtcaagggtttaagcacctatctcgatcagctttgcggcaatccgatgagcagtttcctgggcacccacatgcccctcaacatcgagggaatgggtgcctatccggatctgtttgccttcgtggtgaccatacttttttccctggccattgcagttggagccaaggagtccaccagggtgaacaatgttttcactatgcttaatcttggagtcgtgttgttcgtcattatcgcgggtctttttaaagtttccagcagcaactggtccattccaaaatctcaggtacccgagggctacggcgatggtggatttatgccctacggagtttcgggcataataaaaggagctgcagtttgcttttacggcttcattggcttcgactgcattgccacagctggagaggaggccaagaaccccaagaagtccattccatttgctgtgattgtctcgctggccatgatcttcctagcctactttggagtgtccacagtgctgaccatgatgctgccctattttgagcaggatgagaaggctccgctgccccatgtcttccggataaatgggtggcatgtggccgagtatgttgtcagtattggagcgatgtttggactgtgctccagcatgatgggagccatgttcccgctgccaaggatcgtgtttgccatgtccaacgatggactgctgttcaaatttctcggagacattagcgagaagtacaagacccctttcaagggaaccatgatcacaggtatgctgactggcattctggcggcagttttcaatcttagccaactggtgaacatgatgtccattggcactttgttggcctattccatggtggccagttgtgtccttatgctgcgctacgaagtggacgatcgacgggagagccgcattgtggcaaacggacgtgccacgggtctggagcaggatcgtccgtgtgctctatggaggcgtatattcaacctaaatggtcagacagtacccacaaagcagacttcaaggatcgtcacctacagtgtcacgctgttctctctttggtgcatggttttctcgcagattctaaccaagttcgaggaggatctggctaacgtgacgtccttcgatggtattaagctggtgctaggcaccataccccttgcagtactgctcctggtcatctcgcgtcagccaacatcaggggtgaaattgtcgttcaaggtgcccttggttccctggctacccggcatttccattttgatcaacatttacctgatgatcaagttggacattctcacatggattcgcttcagtatatggatcgccataggcctggcaatcttcctggcctatggcatccgtcacagccggctgaggcagcgggaacagcgcaacaattccattgccatgatgcgggactgcagcaattcggcgttgttgggcggccaggagaactcaaagtacagcaacgaggtgcccctgatattgatgcacagtacatcctaaatatatattgatattaaccacact

SEQ ID NO: 11625 - protein, 621 aa, DROSOPHILA
MPSWSVTNAFRVLTRKKPLEDSNESKLAKVLSAFDLTALGIGSTLGVGVYVLAGEVSKQYAGPAVVVSFLIAAIASIFAGLCYAEFGARVPKAGSAYIYSYVTIGEFIAFLIGWNLILEYAIGSASVVKGLSTYLDQLCGNPMSSFLGTHMPLNIEGMGAYPDLFAFVVTILFSLAIAVGAKESTRVNNVFTMLNLGVVLFVIIAGLFKVSSSNWSIPKSQVPEGYGDGGFMPYGVSGIIKGAAVCFYGFIGFDCIATAGEEAKNPKKSIPFAVIVSLAMIFLAYFGVSTVLTMMLPYFEQDEKAPLPHVFRINGWHVAEYVVSIGAMFGLCSSMMGAMFPLPRIVFAMSNDGLLFKFLGDISEKYKTPFKGTMITGMLTGILAAVFNLSQLVNMMSIGTLLAYSMVASCVLMLRYEVDDRRESRIVANGRATGLEQDRPCALWRRIFNLNGQTVPTKQTSRIVTYSVTLFSLWCMVFSQILTKFEEDLANVTSFDGIKLVLGTIPLAVLLLVISRQPTSGVKLSFKVPLVPWLPGISILINIYLMIKLDILTWIRFSIWIAIGLAIFLAYGIRHSRLRQREQRNNSIAMMRDCSNSALLGGQENSKYSNEVPLILMHSTS

SEQ ID NO: 11626 - DNA, 3250 bp, DROSOPHILA
ggttccaccatccctggtcgcatagccaatacacacaccaaatatagaaatatactgaatttagcgagtacattcaccgatatttatcgatatattgcagacaaacgtatcgaatgtatatcgagcttctgtcatctctgctagtcaacacctttcaaaaatagcggcaatttagcaaattgttaatttctctcccacttaaatcgacttaaatcaacatgtcaactgcccaggcgaccaaaaactgcatcacactcaagggctccgctcagattattgtggaatacctgagtgagtagcaagctacgtcacgaaagcgtctgtaagttcgcctgcaatggcgtctctggttctttttttttcctaaatagagtacggcatcaattcgatcctcttccaacgcggaatttacccagccgaagactttaacaacacgcagcagtatgggctaaccattctaatgtccaaggatcccaagatcaagacctttctgcagaacgtgctcagccaaactgaaggttagtggtcttttggaaaaaattcaagtttatggtgaccattatttgtattcacctatagaatggctctcgaagaacatgatcaacaagatctcgatggtcattacgaacgcccacaccaaggaggtgctcgagtgctgggactttaatatgcaggccgagttgggcgatggcgatatcagtgatcccaccaaggcaacaaccaccaaggagctgagtcgcatacagaacgagattcgcgacgttatgcggcagatctcggccaccgtgagctatttgccactgctcgattgcatctgcaccttcgacataatgattcacacgctgcagaacaccgaattaccggccaaatgggacgaaacgggtgccattgtcatacagaatccgcaggccgtccagctgcgctccttttctacaggactgcacaaggtggacaccgtggtcaactacaagatgagcacttaaaaggcagtaccgcctcatcctaatgtttaaatatttatttcgtttctatatttacaatagtgcgtaacgaacgtaacgtatttgagagttgcattaaaagccagttgtgaaaagctaacagttgctaagtagtagtttggttggccgcaggggtcgtctatttgtctgtgtgtctcaaatgcaatctggaggacgaaacagagtgagagagggtagcatttgttagtggagcgcaacgcaggaaagggcgtttgtctgggcgacagctacctatcctaagcagcgcttagtcgtcaagtctgcgagatagacccaagtatctagtctgtaccgaagtatttctggccaaagtgattaggtgccacgggatgcagctcggaggtgaggatcttcagcttggggaaggcattcactacggtccgagcggcaatgggtgtgcagaagagattggacaggatgatgcagctctcgggtacgccgtgttcccgcagcacattcaccgcctgcagcacagtgttgcccgtggacatgatggggtacatgagtagcacctgcctgctgccgatgtcatcgggaaagcgggcataaaccacgcgggcctcatgcgtattggcatcggactcgaccaggatctttccaatgcgaatggagcgacagcagtcacgcagtccctgctccatggcctctcccgatcggatgatggacacgccgcagttgccggagcgatacttcagtccctcgtaaatcgcaccggtgggcgtctccacatcgcaatgggtgtagggcagttggttgagcgactcctcgatgaccagccggatgagacggtcggcatagaacttgaagtcactgcgcgtggtgttcctggggggtagaattttgttgtactgctactacgctgctgactcctcctccccaacgtcacctacttgtcgcgcaatatggtcagcagttcggccacctgggaattgcactcgagtagcttcaggttgctgccgtactccgccaggatctcctccgatgtggcagctggcaccgcggcatgtgcatgcgtgggagtgtgcagctgttgctcctgctcctgggcttcctgctgcggctgctggtgatctgaggaactgctgccctcctccgactgggagccgctgctgctgggcgagccggtgcgcatgactcggctatttggttgctatcactggctacataaaataaataaattaaaagaattgtacgtagcactttgtcctcctagcgcgtgcttggcttgctacggccacactttgtcgcggcattgccgttcgttgcgcctcggtaatttctagcaattggcagttagcgcacgactggccacactcagcaaatcacctcgtgtttcactcgcaaacaaagaaaaaagtgcattttaattactgattactgcattgcgattaggcgttcgcgaacaacaacgttttcttgcacatcagcggactcaaagggcgcgcgtgggcaaggcattgagcacagtgtctgtgtgcgtgagtgtgggtgcgttgtgcgtgcgtcgcagtgttggtgcgtgtgcccccatgtgtgtgtgtatttgtattgccattaactaataaacaataaccttcgggccacgacgaaagccacgaaatcggcaccgctgctgttctgttctgtactgttccatctgaaccaaccagctgaacaaggagactcatagccagagactaaaataaatcgccaacgcgcttccgcccccccgcgagaggagcgcccagttcaggagcggaccagcggcgatccacttcccatatccatatccaaacagaatcgcactcgcccaaacacacacacgcacgcaatggcggacgtgagcgatcccagcgaactgttcgacctggagctgcacgacctggaactgcaggacgacaaggccagggactccgacgacgacaggatcgagctggacgatgtaagatatagcccccattccatgccatcccgtgccaatgcgtgccgcaccatcccccgatgcaaactgcgcagcaacaatttccctctttgtttaccttttctgcgctttgtctgccagttttcctttcgctcgtctgggcatcccgattccacacccccgaaccagcatatccaccagccgcacaccctgcaaactgggcttatctgctgcgcaaatgtctggcgtcattcggtttcagtccagtcgccgattattcagcgcatgtacatgcgctcactcattgtaccataagttcgactcgatc

SEQ ID NO: 11627 - DNA, 1100 bp, DROSOPHILA
caagccaagcacgcgctaggaggacaaagtgctacgtacaattcttttaatttatttattttatgtagccagtgatagcaaccaaatagccgagtcatgcgcaccggctcgcccagcagcagcggctcccagtcggaggagggcagcagttcctcagatcaccagcagccgcagcaggaagcccaggagcaggagcaacagctgcacactcccacgcatgcacatgccgcggtgccagctgccacatcggaggagatcctggcggagtacggcagcaacctgaagctactcgagtgcaattcccaggtggccgaactgctgaccatattgcgcgacaagaacaccacgcgcagtgacttcaagttctatgccgaccgtctcatccggctggtcatcgaggagtcgctcaaccaactgccctacacccattgcgatgtggagacgcccaccggtgcgatttacgagggactgaagtatcgctccggcaactgcggcgtgtccatcatccgatcgggagaggccatggagcagggactgcgtgactgctgtcgctccattcgcattggaaagatcctggtcgagtccgatgccaatacgcatgaggcccgcgtggtttatgcccgctttcccgatgacatcggcagcaggcaggtgctactcatgtaccccatcatgtccacgggcaacactgtgctgcaggcggtgaatgtgctgcgggaacacggcgtacccgagagctgcatcatcctgtccaatctcttctgcacacccattgccgctcggaccgtagtgaatgccttccccaagctgaagatcctcacctccgagctgcatcccgtggcacctaatcactttggccagaaatacttcggtacagactagatacttgggtctatctcgcagacttgacgactaagcgctgcttaggatagattgcatttgagacacacagacaaatagacgacccctgcggccaaccaaactactacttagcaactgttagcttttcacaactggcttttaatgcaactctcaaatacgttacgttcgttacgcactattgtaaatatagaaacgaaataaatatttaaacattagga

SEQ ID NO: 11628 - protein, 261 aa, DROSOPHILA
MRTGSPSSSGSQSEEGSSSSDHQQPQQEAQEQEQQLHTPTHAHAAVPAATSEEILAEYGSNLKLLECNSQVAELLTILRDKNTTRSDFKFYADRLIRLVIEESLNQLPYTHCDVETPTGAIYEGLKYRSGNCGVSIIRSGEAMEQGLRDCCRSIRIGKILVESDANTHEARVVYARFPDDIGSRQVLLMYPIMSTGNTVLQAVNVLREHGVPESCIILSNLFCTPIAARTVVNAFPKLKILTSELHPVAPNHFGQKYFGTD

SEQ ID NO: 11629 - DNA, 2617 bp, DROSOPHILA
ttttattgagtttaatctatttgtcttgacgagaacgtaaaatgtactctaaaacattcaaagcaaacacagattcgacaattaaagcgaatcaagtggatcatccctataaatactcggatttaaaccactatccacacagtactccatttagtgacaaactgagctgaagatgcgttgccaattcgttatcgcctttgggcttttggccctaatagcaactgcctacgccgattctccacctgcggcaggatccccacccgcgtcatctccaccggctggaaccccaacctcgccacctccagcgactggaacaccgccctcaccatccccagcgactggaacaccaccttcagcatccccagctgctggtacaccgacctcgccaactccagcgactggaacaccgtcctcgccagctactcctgatgcgcccgcttcctcgacatcaccagctacgcccacatcgcccagtgacagtggatccagcagcagccaggaagtgattaggctcaggcgtcggctgcgccggctgaggcgtcagctccgccgcgagaggcgtcaggccaaccagagtaatcagaatggaggtggtggtcaggggcgagtggttcgccgtgtacaccgtcaccgtcgtctattgtaaaattcacgaacatgttggctacgaatttgaaataaaattccagacagaaatgcaataaatctaaaaaaaacataaatgtattgaatggctttttaaattagaggaaccatcgctctttttgtaatgcatacattagtaaactaacttatatttgcccaacaaactttctaaacattgcaatgaatatttcgaatagaagcgttctaaacattgaaataaatattctgattaggaagttcgttgcacatatttaattcaaaatgaccgcgaaacggtgctgccagatgtctgaatttcgtgcactgcggagcggatcttctttctactaaggcaggaagggtcatactaacacctccacttctcaccaaaacaaaggttaccccgaaatttaatcaaaataaatcgaaatgccggtggattggttcggatatgtgtacgcagccacggtcgccgccggaggaatcatgggatacgccaaggcgggtaagtgaccagccccctgaccgtggtcatgtccgattgtgcaacgccctgcattccaggttccattccctcgctgggtgctggtctggccttcggagccctgctcggctatggcgcccacctcaactcccaggacacgcctcgtcccctgctccagttgggcacctccctgttcctggccgggctgatgggcgcccgctggaaccgatccggaaaactgatgcccgccggaatggtgtgcatgctatccgtggccgccttggtcaagaacctggccacctataatcgctacctaatgcccgccggcacaaaggccccttaggctaatttccggccacatgctggacttgccaggagattgccctaccttcattcttcattcgtattgaataggttttctacttttcggtgattggaactttggtaatgcgctgtgtcactttctaagatagtgattaggaactgtacttgctgcaaatatattttatcacctatgcttttaacttgtggacttctttgtactcaattgtaatacttggtcacatttaatagcatactttcaggcactttggtatgacagttcgcatagaagcacagaaatacaccatttcgtacattcaaatctttttttgtatatttattgtttaacttagcttttgtttcttttgtgtgtgtgataaatttacagtttcatctattatacgatgttcagttaactacaactaaaacttagctattacattttgttgctgcatgaaaagagcattaggctaggtaaacgtagagtgatggatttttttttttttttagaatttaggcttctaacaagtttattacaataatgaagtgaataatttgagttttctgcaggcaaagtgcggcaaggtaagtatattatcgattctccacctttctagcattttcccaacaggaaacgataaatatttgttaagtagagtgtacaaattatatatgtttatcacattggaaagtgggattattattaaatttcctttcgattgatttgtggctcaagaaataatttaggttgtctgccgaaagtgcgtgcatgtgtagatgaagtttttacagaattatatgtactattttacaaaattgtttgcattttgcattaaattagattacataatatatgcgtgtactgaacataacaacattgctggctgctgcgttgccctcagcaaacaggcaatcatttaaattagaattagctgcggctagaactaacaacaaatcaatagggtttcgtacagagtataatagtaataaattctagctaaaaacactttaagctgcaaacacttcttccaatttcgatggcagtgacgtctgcgtgccagttccaaacgttcccccaatgcggctgcattttcacactttcactagaacggaaacagcttccagttaaccactgcggatgccggatgcggaatgcggtaacgaaacggaagcgaggaagaaagagag

SEQ ID NO: 11630 - DNA, 558 bp, DROSOPHILA
ccacttctcaccaaaacaaaggttaccccgaaatttaatcaaaataaatcgaaatgccggtggattggttcggatatgtgtacgcagccacggtcgccgccggaggaatcatgggatacgccaaggcgggttccattccctcgctgggtgctggtctggccttcggagccctgctcggctatggcgcccacctcaactcccaggacacgcctcgtcccctgctccagttgggcacctccctgttcctggccgggctgatgggcgcccgctggaaccgatccggaaaactgatgcccgccggaatggtgtgcatgctatccgtggccgccttggtcaagaacctggccacctataatcgctacctaatgcccgccggcacaaaggccccttaggctaatttccggccacatgctggacttgccaggagattgccctaccttcattcttcattcgtattgaataggttttctacttttcggtgattggaactttggtaatgcgctgtgtcactttctaagatagtgattaggaactgtacttgctgcaaatatattttat

SEQ ID NO: 11631 - protein, 112 aa, DROSOPHILA
MPVDWFGYVYAATVAAGGIMGYAKAGSIPSLGAGLAFGALLGYGAHLNSQDTPRPLLQLGTSLFLAGLMGARWNRSGKLMPAGMVCMLSVAALVKNLATYNRYLMPAGTKAP

SEQ ID NO: 11632 - DNA, 6141 bp, DROSOPHILA
tttttcaaaatgtcttctttctattgcatgtggtgcatacatatgtatgtaagtcgaaacagcccggatcagattactttattataagtacattagaaataatgaaaaaataaatgtataacaacattaacttctgttgtttttgatcatatagtgtttttatttaaaaattaaaatatacgtgtaaatatttttcagccctaaattatgtgaacaagataacaataggcggtgtttcttgaaacgttctaagaaactctgttaggggtggacaaggggctgatgaaatagaagtggctatgtagtaagcacattagaaaggccaaaaagagagccaacaagacagagagcggttatagtgctttttaccggctaaattagggctgccattctactgcgttgaatgtattaatatcgcttgcatatctagctcatggagattcgaagaagtcgactacccggattctctcccgaccatcaaacgcaaatagtaaatgatcatggacgtagcgcgaaggatgtaaaataatgcaatattattacttaatataatttatagcttcttattgtgaaggtcaaaaaatattaaatatcaaaattttaacccacaacaaattcttacaacaatacgatatgaatagagtgaatagagagatataaatgactacttaataaacaagagctaaataattcaattatattatacaaattatatttgaactacttaaaagttatccgaaaaacttgttcgtttaataaaaatcaaggaaatgcatggaaagtttttcaaagttttaaaatccaatatatttttaggtgtctaaaatagaggtttcaagttgggcttgcagcaacacttatttaaaatggttcaacgaggtgcaaaccccttttgactgcggccatggcaaatgagagaatggagagagcggcagctgcactggcaatgtgcctgtgttgcgtggaaaagtgattttatgaccaaaacacatggtttgcggcagaatggttatgtgaagaacggaaagcggccgcaaattgatgagcggtacattattaattgaatttaatcaaatcgattcgcatgacagcaatggaggagttcgccgagtactatgggtgagttctttgagatgtgaagtgtgtgtgtgtggggcttcaagaacacgcatgcaacaagtgtctaaaattagcgttaaatgcaatcaaacacggtggctaattttagccacgatttagcacccacttctcggccacacgacgtgaatcggctattccctatcagctgagttgcgtataaacaatggccaaatctccatctccacgcggccatgtgaatgaaaagctcaaacaaagcgaaattagtagtgccgtacgaaagcaaaaccatccaggaggtatcaacaccccaactaaaaaatgccctgtggagcgtgtttatccttttcacaaagggacgaaaagttcagctgctggttttggcgcgtaaaaattccatttaaactggacgcaattgagtatttctattactttgtactgggaaataatacttcatttaaaaaataagtcatactaagaatatatagaaaatttaaaaaaaaaacctttgttctcaagtcgcgtttcttatcttgtgaaggttctttaagatatcagcaactttctaatgtgttagatggatggactattaattgacagtgcgtgtcaaagatgtaaagtgaactgatcctaaaatttagctaccctgctacttatttaatgacgacaaacagtttccactattcgaaccgctaatcgaacgcgacaattcattagggcttgtggtaaacttggcccatcgacctgacaagtcatccgatactcgtacttcatattcaggtggagatggaggtgggtaacgggttaccaattagcgttatcagcgtcagaggcgcgattccaccacagttgtgtctgacctgaggattcgagagcttctgtccggctggaactcaccacgatccccggagccgtggaaccgattcgctatttaatggcactggcgtgcttcacaaacgctcagaaataagtggaacgtttcccggcgctatacgcaactcgatacaattccaaactgcgaattcgaatacgcaaactcaattaagaggcaaccagatacagatacgattgttatttgcccactcaagtatttgaaactcgactccacccttggaaacatagaatggctggcagtttgtgatattttgtgaaatatagattcaaaggggataaattacaaaataaaaaaaagtaaatttgtgttaaaggatctgactagttcactaataaacaggtgagaaaacgataaatacaaatataaattttcaaacacattttaatcttttatcgagaattgaaaaagagtttattagttttgaaaaatagtttagattgagatctaaaaataaatgtttttgcttacttgtccgttttttgtttttttctgtttgtgacagttttgtgtgataaaagtaaagaactcattttttaataaactttattttttatattaattattttcacctatgctaacggaaatagatttagaaaacttgaaggattttcattttcaaatttctgaaaccttatcaaatttgcatctgaacagtttgacaaattcctagtttcttgagcgttgtcttagctgaggcactgcaccttggaataactttgtgtggagatatcccctgtgagtcattggtaataatccccgatgatcacaagactccaatttagatcagcttcgactcgacttggcggctgtaaaaccgttgtctacattcgcacattaacggacgcccactaattttcttatggcccgatccataaatccaactccgcacaatttcttagcccacctaccatcacaggcactttccacaaattgcgaacgtgttaatatgtgggttctgtaaacatcgaaaatacggcgggttattattgcacggctcagcagaagccctaagccccaattgcacacttacccattataataattgtttaatgaacatattccagaatgcccagctggagcgtgacgaatgcgtttcgcgtgctcacacgcaaaaagcccctggaggactcaaatgaatccaaattggccaaggtcttatccgccttcgatcttaccgccctgggaatcggatcgacgttgggtgtaggcgtttacgtcctagctggcgaagtgtccaagcaatatgccggtccagccgtggtcgtaagcttcctcatcgctgccatcgcctcgattttcgccgggctgtgctatgcggaattcggagctcgggttccaaaggcgggatcggcgtacatctacagctatgtgaccattggcgagtttatcgccttcctcatcggctggaatctcattctcgaatacgcaattggtaagttttcaattggagacgacgacgtctgattgatttgatttaattgcccaatattcgctctccctaggctctgccagtgtcgtcaagggtttaagcacctatctcgatcagctttgcggcaatccgatgagcagtttcctgggcacccacatgcccctcaacatcgagggaatgggtgcctatccggatctgtttgccttcgtggtgaccatacttttttccctggccattgcagttggagccaaggagtccaccagggtgaacaatgttttcactatgcttaatcttggagtcgtgttgttcgtcattatcgcgggtctttttaaaggtgggttttgaaattgttttacatatttatttacttacacaatccttttttcagtttccagcagcaactggtccattccaaaatctcaggtacccgagggctacggcgatggtggatttatgccctacggagtttcgggcataataaaaggagctgcagtttgcttttacggcttcattggcttcgactgcattgccacagctggagaggaggccaagaaccccaagaagtccattccatttgctgtgattgtctcgctggccatgatcttcctagcctactttggagtgtccacagtgctgaccatgatgctgccctattttgagcaggatgagaaggctccgctgccccatgtcttccggataaatgggtggcatgtggccgagtatgttgtcagtattggagcgatgtttggactgtgctccagcatgatgggagccatgttcccgctgccaaggatcgtgtttgccatgtccaacgatggactgctgttcaaatttctcggagacattagcgagaagtacaagacccctttcaagggaaccatgatcacaggtatgctgactggcattctggcggcagttttcaatcttagccaactggtgaacatgatgtccattggcactttgttggcctattccatggtggccagttgtgtccttatgctgcgctacgaagtggacgatcgacgggagagccgcattgtggcaaacggacgtgccacgggtctggagcaggatcgtccgtgtgctctatggaggcgtatattcaacctaaatggtcagacagtacccacaaagcagacttcaaggatcgtcacctacagtgtcacgctgttctgtgagtgcaaattttagttttaaaattagtattattaatatacccctaataacatttattttgtttcagctctttggtgcatggttttctcgcagattctaaccaagttcgaggaggatctggctaacgtgacgtccttcgatggtattaagctggtgctaggcaccataccccttgcagtactgctcctggtcatctcgcgtcagccaacatcaggggtgaaattgtcgttcaaggtgcccttggttccctggctacccggcatttccattttgatcaacatttacctgatgatcaagttggacattctcacatggattcgcttcagtatatggatcgccataggcctggcaatcttcctggcctatggcatccgtcacagccggctgaggcagcgggaacagcgcaacaattccattgccatgatgcgggactgcagcaattcggcgttgttgggcggccaggagaactcaaagtacagcaacgaggtgcccctgatattgatgcacagtacatcctaaatatatattgatattaaccacactatacatttactttttttgcctgcgaaatgcgcgattagacacgcttctcatcatccacatactcacctatgtaatttacacatgcacttatcctcataccgtaagataggataccaaaaacaaacgagagtacaataagttagctgaaagcaataaacacgaatattcctatgctaaatcagtataaatttatttgggtgcgagatttgcttataatttagcgatgaaatccagccggtcaatgcaatcacatgggattaaacatacaagttcaaaatgtaatcttactgcactctcagtacataacagtaaatataacaataattgtagtgtcagtatccacatatgccatttgattttgatacgtctatattatcttgacttcgtcttctgctgcaaaagctgttcgcgattttcaaaaaaacgacagatttaacagtaatgttacctaagtatacttgtactacacttataacaattgcaatgtttccgagagttaaatctcgactttggtagcttcagtggcgttgcgctcgcctttctccctttcacgttccccggactcctcctcttcagcttcttcgcgttgctcctcagaggaagcagcctgctcttcctcctcgctcgcgacaattatgaactcactgtctcctgccgtagagttagtcttttcgctcgagcgacttgaattggaaagcgattctaaggcagagccgtacaaagcggggttgcaggtaaactcctgcttcttagcagcgtttacttcacgtgcaatggtggataccgcactaggattcacgttctggctgtgcttgtaagagccaccctgcgattgctggccgaagcccaggttgccagtaacgggtttaactgtagcgcgcttgttcttggctagagcaccggtgaccatgctggccgaaaatcctggcggcggtttgaaccctatatgcggagcattgcaggtgtccatctggaatacgtgccgagttcgagtgctacc

SEQ ID NO: 11633 - DNA, 2010 bp, DROSOPHILA
gcagaatggttatgtgaagaacggaaagcggccgcaaattgatgagcggtacattattaattgaatttaatcaaatcgattcgcatgacagcaatggaggagttcgccgagtactatggaatgcccagctggagcgtgacgaatgcgtttcgcgtgctcacacgcaaaaagcccctggaggactcaaatgaatccaaattggccaaggtcttatccgccttcgatcttaccgccctgggaatcggatcgacgttgggtgtaggcgtttacgtcctagctggcgaagtgtccaagcaatatgccggtccagccgtggtcgtaagcttcctcatcgctgccatcgcctcgattttcgccgggctgtgctatgcggaattcggagctcgggttccaaaggcgggatcggcgtacatctacagctatgtgaccattggcgagtttatcgccttcctcatcggctggaatctcattctcgaatacgcaattggctctgccagtgtcgtcaagggtttaagcacctatctcgatcagctttgcggcaatccgatgagcagtttcctgggcacccacatgcccctcaacatcgagggaatgggtgcctatccggatctgtttgccttcgtggtgaccatacttttttccctggccattgcagttggagccaaggagtccaccagggtgaacaatgttttcactatgcttaatcttggagtcgtgttgttcgtcattatcgcgggtctttttaaagtttccagcagcaactggtccattccaaaatctcaggtacccgagggctacggcgatggtggatttatgccctacggagtttcgggcataataaaaggagctgcagtttgcttttacggcttcattggcttcgactgcattgccacagctggagaggaggccaagaaccccaagaagtccattccatttgctgtgattgtctcgctggccatgatcttcctagcctactttggagtgtccacagtgctgaccatgatgctgccctattttgagcaggatgagaaggctccgctgccccatgtcttccggataaatgggtggcatgtggccgagtatgttgtcagtattggagcgatgtttggactgtgctccagcatgatgggagccatgttcccgctgccaaggatcgtgtttgccatgtccaacgatggactgctgttcaaatttctcggagacattagcgagaagtacaagacccctttcaagggaaccatgatcacaggtatgctgactggcattctggcggcagttttcaatcttagccaactggtgaacatgatgtccattggcactttgttggcctattccatggtggccagttgtgtccttatgctgcgctacgaagtggacgatcgacgggagagccgcattgtggcaaacggacgtgccacgggtctggagcaggatcgtccgtgtgctctatggaggcgtatattcaacctaaatggtcagacagtacccacaaagcagacttcaaggatcgtcacctacagtgtcacgctgttctctctttggtgcatggttttctcgcagattctaaccaagttcgaggaggatctggctaacgtgacgtccttcgatggtattaagctggtgctaggcaccataccccttgcagtactgctcctggtcatctcgcgtcagccaacatcaggggtgaaattgtcgttcaaggtgcccttggttccctggctacccggcatttccattttgatcaacatttacctgatgatcaagttggacattctcacatggattcgcttcagtatatggatcgccataggcctggcaatcttcctggcctatggcatccgtcacagccggctgaggcagcgggaacagcgcaacaattccattgccatgatgcgggactgcagcaattcggcgttgttgggcggccaggagaactcaaagtacagcaacgaggtgcccctgatattgatgcacagtacatcctaaatatatattgatattaaccacact

SEQ ID NO: 11634 - protein, 633 aa, DROSOPHILA
MTAMEEFAEYYGMPSWSVTNAFRVLTRKKPLEDSNESKLAKVLSAFDLTALGIGSTLGVGVYVLAGEVSKQYAGPAVVVSFLIAAIASIFAGLCYAEFGARVPKAGSAYIYSYVTIGEFIAFLIGWNLILEYAIGSASVVKGLSTYLDQLCGNPMSSFLGTHMPLNIEGMGAYPDLFAFVVTILFSLAIAVGAKESTRVNNVFTMLNLGVVLFVIIAGLFKVSSSNWSIPKSQVPEGYGDGGFMPYGVSGIIKGAAVCFYGFIGFDCIATAGEEAKNPKKSIPFAVIVSLAMIFLAYFGVSTVLTMMLPYFEQDEKAPLPHVFRINGWHVAEYVVSIGAMFGLCSSMMGAMFPLPRIVFAMSNDGLLFKFLGDISEKYKTPFKGTMITGMLTGILAAVFNLSQLVNMMSIGTLLAYSMVASCVLMLRYEVDDRRESRIVANGRATGLEQDRPCALWRRIFNLNGQTVPTKQTSRIVTYSVTLFSLWCMVFSQILTKFEEDLANVTSFDGIKLVLGTIPLAVLLLVISRQPTSGVKLSFKVPLVPWLPGISILINIYLMIKLDILTWIRFSIWIAIGLAIFLAYGIRHSRLRQREQRNNSIAMMRDCSNSALLGGQENSKYSNEVPLILMHSTS

SEQ ID NO: 11635 - DNA, 3133 bp, DROSOPHILA
cttgggacgcataaacagctcggactgcacgttctgggcctcgtcgatggtcagcagtagcacggcgtccggctctaggcagccagttaggtagtagaagtccgagttctggcggaacacgtacgggatcttgccgctcatatacttcttggaggcggcgcccagaacgagctgtcagagattcaagtttatatattttgcttctctttgtagcctgcaggtcctcaccatgtgacaagaactcgagtgcccattgaactcgccgccgaaactgcgtgcataggcgcggatgttttgcatcagctgcgaacggcgttccttgatctcggtcagctccacgcccggaaccagctcgtccggctggataagatgtggatgcgagacgctggtgggctgtcccaggtttcccttttgctggcgcagaatctgagccacgccacgcacctcggccgcgtttactgtcgatttgctgctgggacttcctggggagatcgtggtggactggctcatccagcggtgtggccacaggctggtggaaatggcggcgctgcggcggacggtgggagcgatcaggcggtccaggcgccttaggatattcatcgtgctgccggttccggttcttgggttgccaactaaaatcttcacaatattatacacatcagaaaacggaactgttaaaaacactaacgatcctggataaaaacaaaacacatgggttgccagacgattgcttaacaagagtcccgccgattgacagatgtcgataactatcgttgtaaaattatacaactatgtgaatgtagtttcgccttacctatagcagctttcaaaaaacgcgattcatttcgaattgtgtacaaccacggcttatataagcttatgaatccactcaagtacgccaacttgattgctttcgccccatagcatttaaatattgcgctgcaatcgaaaaacctcgatagtaccgccgctaagctttagaagtaatcgacattggcatccctaacataataacaaaaatttttaacaggatcaatagggggctttggaacagtattttcgacttagacagacactttgaaatcatttgacatatctttagaatgtccatggaggaggtatgtgttggtatagcccagttccaatggccaaacactcaatgtaatcccgtcctgcagtgctttgtgccccggctgccggtggacagcgagttcatccagttccacgactgggccatcaagtatgagaagtcgcacatcctgaagagcagctgccaactgggcaccgccaagtgctgtcccaaggactcggccgaccgctgcgacctctgccactaccagcactccctgcagctgccccacctgcccgacatggtgttccacaagaatcggctggtgttacagcacaaggacggcgccactctcgagttctgccccatggacgcgctggcgctggtggacaatgggaagcagccgctggaggtcgcttgtgctcaggagtggcgggaaacgcggtgggtactcccattgagattgggatatggatcgttctactgttgttcctctataaatcgcccaaatgattgaattctatactccagtaacgagcagacaatggaggagaagttcaagcctttcgactggacattcacctccacctaccagggcaccatgaacgaaaaagtgcgatcggagaccacgaatcagacgctgaacaagttcaagctgatgcagcgcgagaacatcatcttctaccacgatttaactctgttcgaggatgagctgcacgaccacggaatatcggtgatgagcgtgcgaatcgtaagtgctgataaatacaaattatagagcccttatcgaagaagcccaactctttctggcacagcgcgtgatgccctctggcttcttcatccttttgcgccactttctgcgcgtggaccacgtgctaatccggatgcacgacacccgcttccaccacgagatcgagaacgactttatcctgaaagagtacatccatcgggaggcgccttgcactgagcttcaaaactgtgtggccttctggaccaacccggatgaaatgcaagaatttgtgcccgtgaagtccaagcagttgcacaagctcttctttaagtagtcccgatgtccgatgctagatgccagatcccagatctctaggtttatgtcagtcgtcgcattggttacaactgctgctatatgcgtttatttattgccaacagtgtgcgcatgcgcagacgacattaaaagcgattttcctaaaaggcacactacgatcaaagctattaacacgaataaaatattgggcggaccagctgccacatcctcgggcctaggcggatccaagtagggctgtcagggcccgcttgtagtcaccagaggtctccgcctggaaagtaaagaaaggaacgtattgaagcgagatccaagttcttgcttttttggctatgccctctacactacaattactactttgcccgaaaatacttttttggcaagccaataatgagatatcgaaaaatgcccaagaaccagtttgcttcggcgttcttagaaataatttgatggggattttggcagcatatgtagcgtaaaaggaacacttgataacgtggagtaaccaagaccaggaatacatccgtttcaccaatggcgtggccaatacttacgtcctaggacaacacaaacaccgcaacaaatgccgacaagtacgtgaagagaaggggaaaggggtgcgttaaccatgtgcgaagcactcgcgattcttcgagatccacttaccaccacggcgctgtgcagcgtacggttgtagatccgctcgaactcctgcttaatggtctccaggtcgatctccgagcggctgacgatgatgcggatgagcgtggcgtcatcggtgccggcgccattcatggccttgtacaggcggttggcgaagaaggccgccggtgactggacgcactcaactaaaaggttaagaagtgtgtcatttaaccaagtgtctgttacaacaattacttataacggaacagttaaatatatactgacctatggccatcatggcctcgtgcagctcgtcggacatctcgtgcttgatggcctgctcgatggtctgcccggag

SEQ ID NO: 11636 - DNA, 922 bp, DROSOPHILA
ccctaacataataacaaaaatttttaacaggatcaatagggggctttggaacagtattttcgacttagacagacactttgaaatcatttgacatatctttagaatgtccatggaggagtgctttgtgccccggctgccggtggacagcgagttcatccagttccacgactgggccatcaagtatgagaagtcgcacatcctgaagagcagctgccaactgggcaccgccaagtgctgtcccaaggactcggccgaccgctgcgacctctgccactaccagcactccctgcagctgccccacctgcccgacatggtgttccacaagaatcggctggtgttacagcacaaggacggcgccactctcgagttctgccccatggacgcgctggcgctggtggacaatgggaagcagccgctggaggtcgcttgtgctcaggagtggcgggaaacgcgtaacgagcagacaatggaggagaagttcaagcctttcgactggacattcacctccacctaccagggcaccatgaacgaaaaagtgcgatcggagaccacgaatcagacgctgaacaagttcaagctgatgcagcgcgagaacatcatcttctaccacgatttaactctgttcgaggatgagctgcacgaccacggaatatcggtgatgagcgtgcgaatccgcgtgatgccctctggcttcttcatccttttgcgccactttctgcgcgtggaccacgtgctaatccggatgcacgacacccgcttccaccacgagatcgagaacgactttatcctgaaagagtacatccatcgggaggcgccttgcactgagcttcaaaactgtgtggccttctggaccaacccggatgaaatgcaagaatttgtgcccgtgaagtccaagcagttgcacaagctcttctttaagtag

SEQ ID NO: 11637 - protein, 270 aa, DROSOPHILA
MEECFVPRLPVDSEFIQFHDWAIKYEKSHILKSSCQLGTAKCCPKDSADRCDLCHYQHSLQLPHLPDMVFHKNRLVLQHKDGATLEFCPMDALALVDNGKQPLEVACAQEWRETRNEQTMEEKFKPFDWTFTSTYQGTMNEKVRSETTNQTLNKFKLMQRENIIFYHDLTLFEDELHDHGISVMSVRIRVMPSGFFILLRHFLRVDHVLIRMHDTRFHHEIENDFILKEYIHREAPCTELQNCVAFWTNPDEMQEFVPVKSKQLHKLFFK

SEQ ID NO: 11638 - DNA, 8132 bp, DROSOPHILA
ccttggtcattttgaacaccttttgtggcccgattttcttcttctgcatgtactccctgcttagtacagagactttttcgctgttcgcactgtttcccaatctcatacgaagctgccggagtggtggcaaagtggatgcgagcacttccatgtcagatttggccaacgaagctgtcggctttgatatgactcgtggcgaactgtcgctgtacgagtacgaagatgtttttctgggaactggcttcaagttggctacccagtttttcatgctacagggactcaaggtaagcgttagcagccatcaaatatcttggttgcattctgatgaagtttcgcattttagattttttgtgccatgttggcctgcaccattcactgccgtcacctgatggtgtggaaaatctttgcgccgcgattcatctacgaggcccttgctaccttcgtcagtctgcctgccctgattgtgggctatcttttggtgttacgcatccaccgtggcgtggacaccctcattaagcgcatcaacaaggccaaggtccactagtctcagccaattaattatttatttcggccttaatacacaaacacgtaataagaaaatgcaactgtttggtggtcttgtagttgtaatcttatttagttaaaatgattgggttcacaaattttccaaaagacacaaaaacgtcatatgatatcgcggatccatggatttacatagttactagtgggtatggcttacaaaattaacacgagcaaacatgacaagaaaatttaagtactggtggggctcccaacctccggttgcgattaagctacaaactatagactcgacacatacgcctctagagtttacgcttccttcatcctcctgcggttaagtacgcaaataagtaacagggtgtgtggacgttttaggggggtagttttggggggccagagcactgattgcttgttggcttggaacgacatccgttccggttttaaaattttttttgttttgtacatttcattgccaggtcattggtgttcttataatttgcttttgccgtgtaatatgcgtgtgcaaaagagattcagggacagttcggaagcctactgaccattgaggagcagcggcgtgctcgagactccattagcggcgcccttaactacaaaatcaaaagagaaacatagtcaggcgaaaatcaaatccaaaacgattacaatcaatttgaaattttgaaaagaatagaaaatgaaagtgaaatgaggtggcatgcattggagcaacgaaagatagaagcttatattatgtacagcagtgaaactataatcttttggttccattctctttggctatggattatgttgactcctggcctcatgccctaatcgctgttctcgtcatatggatgatactgctttgccggcactggcgactgctcctcctgcttaccgtgcgtcgccgatcggcaaaacttcttcgtggtgctccagtcctccttgagggatagattaaacatggagtagtccggatcgccggtcacctcctttacaatgttcaggaacttgggcatgcagttcttcagggcatcgccggtgagtgacgaatacgtctccaaaagcaccaatcccttgcagctgcagcaagaatttttttattataatgggaaatcttagcataattattttaacgcaccgtgggtggcctggctccttataaatatcaagctgaaaatattggttgttgataaggaagcagcggcgcttcttgtagatggtgaagtgagcatcgtcgcgctgggccagcaagttcatgtagtcacgatgcgtcagctgggtcttcacctcaatgcgggcctgcccgtgaacgtttggacgccgctgcgtgtggatgtagctccagtggttcttctgtccacgcttgcgaaggcgagcctgcaccttgggtccggcggactgcagataatgatgtacgacatcgaaatcctggaagggcggaaactcgctgtccggcggcaaaagggccactgtaaaaaaaatacaaagttacacggtattcagaagagtaatctctgacaattggacctacccaaatatttcagcttgcgcgacgtggcctgcaaacggtcgccaatatcaatgcccaatttctggcacaccgactcaatcatgcgattcatcttggtctcgaagttggtggagttgtcgatcacatcgaagtagggatggccaacccaggcggcggcggatttgtagtccagttcccgggccaaatcaacgccctccgagcgacaggcatggtcctgcaatgagcaaacaagaggttagttagtactattatctttttttttacagccattagccctacgcaaatgccactagcgatatttagaaaatgcagctgccactctacgcagtcgttacaactacaatgtttttacaaaagaaaaaggtcccattaaatgcatttatatactggaaaatggtgaggtgttgcgctatatttttatgttatattaacaacaataactaagacagtatgaattgaagggacttcgaatttgcaggaccaactgtggcaaccgattctaaaagtgcagccatttttggatacctgatagtggcgctttctgttctaccgttttcgggcgattaattggtgcggacaagagaattgatcaggtgaaatttgtaatgccaaccgaccaagtggcatgcaactcacctctgtggagtagaaatcctcggcgccgttggcagccgaaaccaagtgcaggatttggttgtaacgattgtcgcgcatctccacgggattccaattattgcccgccatcatcttttcccatttatccttggatatgtctgcaaatgagtagaatgatgtttatcttcaagtatgagagcggcaaattccactgattactcacatgcactggcatccataacgccgcgatcgcagattatcagacagttgcgattgctggagttgcccagctcaaagtaggtgttctcaatttgaaccatggtgcggatcagattctcctggaacttgtaggctgcaaggggagaaggaatagaagatggaaacgttactctttggactctcgacgtttgcgaacaatccgaacaaatagaattcgaaatacaatggcaagcaaattcgaatcgaagggaatttaacactgtgtgacatcgaattgtaagaaacttaattgactgggcggctctgattcgagtgggatgacagtgcttgatgaacgatggccagtatccagtgtctgagttcagcgatgtcaagttgaagcgatggcgatgaaacctaatctgaactgaagtagtcaatggaatgggcctacaagagcgcgaatcgaattcaaatcatttgagttcaatcaacttgttctctttcccccaagtaaacagtttctaatcagcattgggttaaagagtactcagcattattcgtctcctccagatgttagtgcctgaattgaggtttcagttccatctcggtttcattgctgatactaatttaaaaagcggttagaggcagtttaggacgaccacatttccgattgtattttttctttttagtaatttaaagctcaataaaattataatagcacacaaagccagacaaacatacatgttgaataatttgaataaattcgaatgactaacattatagaaatttgtgctatttcgaaaattgatcaatacaatgcgcacagttgccaaattgtttttgagtaatcttgctaatggaataattttgcttcaggaatgtactttcatttcgaaatgaacaatggcacataggaatcttttgggataaacactcaatggccttgttgcctcaaagtggagcttcatgggtcagccatccgaggcaattgaaacaagtgagctgtaatcgctgatcccagtcgagatgaggaggggttttttcccagagacagggagtcacagcttgtcatcatggcgataagctaagtcatcatcatgctctttctaaaacagttgaaattcgttaactggaacgttctatagattgttcttggtacaacagcgcggtaaatgtatcttaatatcatttggcgttgtttatcttttataaatggttctattgagtaaaaaggctgagctatttattcaaattcagtaacagcgcattgctgttacagtttcagctagcgaagctgcactgtggctgccttgcatttgtgagccaatgggggtaaataaatcagattgataggcgtgtggttgttgggtgggcaaagtcaggtgcttttgggggatagacagaggcaacacttgttgcggttccctgtcgcgtgcaaaatagaaaaccaaaaaaaaaaaaaaaaaaaaaacgtggaaaactttgctgcccaataagctccctttgtatgggcattagtaagtagttggtttattgcattgaacttgacgtagtgcatcgggtggcaggtggaatcgatcagttttgtgggacgcatttttgtgccccctgaacgttttgttttggtttgccagtctattcttttggcctgccaattctaattcaattagcaacgatgatgcaagagaaaataataaacaaaaacgtgaggagatgtatgtaagagcggtgtacgcgtatttgcaatttcaccagctattgcgcatcgggtaatggaaatctatgaacaggaaaaaaataataaagaatactttctaatcctgataagaaactaaagcggaccacctaaatagttggtgacaagaatggttagttcgagatatgttttaaatctatttatatgtaatccagaattcatttctaatcaatccattatgtatctgagtttgtatctaaatgattgttttaaagccgacatgtgcgtgaatttcgattgtgtgtgcttgtgagtgcccagccaacctttaatggattctcgagttaataaaatcgtatgcagattaggagcttctttacgcacagacaaacataattagccaggttaatttgcattaatgccagacaaacgattcggctaatgaagaagttgggtgggtatttggaaaacaagcgaaataaagggttcactttgaatgtggggaaagcaaatcaacagacaaaaaataaaaaacaaaatcgtttagcaatcaatttcgggaaatcaatcgagtagagaggacaccataaccacaaccatgccaaccaaagtcgactgacagacatcgagcgataacaagttcaaacgagaattcttggcaagactggcgacaagcctcgcccctcaaatatattacctatcaaacttaaagcgttctataatatagaacctatatgcattaaaacaaataatcatctactactactactactacaactacatacatttgtggttgagggatttttttctattaacatgtttgtgacaaattcaaaaatatatttatatacatagtttctagattgtagtgtgtttattaattccaatgaaaaaccatactgaagataaatattatttataatttatccattggttaaatgaatcattttttcttcagcagagaatagactcattgctctatatttgcgaccgcaactgtataaatcggagcactatgaaactaattgaatggagcgcgcatttagcgctcaactgcgaagagagggtaaacaaaagtctgggggggggggtctcaatcgggcggcgaaaaaggggggtacgggtggcctgtgtttcggttgggaagcggatgtcgaactcgcgtcagcaggcacgtgatgcgctagatcatttcgcattcttcgccccacaataaacacatttcattagccagtcggaagaccagcatatagaacgatacacccccacaagcaaattagtgccgaaatgaaaacgaaaatggtttttcagctgggaaattgccatgtggccatggctcgctgactggccaacaatggtcgaaagccgtaaagtctatgtggcacatacagtgagtactgggcgtaagcaaaccatggttattagacgcttacaacagccgaaagtagcattagtcagctaagagttgtaagtaaaggtaataaggcaaaatatatcaagtcaaactgaatgtctggataggcaaaatcagaatgtataagcaatttgttcaaaaatctcacattacataagaataagtaaacacatttaggacagattttagccaagtctcaaaaatccagacttctgcgagtgggtgtccatcagatagcagacttctatatatctatatcttatatatatatattatctgatatgtatcaactctcgcctttgcatgtgttgcggctaaatttaaatggcccatttaaatgtggctgaaattggtagcgactaaacgaattgcagaggctcggcgcgtaaaatattgttattgaaatgagcagatttgcaagtatacaacggatatattgttggataaagacaaattgtacagatcgccggcgattgcgacgtgttagtggacacaagtgttatggggacgcacataaatcatagaacgaagccaaaacaaacagaaatacacacacattatatgaaaggcatttaaaagagcattgtttgcgcgggccaaacagcacggtatgatggttaaatgtcaagtcatttggggacgaacacaaagcaaaagatacgggaaagttctgttcaagactttatccgattaaaaaagtgcattgggaaagcagctcaaggacgcacaggtagacaggttgacttggcatcgaacttcgttcgttcatttgttcgattcaaatgggttagagagccaagctgattgcaaaacgaacgaggataataagaaccgatctttggcttcaacggctctcactcaccttcgctgccattgggccgggatgcagccttggccaagcagcgcggacaggatgcggttagatcgatgagactgtgctccggagcggcgaagggcagatctttgtaaacgaacgtggttggcgtgggcgggtctgtgagtgtggttggttttggttgatttggttggcgatttattttaggtaatcgtatgggagtgggtgtgtattagattagccgctggccgtaaatactatatatatatgtatagatgtacccgtccgcttgtgactcataaaggctttaattgtcctgcttgcgaatgccattactcatgaaggctttgtaaggaattgcgactaatcggccgacatgtgatcagacctgtagctacattctatatcttatctgattgtactttttggcaatttagatattttcgaatgcgcctcctctccgcccccgccggcacaagcacattgacaaatccattaataaccataattgacaaattgctcggcgagtgaaaaggaagaaagctagcgaaatgacctcgagtcacgcaatcaggatatcgagtggggaattcgaatcgtgtcccaaggaattacgtaagtttcattgaagacgtgactctcgtgaggcgggggaccttctggccaaatactcagatatatgtatatactcgtactatctatagtatgctggctgtcgcacttgcctgattttaaaaatacccctagcatatattgtacgtatagtatagggattctttctgttggtcgctagcggcaagtaaatattttgatttattttcgttgcttcgagaaaacttggtatcgaacttgacagtgctcggataatgagatatgtgtgtgtgtggactcggaaaatgcttgcattgtaagactcctcttctcttatctcctctgctaagttaactagcaagttattctttggtctcccggtcggttgcaccaccgcctgctatctatacttaccctctttctcggtcagatcggagaacttcacaccgccactagatattcggatggtttgggggagaaacagagagaaagacaagcgggaattagcatcattcacatgaaattctatttgtattcactagatcaagtatttcaaagttcaagagcatcgagaatggaactcgaatggaattaagttcgtatcggcatggtcatcgtcacaggtaaaagacgagcggcaggcaaggctacttggtccaatctcaggtggcaaactcctgagcggctcctttcgctttgattgcctagc

SEQ ID NO: 11639 - DNA, 1582 bp, DROSOPHILA
atgagtcacaagcggacggacccgcccacgccaaccacgttcgtttacaaagatctgcccttcgccgctccggagcacagtctcatcgatctaaccgcatcctgtccgcgctgcttggccaaggctgcatcccggcccaatggcagcgaagcctacaagttccaggagaatctgatccgcaccatggttcaaattgagaacacctactttgagctgggcaactccagcaatcgcaactgtctgataatctgcgatcgcggcgttatggatgccagtgcatacatatccaaggataaatgggaaaagatgatggcgggcaataattggaatcccgtggagatgcgcgacaatcgttacaaccaaatcctgcacttggtttcggctgccaacggcgccgaggatttctactccacagaggaccatgcctgtcgctcggagggcgttgatttggcccgggaactggactacaaatccgccgccgcctgggttggccatccctacttcgatgtgatcgacaactccaccaacttcgagaccaagatgaatcgcatgattgagtcggtgtgccagaaattgggcattgatattggcgaccgtttgcaggccacgtcgcgcaagctgaaatatttggtggcccttttgccgccggacagcgagtttccgcccttccaggatttcgatgtcgtacatcattatctgcagtccgccggacccaaggtgcaggctcgccttcgcaagcgtggacagaagaaccactggagctacatccacacgcagcggcgtccaaacgttcacgggcaggcccgcattgaggtgaagacccagctgacgcatcgtgactacatgaacttgctggcccagcgcgacgatgctcacttcaccatctacaagaagcgccgctgcttccttatcaacaaccaatattttcagcttgatatttataaggagccaggccacccacgctgcaagggattggtgcttttggagacgtattcgtcactcaccggcgatgccctgaagaactgcatgcccaagttcctgaacattgtaaaggaggtgaccggcgatccggactactccatgtttaatctatccctcaaggaggactggagcaccacgaagaagttttgccgatcggcgacgcacggtaagcaggaggagcagtcgccagtgccggcaaagcagtatcatccatatgacgagaacagcgattagggcatgaggccaggagtcaacataatccatagccaaagagaatggaaccaaaagattatagtttcactgctgtacataatataagcttctatctttcgttgctccaatgcatgccacctcatttcactttcattttctattcttttcaaaatttcaaattgattgtaatcgttttggatttgattttcgcctgactatgtttctcttttgattttgtagttaagggcgccgctaatggagtctcgagcacgccgctgctcctcaatggtcagtaggcttccgaactgtccctgaatctcttttgcacacgcatattacacggcaaaagcaaattataagaacaccaatgacctggcaatgaaatgta

SEQ ID NO: 11640 - protein, 404 aa, DROSOPHILA
MSHKRTDPPTPTTFVYKDLPFAAPEHSLIDLTASCPRCLAKAASRPNGSEAYKFQENLIRTMVQIENTYFELGNSSNRNCLIICDRGVMDASAYISKDKWEKMMAGNNWNPVEMRDNRYNQILHLVSAANGAEDFYSTEDHACRSEGVDLARELDYKSAAAWVGHPYFDVIDNSTNFETKMNRMIESVCQKLGIDIGDRLQATSRKLKYLVALLPPDSEFPPFQDFDVVHHYLQSAGPKVQARLRKRGQKNHWSYIHTQRRPNVHGQARIEVKTQLTHRDYMNLLAQRDDAHFTIYKKRRCFLINNQYFQLDIYKEPGHPRCKGLVLLETYSSLTGDALKNCMPKFLNIVKEVTGDPDYSMFNLSLKEDWSTTKKFCRSATHGKQEEQSPVPAKQYHPYDENSD

SEQ ID NO: 11641 - DNA, 3019 bp, DROSOPHILA
caattacaattgatttgggtttcggtttcggtttcggtttcaatagctgagatttctgtgaatgggaatggtatgggaaccttttcttgatggctttttgaatgcctgcctaactgaaatgtcatgaacgagcgttcggctttggacagggtcaagactttttggctcattgtgcgaaagaaatttcgaccgaaaaccgatctgaatcagaagccaatgctcctaaccttggattggccgaaaattatccgaatgagccatgtttttcagtgaaatcggttcgcgttcccacgtgtcagaaccatttacatattacactcaaatgaaatgcacgcattaataattttaattaaaatccgtttattgcaattacaaagggataatcaaatcggagagctcttttacgggcagttaacaaatttatggcaaatttattaattggtttattgcaccgcgtctgatgtttataacaaatactcgatgcgactcgtgatttgtgtgcctttagcgatactctgttaatgtgaagtacaccttaacctgggccaactccgatcggtggaaagtgaaggtggtgaagagtccgtagtccccgaagggcaggggcatcatgtccagaaccttgacgggaaaccgaaagtgctccaacactatttccggctgtaatcgatagaagaactgaagtaaacatcataatcaatcatttcttaggcaaactcactggaatcggacacttgttcacattggttctgttcccgaaactgctcaggatgatgttaatgaagggatgattccgcttctccagatactcgcacacatccgactggcagatattgtagagaaagggcttatagccactggccttcttcagcagctgcatgcgcatctgaaggagaaacatattggtattacactaaggtgttggtgctatacgccagcaggctgtgctttacactttacacacaactggctgtagaatatcgccacacttttaaacaaacagttagatacacaggcacatcgatcttaaactgccaatttcgattatagcccatgcattaaattcggaattttccaaaagaagaacacttattctggcagtcctagtatccaccgtatattttagatatgtgtttctttggccttgtttcgcagttcctgttcttcgtttacggcaccatgggaccggcctggcaaacctataagactctgaacagcggagacgaggagttcctggcctgggccaaatactggatagtttacgccttcctggtcaccttcgaggtgctggcggacgtcttcctctcctggctgccgctctacatgcccaccaagttgctcctggtcgtgtggatcgtgctgtccgctccggccgccaatgtctggatattcgacgccatcctgcgtccggtgctggcaaagcggcaggaggagatcgatcacttcctgcaccggggcaaggagaagctcctgatcgacgccctcgcttcgatgacacagctggtggcacagacccaaatctctgtactgcctttcgtgtccagcttctggtcgagatcgagcactgctccccttaggacttccgatctgttgcaggactccactggagaaggaattggaggcagaacttccgaggatactgactcggccaacgtctctgtccaaaatctgtccagtggttccagtcccgttggcagcttagagcacctccgtgacgactctgaggagcttctggtgggcgtttcgaaggccaccacgcacctgcaggcggagcagttccagagcgacgtgtcgtcggaatcacccaggataattaatcgccgacctcagcgcaagttcaagaatgccattgctattgcctccgccaccaagctggaggacctccatgacgatgtggaggatctgctggccaagacggcgatggagaccagcggccaggaagtgcgtcagcagcgtcaaccggccagccgtcgccgtcttttagcacaatcatttgtgaaacctcaaacaggtttatagttatttcattaattcaaaacataaattggttttaggcatggataggtttcaagttgtttaattactagtgttttggactcgcattttctactatagatagctattcaactatggcattcaggaacgccctagctttgcaaactaactcaccgataccggaccttttggccatcgcaggatgttggcccgcagactcatttcgacgacatccctctttacggcgtacaatcggcacagggaaacggtggtgaagttttcgtccgcactcaggcactcgatgtttgtgaacttggcaactccttggacctgaagtgagctagtgttcggttcataatcccagccggcctagcttacggtcgaacttgcctgcaaaatgtgccacagcccaaacaagaggaataactctgtcaacgtggccatcactaagttcaccaaagagccattaaaaactggcaaactgtggcattataatgttgacgaaagtggcaaaagccagtcaagcgaaaccataatcgatagatatcaatcattacgggcaattatcaattctgtttaattacttgaactttcgaattgttgttgagttttaattaaacaaaaacgtatgggtctgtatccaacaggcagcacttaactaaactaggcgaatgtaaactagatttgggacatgggtgtgtgaggagcgtggtgtgtgtttatggaattgatttgttgtgtttatggccctaatcactggcctcatcttcctcatcctcatcgctggcattgctgtcctcctcgctctcctccggttcgctctcgctcttggcctttttcttcttggcatcgccgtcggatgggggcttgctcttcttcttggcaggctcgttgtccttctcgtcgtcggagctggtggagtcgtcgtccgaaatgtactccttgctcttgaagccgctgcccgaggtattcgccttcttggatggagaaggctccgtcttgcgcttcttggaggactttccac

SEQ ID NO: 11642 - DNA, 1019 bp, DROSOPHILA
cagttagatacacaggcacatcgatcttaaactgccaatttcgattatagcccatgcattaaattcggaattttccaaaagaagaacacttattctggcagtcctagtatccaccgtatattttagatatgtgtttctttggccttgtttcgcagttcctgttcttcgtttacggcaccatgggaccggcctggcaaacctataagactctgaacagcggagacgaggagttcctggcctgggccaaatactggatagtttacgccttcctggtcaccttcgaggtgctggcggacgtcttcctctcctggctgccgctctacatgcccaccaagttgctcctggtcgtgtggatcgtgctgtccgctccggccgccaatgtctggatattcgacgccatcctgcgtccggtgctggcaaagcggcaggaggagatcgatcacttcctgcaccggggcaaggagaagctcctgatcgacgccctcgcttcgatgacacagctggtggcacagacccaaatctctgtactgcctttcgtgtccagcttctggtcgagatcgagcactgctccccttaggacttccgatctgttgcaggactccactggagaaggaattggaggcagaacttccgaggatactgactcggccaacgtctctgtccaaaatctgtccagtggttccagtcccgttggcagcttagagcacctccgtgacgactctgaggagcttctggtgggcgtttcgaaggccaccacgcacctgcaggcggagcagttccagagcgacgtgtcgtcggaatcacccaggataattaatcgccgacctcagcgcaagttcaagaatgccattgctattgcctccgccaccaagctggaggacctccatgacgatgtggaggatctgctggccaagacggcgatggagaccagcggccaggaagtgcgtcagcagcgtcaaccggccagccgtcgccgtcttttagcacaatcatttgtgaaacctcaaacaggtttatag

SEQ ID NO: 11643 - protein, 279 aa, DROSOPHILA
MGPAWQTYKTLNSGDEEFLAWAKYWIVYAFLVTFEVLADVFLSWLPLYMPTKLLLVVWIVLSAPAANVWIFDAILRPVLAKRQEEIDHFLHRGKEKLLIDALASMTQLVAQTQISVLPFVSSFWSRSSTAPLRTSDLLQDSTGEGIGGRTSEDTDSANVSVQNLSSGSSPVGSLEHLRDDSEELLVGVSKATTHLQAEQFQSDVSSESPRIINRRPQRKFKNAIAIASATKLEDLHDDVEDLLAKTAMETSGQEVRQQRQPASRRRLLAQSFVKPQTGL

SEQ ID NO: 11644 - DNA, 7537 bp, DROSOPHILA
tgaaacaaatatatcaattttgaaaagtttgtcatttccaaccattctccatcagtttgaaacactccatgttacagttatagctaaatatattttattatattcttcatatgtagtatgtgtataaaaacaaaacaacagccagctcataatattgggggcgcaggttcatagaatggctcaattgagtgtcagtggtggggcatttaccgttaagcatccagcatcaccaactagaccacttcgctctccccgatgatcgactgtgggagaccctatatgaagactccagatccttggcccgctaatcgccgatgctgtttttttttcttctcttttttttttttggtggtggggacttgatgtttgatctcgttggtttcgatgagctttattttgatttgagagtgggctaacttttgatttacaaatacttatcaaccgtacagtggtctgtagtaaccatataatatgatttcaaattagaaacaattgcacctagcgattttcgtagattaccaaaaacgaacaaggcgtgtgattaatattttactattaaaaaattaactacttttgacgattgccattctatcaaagggcccgtagtatatagtaactcccaaggagtagtagtatatagtattgttaaagttttatattaccagtgaccagtccaaagccaatgagctcaatgtgaacttaattttagctacgatacatttagttattgtgttttcggttatgcttaaatatccatataatttttttaacgacatcgaagtgtgtttagtattgtattgtaacgaaccaggagcaagaaaaacatcgatgattattggttattgatgttggcctggcaaaaacatcgatgcttttccagttctaatagaaacgatataacgatattcgcgacattgtgcttcgtgagcaagggggcgtgagaattttggggtgcatgtgggctggtgctgggcaatctaaatgcttttctgatctgcgcctatttgctcttggccagctgactctgagccgaggtggtcagcttggagacgacccgcgttagggcccgattctcggctcgcagacgatcgttctcagtctttagcttctgcaatagctaaaatcacacaaaaaaaaataaggacaacagcggcgacgcaagaaaaataagtggaaaataggcatgttttcgtttgagcgattgccgataatcgattgtttcgattgtttgttcgatcgatgaggcgcgtgggaagagagagaaaaaagaaaatcaaatttgagtgagcgtattgttcaatgagagcgcttttctttaaaaatttgtaacaattaggtgagtgcgattggtagacgtataacgataaacgtgtaacgtataaacgcatgggaacagtgatagtgatcaaaaatcataaaagttggcgaatgacacagcgagagattgagcgagtgatgaattgagatgcgatgatgacagagaaacataatggtcttgagatgagaacatgtctgatgtctgttgttgctgtggtgtgatatgaaaaaataaccatagaaaacgaatatatgatctgatcacgaggcgaaggtggggcaaaaataaattggcatgggaaatcaaagcgatcgcttcactgtacagcggggtggcataaaataataaaagttctatacacgggaagaatttggtaaatcaatttcaaatcaaatcaagtgtcatggcattcacacacagaagacggctggtcaactaggtgttctatatggtggccaaaagggaaaggcaattataaaagtaaagattaaactataaaggtgagagaaacgcgtgtgctccaactcagtgcgaaatgggtattatggctttgggttataagaacagaacggctcaattcgagttaataataagggggttaataaatcaggatttcagacatgcaacaaggcttttttggggggtaaaagtatcacaaactcttggacaaatcatgtgggggatggaaccaaaataaaagtaaaccaatatagcaatcaattttggggtcctgttctcagaacacaaaaacagcaacagcggcggcacttttaacgcttacggttagcaaaggacacttttgtaattaccttgagctcttcttccaactcggaaagcttgcgttccatagctcttctttcgcgtttctcaagttcagatagtgaatttttcgttgtctgcgaatgtgaaatgaaacaagatgtggttttgcgattttttgtttttcgattttgattcgggtcttggtttttcttgttcagttttgtggtgtagttgttgtttgttgggaattcatatttttgttcaacggatcgaaaaaacatatatatataaatatatgtatatatgtacgacagagcggggtgtaaagagcgaaagagagcgcgagcagtaagcttcacatgagggggaaaaagaggcagcgaggtgggtggtttttgtgtgttaaagaattaaagtaaatatattttggtggcatccttgaactaagtttatcgtgttgcgtgttgttttgttgttggttactgctggcagtttcggtattggtttatcggcttttagtttttatagtgggctgatgtgggcgtggcatgttaggggcgtggcatgtacttacggcattggcgaatctctcgagtgttgcacgtgtctggacggcttcatcgtccttctgcttgagcatctgcctcagcttatcgttctccaatctacaaaggataatcgtttagattcggattatatactttaaagttcttggaggggagcttcactcacttttccgcttcccagagcgccttgtagtcaatgccatcgccattctccgtcttgtcattgctgctggagctctttgactcgctggtggtggccgtactcgcggtgctgcccagccgggaacgggatgtccgctcactgccactctgtaaaggagaaaaagaaaatttaactaattttagcaactggggaaagtcaaatttgggagatcaacttttagatagtttaaattatttgttctgctacttcatatttcttgaaaattttcaaagtttcatgcgcaactgctcttaagatccttgcgcatatactaaataatatttaagtattctataattttcaaatatcttttctattctaaataaatttcaaatatgattttaagtaaatagtgtagatatgtgaatccaataaaaacaactacaacaacagcataaagtaattaaatagaaaccgacttaaccagtacacctgcttacttcatatccttcactcttctctgaggaagcactaatggatctctgtgccgcactcttcgaccgcgtgcgattgcgagacttgcgctcctgttcccgcaaagagttgctccttgtggctgcgatggcggccacagtggctccggcactggttaccccattcgaggatggaccaccataggcaccattcaggctgctatttgatgctgacagtgatttggtcttcagtaaacgagaactcttgaacgaattggacgaactcaaaccgggcgacttgaaggtcagcgaagcggtggtcacacccttatcataactactcgaataggggctgacatatcgatcgcttgtggagtacgaagatcccgccgaggaataggaactgggattgtacctggaactgtcgtatccaccaccaccgctgcctgttccattcgaagccgaggaggaggacgacgacgagacggtggacagagaggaggagagagcagaagctttagaatggccgtaactatggctctggcttatatgcttgcccaccaccaggtggccatagtgatgaccaccgcttgtggccgccgaacccgaagcagatgaagtggcggtgggctggagctgcagatagtagcgattgccctggtgcgtttgcgttttagttgctggcatggcggcattggacgcagaagctgtggatgcggcatggcatgtggaggcggatgaggttacacctgtcgatgggccactgcttgcggttggctgatgggaatgctgattcgaatagtggttggtggtgctggtgaactgctgatgctgatgaagatgatgatgatgctgctgctgatggatctgatacttggacgccccgtaatcgtagcgactgcccgcattaccataagaactccgaccagcacctcctccgccgtacaagctctccctcgagctgtacacactggcatagggactctggtaactggaggcgctactgctgctgggaaagtagcccgtgctcaggggacgaccagtgctgccggagctgctatagctacttccgttgtagttataggccccggaaccaccacttgatggagccattcgcgaactggaggacaacgatcgccgccgactggacaggggcgcctgggttcttgatctcgagcgaaaggacatctcgctgatggaaactataagaacgtgggctccattagtttgccatctcgccaggcacttcgtatatcaatcgtcagtgccaaagtgcaattacgcttaaacagctcgaccaaaaaccacatgacctgaatgatctttcctattggagggtaattgccatctggccacacgtttgcaaagcctttatatttttggtaaatcgttcccaatccattttagctattgatagtttcgcataaataaaccaataatttcttagacacatctttctttaagtaggtttttgaataattaatagactcgataaaatgtactctataaactaaaatcaaatccatttaattactcaaagaaagaaatcgctaaaatatctttaattaacacgaaaaatctttcacgaatatggacagctgtcattcaaaaaagactctttgaactttagttcgactttggattcaagatgctatataaagaacgcatttgaacgaacgatacccctgggaataatttgcaattagagggcatttcaacttcgattctgatcgatttgtgttcccattacagacgcgcacacaaaaggcaattacaattataatcaaagcgaacatacaaaatgttcttgaattcggcataaacaaaaataaaggaaaacaaacagcttctcggtgtgtttacatgtgtccatatatctcggctgtatactagagggatacattttcgatttggaaaacgcaatattgacatgtggttcgggaatcggttttggacgtgcaccgggaaaaccgaaaatgacgtcaaagcatacattttgacaattttcatttcagttttcgacgtatatacctccactggcactagctgggtctgttggatctcgacgggatgctcttgttgggattgaaaacacatagaaaacgtgatatatggatgcgaatatcccgctgccggcctagtatttatttgtttctctaagttgatgcctctcatcctccgcccacgcgatacaaaacaacaaacatgaaaccaaccgaccgtcagaccagaaaacgtttttcttttcaagcgattttccaatgcatataattcatgacgaaccgtttcgttttcctaccagactcatttcattctgtgtatctgcccgtttaaatggctctatctataggacaatcgcccatgaatgaagcgcctttttaatgtttggtcttttgcaatcatttccccccttttatgcctttctgtattgtggtaattcaaacattttgcttggctaatatcgcgtaaaatgtatatagaggaagcttttaaaaatacaattttctgttgtgtcatggcgaagataaatgaactagccgggtcgcagaggcatcataaaaaagattaggaaatagacgtaaatcaagtcaaaggataaatactagcgaaatgattcgacaattttcaagacaagtatttataaaaacatgattaagacttgcatactttaaatgaaaaattcaatgtaagtggggtataacaaattaatattttgaattaaaacttgacttttaaaatacacactttaaactacatagatgttgcatgaatttttttccccgttctcgtgttaaactttaacatttgtggtcatgaaaaaaatacaaataaattaggcacgttcacgaaatcaaattaaaaacttatcaaaatagttgaccatatttgcaaaaaccacctggtaagagcatcaacttgaaatgtccaaaaattatgcgcagttggccaaaaaaggcaacgcgaagcgattccatcaactgaaaacgattcaactttttgcggccggcagtcaaatcatcaactttggtttggcaaatcccctccagctgcccctttgatcacaggggtaaactgatctaagctgcaatagcagttgattttgacccccccaacaattcttctttgacacattcgacaggtcttgtggtttttggtctctcgttgcacttgacgtattgaattcttgagcttaattgggatttacattgagatttagacttgtttgattggattagctgggtttgggtgatctgaactgaatcgaactgagatgatccgctgtgctgggcgcacaaaactcaactgtgttgctcgctgacgatttgaaatgttttatttgaaagcgaacgatcggaaataaacacgaaagagcagcgaaagagtgcccacatcgagctaagagttaaatgaagagcggaaaagccggaaaaattaaacaaaaaaaaaaaaaacatagagaaataaaaggtggcggcatattttcaactcaaatatgaacacaagaaataataagagcagggaaaggagccaaattttcacttgaaattgcgcacacgaaaaattcgttgtgcgagtttttcacctggttgagacatcacatctaaatttagtaaatcgcacacgtatttggcccaatgtccgagacgaaaaattgttaactatgctggtgtcagaagaaatcagggaaatacaaacgcaaacgagagcactgcaaactgggccaaaaggcgaagcacagtcattgacacatgactgcagcgaaactaggaaaattcgtgaaaaagcagacatagaatagcgcgagcataggaaaaactatttttgtttgcgtttaaatttagcattaagtgcgcgacaggagacagaagaatccaatttggggagttgctccctcccctctcataactgggccaaaatcagacccctccgtgcagagtttatggtttcgttggatgcattttccggctataaataccgcatgacgatccttttgccgcagggagagagaatgaggaagcaaatgcctgcagcaagctgttataaatttagccgcacattttctcgctttttctgcaaagttcaacggacgtgtgccagcttttcttattattatgcgcttctcaatatagaatcaaatatttccttcggcttgggtcgtgcctctgtaattgcccaatttattataaaatgcaaaactgtctgcgaagacgattgtgaaagtgatttccccagattcccaagcatttgcgagatgaaaactaaaaagtagaataaa

SEQ ID NO: 11645 - DNA, 1205 bp, DROSOPHILA
atcatctcagttcgattcagttcagatcacccaaacccagctaatccaatcaaacaagtctaaatctcaatatgtcctttcgctcgagatcaagaacccaggcgcccctgtccagtcggcggcgatcgttgtcctccagttcgcgaatggctccatcaagtggtggttccggggcctataactacaacggaagtagctatagcagctccggcagcactggtcgtcccctgagcacgggctactttcccagcagcagtagcgcctccagttaccagagtccctatgccagtgtgtacagctcgagggagagcttgtacggcggaggaggtgctggtcggagttcttatggcagcggtggtggtggatacgacagttccaggtacaatcccagttcctattcctcggcgggatcttcgtactccacaagcgatcgatatgtcagcccctattcgagtagttatgataagggtgtgaccaccgcttcgctgaccttcaagtcgcccggtttgagttcgtccaattcgttcaagagttctcgtttactgaagaccaaatcactgtcagcatcaaatagcagcctgaatggtgcctatggtggtccatcctcgaatggggtaaccagtgccggagccactgtggccgccatcgcagccacaaggagcaactctttgcgggaacaggagcgcaagtctcgcaatcgcacgcggtcgaagagtgcggcacagagatccattagtgcttcctcagagaagagtgaaggatatgaaagtggcagtgagcggacatcccgttcccggctgggcagcaccgcgagtacggccaccaccagcgagtcaaagagctccagcagcaatgacaagacggagaatggcgatggcattgactacaaggcgctctgggaagcggaaaaattggagaacgataagctgaggcagatgctcaagcagaaggacgatgaagccgtccagacacgtgcaacactcgagagattcgccaatgccacaacgaaaaattcactatctgaacttgagaaacgcgaaagaagagctatggaacgcaagctttccgagttggaagaagagctcaagctattgcagaagctaaagactgagaacgatcgtctgcgagccgagaatcgggccctaacgcgggtcgtctccaagctgaccacctcggctcagagtcagctggccaagagcaaatag

SEQ ID NO: 11646 - protein, 377 aa, DROSOPHILA
MSFRSRSRTQAPLSSRRRSLSSSSRMAPSSGGSGAYNYNGSSYSSSGSTGRPLSTGYFPSSSSASSYQSPYASVYSSRESLYGGGGAGRSSYGSGGGGYDSSRYNPSSYSSAGSSYSTSDRYVSPYSSSYDKGVTTASLTFKSPGLSSSNSFKSSRLLKTKSLSASNSSLNGAYGGPSSNGVTSAGATVAAIAATRSNSLREQERKSRNRTRSKSAAQRSISASSEKSEGYESGSERTSRSRLGSTASTATTSESKSSSSNDKTENGDGIDYKALWEAEKLENDKLRQMLKQKDDEAVQTRATLERFANATTKNSLSELEKRERRAMERKLSELEEELKLLQKLKTENDRLRAENRALTRVVSKLTTSAQSQLAKSK

SEQ ID NO: 11647 - DNA, 9002 bp, DROSOPHILA
ttacaaaccgctttatctgcggagcctttcgtcacattagtttttacatacatacatatgtacatatttacatagcctgaatcttgaaaagcgaaccgctaagtgctccatgtttgcagttgccatcgagtaaatttgatttgatttgtgttgatctactgtccacctcttcattctccccatttcccatccttttctcgtcttctcttctgcactcttctttggcccctctttcatcgctttttgcgggggctttttaaaaagtgtcaagtaatgcgtggcatcgttcaattaagcgcagtgcaagaaattcagatacagatttaaattaaaatccatgctcagctttaacttgacatacactcagaaaagcgaggggaagtaccaaaaattcttctggattccatttacttataagtagaaagtcaaaaattcgttcaaaaggaacaaataattttgttttacattttgtgcagctaataaacgcaaaaattcttcacctttttgtgtggtattttttggtttagttttgagtgttttgagctggcgatcgtttgagagacgcagccgctaaatcgccgcagccaaagcggcgctcgttccactgaaatccgctcagaagagcgcagagagcagttaaaaaatctacgacaaaaggggagaatacaacagtgatgatagcgccgaaagtggcggaaaaacgctaaacaaaattgaaagtcacatctaaacattacgtatacgccgtagtggtgacaaattacacatacgactagttgaacggactgaattaaattacttttataatagttatagcttaacaatagttgtaggcgctactcgtattgaaaatttattatgtagcgaacgttcgctaacatgtttttgagtgccttggttagtttaattcgacccattaggtcgaatgaaattctggcacattagtagccaaatgagcatcactgacttctggccggaggttgggcattcgcgtttggcgttcgccgctttggcgctcagtttgtcatttgcacgcgcttacgccggttggccgcccaacaaaaacaaggctgtagaatacataaaccgcctgaccgaccgctcgcgtgtttttagttttagcagctaatataaatacataaatgcgactatttacttgggcaatttgcgactaaggtgcgcttaaatacaacacttatttttttgaggtgctgccatcgttttcatatgtgccaaaagccaagagtgtgtgcgtttctggaacagccataaagttcaaagtaataaaaaaaaagtaatagggagagaaggaaaaactgtttgcaaatctgctgggcaagccaaaaaagaatgcaaataaacggagagaaagaattctttcctcttttcagctctcttctcctgattttgttacttgtgatcacagcccacgcatcaaaacaaaacaaacagaacacaaacaaaccgaagccccaaacaagaatttagcatctctccattcttgtgttttattcttgtttcgcttttttttttgcaattcccccaggggaatataaattagcagtgtagaattgtgaacaaacgcccccttgctaaataaaatatacatgtacatatgtatatacgtatttaaattggcagacaccttgccatatatccatatccattatgtccgctgctcgtcatcatcgtatttcgatacttcaaggttaaatgacgtcggagaaaagcaaacgttaaataaaaatctgtttttagttggcgtttgtcgtaaaaactgtttcggatcggcaaaaagtccaaccccaaagtcattgttacaaaaaggtattcgaaatttgctccaggccacagtcaagtctctgaaaaacgaacccttttgggtgttaattggatatccttactatatatagaaacaaatcactgttgttctatacaaattcaataatcccttcggattctaaattaaattggttttctttgaacctttttaggatttttagcggtataatttatattttgagttcgatttcacttaaggaacttttacttttacgaaatgttgatcgaaaattgtgccaagtgtatggaaagaggtggcgcagaacaaaaaagcaaagcaaatgcccgcttttcaagtagtagaaagcaatgagcaggctaaaaacattaaccccgtcaagtgccctcagcattctacgtactactactttttcgtttttttaggcggttggacctttggccaaacctagcttcgcttttaacaatgaacttcgggctctgaaagaaagttggtgactattttgctagagataagaattgcttaatcgctggaaagcttgtaggtaattgtttgacacatttagaatgaacgcagaaaatggcaaattcaaaaagattggaatatactcctaagctaagtctgatgaaagttgtatctaatcatttttatttatatttatataaatattttaggaaatgaaaacagcaatctttcttaaacaaaagttacatccttttttatgcataaaatacgaatttaaaatgttcgatatatcgaggtaaaactttaactcgcaaatttccaccatgactgatttccccagacataaatactccagttagtcattaagtttaccgttaatgccattcggctgtgtaaactgcatggagtaatacgtttgaaaagcactggtaacaaaatacacatgtgtcatcctgcgagagttgagtcaattgtgaggtggtgaggcaatccgactcatttagttatcttatcgaatttaccgatactaggtggtgataagatagtgccgtttcaaaaaccgtttcgaatcgggcaatcaatggagttcgtcggcactccacccagttactactacgatgtgaagcagtttattgcaagactagctttcggtttgttcagttaggcctcgattaaattcaagtcattttgcactgcattgtacagtcgatgaaatgtgctacttatgattggcacaagtgattgtggccaaaataacgatagtggcgttaacaatatgccaaaatacatgtagcatacacacgtgtacatacattcaatttgaaagcattgctagagcccaatgattgcaaaaatccctaatgatttttaatgtcccgttgaaaagcctatgaatattaactgcaatattgcacaattccacttacaagctgtcataattgagacactaggattgtggatttagtaatagtaagttatgataataacttatcgcacataactaattatatttattctgttaagaaaggtgtgctttttttaaattttaaatgcgtatagattttagggccaaaaggacataataggacataaaagcactatatacacatatcataattgccgcctaattgagcgtaattaaggggcgtagtccaaggggggtttttatgggcagtgattctacggattttacagtgcgtgtgcgcgactttctacttggcaggaaatgcaattgcgctttaattcaatttcctaaccgcaagtcaactcaatgaacgtcacttgattcaaccccaaagggttggccaccgcgtctgcggcgcatccggaattctaaggccccgggccatgaagcagcatagttagagtgggcaataacgtattatgactttatatatatatttcccttgtttgcaatgagacatttgtcctccactatcttaattccactgtacttagacattatcttgacaatatatattttaccaaagtcaaatgaaattgcaaaagtaccctttaaaaggtagactttttacaaaacattttcaaatactgcagtttgaatatgttaaatgggtaatacgaatacagctctatggcatacttggcacaatcgtatatgattttgaacttgtagcctctggaatgcccattcgtgccggtttctcgaattcttcgactcgagcgcaaatatttaagcagttgccacttgagatcgaaatggagactcaactctcgacacgacttaattttcctctcgcgcaaattgagttctataaacaaatgggaaaacgaaatggccataaacaaataacaaagcataattgctcatgttcgggctaccatcagagacccatttccagggccagagagattttcagtccagagtttggcctcagaattcaattaacggatggaggaaacggtggtgattggagggcaagagaaactactgacgaagtgatcacaattggagagggtgttgtgattcaattagaccctcgtccacgtccacgacttgaaaaacgagtgtgtttgcagatcgttgggcaatatcgttagctgattatgatcgacactctcaactgacaccacacccccctcaccacccctctagtagttggtcgaaattcgccacaagatcggtaatcgatcactttgtttgtggaatatgtgaaattttattatgtcgtttcttgtgacacttttttcactcacacttaactggccactggaatttttatgtataagaattgatctgccacttttccaagagtattaaaattttgtcgcaacttaaaaccaaacacttatcatataaaaagatcaggaaacttttaagaatgttagaatataaacaaaaatacttatgtaagtcgtcttcgtaagtgtctcacttttcgtaatctcgatccaactaaaaaataaattaataacttacatacgatcctggttaaataataaatcgtggcaagatcagaatacaattttttacaaataacgtagaataataaccttgcatcctctacaatagcgaaagaaataattgaagcttttgaatttcaaacaaatataaactgaaatcttatctaaaacaagtcaaaaggaatacgtataaatacagctgtgttcataaaataagaagaacttgagacccgcaggtcccaaagataagataagatacaaaattcctatgattcacagtttaaatggtcaattttgtttttataatatcattaggattcccaagttcagcgcagactgtatgtccctaaaagatgcaaaagtattgactttgctgtaacgaactatgcgtctatatctgtggttttacgtatggtaccacggttttcgtgcttccattcatatttaatggcattggataccattttgacagaacattcaaagggtttttgaatgtccttatatgttttttcttcttttcttagcttaagaattaacattcttttctcctgggagcagtgcggtcctctacccactaaaatattattttttttttttaatttattgcccttttaaatatatgtatttacttaaccaaagacacactttctagaaaatattgatcattttcatttttttcctatctacacattccattttacaaaaataagtggaataaaaagtcgatcccgaaaagggacatggaaatataccgttgtatttcttagtttcccttgcactgctattttgtttaacacaactgtatgtactttgaaggatcggaaacgcttcccctttgcctgtcgcacattccaatttactctactagtaacgggtatcacaaatcataaattttcaaaatcaaaattgtgggagtggcagcttttggcttttgtacgcgttaggatggacgtagcaatgttctcagcacctgctataaagagagatatatagagcttgattacagagagggacacacacacacacacacacacgccatgcaaacgcacacgacaataaatgagcttcacatgtattatagataagaaacaccttgaaagataaggctggagcgaaacggtctataatcggcagttctacggaacgctcacggcgaagagcagtgcacagcggagcggacggtaaacacaactagaaaatgaacaaagagtggaccggagaatagagaaggcgaaacgagcgagggcgcgcaaaaggcaccagttaatatgagtgaataattggccacaggcggatcagttgaccaatcatgcggaatatcagaaatctcaaggatccgacgacatggacgcggattctcctgccgttcctctcctgcctactcctcgctgtccaggcggatctggtgaatgtcacctgcggggagtatggcaataccatcacttgcgactgcaataactccgaccaggtgagtcagttatttggcaaatacctaatgtttgtatattatcattaatgaaaacgtttaatgatatcatagccataattcaaacgtggctgacatttctgcaagcataatcagcaaaattctggactattttttgaatttgcattgctttttttttttggtttcatattaagatattattttatacataaataatgacaaatgcatggcgaggttctacaaagtacatcagtcttttgtcctacttaccaatgagtaataatttaagcaacattttatcgctatgctttatctataggcccaactgttagattagttataatgcgacccgatttgttgtgctttttcaagcgaatgttatacattgtagatgcttatagattacatatattcctagaataactatactaagtcacatatttatggtaagagaactagaaatctagaaacttaactaatatttttataaacctcatcctttttaattattttcagaccatggctttgccatcgttgcgcggaaatgtctacatgattgagatccgcaattgccgcgatcttctggtggaggccaatcggctggcgaacacgatgggcctgcacaaggtggtcttccgccaggtgggccaactggtgctccgggagcacgcgctcagtgtgccgcgatatgccagcaataaggcactgatcgtggagttcgagcagacgaacctcaagctgatcgaatcgcatgccatcaacggcaacatcgaggagatctcattcgtgggcgggcggattgagctaatgaagcctttcggattcaccaccaccaaggatagtgccatactgctcaagctggacggggtcaccattcagcgcatcgagagtcaagtgggtgaaagtatgttgtggtaactatagtctattacttaaatcctgtttgtgcttataggcctttaagaaattcgccgtggagcagatgagcatcgccaattgccaattcctgggcgatctgcccacgcgtgccttctacgagctcgaggtgaccaacgagctgagtctgcgaggtaatcagttccaggaggtccactcccatgccttctccttcaagcgtaagtgtttgtcagtatttaattatgaacaaaaacctaattggatctgcctcagttgtctccaagttaagcctgagtgataatcatttcctatccgtcgatggtgagtggttggaagcccaaatcagagatgcggcgacaatacgaggaaacgaattcggggccacaagtgagattgcgtttcgcagcctcaccgttcatcgttcgtatcagttgagcgagcgtctggagctgcgtttccacaacaacagtctgcgcagctcgcgaccaggtgcagatcctcgggtcgatggcaccgccgagaatgtggcaccacaaccccttcaattcgacaatagcttcgcgctcaatgtacgcgatatccgctataataatgcctggagctgtgaacagctggacaggaatgtggagccaccattgccgcgagcggagttcttccgactgcacagcgatcaactgatgttccatccgcccgattttggcggacaaggccaaatccagccgtatatcccacttcgatccctgatcacggatgagtgccgcgagcgcagctacatggcctttattatctcgggtagtgttcttctgggactactgctgctcctcctgatccttttgctgtggtggcgagtagtccaaaagcgacgacgtcgtaagctggacgtagtgcagccggaaccgcgcacttacaaggaaacccagatcgtataccaaatcgagaacgctggcctgctaaagactgatttgtagacggcaaggaaagacacatagatcacagatgcctgttttggactgtttttcagtaccatagcagatcatctacccacaagagacacacagctgaatgaagctaaaaggagcggtgggcggtggaatggttggagcaccattgccaccattaccaccaccgatcatacagaaccaccaatgcgtgacctttcgctgtaccaaaaccatagcctacagttagtcgtaatatatcttaatctaattattcataactcgcaatgttcgtcagttgtaagtggcccatgtatatagtcgcatgtaggctgggatcttgcccaaaaatatccaggtggattagccatatcccaccaaatacgtatgtatatggaataaatcaatttaaagccaaaatgtggtgctcttaaatgtatatgctacatatgtacatatatgttaatactatttggaagcgtaatttaaaataacaaaatttggaggacaaagtcagctaataaaatattgtatacaaattgcggatgacagacgagatgtacgtgtaaacaaaagttttattgatccctatagctttcgaaaatatttttagaaacttgacacatgtttacaagataatcataaactttcaaagggaaatagtgttggaaggaagcccatttttgtttacgatatttaaatatttataaataatattatatttcccatttcccaaatacattacgatttaaataatgatagtacttaaagaactcacccgatgggtaaatatgattccaaagcctggtgaacggtcaactgcggttcagatagggcaaatcctttagagagcagggtatgatgagtgttgatggtctcctcaatgccgctcatgtcctccacgtctttgtcatctgatgtgatacatatttggttttaatataatccaaagtaaaagtaatactcgcataaattacctggcagattgagctccttcttcatcagattggcactgcacatgccacccaaa

SEQ ID NO: 11648 - DNA, 1796 bp, DROSOPHILA
ttcgccgctttggcgctcagtttgtcatttgcacgcgcttacgccggttggccgcccaacaaaaacaaggctgtagaatacataaaccgcctgaccgaccgctcgcgtgtttttagttttagcagctaatataaatacataaatgcgactatttacttgggcaatttgcgactaagataagaaacaccttgaaagataaggctggagcgaaacggtctataatcggcagttctacggaacgctcacggcgaagagcagtgcacagcggagcggacggtaaacacaactagaaaatgaacaaagagtggaccggagaatagagaaggcgaaacgagcgagggcgcgcaaaaggcaccagttaatatgagtgaataattggccacaggcggatcagttgaccaatcatgcggaatatcagaaatctcaaggatccgacgacatggacgcggattctcctgccgttcctctcctgcctactcctcgctgtccaggcggatctggtgaatgtcacctgcggggagtatggcaataccatcacttgcgactgcaataactccgaccagaccatggctttgccatcgttgcgcggaaatgtctacatgattgagatccgcaattgccgcgatcttctggtggaggccaatcggctggcgaacacgatgggcctgcacaaggtggtcttccgccaggtgggccaactggtgctccgggagcacgcgctcagtgtgccgcgatatgccagcaataaggcactgatcgtggagttcgagcagacgaacctcaagctgatcgaatcgcatgccatcaacggcaacatcgaggagatctcattcgtgggcgggcggattgagctaatgaagcctttcggattcaccaccaccaaggatagtgccatactgctcaagctggacggggtcaccattcagcgcatcgagagtcaagcctttaagaaattcgccgtggagcagatgagcatcgccaattgccaattcctgggcgatctgcccacgcgtgccttctacgagctcgaggtgaccaacgagctgagtctgcgaggtaatcagttccaggaggtccactcccatgccttctccttcaagcttgtctccaagttaagcctgagtgataatcatttcctatccgtcgatggtgagtggttggaagcccaaatcagagatgcggcgacaatacgaggaaacgaattcggggccacaagtgagattgcgtttcgcagcctcaccgttcatcgttcgtatcagttgagcgagcgtctggagctgcgtttccacaacaacagtctgcgcagctcgcgaccaggtgcagatcctcgggtcgatggcaccgccgagaatgtggcaccacaaccccttcaattcgacaatagcttcgcgctcaatgtacgcgatatccgctataataatgcctggagctgtgaacagctggacaggaatgtggagccaccattgccgcgagcggagttcttccgactgcacagcgatcaactgatgttccatccgcccgattttggcggacaaggccaaatccagccgtatatcccacttcgatccctgatcacggatgagtgccgcgagcgcagctacatggcctttattatctcgggtagtgttcttctgggactactgctgctcctcctgatccttttgctgtggtggcgagtagtccaaaagcgacgacgtcgtaagctggacgtagtgcagccggaaccgcgcacttacaaggaaacccagatcgtataccaaatcgagaacgctggcctgctaaagactgatttgtag

SEQ ID NO: 11649 - protein, 463 aa, DROSOPHILA
MRNIRNLKDPTTWTRILLPFLSCLLLAVQADLVNVTCGEYGNTITCDCNNSDQTMALPSLRGNVYMIEIRNCRDLLVEANRLANTMGLHKVVFRQVGQLVLREHALSVPRYASNKALIVEFEQTNLKLIESHAINGNIEEISFVGGRIELMKPFGFTTTKDSAILLKLDGVTIQRIESQAFKKFAVEQMSIANCQFLGDLPTRAFYELEVTNELSLRGNQFQEVHSHAFSFKLVSKLSLSDNHFLSVDGEWLEAQIRDAATIRGNEFGATSEIAFRSLTVHRSYQLSERLELRFHNNSLRSSRPGADPRVDGTAENVAPQPLQFDNSFALNVRDIRYNNAWSCEQLDRNVEPPLPRAEFFRLHSDQLMFHPPDFGGQGQIQPYIPLRSLITDECRERSYMAFIISGSVLLGLLLLLLILLLWWRVVQKRRRRKLDVVQPEPRTYKETQIVYQIENAGLLKTDL

SEQ ID NO: 11650 - DNA, 3311 bp, DROSOPHILA
gttgccagcgtgggaacgatttgcataagagtcttatgggaaaaataaaacaaattggaatcgtcttgaatataaaagcgcttgtcgagcattcttcagcagtttatgacagactgaaagacaaaggcaaagtaaagcaatgttgtttaggtacttgcgaaaacctattgctcaggatctcctgacttctccggaggcatggcgctactttgagtatggcatgttttggatgggatggatggctccgccaaagaaccggggcctaattcaatatatcaaaaattgatccaagagtaaaagaatgacattttcagtgaaaaaacatatttttaaatgctttccaatattttaggtttgccaggtttttaggtttttattaggtttttatttcaggtggctaagctggcattttcagtagttacttttgtcaaactgaacatttctgagcgattgacaaaaaattagaaaataagacatgcaatattactctaagaacaatgaaaagaattttctctggttcaatgaggcgtttcagtacttcggcttagaattttttttgctttgttataaacttggcgaatagtaccagttcatgtacaatattttagcattgtccataaatgcctgatacgtttattacgagcctatggaaatcataatccgctttgttatagttatgaaatcccagcagtcttttaatcaaagttcctcggaacacattccaaggaaacacatggtgtgtgttcagaagcattgcagataataacagctttagaaattcaaaatttgatgtggttagcctagattacaggtttcagaaacaaaggtctattttacctagtctgtgcattcaaaagaaaatttgcatttcagatgaagcacttttgattttggttgcgcgtaacagtccacaaaattttaaaattggttgtataaatacagcacgtctaaaacaaccgacaacagtttagaacagatttcgaaacagaaaagtgtgaaaatgttgttcaactatctgcgaaagccgaatccgacaaaccttttgacttctccggactcatttagatactttgagtatggaatgttttgcatgggatggcacacaccagcaacgcataagataatctactatataacatcctgtttgatttttgcttggtgtgccgtatacttgccaatcggaatcatcattagtttcaaaacggatattaacacattcacaccgaatgaactgttgacagttatgcaattatttttcaattcagtgggaatgccattcaaggttctgttcttcaatttgtatatttctggattttacaaggccaaaaagctccttagcgaaatggacaaacgttgcaccactttgaaggagcgagtggaagtgcaccaaggtgtggtccgttgcaacaaggcctacctcatttaccagttcatttataccgcgtacactatttcaacatttctatcggcggctcttagtggaaaattgccatggcgcatctataatccttttgtggattttcgagaaagtagatccagtttttggaaagctgccctcaacgagacagcacttatgctatttgctgtgactcaaaccctaatgagtgatatatatccactgctttatggtttgatcctgagagttcacctcaaacttttgcgactaagagtggagagcctgtgcacagattctggaaaaagcgatgctgaaaacgagcaagatttgattaagtgcatcaaggatcacaatctcattattgagtagctaaaaacaacattaattttaaaaacaatttatcttagtttctttattttcagctatgctgcagcaatacgaccagcggttacccgcacaattttcgttcaattcctcttgatcggaatttgccttggcctttcaatgatcaatctactcttctttgccgacatctggacaggattggccacagtggcttacatcaatggtctaatggtgcagacatttccattttgcttcgtttgtgatctactcaaaaaggattgtgaacttcttgtgtcggccatatttcattccaactggattaattcaagccgcagttacaagtcatctttgagatattttctgaagaacgcccagaaatcaattgcttttacagccggctctatttttcccatttctactggctcgaatattaaggtaagctcgtcaaagttttacaaattaaaagcatatatgtgttgtatatgtgtttttcaggtggctaagctggcattttcggtggttacttttgtcaatcaacttaacatagctgacagattgacaaagaactgaatattgcacaaagtatattcagagtaaagaatctaatagtttgtagcattgcagaaaataactttgtttgattattttcaattaattttttctttgggccaaataaaaattcctttcccagctacttctgtggtcactcttgcaagccgaattccggaagctgacaagttaaagggggattagaagcaactaccaacataagtgacctaagtacacatgcactctgcttagctctaaaatcaatttggcctaaccgcaaaaggaaacatatagataacaacaacggcttttaaattttgtgggctgtctgctggaagggaagttgcggggaaaacaagtaaataaacaagcaaacagagaggccaaaagacgctggggcagatggcaaagtcaattaaaatgcaggaaaattaattgcttaaaatacgcatagaattgatttacaaattcgccaaggacatcgtaaacaagaaatctgttttaattgcggttgcgccgagggcaaggactctagactttaaactctaagccaccccactccctcagccattcctttagcagcgagttcaaagtctagccgctggcgaaaatgttcctggctgtctttgatgtgcagcgcagggaagacggtcgtcggttaggaatcggatgtctggaactggagctggagccacggcgacaccaacaagatttgcataaaccaaaaatgggggccaaggcaaaagagccggctacgaaatgcagagcgctcatatttaatgggcaccgcagcaaaaagcctgcggaaaattaatttgcattttcccccaaacaacgtgctggcatacatttgcaattgagtttgtacatagtttcacggcgcacgacggcaagtttggcaacacaagttttcacttgcccaattcactggggcatttgaggtggatcctcgtggcggcgctaccaaacttaattctcacaaatggccaaaaacgagagcaacaacagtaggcgtagcaca

SEQ ID NO: 11651 - DNA, 1164 bp, DROSOPHILA
atgttgttcaactatctgcgaaagccgaatccgacaaaccttttgacttctccggactcatttagatactttgagtatggaatgttttgcatgggatggcacacaccagcaacgcataagataatctactatataacatcctgtttgatttttgcttggtgtgccgtatacttgccaatcggaatcatcattagtttcaaaacggatattaacacattcacaccgaatgaactgttgacagttatgcaattatttttcaattcagtgggaatgccattcaaggttctgttcttcaatttgtatatttctggattttacaaggccaaaaagctccttagcgaaatggacaaacgttgcaccactttgaaggagcgagtggaagtgcaccaaggtgtggtccgttgcaacaaggcctacctcatttaccagttcatttataccgcgtacactatttcaacatttctatcggcggctcttagtggaaaattgccatggcgcatctataatccttttgtggattttcgagaaagtagatccagtttttggaaagctgccctcaacgagacagcacttatgctatttgctgtgactcaaaccctaatgagtgatatatatccactgctttatggtttgatcctgagagttcacctcaaacttttgcgactaagagtggagagcctgtgcacagattctggaaaaagcgatgctgaaaacgagcaagatttgattaactatgctgcagcaatacgaccagcggttacccgcacaattttcgttcaattcctcttgatcggaatttgccttggcctttcaatgatcaatctactcttctttgccgacatctggacaggattggccacagtggcttacatcaatggtctaatggtgcagacatttccattttgcttcgtttgtgatctactcaaaaaggattgtgaacttcttgtgtcggccatatttcattccaactggattaattcaagccgcagttacaagtcatctttgagatattttctgaagaacgcccagaaatcaattgcttttacagccggctctatttttcccatttctactggctcgaatattaaggtggctaagctggcattttcggtggttacttttgtcaatcaacttaacatagctgacagattgacaaagaactga

SEQ ID NO: 11652 - protein, 387 aa, DROSOPHILA
MLFNYLRKPNPTNLLTSPDSFRYFEYGMFCMGWHTPATHKIIYYITSCLIFAWCAVYLPIGIIISFKTDINTFTPNELLTVMQLFFNSVGMPFKVLFFNLYISGFYKAKKLLSEMDKRCTTLKERVEVHQGVVRCNKAYLIYQFIYTAYTISTFLSAALSGKLPWRIYNPFVDFRESRSSFWKAALNETALMLFAVTQTLMSDIYPLLYGLILRVHLKLLRLRVESLCTDSGKSDAENEQDLINYAAAIRPAVTRTIFVQFLLIGICLGLSMINLLFFADIWTGLATVAYINGLMVQTFPFCFVCDLLKKDCELLVSAIFHSNWINSSRSYKSSLRYFLKNAQKSIAFTAGSIFPISTGSNIKVAKLAFSVVTFVNQLNIADRLTKN

SEQ ID NO: 11653 - DNA, 2859 bp, DROSOPHILA
actaaacgtcaaccaccggcgtcgacacccgacccacattttatatagtggctcataatattccttctgcagaaagagattaacaccaaacggcgacggtggcgtcggtggcaaaaagtttataatcatcctcgctgacagagcgaaagagacgggcgattggaaagcataggcggaggcagggagagagagagagagagtgagcggagaaaatcggaaaatcgttatgcgactactataacccaccacaaaatcgcggtcgtctctgttgttgccgggcacctcacactcgcgcatcgattccgattgcgattcaggatctgaattttttgcctggtttgtggtgcgtgcgatttttaaaaatgtttaaatccgcaatttctttctccgtgctctgtgctcttcgtccccttcgtacaccggcgaacttgtgatttgtggttaatttaaattaataatcttttaagtgtgtcatgaattaactgcaagttaaataaagtgctgcgtcgattttgcatattttataatccatttcgttgggttaataattgccaaatttattatttatatatattgacgtataattttaaagtttattgttttctgaagtgctgcgctcctaaataaatttaatgccgctaaaattgtattcgccatgaaacatcatattaaaccatcccttaaattggactactacacagcgccacctatgaaaagctttgataagcttatattcatcttgttaatctgactaccgcgtaatattttggctttgaatttccgaaaggcttaacgattattttgctttaattaaatttaaggaatacctgacagacgtttgcaatttgttaaaccatttcgggttaaaacacaaaacagatgctccacctataaaaagctttgctaacctattaaatacataaaattccgacagatggcgctaccgaacagctgagcatacgagtattcacccctattttttagttttcttatgcaaccctgcatcataataactttgatttgcaaggactaccctaaaagattacacatcccttcaacctttttttcacagctggaaaagtcccataaaatacaaaaaaatggatccctcgaatcttgcttttggttttcccggtctccccaaccacggacacatgccaatacctcctacagccaatatgcttggtggccagcatccagcacccaccgccagcccaccacaaagcgtccccggccgtcggacgccacttggatcggttggtctgggtggtttctatgcccagggaatgggcatgtcccagcagccaccgacggatgagaacaaaccagggcccagtgctccggagaagccattgagtcccacggccgccgccatcgcagccattgccatcagtggtggcaccaccacggtggccgtgtccagtggtggcgccagcggaagtggctccaacagtggcaagcagaaaaaccgccagggaaagacggtaaggctgaacataaatgcccgggaacgacgaaggatgcacgatttgaatgatgcccttgatgagctgagaagtgtgattccctatgcccattcgccttctgtgcgaaagctgtcgaaaatagccaccttgctgctggctaagaactacattctgatgcagcaaaatgctctcgaggagttgagaaggtaacgtagttcattaccacgctcaataggaattattaacatatatgcttttacttttagacttttggcctatatacaaagcaccacgggagcagcgccactggatttgggtgcatttccggcggctgccaagttgcaggctcttcttcaaggacctcacaacgaaccaccgactagcagcagttaaataggagtgggggccaccataaactatggttcaactgataagcaatccattaatgagcaatacttttaagtcaattggaaagcaaatgccaaatacttgtgtactagtcagacgaaaggaggttgataaggagcctcttatcagagcagccaagtgaaaatctgttcagtgatatttatttttgtcataagcatttcttatttatgcatttacccaatgtcaaccaatatgtgtaagatgaatattaccgaataaagtattattgaagtagaaagtatgtcgttggaaaagggtttggtcatttaggtttacccatcagcactgatagaagcctgtcatttttcagaatcatcaaacaaacaaacaaaataagagtttcaaatactcaaacacgcccaacccaaccaaccatttatagtcatcagataacaaacatcaaagagcacaatcaaatttaaaataatataatcttagatccgtttcaagtcttggcaaaaatatttaacatataaatatacatacatagttgtctgtatggtttttgatgattaagcaaaagccgtttagcggaattcgaaataagcggattacaactagaaaactagtcgatgaatactctaaaaatatatatatatatagacatatacgacatggaggacggcggcgaaggcgatcggtgcaaaatcggctggcattatattattccggtatgcccagggacaaaaccttgtttttgccagtgcgaaaaatgtgctgcttggtgggcagttgaccgatcaagaaatccttcatcatttcgatggcatcccccgagtgtcctgtgccatggaaggcgatggtggcatctcgccctgcgtgatccataatgacgtcgtcgccgccgggatgatcccttagaaagtgtgtcacatcgtagaccctatcgtagattaccacccagcaatcgtcgaagctgtcgtgctgggccacctcctccaatgcgatctccggcagatcttcc

SEQ ID NO: 11654 - DNA, 799 bp, DROSOPHILA
tgcatcataataactttgatttgcaaggactaccctaaaagattacacatcccttcaacctttttttcacagctggaaaagtcccataaaatacaaaaaaatggatccctcgaatcttgcttttggttttcccggtctccccaaccacggacacatgccaatacctcctacagccaatatgcttggtggccagcatccagcacccaccgccagcccaccacaaagcgtccccggccgtcggacgccacttggatcggttggtctgggtggtttctatgcccagggaatgggcatgtcccagcagccaccgacggatgagaacaaaccagggcccagtgctccggagaagccattgagtcccacggccgccgccatcgcagccattgccatcagtggtggcaccaccacggtggccgtgtccagtggtggcgccagcggaagtggctccaacagtggcaagcagaaaaaccgccagggaaagacggtaaggctgaacataaatgcccgggaacgacgaaggatgcacgatttgaatgatgcccttgatgagctgagaagtgtgattccctatgcccattcgccttctgtgcgaaagctgtcgaaaatagccaccttgctgctggctaagaactacattctgatgcagcaaaatgctctcgaggagttgagaagacttttggcctatatacaaagcaccacgggagcagcgccactggatttgggtgcatttccggcggctgccaagttgcaggctcttcttcaaggacctcacaacgaaccaccgactagcagcagttaa

SEQ ID NO: 11655 - protein, 232 aa, DROSOPHILA
MDPSNLAFGFPGLPNHGHMPIPPTANMLGGQHPAPTASPPQSVPGRRTPLGSVGLGGFYAQGMGMSQQPPTDENKPGPSAPEKPLSPTAAAIAAIAISGGTTTVAVSSGGASGSGSNSGKQKNRQGKTVRLNINARERRRMHDLNDALDELRSVIPYAHSPSVRKLSKIATLLLAKNYILMQQNALEELRRLLAYIQSTTGAAPLDLGAFPAAAKLQALLQGPHNEPPTSSS

SEQ ID NO: 11656 - DNA, 6975 bp, DROSOPHILA
cacatccatgtgggcatgtcagccccagctgcgggcacagatgtcgaccacagaccaatgcatgacggtgacggctgcctgtgatcctgctggcgatggtgatactcccccgggactggcctcaggaaccccgacagcgctctgcgatttgccagctccctcctccatgcccatgacctcatcccgggtatgcccctgctgctccgtcgtttggcaggccgcgtacaacaactatgcggtcacgtagtactcccgctgcctcttctggcacttctcgcgcgcaatgtagcacaaggcgatcgtgatcaggagcactatggtcacgcccatgccgatgcttacccacatgatctcctcgttgatgcccacataggagcgtcctggagaaaacataacataacatacaataaatcaatgttaggggaataatccacatacagaacccaccattgtagtagtgattggagtagccggccttgccagccactcgacccgctggcattttgcgaaaagttcgggtcaagtaataaataaatgtgcgcgccctttatttatgtttggctacttggctcgctggccagcaaagtttcaacgggctatttgttgctattgcagctggttgggatattttattgggtttctccttctgttcttcaatttctttgcccttgtttaattggaatttatgtgtgcaggcgcactcttcgcttctcaaggtctttcggtggcgccagcaggacctgaaattagcgaagagaaaacaaaattagagtaaaatcattgctgaagttgatattttgtcgcgttttgagtgccattcaaatttgcgcgggctgtagtgttttgcagcactgctctgcccgttttacatcactgctgagaaagagaaagagcactgctgtcagctgtttttaagtaaataaacatattagttttcgacgatttgattgttgcttatttgtggagtttcaggtcaaaattaattgttggaaattgtaagatggatagtttggagtctaaggaactggcaagcatcagcaaagtgatggaaaacaatgataaagcgagcgaaaatgacaaaatcaccggcattaccaccgaagaagaagaagaagttgttcccgtgaagaagaagagaactgaagagggagggggtgagcttaaggaggtagcatgcgagaaagagacagtgcaacgcgaaaagtgccaagacaagaacacctgtagatgctgtaagtccatctctttctctgacacatatatcagtctctattgcactatttgttttttagggaaaagtgaactttcattttattgaaataaatatattcaactattatttactacttttaaagtagtaaaaaaaaaattgaatagagtaagcgacatgggtttttgttagttcataataacaaccttatctttaaagctctctattactcattctataatttgagtagtgataatgtttctgtttgttaaatacgttttcttggtatgtacatagatgtcattctataaatagtgtactttagagatttagagatcagtaaaactagaaaatttgctaagattaccgaagttatcattcgctttaaagttgaacgaacataagcaatagcactctttgttcatcatgaatcctttaagcgtgtcccttttatctgaccaaggatagtaatagacttttggatcatttcgtatgcagggattgttcctggccagaatccatatcctggcatccgtgatagattaaagtaacgcccaggcacaaattgcttgaaaacgtcacgcctgtcgtccttttccctgccatatctgctgcagttgcaaaaagtttcgcccaagcacactgagaaaaacgaattgcaccgcatccataagccttagaaataaattcaaggtgtaaaacaacagcactgcgcaccgaaatgagcccttgtggccatggttcatttgaaagaaacctctaactggctaaattttctcgcagtgcagcagcaaacacaacaggaagcagcgcatccttccgtttccatgctgcacattcagaaactgcaactgcaatcgaaatgagtgcgaaggtcgcttttgaccaggcccaaaccgaaaacccgttagtgaagtggctttaactcggctttcgacttgaataattcatgtccaaaaaacggcatactatgccacgcatcgcaatccaatataatgccattttcagggctcacgtaccaaaaatcgtgcaacacaaaagttgggagttgggagttttttggaccgccagcgataagggcgataactgaatcatttgttttcgcttttccccccggaaaattgcgaactttaaaggaaactcctgcctgcgtggtaatgaaaataaagcgttcacccgttatttaaccgcgcattaagtgcagttgacgttcccggcggcgttggctaattgaaaagcgccaactgcagccagcatgggttaacttaaccccacactaacccctcgactcatgattaaatggctgtctggggtatttatagaccggcaatcctttctggttagcaactgctgcacaatcccattaagattgcttatttccacaactatctcttgcttttaagtagcagcaatacatttgtataaatatagatagattactcgttaatattgtgaggcatataacaggataattgctcacggcatgtatcttagagttctcacactctctcttaggttaagatatctaatttcccccactatctcagctaaactgaaccttttatattattcatgacactggatactattatttaattggagcaagaatttgcataacagctgcacttaatcgccattgaaattatctggcggaaataataaccagctcgctagtttgaccgtgacaaattcagcgggtcaagtggcgaatgcgaaaattgaaaaactttaagtgcttatgcggaaaatgcagaagaaagaaattcagctcgttctacgagcgttgtaaaaatgctactaaacgccggtaattgggttataaaattcacttattcacgtttaatgggtattcgaatatggaaagtataacgctttttattatggagaattacagaatttattagctaagaatgttccataaaatacatataccccttgaaggcaataaataagtcgctattaaggtacttaaatacatgcaagttttagtttgtctggtttttgaattagagaactgttcaacaacccaaagtgttataaactaggcaaactgttttttttccagtggggctcaggcaacccattgccatttcatggcacaaatattcgagatataaaaacataagctagagattagctagtagcgaaccgctgtcccattctccattgtccactgagccctcgagcggttcgcatccgcgcaaagatcttagaagtaatgtctttacgacgtggactttacatatcccccgcccttgcagcccaactggaggcggagcctatcaaggataaccgccagctgctggagtttcgggtgcgaagccggaacatcgactggcgcgagtacgtcctgccactggacaccagcgttcgaacgacacccgtctatctggaccgccaggcggacttcgtgggcagcacccggcgccaggtgaccgaggataatcgccgggaactgctcgtctgccacgacatgatgggcaactacctcgaggatcggtgagtccttaaactgagaagtttaacaacaaaaggagggggtacctgggatgcaatccctttacgaatttacctaacaaaaagcccatgtcaggtcaatgcaaatgtattgcaacttactaattttcaagccacttgatgcaatcgaagttgtactaatgaatatctgccgcaaaaacaggcgaagctatgcggtttcattaaacttggaagccagaggggtccgaaaataaagttttttttaatggttttttgtgttttgccaggcactttcacagctcccagaagtacgacgactatcgattcgtgcactggtcagccgtggattacttctgttacttcagccacgactacgtgaccattccgccctgtggttggctgaatgccgcccatcgccacggagttccggtggtgggcacgttcatcgtggaggctaccgcacggctggacgagtttctggccagcgaagagagtgtcgagagcaccgtggaggctctaacccgtctctgtgagcacttcggcttcgagggatggctggtcaacgtggaggtgactgttcccctggccaaaatgcccagactatagtgagtactcatggacagtgcatcctaaaaaaaagggtccttgttacccctttaaaattcgcacacaagctgttagctagtaaaagttttagaatgcgagtgtttacatgaaaaatggctgtgtatcagcgcctcttgcaaccaattcgccataggagcaaactttggccttgtatcagctgtccaatttatcaacagcttctgcaattcaatctatcatgaactgtcaaaagcaaaacgagcttttctattttcacactacaatcaagttgacttattgcactttgcacaagtcaatggaacgcataagttcgattgcacataagataacatccgcatggaatttaaaaaattcggaataatagtgaagagcatctgaaaagcaggcaattcttacttgatatataaagtgaatttggcgccgaaactaatcctaacgtaatggctgtaaccttgagatcgattcatgctaatccctttatggcgtttccattttccacagccgctttgtccggcaactgacggctgccacggagtcacgtgtgccacatggtcgtgtcttttggtacgacagcgttacggacgacggccaactccggtggcagaacgagctcaactcccgcaacgcgaagtttttccggcacagccatggaacgctcataaactacgcctgggacgagggccatctggagcggagtgctcagcaggtcaggagggagcaatcgccccggcatcgcgtctttatgggcctggatgtgttcggaagaagtcgcaagggcggcttccatagttgggagaccatggagctcattgcaaagaacggcttctcggcgggcatctttgcacccggctggaccttcgaaaccctcaatcgctttgggtacaacatcaaaaatccacgcggggatgaccaggtgaacgcgtcctttttggccagaaacgaggcgtggtggtctcgcatttggcccacattggccacgcatccgtacacttcgctgcccttcttcacggacttttgcgtgggttccggccgggcgaaattcgagcgaggttggcggattttgggcgaggatagccccttcttcaatctatcgcggcaatcgctgcagccgtcggtgccgctgggcaggaatgcaatgcatcatttcgacgaggcctactcgggcggctgctccctactggtgaccaactacgagcgggctttccggctttttgtcaccgactttgaattggaccgcggcgttttgctccttaggtatgtcttcaaaatcgacggtgatgccgtcggcaccatgtttgacttgctagtgcgagtgacaccgctccgtaggaatgaccaggacttgcacctcttctgcggcgactatgaaggctccatcgttgctccacagcgctgctacctatcgcctcacgaaagcgacctgcccagcggtcttttccgcttgcaccacgacagcagctccttggcagcgggctggcagatgcgtgactatctggtcaagttcgatggacccgtcagggttcaggatatcggagttaagtaccagcggccgtcggaatcgagcacggatgccaagttgggtttcgtgtatgtggacggcctgacgctggaggatttaaaggacacttggacagatattccagtctacagcaaacacatgtggaatgagcagcgagcttgaagcccaagttgcttgtgtaaataagaacttaatttttttatacattataaaattgtgcaattaataactattaattttcacgctgttgcagtgttcaaagaaataataaattaaacgatatcgttgagcatccaactataaaacttgtaagacttggcatcacatttaagcgcaaatatcaaactcattttgatgaagatgtttaaggctgctccatagtgaaattggttcggtatccataaaaaaaaccctgtttaagtaatctttacccatttttcggtggcctctgccattggcagtcatttatcaaggaccattctggcatttgtgacgagcttggcggctgactcacgcatcctggaccaccgttttgccaaaaattgacttcggtcgcttagacagcgctcctggcacttggccacatcactcaactacacttcacttcacttggctccgctccagtggccctcaaactgggtttggctggctgccaagctgtctggcccttaaaacgtgactttgaaactgtgtccttggccgatttatgccgaatttttgtggtagcatttaaaatagtttgctaaatctgatttgtatgatttaaacctaattaagtgtagactgtcgttctgcattatgctaaatattaatcacgttctgccagttgtatgcaatgttaatcagaccaattaggatttttgtctggcttgtattgctgcataaataattatctaattattattgtagagctctaaataaataatatccaatgtaaacggagtttaatctaaaatttatgtttactttgacgcagaacgtgaccaactgaccgcaaaatttgcatttaaatttttagcaattttagctccaacaccttctctgatacttcccattcccgcacaccaccccttactccttacccactagccttggctgagtaattttttgacatttttaatgcagattttctggcggcacacactgttgacatcatttccgt

SEQ ID NO: 11657 - DNA, 1968 bp, DROSOPHILA
atggatagtttggagtctaaggaactggcaagcatcagcaaagtgatggaaaacaatgataaagcgagcgaaaatgacaaaatcaccggcattaccaccgaagaagaagaagaagttgttcccgtgaagaagaagagaactgaagagggagggggtgagcttaaggaggtagcatgcgagaaagagacagtgcaacgcgaaaagtgccaagacaagaacacctgtagatgctcccaactggaggcggagcctatcaaggataaccgccagctgctggagtttcgggtgcgaagccggaacatcgactggcgcgagtacgtcctgccactggacaccagcgttcgaacgacacccgtctatctggaccgccaggcggacttcgtgggcagcacccggcgccaggtgaccgaggataatcgccgggaactgctcgtctgccacgacatgatgggcaactacctcgaggatcggcactttcacagctcccagaagtacgacgactatcgattcgtgcactggtcagccgtggattacttctgttacttcagccacgactacgtgaccattccgccctgtggttggctgaatgccgcccatcgccacggagttccggtggtgggcacgttcatcgtggaggctaccgcacggctggacgagtttctggccagcgaagagagtgtcgagagcaccgtggaggctctaacccgtctctgtgagcacttcggcttcgagggatggctggtcaacgtggaggtgactgttcccctggccaaaatgcccagactataccgctttgtccggcaactgacggctgccacggagtcacgtgtgccacatggtcgtgtcttttggtacgacagcgttacggacgacggccaactccggtggcagaacgagctcaactcccgcaacgcgaagtttttccggcacagccatggaacgctcataaactacgcctgggacgagggccatctggagcggagtgctcagcaggtcaggagggagcaatcgccccggcatcgcgtctttatgggcctggatgtgttcggaagaagtcgcaagggcggcttccatagttgggagaccatggagctcattgcaaagaacggcttctcggcgggcatctttgcacccggctggaccttcgaaaccctcaatcgctttgggtacaacatcaaaaatccacgcggggatgaccaggtgaacgcgtcctttttggccagaaacgaggcgtggtggtctcgcatttggcccacattggccacgcatccgtacacttcgctgcccttcttcacggacttttgcgtgggttccggccgggcgaaattcgagcgaggttggcggattttgggcgaggatagccccttcttcaatctatcgcggcaatcgctgcagccgtcggtgccgctgggcaggaatgcaatgcatcatttcgacgaggcctactcgggcggctgctccctactggtgaccaactacgagcgggctttccggctttttgtcaccgactttgaattggaccgcggcgttttgctccttaggtatgtcttcaaaatcgacggtgatgccgtcggcaccatgtttgacttgctagtgcgagtgacaccgctccgtaggaatgaccaggacttgcacctcttctgcggcgactatgaaggctccatcgttgctccacagcgctgctacctatcgcctcacgaaagcgacctgcccagcggtcttttccgcttgcaccacgacagcagctccttggcagcgggctggcagatgcgtgactatctggtcaagttcgatggacccgtcagggttcaggatatcggagttaagtaccagcggccgtcggaatcgagcacggatgccaagttgggtttcgtgtatgtggacggcctgacgctggaggatttaaaggacacttggacagatattccagtctacagcaaacacatgtggaatgagcagcgagcttga

SEQ ID NO: 11658 - protein, 655 aa, DROSOPHILA
MDSLESKELASISKVMENNDKASENDKITGITTEEEEEVVPVKKKRTEEGGGELKEVACEKETVQREKCQDKNTCRCSQLEAEPIKDNRQLLEFRVRSRNIDWREYVLPLDTSVRTTPVYLDRQADFVGSTRRQVTEDNRRELLVCHDMMGNYLEDRHFHSSQKYDDYRFVHWSAVDYFCYFSHDYVTIPPCGWLNAAHRHGVPVVGTFIVEATARLDEFLASEESVESTVEALTRLCEHFGFEGWLVNVEVTVPLAKMPRLYRFVRQLTAATESRVPHGRVFWYDSVTDDGQLRWQNELNSRNAKFFRHSHGTLINYAWDEGHLERSAQQVRREQSPRHRVFMGLDVFGRSRKGGFHSWETMELIAKNGFSAGIFAPGWTFETLNRFGYNIKNPRGDDQVNASFLARNEAWWSRIWPTLATHPYTSLPFFTDFCVGSGRAKFERGWRILGEDSPFFNLSRQSLQPSVPLGRNAMHHFDEAYSGGCSLLVTNYERAFRLFVTDFELDRGVLLLRYVFKIDGDAVGTMFDLLVRVTPLRRNDQDLHLFCGDYEGSIVAPQRCYLSPHESDLPSGLFRLHHDSSSLAAGWQMRDYLVKFDGPVRVQDIGVKYQRPSESSTDAKLGFVYVDGLTLEDLKDTWTDIPVYSKHMWNEQRA

SEQ ID NO: 11659 - DNA, 2967 bp, DROSOPHILA
tgaactccgccgggtcgaactcctccagggtttccaaacgtaaagtggccagctctgaccagcagcagggaaggtccttttcggccaacattaccactggcagtcgggcatccgtcgctgcctggactcccttaggagtgccatcgaaaaccagggtgcaatctggtccggcatctcccaaccgtctcatggcaattaaatagacatccggttccggctttggagcttttaagtccgcatcatcggcgcatatcaccgatgaaaaattttggaaaaagtcctccctatcccgaatcttagtgcaatacattgattcggagcacgaggtgatcagccccagtcccatacagcacctccccaaatgggtgaccaaacgctctactccgggcatcagggtgggattggcaatcaagtcggaagtacgctcatttagctgaaagcgaaaggactcccagctcacggggagatcgcatttccggcagatcaactcggccatctcagccgtttccatgggaccgctttttatcaggaccgcttcggggatgatcttgttataactcgcagccagctcaattacggccctcttatagacatgacgcgtgtctatatgggaaatcaggtcttaatttaatttggaaaatgtacgaagggtatcttaccgaaaacggcgctctccagatcgaagatgcaatagctaatacccggactacagcacatcggtggacaaagtgagcatcctggcggagctttgcaagacttacagcaagcactgcacatttttgagccggactttacaattttttaaaactcaaattttgttctacgaattttggccgaacactgacatgtgccgcattgaaaacaaagttaaccaattatgtaatctacagtcgcacatctttgctaagaaatcgaagagtaagctgaatttgcaagaacgacatatttttattaacttataaaatatttgatatcttataaatcatttctaaaacgtgacttattctcttaaatttaaaatggatggtagggcggctggtggtggtggttcggcgggttcctcctcctctgcctccgcctcctccgcggcagctgcttcggccgctcttgcccggattacggtcaatctttgactgtatctcgtgcgccgacgactcgatcgcctcttgggcgcagggtccgtaaatgggggcaaattatacatctccggctcgaagtcgtccaggtactcgaagcgcaaggcggccaattcggaccaacagcagggaaggtccttttcggccaacattatgacgggcagtcgagcatcgctcgccgcctgaactcctttgggagtgccatcgaaaaccagggtgcaatcaggtccagcatcccctagcctcgacatggcaatcaggtagacgtcgggctcgggtttgggtgcccgcaactccggatcatccgcacagaccacggtggagaagttctcaaagaagtcctcccggccgcggatcttcgagcagtagttggcctcgttgctggaggtgatcaagcccaattccatgcagctattgcgcaggtgcggaacaagccgctcaatcccatccataaacgggggatttgcaatcaaatgggaggttcgctcgttaagttcataccgaaacgattcccaactcatcggaatatcgagcttccggcaaaaaagttcagacatctctgatatcgtcataggtccactttggacatgtaaaatgtctggtatcctcttatcgtaacaacggaccagttccttgagagccttccggtagacgtggcgagtatctgcggaagacagtgctttataaaggcatttttccagttttaagctcaccaaagacagcactttctagatcgaaaatgcagtagctgatacaaggactgcagcactttggggaacagccctcacaatctggttgagatttgcatgtcctgcagccaaaagtgcacatcttccttttctaccagaagaattctaggactggagaaattttcagcgaatttatatcaacattatctgtatcaaggtctaaaagtatgaaaatttacactagaaacaatggttcctatatttgtatttattgacatggtgtaacatttgatttcaaactacatgatacatatatctcacaaaggtggcagtccaaaatattgtggcttgaatccttccagcgatcgcagtctcaaagtggcgtgagcacttgctcgaaaggataccagaggatcgggcacgaggaccacctgcatgccagcggacagagcagcctccataccaaccaaagaggactcgaagaccagacacttgctcggctccggcgattcctcaaaacgagaggcggtggtgaggaaaacatccggagcgggtttccccctcttgacttcttcgtcggagccgctcaaaaccacgtggtggaagacatcgaagggcctggagtgccgacgcgtctttatcctaaacgaatcccgacagcagccacttgcgatagccatgggaatgttgaacgctttgaggtgatgcagcagacgctccacaccgggcatcagtcgaatgaatcccattttgccacgacactgaagttcctgctggttctcaaactccgtcatgctgaagggcagattgaaggtgtttacgattagagcagcctgctcggaatctggctttcccatgcaccgcatcttcagatcgaagctatacgtgtgaccatagggatccagaatcctttgaacggtttccgttctcaaacgctcgctgtctatcagcagaccatcgagttcgaaaatgcaatgggtaactggctgaaaagagcactgcctagaacccgcctcttccgccgacattttggttcacttgaattttgaattattttttattttatagatagaatactaattttgacggatcaatttagagtgctagggattagccaaactcgaatttggagcaggtgtcaa

SEQ ID NO: 11660 - DNA, 918 bp, DROSOPHILA
atgtgcacttttggctgcaggacatgcaaatctcaaccagattgtgagggctgttccccaaagtgctgcagtccttgtatcagctactgcattttcgatctagaaagtgctgtctttgatactcgccacgtctaccggaaggctctcaaggaactggtccgttgttacgataagaggataccagacattttacatgtccaaagtggacctatgacgatatcagagatgtctgaacttttttgccggaagctcgatattccgatgagttgggaatcgtttcggtatgaacttaacgagcgaacctcccatttgattgcaaatcccccgtttatggatgggattgagcggcttgttccgcacctgcgcaatagctgcatggaattgggcttgatcacctccagcaacgaggccaactactgctcgaagatccgcggccgggaggacttctttgagaacttctccaccgtggtctgtgcggatgatccggagttgcgggcacccaaacccgagcccgacgtctacctgattgccatgtcgaggctaggggatgctggacctgattgcaccctggttttcgatggcactcccaaaggagttcaggcggcgagcgatgctcgactgcccgtcataatgttggccgaaaaggaccttccctgctgttggtccgaattggccgccttgcgcttcgagtacctggacgacttcgagccggagatgtataatttgcccccatttacggaccctgcgcccaagaggcgatcgagtcgtcggcgcacgagatacagtcaaagattgaccgtaatccgggcaagagcggccgaagcagctgccgcggaggaggcggaggcagaggaggaggaacccgccgaaccaccaccaccagccgccctaccatccattttaaatttaagagaataa

SEQ ID NO: 11661 - protein, 305 aa, DROSOPHILA
MCTFGCRTCKSQPDCEGCSPKCCSPCISYCIFDLESAVFDTRHVYRKALKELVRCYDKRIPDILHVQSGPMTISEMSELFCRKLDIPMSWESFRYELNERTSHLIANPPFMDGIERLVPHLRNSCMELGLITSSNEANYCSKIRGREDFFENFSTVVCADDPELRAPKPEPDVYLIAMSRLGDAGPDCTLVFDGTPKGVQAASDARLPVIMLAEKDLPCCWSELAALRFEYLDDFEPEMYNLPPFTDPAPKRRSSRRRTRYSQRLTVIRARAAEAAAAEEAEAEEEEPAEPPPPAALPSILNLRE

SEQ ID NO: 11662 - DNA, 2896 bp, DROSOPHILA
gcaagttggcatctgcaactaggcaaacatattgcatgtctacacccttgtagacaccgacagacacacacacgctggtgcactgtggcccacactgcgtatgcgtaatgtgttgaataattaaattgtcaaacaattggcttttggcagagagacagagcaaagatgacggcaagaaaatgctgaacgcaaccgggatttattgtcttgcagaatgcgaatcctgtgaatgcggagaatggaaaacgcttaatcatctttaattgaaagcacttgatgagctagtcaaatgccaatgaacaacgaacggtgaacaatgggaaaattcagacaatcggcattatttataatgctctttaatctccgtctgaatttgcatttgcctttttttctatgagtgtgtgctggtaaaatcattgctcgctgataggattcaatttccttgtcatcccgaaaacgttttcaattaaactgtatttattattcagctgatagagcaaacaattcccttttcaatagttaataataatgctaagtcgatttatcgcagctcacagttttatggatcaatttcgcttcaagccaaagtatcaagaaaaaggcttcaattaattggcacttcattaacaccaaataataaacacatgcatttatcaaatctttcacatcgactgaatttaatatgttaagcttttaagttaaaacttctcgcttatatctactgaagtgcgaattgcaaaagcttttagacagattgcctggatttatatttaaccgcaaatctgctgagttgttaactacgtatgaattggcttgaaaggtttaaatacctgaggaatcaggaagaggcaatttaaagccagggcttatgacttgattacttttactagttgagaacgcagattctacaattgcatttatcattgattttacaaaatgttctgtaaaatgtttaaaatacttttcccatccaatacaataaaatccaggataattccaattatgcaacctcctgtccttcgccttcctcctcctcaccctcatcagcttctgaatccgcagcagctttctttagtgcagcggaaccccgctgacttcccgcagatttttgggagctacgatgacttgaagccttcggtttttttggaggcggttccgtgcagctgtacggcggcatgttgaactccgccgggtcgaactcctccagggtttccaaacgtaaagtggccagctctgaccagcagcagggaaggtccttttcggccaacattaccactggcagtcgggcatccgtcgctgcctggactcccttaggagtgccatcgaaaaccagggtgcaatctggtccggcatctcccaaccgtctcatggcaattaaatagacatccggttccggctttggagcttttaagtccgcatcatcggcgcatatcaccgatgaaaaattttggaaaaagtcctccctatcccgaatcttagtgcaatacattgattcggagcacgaggtgatcagccccagtcccatacagcacctccccaaatgggtgaccaaacgctctactccgggcatcagggtgggattggcaatcaagtcggaagtacgctcatttagctgaaagcgaaaggactcccagctcacggggagatcgcatttccggcagatcaactcggccatctcagccgtttccatgggaccgctttttatcaggaccgcttcggggatgatcttgttataactcgcagccagctcaattacggccctcttatagacatgacgcgtgtctatatgggaaatcaggtcttaatttaatttggaaaatgtacgaagggtatcttaccgaaaacggcgctctccagatcgaagatgcaatagctaatacccggactacagcacatcggtggacaaagtgagcatcctggcggagctttgcaagacttacagcaagcactgcacatttttgagccggactttacaattttttaaaactcaaattttgttctacgaattttggccgaacactgacatgtgccgcattgaaaacaaagttaaccaattatgtaatctacagtcgcacatctttgctaagaaatcgaagagtaagctgaatttgcaagaacgacatatttttattaacttataaaatatttgatatcttataaatcatttctaaaacgtgacttattctcttaaatttaaaatggatggtagggcggctggtggtggtggttcggcgggttcctcctcctctgcctccgcctcctccgcggcagctgcttcggccgctcttgcccggattacggtcaatctttgactgtatctcgtgcgccgacgactcgatcgcctcttgggcgcagggtccgtaaatgggggcaaattatacatctccggctcgaagtcgtccaggtactcgaagcgcaaggcggccaattcggaccaacagcagggaaggtccttttcggccaacattatgacgggcagtcgagcatcgctcgccgcctgaactcctttgggagtgccatcgaaaaccagggtgcaatcaggtccagcatcccctagcctcgacatggcaatcaggtagacgtcgggctcgggtttgggtgcccgcaactccggatcatccgcacagaccacggtggagaagttctcaaagaagtcctcccggccgcggatcttcgagcagtagttggcctcgttgctggaggtgatcaagcccaattccatgcagctattgcgcaggtgcggaacaagccgctcaatcccatccataaacgggggatttgcaatcaaatgggaggttcgctcgttaagttcataccgaaacgattcccaactcatcggaatatcgagcttccggcaaaaaagttcagacatctctgatatcgtcataggtccact

SEQ ID NO: 11663 - DNA, 840 bp, DROSOPHILA
atgtgctgtagtccgggtattagctattgcatcttcgatctggagagcgccgttttcgacacgcgtcatgtctataagagggccgtaattgagctggctgcgagttataacaagatcatccccgaagcggtcctgataaaaagcggtcccatggaaacggctgagatggccgagttgatctgccggaaatgcgatctccccgtgagctgggagtcctttcgctttcagctaaatgagcgtacttccgacttgattgccaatcccaccctgatgcccggagtagagcgtttggtcacccatttggggaggtgctgtatgggactggggctgatcacctcgtgctccgaatcaatgtattgcactaagattcgggatagggaggactttttccaaaatttttcatcggtgatatgcgccgatgatgcggacttaaaagctccaaagccggaaccggatgtctatttaattgccatgagacggttgggagatgccggaccagattgcaccctggttttcgatggcactcctaagggagtccaggcagcgacggatgcccgactgccagtggtaatgttggccgaaaaggaccttccctgctgctggtcagagctggccactttacgtttggaaaccctggaggagttcgacccggcggagttcaacatgccgccgtacagctgcacggaaccgcctccaaaaaaaccgaaggcttcaagtcatcgtagctcccaaaaatctgcgggaagtcagcggggttccgctgcactaaagaaagctgctgcggattcagaagctgatgagggtgaggaggaggaaggcgaaggacaggaggttgcataa

SEQ ID NO: 11664 - protein, 279 aa, DROSOPHILA
MCCSPGISYCIFDLESAVFDTRHVYKRAVIELAASYNKIIPEAVLIKSGPMETAEMAELICRKCDLPVSWESFRFQLNERTSDLIANPTLMPGVERLVTHLGRCCMGLGLITSCSESMYCTKIRDREDFFQNFSSVICADDADLKAPKPEPDVYLIAMRRLGDAGPDCTLVFDGTPKGVQAATDARLPVVMLAEKDLPCCWSELATLRLETLEEFDPAEFNMPPYSCTEPPPKKPKASSHRSSQKSAGSQRGSAALKKAAADSEADEGEEEEGEGQEVA

SEQ ID NO: 11665 - DNA, 4050 bp, DROSOPHILA
cacggcgggtatgtggaaccgcatctccagtagacccacgggcgcatcgtcgttttggtggaactccagggtgacctcgttcttgccggtcacgcactgcgaaacgtgcgacagcggcacctcgaagatggtcttcgactccttgtcgaagctcaggacggagcccatgaagcgggcggtgccccagttccagcccttgacgcacatctccttctcgaccatctcctgcgagtaggcagccttgataaacttgcccagcttctcgtgctcgctgtcgcggaatccggtgaagcggtggagcacgccgcctttggtgaacaccctcagtccccaggtgcccacgaacttctgcgaattgatcaggtctatgtcctctgccgagatctgctccaccttgccggtcttggtgttcttgaagatgatgttctgctcggtcatctttaggcgtccggaacacttttttgcgcgcagggaaatggaaaacctcggtcatgcgaaatgtgacaaaatacgccggcttttttgcgactcaccaagactccgcgcacttcggcgtttatgtcgttgtactccagagagtctgtcatcctgcacttcttcctctccagtaacaagataatagatcaactatgtattacgccgccttgcgaaattgtcaccaatttacaataattccggcagacacaaaacaacactgcgcgcctaattttaggttagacgccagtcagctatattagagtgaccgtatgtgtgtttagtatttttgagtgcactattcttaaattgcaatcgatataaactcttaatattccaatgcagtttcctttattgtttatatatatcttgtttgcaatacatgaacaatatatgagtcattattaaattgaaaaattttaatgggcaagccagagcttatttaaagaccataacaattcgctcgatcttttaaaataccaaattgacagtccgaatataaacggtcacttaattcacttgtttacaaaatatttaccgcatattttcagagaaatatagttttaattaaaaatttgaaaatccacttagcgtggggccttaaaactatgcaacgcggtaaaatttccttcgggaaaatcaaactgaatgtaaacgtacctcctgcggagccaagatccaacgaaaccgaggcggaagatgcaaaggagtccactgaagccagcggaaatggcggaggattcaagaaaatggacaaggagcagatgattcggcagatcgaggacgtggccgaagatctggagagccagcacctcaaggaagtgatgggcatcagtggctttggtcgcaaggcggccaaggtgttcgacatcaacgagcagatagaaaaggcgagagttacccgcccgggaatggacaaaaaaagggaggagtccaagccgaaggaggatgaccagaaagacgaggaagaggaggacgtaataggtcccctaccaccagctgtgaccacagacaaggagaaagccacgaaggaatcgtccaaagacgaagactccgatgacgatgattattcgtccgatgaagattcagatgacgaacaaagccttgctaagcgcataccctacacacacgaggtgcagatgcagcacggttcccgcgctgtccttgccctggctggcgatccctcgggtgcccgcttggtctctggttccatagactacgatatgtgcttctgggatttcgccggcatggactcgagcatgcgtagcttccggcaactgcagccgtgcgagaaccatcccatacgttctctccagtactccgtgaccggcgacatgatcctggtcatctccggaaacgcccaggccaaggtcctcgaccgcgatggattcgagaaactggagtgctgcaagggcgaccagtatatctcggacatgtcgcgcaccaagggccacgtggcacagttgacctccggctgctggcatccatttaacagggagcagttcctgaccgcagctctcgacggtactctgcgcatctggcagggattgaagtccaaggaacagttgcaggtgatcaagacaagggcgcagggaggcctccgcaccaacgcagcatcatgcaactttaacagggacgccacactcatagcagcgggctgcgtggatggttccattcagacgtgggacacgcgcaagatgtttgtgaacaccacgcactgcgtcagggatgcgcatcagaagggttcggagatcacctccattgtgttctcgtacatgggtcagcagttggccactcgcagcaacgacgagaccatgaagctttgggatctgcggcagttcaaacagccgctgcatacctggacaaacctgttctcccgctacgacacaacagattgctgctttagtccagatgaccgtctgctagtcaccggagaatcgcttccgaagggccaggccgaagcgaacctgtatttctacagcactaagagctacgaggaagtgcagcggattcccgtgtccaacgcgcacgtggtgaaaacgctgtggcacccaaagctcaaccaactgttcgtgagctgtggcaatggaaccattaagtgctattacgatgagcaccgcagcatccggggcgccaagctgtgcgtagtgaagacgcatcgcaagaggcagcccatggagatggtgggagtctcccagatcattacgccgcacgccctgccattgttcaggcaggaaaagtcccgtacctcgcgtaagcggatggagaaggcccgtatggatcctgtcaagtcccagcgaccggacttgcccatcaccagcggtcagggcggccgcgtggccagctccggcggcaccctctcctcctatgtcatccgcaatctgggcctgagcaagcgggtggacgacgaccaggatcccagggaagccatcttgaagtatgccaaggacgcagccgagaatccttactggatagcaccggcctacaagcagacgcagccaaaggccatcttctccgaaaaactacccgccgacgagccggccaccaagaagcccaagacagaggcggacaaataggaagtcaatctatttataagagcttagatatgttaataaactcgttacgacgtaagaactttagcttagcttaaaatacaagtgtgtggatctcagacctcctgcattcggtagcaatcggagacgaccttccatttatcattctcggcggtaacgatgaaagtctgctgaaatttgcgtaactgctgatctgcgaacttgacggagccgctggccatgatgaggtaggccagctggttggacacagcctgatccacaataggctgcgcgtccagggtgttcaactggtggtttgaggatggcagctcctgaaagtagctctcgatcatctggcggccgatggccccgtttccattccagctaagcgtagcattgtccaaatagaggcgtccaatttgctgcaggtggaatctatttgagtttcgttttcccatgaaatgcagactttcaaggcggatctctacttacttggcgtcggttgtccacggaggcgtagtacaggcgtgtgaaggtatccgccgtacgggcgcagctctcgaccttggctttcaaatcctttaaacaaatagttgctatgctaaattgctaaaaaactaaatattttcaactcacgctgtccatgtttcccgcgattctcgaattagagtgaccgtcctcgggtggtcagaaaaaaactctccagaaagaaagaaacaaaaatattactaccaccatttgaaatacaaaaacgctactaatctacgtgagtacccttaatatttatttaaagtttaaaaaagtcaagatgttcaaacacttaaaaacaagtttattgcaaacattttctgcaaattgcccgaaaaacaaatgatgacttttatttttcaagttgtttatttctaatcataattttaattaacaattagacacaatttaaagcatagcgatcacaatttgaattggtaacctaacatttgaagattccctgtcggagtggcccattgggggtcactggaaaatc

SEQ ID NO: 11666 - DNA, 2050 bp, DROSOPHILA
caaaatatttaccgcatattttcagagaaatatagttttaattaaaaatttgaaaatccacttagcgtggggccttaaaactatgcaacgcggtaaaatttccttcgggaaaatcaaactgaatgtaaacgtacctcctgcggagccaagatccaacgaaaccgaggcggaagatgcaaaggagtccactgaagccagcggaaatggcggaggattcaagaaaatggacaaggagcagatgattcggcagatcgaggacgtggccgaagatctggagagccagcacctcaaggaagtgatgggcatcagtggctttggtcgcaaggcggccaaggtgttcgacatcaacgagcagatagaaaaggcgagagttacccgcccgggaatggacaaaaaaagggaggagtccaagccgaaggaggatgaccagaaagacgaggaagaggaggacgtaataggtcccctaccaccagctgtgaccacagacaaggagaaagccacgaaggaatcgtccaaagacgaagactccgatgacgatgattattcgtccgatgaagattcagatgacgaacaaagccttgctaagcgcataccctacacacacgaggtgcagatgcagcacggttcccgcgctgtccttgccctggctggcgatccctcgggtgcccgcttggtctctggttccatagactacgatatgtgcttctgggatttcgccggcatggactcgagcatgcgtagcttccggcaactgcagccgtgcgagaaccatcccatacgttctctccagtactccgtgaccggcgacatgatcctggtcatctccggaaacgcccaggccaaggtcctcgaccgcgatggattcgagaaactggagtgctgcaagggcgaccagtatatctcggacatgtcgcgcaccaagggccacgtggcacagttgacctccggctgctggcatccatttaacagggagcagttcctgaccgcagctctcgacggtactctgcgcatctggcagggattgaagtccaaggaacagttgcaggtgatcaagacaagggcgcagggaggcctccgcaccaacgcagcatcatgcaactttaacagggacgccacactcatagcagcgggctgcgtggatggttccattcagacgtgggacacgcgcaagatgtttgtgaacaccacgcactgcgtcagggatgcgcatcagaagggttcggagatcacctccattgtgttctcgtacatgggtcagcagttggccactcgcagcaacgacgagaccatgaagctttgggatctgcggcagttcaaacagccgctgcatacctggacaaacctgttctcccgctacgacacaacagattgctgctttagtccagatgaccgtctgctagtcaccggagaatcgcttccgaagggccaggccgaagcgaacctgtatttctacagcactaagagctacgaggaagtgcagcggattcccgtgtccaacgcgcacgtggtgaaaacgctgtggcacccaaagctcaaccaactgttcgtgagctgtggcaatggaaccattaagtgctattacgatgagcaccgcagcatccggggcgccaagctgtgcgtagtgaagacgcatcgcaagaggcagcccatggagatggtgggagtctcccagatcattacgccgcacgccctgccattgttcaggcaggaaaagtcccgtacctcgcgtaagcggatggagaaggcccgtatggatcctgtcaagtcccagcgaccggacttgcccatcaccagcggtcagggcggccgcgtggccagctccggcggcaccctctcctcctatgtcatccgcaatctgggcctgagcaagcgggtggacgacgaccaggatcccagggaagccatcttgaagtatgccaaggacgcagccgagaatccttactggatagcaccggcctacaagcagacgcagccaaaggccatcttctccgaaaaactacccgccgacgagccggccaccaagaagcccaagacagaggcggacaaatag

SEQ ID NO: 11667 - protein, 655 aa, DROSOPHILA
MQRGKISFGKIKLNVNVPPAEPRSNETEAEDAKESTEASGNGGGFKKMDKEQMIRQIEDVAEDLESQHLKEVMGISGFGRKAAKVFDINEQIEKARVTRPGMDKKREESKPKEDDQKDEEEEDVIGPLPPAVTTDKEKATKESSKDEDSDDDDYSSDEDSDDEQSLAKRIPYTHEVQMQHGSRAVLALAGDPSGARLVSGSIDYDMCFWDFAGMDSSMRSFRQLQPCENHPIRSLQYSVTGDMILVISGNAQAKVLDRDGFEKLECCKGDQYISDMSRTKGHVAQLTSGCWHPFNREQFLTAALDGTLRIWQGLKSKEQLQVIKTRAQGGLRTNAASCNFNRDATLIAAGCVDGSIQTWDTRKMFVNTTHCVRDAHQKGSEITSIVFSYMGQQLATRSNDETMKLWDLRQFKQPLHTWTNLFSRYDTTDCCFSPDDRLLVTGESLPKGQAEANLYFYSTKSYEEVQRIPVSNAHVVKTLWHPKLNQLFVSCGNGTIKCYYDEHRSIRGAKLCVVKTHRKRQPMEMVGVSQIITPHALPLFRQEKSRTSRKRMEKARMDPVKSQRPDLPITSGQGGRVASSGGTLSSYVIRNLGLSKRVDDDQDPREAILKYAKDAAENPYWIAPAYKQTQPKAIFSEKLPADEPATKKPKTEADK

SEQ ID NO: 11668 - DNA, 3726 bp, DROSOPHILA
cgtggatgggcgtggaatgagctgcacttggtctgtaacggaaggtgcagcaggccttcgacaaaaatccgttgcatattccaatgaaaattcctggggaaattcaatcctgccggtttctataacgaattgatacttccgcagctgaattgaaaaaagtgcccaaatcaaatcgttcccaccaacattcccagacccaaaactgcggtatatggcatatttctttctaagtagggctatcgaggtttcgcacactatgaccgtggagcgatatagcgatatgcgatacatttgtcatactccactccatatgccgtgagtcgagaaactgccgagatcagctgattttccggggtcccaacatgaatatgaatggggagaatttgatatgatactttgcctttaattacttcacttgaaagttggccattgtacgtcaattgagtcatcatcattatccgtgcacccgagtccaaaagcccgataataaataacaaaagcatttgggggctgcgctgcggttattggatacacaagcggatatacaacactccccatcagaactttggaaacgggaatgggggcctgggcaggaactgggctgcccgacaaatgtttctcataaaccacaatttgatatctgcaaacagaacttgagaacttgaacttgaacggcgatgcaaatgcgagaaaaagtttcttatcagcattatgcgttttacaagaagtaagcaatattattccaacctaatagcgatcaaataaacggacaatgtgaaggggatttccagtgtttgctctctatcgttcaaatatttaggccaataaaacaaaagctgtgcaatctatttagatatatttacataattaaaataggtaaataaataaattgaatgtataactattggtaagttttttactgttagcaaataactaatcagctcatagttttaggcagttatctagtcagttaaacaagtacttctaaagtatcaaggacttattttggtcgcaccataatgttaacagtcttgtagctgtatgtgaagcccttccattctccccaaacgattccagagccaaacagcgcgggatcggtgtggtttccacccagatatgcaccattcagattgctgcaagggattctttatgagtactatgatcttggaatcttgggaaaaggtcaaaaaccttacctgctaaggcattctctgtaccaccaggctcccatatatctggcagcacagttgatagtggcattgtcgttatccctatcgaaggtgctgaaaggttggtacagatgatagctcaaactgtctccggcggttccactgtacgcgcccagctgggttatcgggtaattactgtacacgttgcccacgtgaaacacactgtagtgggcataccgcttctcgccagcaaagtccaccaactcaatatacaactcttggggttgcagggacgagatcttgttcagattattcaatccgatgaagaagttacccttaaggtcaccgaaacccgtctgataagaggtccaattgcggtagaagttctcctccacactgactcttcgctggacgaccagccagccctttccggcgattgtcacatcgcagtacacttcgattacatcggagcccacttggatcttctggacaccgctcttctttgggttcaactccttgcaggatgaactatacttcttgtacgtctggatcttcacattttcaccaatctcagcgctggccaaatagaaaaggcctagcgaaaatacgcagagtgcgaagcaaatgggtttcattgtgttggctcgaaacgactatcaaatcagttggccaagacaaaccattttatatcagttgtatacttcttatcatatttttactattggtcattttcgaccagccagttgataaaccccttttgattaaatcccctctacgatcttttagtaactaatttggacaagagataagaaactactattcagacagttagtcatctttatgggggagttttcttggaatatgctatctacaatctttacattttgacaacgttgataattccaaggtaaaccccaattgtatttttgggtataacaaagttttactgtactaatgaaagatatttcaaggcactcaattaaagtccttacaaaggatataattgattaaaaaatgattccaaaggatgtttcatgtttcagggacgttatattgttcaacccgccttataagaataaggaaatgcgatttaaatctttaagcaggtggcataaataaggttcgtaccatgatgattttcataataagtttgaaagggcctatcatgataaacaaattattattatttgaaattgatcagtaaaataaaaagtatatcaacaagtttgaagaaaaacttgagacttctataatttgcaacatggcgccacgagtttattagtagcaaattacccgactagcacaaatcactttttatcgagaattctaattatacgataagcttaatataagcaatcacatttcttcgtagagatcgactagctgattttgccagaaaatagaacataatacattgaaggctcggaaaaacttcgttcgtagcgctatacaaatatttacaaagaatccatttcccatttcctgtttctaggcagttggatgcactttggacaagtgtcaaaaggtgtcaccaaaggtgctaccacccctcaccatcagatcatgttatgtttttttttagttttttttcttttttggtttttgacaacttttggaataatgtgacagagcatgtcggctaccaaagttgcaccgccggcggaaagaaactactatggcgagaggtgacaactcgaatgacagcagatataagagccacctacaaagtgcacacaaataccctactcccactcccactggtttctactaccatatctcgtaccaccaacatatgccacaccattattccaagcaacaaacaaacaaacaaacaaatgaacaaatatttgccacaaagagcgaggaagacaaacccacaaggaagacgactgggagcctgaagaacgataaaatggcatttatgataaatacataatactcgatgtttacacactcattcagtaacgcatatagaacactgggaaaaaagtatttcattttaacctggattcaaaatattacgttatttaagcagtcggtttaatagtacaagtaatcaaaattggtcatttgtttggctaccaactaaaggtgaactaaattggattttaggacccctgttttattttttcagtgtacgatatataggcaatagacgtgttgtctacggcatttggcacagcgatgaggaatggaggcgaccggaatgggaataggagttggggagccagaaaaacagaacagaattcaagtgtcaaagtgacagttttgaaattgattgcagcagcagcgacaattgtgtgtgcgttgcggctgataaataaggcagctttaaaccgacttaaccgagagccattggggttatctaatggagccagagatagacaacccagatagaataccccagctccatatcaatatcaacttgttcatatgattgacaggcgacacgtggtcagctccctggagttcatgcgcattcgattatcgcgatcacgtcgcaactgtggcataaacgatatttgccccatacactctacctagcccattttccgtt

SEQ ID NO: 11669 - DNA, 726 bp, DROSOPHILA
atggtgaggggtggtagcacctttggccttttctatttggccagcgctgagattggtgaaaatgtgaagatccagacgtacaagaagtatagttcatcctgcaaggagttgaacccaaagaagagcggtgtccagaagatccaagtgggctccgatgtaatcgaagtgtactgcgatgtgacaatcgccggaaagggctggctggtcgtccagcgaagagtcagtgtggaggagaacttctaccgcaattggacctcttatcagacgggtttcggtgaccttaagggtaacttcttcatcggattgaataatctgaacaagatctcgtccctgcaaccccaagagttgtatattgagttggtggactttgctggcgagaagcggtatgcccactacagtgtgtttcacgtgggcaacgtgtacagtaattacccgataacccagctgggcgcgtacagtggaaccgccggagacagtttgagctatcatctgtaccaacctttcagcaccttcgatagggataacgacaatgccactatcaactgtgctgccagatatatgggagcctggtggtacagagaatgccttagcagcaatctgaatggtgcatatctgggtggaaaccacaccgatcccgcgctgtttggctctggaatcgtttggggagaatggaagggcttcacatacagctacaagactgttaacattatggtgcgaccaaaataa

SEQ ID NO: 11670 - protein, 241 aa, DROSOPHILA
MVRGGSTFGLFYLASAEIGENVKIQTYKKYSSSCKELNPKKSGVQKIQVGSDVIEVYCDVTIAGKGWLVVQRRVSVEENFYRNWTSYQTGFGDLKGNFFIGLNNLNKISSLQPQELYIELVDFAGEKRYAHYSVFHVGNVYSNYPITQLGAYSGTAGDSLSYHLYQPFSTFDRDNDNATINCAARYMGAWWYRECLSSNLNGAYLGGNHTDPALFGSGIVWGEWKGFTYSYKTVNIMVRPK

SEQ ID NO: 11671 - DNA, 4229 bp, DROSOPHILA
tttcgcactaatcttcggccgactatcagctgataattggcctaattagcgaccttgaaaacggggccaaacaaatccccaaacgccagtgaatcacccaccgggatcatatgagcactgcaggtgatccaagtgcattttccagccttttcctgcccatttctcgaccccctcggtgaggttagattgcataacttgaggggcgatggcgtttggggaatcggttatgtcgcccgatccttaccttggctactgccgaaacaacatgacggagcgtgaattgcatggctggtgcgggcgagttatgaggataatcgttatttaactacaaacacaacactagtttgatgtgtgtttttccgactgtttttcgtgttgtggggctcggagcggtcgcagggctggcgatgtgcattcgatagtggtcatatgatggccgcgatgctatcgattgttttggtgattttccactctgttggaatttgaaattctaaaacattttcgtatgaaaaagatgtgtataaaaatattagcttgatgatcgttcaaaatacgatatgtccgtcactcaattgctagtttatacaatattcactttatgggtcatttgttgtagcaaaagctacctaaaaacaagccaactatacgtgtaagccggcttttatagttttggcacccattaattaatgtttttgtacgtataaaataaactgtaataaataaactgtaaaataactgttttaaaaatatataactcaacgtacatacgatacatatataataagagttccaaagtaatattaactttattatatctataggtaattaaaaatgtattatacgatgaatattcgatagtttgccctacagtacaaccctgtgtggtattccccatctgggatatttcccacaacacttttggtattttcacgtcgcgttcatctcgcgttttcgttgaagcctcagtatttcgctagctgtcgcaatgcggtcacactggttcgcggacacaacaagatggcgagacttgcccccgaaatctgttagaaaacgccacaagagcaaataattagttcagttttcgaccagaaaagagtcagccgaagtgccgggcagacgcggcgcattttgcagagtgtgagcttggccagcgttgcccgagagccgcgacaggcgacaccttctgctggccttgccttgttgctgtgcccctgtgtgcgtgagcgtgtgcggtgcggtgcgattgtgtgcgtgggttgccaagagtgaagagaatcgctgagtttccaagatgatgagcaactacggcaacatgatggactcaccgaagtcatcgccccacggcggcggccgatcacccgtggtggcccgtcaagactcatccggcaccctgaaaacgaccatttcgctgggcaagacgccaacgatcattcacacggggccattttactccatgaaggaaccacccgccaaggcagaacttaccggcgacaaggatctcatgaccgagtacggactgcaccacacactcaccaagttcaaggagaagaagttcaaggagtcgctggcctcgtttctgcagaacatccccggcattaacgacctcatcacgcatcccgtggagaatagcacgctgcggagcgtgatcgaaaagccgcccattggtggaaaggagcttcttccgctgactcccgtgcagctggccggattccgcttgcatcccggaccggttggtttttccaatatgcttttaattcgcttgctcagtttgaaaaatgacgaatctttagatacggcacattgaacatcttagaatacatttagacgctattcaatgctttgcgtctctatacatttgcatgcattaatttcgctttttaaaatttgcatatgaaatttggatttaagtgtccttgcacagactgatctactataaagtgttatttggtcgcaccttttctgtcacttatttctataatcaccgtagtattttagagttgtaattcattttccttatgttcaacaacaaatttgaaacacaaatattttagtcattaatcacaaaaattacttaaattaacaagagtgtaaatgttggttttccctttaaacctcttttgaacagtgtatattaagtcagtagttcgcaacgcagtgatctatatgaacagctgagtcgataaggccatgtccgcctgcccgttttctttcagttttaaatttttgttgcaagtagtgcataaatcagaacgcgccagtttaggccactaattcatattgctgccatatggtttaatattatgatattcaaaaaaaaaaaaaaaactaaccttccttgttgacggattgtccttcctttcttgttattgaaatattggcatttaatattattgagagttttctttcaccctatatgcaatctaataataataataattcatcttaaaaggtttcgtgaaatattttttacatgtcatatatttcaaacaatggataaatcgttactagaacaaattgcataaaatatattatttttttcctctgcactttcacattgctaatttatccgattctggtgctcctttcagctgccggaacagtatcgtaccacatatgtcacacctgcgcgtaaacacaaaaacaaacacaaaaagcaaaaacacaaagacggggtgaccacgggacaggaatccacgctgctcggtaagcaatctgctgaattatcgagcaactcgatcacacataatccaatgataaccatcttgcagactcggccggcctggagacttacgagaaaaagcacaagaagcagaaacgccatgaggacgacaaggagcgcaagaagcgcaaaaaggagaaaaagcgtaaaaagaaaaaccagagccccgaaccgggcgtgggcttgctgcccggaggagcgagcttgggcggagcagcgggtgtaatgggagccactagtctgggatcgctgggaggaggacctggaggacccgggctgtccagccttagtgccagtatgggacctggcgttgtggggaacatgaatagcttctcctcatcgatgcagatgcagcagcaacagcagatgcccatgcagcaacagcagatgtcaagtggcggtctgctgggatctgtgctgggcactagtggcggtccaggtggcggcggcggaggaggaggtggtggcgggggcggcgtcggtgggagtctgcttatgtcgcagttttaggcaggatcctttagcaaaatagacttggctcattacctctcatcagcagacgcaccccaaatggcaacataaaaaaaacgcagagggcctcggtcctctacatgcaattttctcgatatcgtttcgtgtcctagttattaatttatgattattgtaaatgtaaaatagtttatttctgtaattagccaacaatttttcgttcgttttcgcgctagcttaatgagatttatttaaacgcaagttatggtacaaaacgcaagaacgttttcgctctcgattccagctcttccctccacacaaacacacccctcgccacgccgccacaaaaacgctgctttgcaacctctttaatttgcttaccaaccttgtaacgtgtgtagggtcagtatttcaattaaatttctgcaatggtttgttcttccagcaagtttataaacacaaaagaaagctgagattcaacaaaataaaaatgcctgtactataagtaattaattttagtgattaggcacataaaacaataaacaagcataaaaatgatcaaagtgtgtgtttacaatagtttggggagcttagttcatttttcgaatataagcatttgttgcacagaagttctgcttccaaggagcccttaaattcaaatttggcgccaaacacttgttagcactctgttgactttaacatggcgcattaacagctacgctgaaatctgacagatagtaacatagccttaacaggcgccaacagctgctttaattctcagggagtttctcgcaatcgagagtcaattaataaattaaaagtgatgtgtataagatagtcgtcgctgcaaagccatagatgagttgtaacttcgccagattttcgcgacaggcagctatcaacatgtacaagcagtcgtgcaccaatctcctggaattatcctccgccaaggtgaccgagtggctagcaggcttcgacagtgtaataaccgactgcgatggtaagtcggtggtggggatga

SEQ ID NO: 11672 - DNA, 1305 bp, DROSOPHILA
ttcgcggacacaacaagatggcgagacttgcccccgaaatctgttagaaaacgccacaagagcaaataattagttcagttttcgaccagaaaagagtcagccgaagtgccgggcagacgcggcgcattttgcagagtgtgagcttggccagcgttgcccgagagccgcgacaggcgacaccttctgctggccttgccttgttgctgtgcccctgtgtgcgtgagcgtgtgcggtgcggtgcgattgtgtgcgtgggttgccaagagtgaagagaatcgctgagtttccaagatgatgagcaactacggcaacatgatggactcaccgaagtcatcgccccacggcggcggccgatcacccgtggtggcccgtcaagactcatccggcaccctgaaaacgaccatttcgctgggcaagacgccaacgatcattcacacggggccattttactccatgaaggaaccacccgccaaggcagaacttaccggcgacaaggatctcatgaccgagtacggactgcaccacacactcaccaagttcaaggagaagaagttcaaggagtcgctggcctcgtttctgcagaacatccccggcattaacgacctcatcacgcatcccgtggagaatagcacgctgcggagcgtgatcgaaaagccgcccattggtggaaaggagcttcttccgctgactcccgtgcagctggccggattccgcttgcatcccggaccgctgccggaacagtatcgtaccacatatgtcacacctgcgcgtaaacacaaaaacaaacacaaaaagcaaaaacacaaagacggggtgaccacgggacaggaatccacgctgctcgactcggccggcctggagacttacgagaaaaagcacaagaagcagaaacgccatgaggacgacaaggagcgcaagaagcgcaaaaaggagaaaaagcgtaaaaagaaaaaccagagccccgaaccgggcgtgggcttgctgcccggaggagcgagcttgggcggagcagcgggtgtaatgggagccactagtctgggatcgctgggaggaggacctggaggacccgggctgtccagccttagtgccagtatgggacctggcgttgtggggaacatgaatagcttctcctcatcgatgcagatgcagcagcaacagcagatgcccatgcagcaacagcagatgtcaagtggcggtctgctgggatctgtgctgggcactagtggcggtccaggtggcggcggcggaggaggaggtggtggcgggggcggcgtcggtgggagtctgcttatgtcgcagttttag

SEQ ID NO: 11673 - protein, 337 aa, DROSOPHILA
MMSNYGNMMDSPKSSPHGGGRSPVVARQDSSGTLKTTISLGKTPTIIHTGPFYSMKEPPAKAELTGDKDLMTEYGLHHTLTKFKEKKFKESLASFLQNIPGINDLITHPVENSTLRSVIEKPPIGGKELLPLTPVQLAGFRLHPGPLPEQYRTTYVTPARKHKNKHKKQKHKDGVTTGQESTLLDSAGLETYEKKHKKQKRHEDDKERKKRKKEKKRKKKNQSPEPGVGLLPGGASLGGAAGVMGATSLGSLGGGPGGPGLSSLSASMGPGVVGNMNSFSSSMQMQQQQQMPMQQQQMSSGGLLGSVLGTSGGPGGGGGGGGGGGGGVGGSLLMSQF

SEQ ID NO: 11674 - DNA, 2653 bp, DROSOPHILA
caaccccaagtcggatgggctgtacgggacgcaggggatgtaggggttagggggtggcaactgaatgggactccgggacatctacttatccagatgctggcggggattacctgcgcgtgctgttcgtgtacagctcgtagaagtggtcgccatacttgagcggattgagcaggccaaccattttggcccgattttccgttagatccagtgctccaatcgatattttctatatattctaatgctccgttaccgtagccgttactgttgccgtctaccgttacaacgttatgctcgctctctcccgtgaatctcctctcttctttggctaatgatttatattgcacagcggttattaaacaaaatatgaattaacaactagaatttaactaatttgccgagcatcgtctggcaatttgagtgccctttgttttcgccatttgccttttgtcactttcacccaaaaaaaaggaaacacacaccgagcgacaacgcaacggtacaatgggaacgagggaactaaactttcgtcccgcttgctcttgtgcgcttcctgcgagagaggacgctcagctgtgtgggagacagtgacagtgttggtaacagagcggcatgtcctattctgtgcttaaaatcttaaatttttcggagctttccgatttaatttctgcctaaattaaaggtactttaaatcgcacgagtattttcttcaattttttattttatatatcttaaatcaacaattttggtttccacctttcatccatagctaaggcttttcagttttattttatggcacaacgcaaaagtatcgatcacgaaatatcacatttattgttcaacttttaatatctgtgtgccttttccctaaaagttccgttataaaagttaacatttaaaaatatttcacatacattgcaatacaccagctgttcgagcagtgctgaaaaacgccgacgcatcgcgaactggcaacgctgtcagcagctgtcacttgcaacaaaaacaacaggggcaggaagaagaagaactttgacagctgcggcgcaaccgaaatctaagaaaaacaatttacgtaatttaattgagcgaatttcaatggtttgcgagtgtactaaaacgttttttccccacccgcaggatgggcaacgcgctgacgcactacatgaaaccggacgtgatgcccggcccggacgtggtgcccacctttgacccactgctgggcttcaagtcgcgcaaggagcgtgtgatgatcgccacccaggaggagatggagtccgccaagctgccgctggaattccgcgactactgcgcccacctggctatcgcctaccaggcctgccgcagcgacaccttcccgtttgtgtacaagtgcgcccaccagaagcacgagtacctcacctgcgagtacgaggactacgtgctccgcatgaaggagttcgagcgggagcgccggctgctggagcgccagaagcgcctcaacaaggccgcctagacttaggctagataaccctatacacaaaaaaaaaacacacccaacaccaccaggcgacgctcctggccgcggattcactgccactgccccatgttgcaagctagtttccagcggaaatgtcaataaacaactccatgctagtaataatgcggatctgctaaccattttttttttattatccattaaacgattgaaaaactgttcgaaaaaaccgacgagtgtcttggagatgtggatcgtggatggattatccatttataaatggatttagttggatgagcagtgggatgaaggtatggatgttataggaaatacaaactgcagttgatttgagcggaaatatcaattaacaaatcgtccaaagtatctaccaactatttatttatttattcaacaacgcagttgctcgaaaaatgccaccagtgacaagtacttcaataagttctaaaatatttaaaaaatacaactgatgttcgcgccagactttacaatataatccaattaaatagattgcatagattccaattgtcagtgtagttcgaaatgtaatttttgtgttcacctcaccataggtaatgggaatacaatggcgtttggttatcaacaagtattcattatctaaacaattggcaattttaaaaacattttacaactatgagatagctggatatgtcgtttttgccttttgggtgagatattcatacaggaagtctttcaaccaattagttttattagcttagagtaaaccctttaaaatcgcttccattccagcagaattattaaagaactaagaaccttttattcacaaaatttctgcacttttaatcttaaaatcaaacttatctgcattaatcgtacaattgctttcgtttaacaatgcaacgaacatgcgcgcacacacaacacaccccgtatatcacaagcacacacccgcatatctataaatatgcggaatactatatctctcctgactacataatgtatgatatataatcgtatatgcattgatactaacgaactactgatgatggcaagtggttttttttttataaattacattctaactagttggggaggatccagctgccggatgccgatgcaaatgcatcctcgttgctctgggacacacatctttggtagaggcttctcctcgtcaccgca

SEQ ID NO: 11675 - DNA, 588 bp, DROSOPHILA
aaacaacaggggcaggaagaagaagaactttgacagctgcggcgcaaccgaaatctaagaaaaacaatttacgatgggcaacgcgctgacgcactacatgaaaccggacgtgatgcccggcccggacgtggtgcccacctttgacccactgctgggcttcaagtcgcgcaaggagcgtgtgatgatcgccacccaggaggagatggagtccgccaagctgccgctggaattccgcgactactgcgcccacctggctatcgcctaccaggcctgccgcagcgacaccttcccgtttgtgtacaagtgcgcccaccagaagcacgagtacctcacctgcgagtacgaggactacgtgctccgcatgaaggagttcgagcgggagcgccggctgctggagcgccagaagcgcctcaacaaggccgcctagacttaggctagataaccctatacacaaaaaaaaaacacacccaacaccaccaggcgacgctcctggccgcggattcactgccactgccccatgttgcaagctagtttccagcggaaatgtcaataaacaactccatgctagtaataatgcggatctgctaa

SEQ ID NO: 11676 - protein, 117 aa, DROSOPHILA
MGNALTHYMKPDVMPGPDVVPTFDPLLGFKSRKERVMIATQEEMESAKLPLEFRDYCAHLAIAYQACRSDTFPFVYKCAHQKHEYLTCEYEDYVLRMKEFERERRLLERQKRLNKAA

SEQ ID NO: 11677 - DNA, 9345 bp, DROSOPHILA
gcccacttctcatcacacatcccatcacaccatgttacggccactacagaaacagaaagtgtggcactatgtaccatataaagtgtgtgtgtgtgtgtgtgtgtgagtgcggacagcatcaagtgccattgacggcgcgtcattttcttgagtactcatttatcctcggcgcacaaaagttgccaccttctggaatggaaaaacagcatttgagacccgttttctgcgtatttaattaacgaaacggaaattacgaaatgcgcctgcggatagaaaatccattgaacttgcattcagtttaagttgtccggccttggccaaaatcttagtattttcgtagccaattccattggtagcagcccttctctaatttaataataatattattaatgctaaaattatacttaaagtatattcttacttactacttatactctacttaaagtatatagcttaaaacatcgaatgatttgcttatgaaaatgcatttaggaaacgaacttttttcacaaataaacgacgagaggctttattgtaaaacccataaaccaattagcaacatagcacaatatttattattgaacttgtagcttctggcttcgataattaaattaaagtatttgcactgcacagctaatccattaactttctgctcggtttatttattaagttgaaactttagaaactacaaattgctttcactcttttctgaaacaaatctattggatttaaagtaataacatataacatatattgtgtgggaaatgtatatgaacactctagtttaatctaagggtaatgaagcaccagtcaggtgacctttcctaattgctttcatttggccggaatcgaggccaattgaatccatcagcaggcgctcttggccagctgtgaaagttggcagttggccagctggttgtcacctgtgaaagcaaactaatagattcaaatatttgcatttcccgtccacagctggaggaggatcagaactgccacccaaatggggcagagcagcaagtccggaagtgccggagtcggcggcgtcggcggcggaggaggcgtggtctgcccctctacggcgatcagtggctgcgcctccggaacggcgcttatccaactggacgccactgggccaggagccggcggagctggggagtcggagcacgaacgtggcacctggacgggtcgcttcgacttcctgctctcgctgctcggatactcagtgggcctgggcaacgtgtggcggtttccctacctgtgctacaacaacggaggaggttcgtttcatctaagaaatgtatctagtagatacacaattaatgatatatatatcaaaatgatatatgctttccctttgcaggagccttcctcatccccttcaccataatgctggtcatcgccggactgccgctgatgttcatggagctctcatttggccagtacgccgccctgggtcccgtggccgtctatcgtcggttctgcccgctcttccggggactaggaaccggcatgatcctggtgtccgccatagtgatgctctactacaacctgatcatcgcctggaccatcttctacatgttcgcctcgtttgcgccggtacttccgtggcagaattgcgagcccgcctggagcacaaagtgtgagtttgtcccctggggagcacatagtgcgatggatccaattaattaataggccaaaacacttggcgggggaaaagggggggaacggtggaggatgaggataagagcggatgtcagattcccatcttttgttacgtttctcgggtaataaattaggcaaattgcaggctgtcaaaagtggaattttattccgctcggctccgcatttgttgtttttgtttgtgtccatcggcggcacgtggctcggttgggaaaacacatggccagggaaatcgaaatcggatggcgggtgcggcggggaaaaatggttgtgtaaccagcggagcccggagacaattgattcggggcgacgcagcaaagataaacacacacaatcccagggaaactttcaaggaaactcgcaagtcaggggaaagaaatgtaaaataaaaactcgataagttcgcttccgaaatatccgaatagtggaggccagcctagcataatgccacggggatcaaaagtacatcattcattgtgaacaaatgtgaatgtctccacaatcctgcccttcacgcacacgcaagcaaatagaaagtatgaacaaactttcgcccagaattataataataaacaagaagcatggaggattcctaggcgccctgaagtaggcaattgtttttgtgcctcgcttgacattgcaaggtgagagcttgctcagtgtgtgtgtgtgaggactctataagtgtgtgtgtgtgtgtgtgtggcgaaggcgttgccttgcgaattccccagtctgctggtgacttccttggctagaaacagagacacagacactttaaaacgttccgccacgcgaaacacataaatctttaacgaccattgaacgccgactcttccggattctgaattccagatactggagctgggagctgggagctgggcggcgggtggattcgtcatgctgccccggaaaagcgtggcaagttttctatgtaggtcagaagggatgagcttatttgtcgggcattcaacaaaatttacatttccagcatgtcataaatggttgattttgtgaagaagtaggaaaatccaaatgaatgggtggaaactttcctaattgctttgattaacaaaggaagagttatataaattcaagcctctgctataggatagcatgatttttgaatatggttatgtaggaattcctagtacgatccctaccaaaatcaatacataagacgaaggcacctgcttcgaaatcaaacttagacggcgttccctgactggcagccatttccatatttttttcattttgtgctggcccagaaatcgataatggatgctattgagggtcctggatattgagcagcgtccctcgacgcagagcatttcaccttcgggggaacgaacacggcagcttcaaattgttaaaatgacaaacaattatgtcttaactgtttttgacactcaatcgctggcagtgggaaactcaaccttgggccgggcttttccctaagctcccaggaatcccacgactagaaagtattgtatgtgtatgcaggggaggagtggggtatgcgggcggagtggggggtcctgccccggcagacaagcaatttcttaaggattttatttattgacacttctcgattcgccgcccgatgtgctgctgctgccagcatcctgacctcgttcgcctttgtcctctgtcgtctgttttagatgacaaatgtttacttttagtgtcacgattaaaatgtgtttgactctgtttgtccacggatcgaatgtcgcactctgtttggctctccacttacttgtgtgcttatgttttccagtaaatatttggccagcatttcgatgtgcctaataaggtaaatgatctggccactaaaaatccttttatttgactctctaaactctaaacactggccatacagcatctgcgaaatgtgccatcaaatccgaggccacaaaacttaaggaggccaattttctgctctgcaagttgaataagaaagtcggtatccttttccaagcgggatacacaaactgcgcccaggatttatttatatgcgaattgcttggttggtcctcgtttctcgttcctctttcaaatagaatttatatcgcacaactcgcgtgtgtgtgcgtttgtgtaatcaaattaattgcaatgcaaacagaggcagacaggcaaattaaacggcgtgtaaacactttgaagtttttcacaaaaccatcaaccgccagccacacgaaattgttctcgagtttatttccccattgcaaaatgaagctgatgaatgaatgtacgtagatacatatgtatgtgggctggctcggaatttaaacttgagtctagcgacggtttaattcgatgcgccaacggggcgtatgagtaatgtttattgacaggcgctgattgggcgtgggaatggtgggaggttgtggtgtggagttgtgggtttgctgctcaataaatcgatttgaatacccatttcagttggcaaacgaatttagttcgcaattagccactgccagccttaatgtcctgcaacttataccatcctgcaaaggcgaaatcaactgtcagccagtcattttgcgtggaaatttgtgtggaaaacttcgacggcgacactttctcttttggcacacatacataagtcaaatgtcataaccagaactcgaagtttctgtcttttgtgggactgacaggtaaatacaatttgtggctgcgcgggaaaagcgagtgttgtgaatgagggagtgggtttttccaacaagctgcctagtgcctagttaaagttaaagtctcattaggcggatcaaatcgaatggactttatgtactgtcgaaagaaaaaggcaggcgaaagacagattgctctgctattgacctttcacccccgccaggcagtcaaatttgccagttgccagatcctttctgggcaacccttttccgccaaaggactttgacatgcccagaccctttttttttttgcttgccggggcagcgctttttgtgccctcctctgatttgctactttgtccttttaattatgttcccagagtgggttgcacaacccagcaaatagttcataaatattaaagcgctgtttgcataattgagtgagggggaatgggaatgggaatgtggatggaagggaaatgaagggaaggtggagatccaacttgctgacaggcaaagtctcttgcagattgcttctcgtacgctcaggcggaccagtgcgaggccaccaatggcacctactaccttcgcacctgccacaacgctacctccgcggcggaaaacaacatcaccaccctggcgcttggagccctgaaacgtccaccagctgaggagtacttcaagtgggttttcacatggattttgcacaattatcatttgctatttcatgcatgatttcattcactacctattttcattacccacatggggcatttaaattctgtgttaattgacttgaacttcgcttctcttccattgggtctctttcacttgccactcgcacttggctccggcagcaactttgtgctcggtctgtccaagggcatcgaggagacgggcagcattaagctgtcactggccgcctgcctcttcctggcgtggacgatagtgttcctctgcctgtgcaagggcgtccagtcctccggcaaggtggtctacttcacggccctctttccctacgtcgtcctggtgatactcttcgtccggggagtcacgctgccgggcgcgagcacgggcattctcttctacctgacgcccgactggaagcagctggccaacgcccaggtatgtgctgaatgcggcaacccaccgctccatggctacgtccttcatcctcccactcatccactaggtctggggcgatgcggcggtccagatattcttcgcactgagcccggcctggggcggattaatcacgctctcgtcctacaacaagttctccaacaactgctacaagtaagtttcattatattccgattggcttagcagcgataagtcctgcggatgagatgagtaccaccttggtaccacaccatggttacaagttgtggaactttcgaactaagcaccaaatccaattcaagggactcgctgatcgtggccttctgcaacatagccacctccttcttcgccggcctggtgatcttctccatcattggcttcctggcccacgagctgaacgtcgatgtggagaaggtggtggaccagggcgcgggtctggccttcattgtctatccggaggtggtcacccggctgcccgtctcgcccgtttgggccgttctgttcttcgtgatgctgctgaccctgggactggactcccagttcgctctgatggagacggtgacgacggcgattctggacaggttccccaacctgaggcagtacaagatctgggtggtcctgtcggtggccattttcggctacatcggcggtctgggcttcaccaccaatgtgggtatttttgagcgctaatcaaagtgtatgactttacattactactaatcctctagagcggcatgtactggctgcagctgatggacaaatacgctgccaactggtccgtgctgctgattgccatctcggagtgcatcctaattgcgtggatctatggatcccagcggttcctcaacgacattcagggcatgattggcaagcgatcgtggttctggaactttttctggggtatcatgtggcgctacatcacgccagccaccctcttggtgagttaatctttctgattactgctgatgatgtattccttatctactacattactcccagttcattttgttcttcaactgggtggagtacaagcccgccaagtatggtcactatgtctaccccatgtgggcggatgcagtgggctggatcgtgggactgctgcccgtgctggtcatcttcctggtggccttccaggagatctggcgggcgcccatgagcctcagcttcagggaccgcatcaagcacctgctgcagcccaccgccgagtggggaccagcgggcagaccctgcgtcaacctgcacgccgagcggtaccagagccaaaactacgacggcgtgaccaacaccaagattctcatcgaggaggaggcctcgcccaagcaggcggcgaacaagaaggacaggcaactgaccctggacgtggacgtggatgtcgagtgcctgcctctggcgactgtgggcaagcggccaggtgctccgaaatccatgggcaagcaaggcagcagcggcaacctgcagacgaatgccaagaacggcacccacaagtcgccaaccaccgagatcagccccagcaaacagccccttattccctccgaaaaggacaacaaatcggcgaacataaaggtcctggccgccggaacgcagagcagcggacgtgagtgcaccaccatgtccactttcgcgggaggcggggagaagaagtcaaccaaagtcaatttggccacaggagccacgagtgctgcagctccgctggccagtagcaacatcgcgacagcagcaactgtcgctgctgccaccaaatcaccgcctgcagctggtgttgcacccaccactttagtgggcattgctgccacaggaacaacagttgctgctgcggcaaatggcaaagccacacttaaaacgacaatatcatcaggtgctgttgctgccactgctgctggtggcaacaaagcagccagtgttgcagctgcaacagcaacagtcgccgctggcaaaacgcctgcagcagcaatggctttaaatgtggctgcctcggttaaagtgtcgcaaacggataaaacagcaccacttaagaccacaatatcagccagtgttgctactgctccaggcggcacaaaagcatcaacagcacccagtgttgcaactgcagcagtggttagtgtctcgtcaggagcaacagtgcctgccgcagcctcaaaagcagccgctccactcaaagctacggcaccaccaccatcattagctgcggttaatgcaacacaagccgcaaaaagcacaccagttgccgctgcatcggcacttgttgcttctgcgccgccagccaagtccacatcagcatcggtggcgaagacaaatacaaacgctggcagcaagccaacggccacattatctacttgcaagtcggatgctccagctgcagctgccagtgttggggtgacgaacggaaaggtcactccgagtggaggagccacatcaactgcacagccagcagttaaccaaaaagcgacagcagcagcagcagcacaaaagtcgcaaggggctactgcaacagcaacgcctacgaaaactgccttgaatcagaagacgattgtcccttcagcgggaagtggcaagggcgatgtgcccagcagccgaagcacggatactccaccgcctgcaaagggcgccgccagcagcaacatctcggccaagtccacgaaagccggcaagacacaggcgaacgaaaccagccccacgaagtcggcagtgaagcccatcaaggccggctccaccagccccacaaaagctgtggtgtccaaaccaggagcaagtgcagccaagactgcagcggcttctgctgcaacagcgacagcaactgcagcgggcagcagcagcagcaacaagaaggcggccacgtcgacagctgcaacattgggcagccaggccaagacgaaaggcaatgcatccggagcaggaactaagaagtaatagccagagcgtaccaggtaggatctgtaggccgaggtgtaagaaaaggaaaggagtcgaacgcatacgttgttgttctcccaatatcgaaaactatttttataagtatatatatatataaacgtgtatgtgtgtatctatgagctaagcaacccacttaactgtacttgtaaaaagtttaactaggcgattatgcaaacggacacaagctacagtcgaatattttataggcacctcattcggatgagcagagtgcgacgagggaggatcgaaccttcatgtttcctatgcgaaagtacctatttatcagtcatcacggtgggatagctgttccttagtacctaatttcagaagttaacgtaggctttaggtcaggagtcccgatgtgtgtttatttagttccgtgtgtatatccttggatgccccccgttgggcgccaattaattcgagagcaatgttgaaagtgcaatggaaatcgttgagtttttaaatatataaatttatatacaaatatacaaaggttacaactaatcaatttacacaagtgagagatcgtttgattggttttttactgcgaatattcttaagactactttggagggcggaacttgggcgggcggatgtatttttccgtttgaaaagtgtgcgcatttgtttatagagcagaatacatcacccggaaggcgagatccctaatctgtaaatgtgaatgtaaatgtaaatgtagatgtatctatgtgctcactgtactccatgttttctgtgctaacgagagactcatgtacctaaatgttaatcaagttgcatcaaatccctatttgtgtgcatttgtatagttaagacaaatatttagaagtgttttatgtgcgtggagtaggcgggagctaggccaaatacggaaatatgctcacagaaaacgggaaaacaataattacgcgtacatttctagaatttatataaccattgttgtgtattcatgttgaaataattatataaatat

SEQ ID NO: 11678 - DNA, 3606 bp, DROSOPHILA
atggggcagagcagcaagtccggaagtgccggagtcggcggcgtcggcggcggaggaggcgtggtctgcccctctacggcgatcagtggctgcgcctccggaacggcgcttatccaactggacgccactgggccaggagccggcggagctggggagtcggagcacgaacgtggcacctggacgggtcgcttcgacttcctgctctcgctgctcggatactcagtgggcctgggcaacgtgtggcggtttccctacctgtgctacaacaacggaggaggagccttcctcatccccttcaccataatgctggtcatcgccggactgccgctgatgttcatggagctctcatttggccagtacgccgccctgggtcccgtggccgtctatcgtcggttctgcccgctcttccggggactaggaaccggcatgatcctggtgtccgccatagtgatgctctactacaacctgatcatcgcctggaccatcttctacatgttcgcctcgtttgcgccggtacttccgtggcagaattgcgagcccgcctggagcacaaagtattgcttctcgtacgctcaggcggaccagtgcgaggccaccaatggcacctactaccttcgcacctgccacaacgctacctccgcggcggaaaacaacatcaccaccctggcgcttggagccctgaaacgtccaccagctgaggagtacttcaacaactttgtgctcggtctgtccaagggcatcgaggagacgggcagcattaagctgtcactggccgcctgcctcttcctggcgtggacgatagtgttcctctgcctgtgcaagggcgtccagtcctccggcaaggtggtctacttcacggccctctttccctacgtcgtcctggtgatactcttcgtccggggagtcacgctgccgggcgcgagcacgggcattctcttctacctgacgcccgactggaagcagctggccaacgcccaggtctggggcgatgcggcggtccagatattcttcgcactgagcccggcctggggcggattaatcacgctctcgtcctacaacaagttctccaacaactgctacaattgtggaactttcgaactaagcaccaaatccaattcaagggactcgctgatcgtggccttctgcaacatagccacctccttcttcgccggcctggtgatcttctccatcattggcttcctggcccacgagctgaacgtcgatgtggagaaggtggtggaccagggcgcgggtctggccttcattgtctatccggaggtggtcacccggctgcccgtctcgcccgtttgggccgttctgttcttcgtgatgctgctgaccctgggactggactcccagttcgctctgatggagacggtgacgacggcgattctggacaggttccccaacctgaggcagtacaagatctgggtggtcctgtcggtggccattttcggctacatcggcggtctgggcttcaccaccaatagcggcatgtactggctgcagctgatggacaaatacgctgccaactggtccgtgctgctgattgccatctcggagtgcatcctaattgcgtggatctatggatcccagcggttcctcaacgacattcagggcatgattggcaagcgatcgtggttctggaactttttctggggtatcatgtggcgctacatcacgccagccaccctcttgttcattttgttcttcaactgggtggagtacaagcccgccaagtatggtcactatgtctaccccatgtgggcggatgcagtgggctggatcgtgggactgctgcccgtgctggtcatcttcctggtggccttccaggagatctggcgggcgcccatgagcctcagcttcagggaccgcatcaagcacctgctgcagcccaccgccgagtggggaccagcgggcagaccctgcgtcaacctgcacgccgagcggtaccagagccaaaactacgacggcgtgaccaacaccaagattctcatcgaggaggaggcctcgcccaagcaggcggcgaacaagaaggacaggcaactgaccctggacgtggacgtggatgtcgagtgcctgcctctggcgactgtgggcaagcggccaggtgctccgaaatccatgggcaagcaaggcagcagcggcaacctgcagacgaatgccaagaacggcacccacaagtcgccaaccaccgagatcagccccagcaaacagccccttattccctccgaaaaggacaacaaatcggcgaacataaaggtcctggccgccggaacgcagagcagcggacgtgagtgcaccaccatgtccactttcgcgggaggcggggagaagaagtcaaccaaagtcaatttggccacaggagccacgagtgctgcagctccgctggccagtagcaacatcgcgacagcagcaactgtcgctgctgccaccaaatcaccgcctgcagctggtgttgcacccaccactttagtgggcattgctgccacaggaacaacagttgctgctgcggcaaatggcaaagccacacttaaaacgacaatatcatcaggtgctgttgctgccactgctgctggtggcaacaaagcagccagtgttgcagctgcaacagcaacagtcgccgctggcaaaacgcctgcagcagcaatggctttaaatgtggctgcctcggttaaagtgtcgcaaacggataaaacagcaccacttaagaccacaatatcagccagtgttgctactgctccaggcggcacaaaagcatcaacagcacccagtgttgcaactgcagcagtggttagtgtctcgtcaggagcaacagtgcctgccgcagcctcaaaagcagccgctccactcaaagctacggcaccaccaccatcattagctgcggttaatgcaacacaagccgcaaaaagcacaccagttgccgctgcatcggcacttgttgcttctgcgccgccagccaagtccacatcagcatcggtggcgaagacaaatacaaacgctggcagcaagccaacggccacattatctacttgcaagtcggatgctccagctgcagctgccagtgttggggtgacgaacggaaaggtcactccgagtggaggagccacatcaactgcacagccagcagttaaccaaaaagcgacagcagcagcagcagcacaaaagtcgcaaggggctactgcaacagcaacgcctacgaaaactgccttgaatcagaagacgattgtcccttcagcgggaagtggcaagggcgatgtgcccagcagccgaagcacggatactccaccgcctgcaaagggcgccgccagcagcaacatctcggccaagtccacgaaagccggcaagacacaggcgaacgaaaccagccccacgaagtcggcagtgaagcccatcaaggccggctccaccagccccacaaaagctgtggtgtccaaaccaggagcaagtgcagccaagactgcagcggcttctgctgcaacagcgacagcaactgcagcgggcagcagcagcagcaacaagaaggcggccacgtcgacagctgcaacattgggcagccaggccaagacgaaaggcaatgcatccggagcaggaactaagaagtaa

SEQ ID NO: 11679 - protein, 1201 aa, DROSOPHILA
MGQSSKSGSAGVGGVGGGGGVVCPSTAISGCASGTALIQLDATGPGAGGAGESEHERGTWTGRFDFLLSLLGYSVGLGNVWRFPYLCYNNGGGAFLIPFTIMLVIAGLPLMFMELSFGQYAALGPVAVYRRFCPLFRGLGTGMILVSAIVMLYYNLIIAWTIFYMFASFAPVLPWQNCEPAWSTKYCFSYAQADQCEATNGTYYLRTCHNATSAAENNITTLALGALKRPPAEEYFNNFVLGLSKGIEETGSIKLSLAACLFLAWTIVFLCLCKGVQSSGKVVYFTALFPYVVLVILFVRGVTLPGASTGILFYLTPDWKQLANAQVWGDAAVQIFFALSPAWGGLITLSSYNKFSNNCYNCGTFELSTKSNSRDSLIVAFCNIATSFFAGLVIFSIIGFLAHELNVDVEKVVDQGAGLAFIVYPEVVTRLPVSPVWAVLFFVMLLTLGLDSQFALMETVTTAILDRFPNLRQYKIWVVLSVAIFGYIGGLGFTTNSGMYWLQLMDKYAANWSVLLIAISECILIAWIYGSQRFLNDIQGMIGKRSWFWNFFWGIMWRYITPATLLFILFFNWVEYKPAKYGHYVYPMWADAVGWIVGLLPVLVIFLVAFQEIWRAPMSLSFRDRIKHLLQPTAEWGPAGRPCVNLHAERYQSQNYDGVTNTKILIEEEASPKQAANKKDRQLTLDVDVDVECLPLATVGKRPGAPKSMGKQGSSGNLQTNAKNGTHKSPTTEISPSKQPLIPSEKDNKSANIKVLAAGTQSSGRECTTMSTFAGGGEKKSTKVNLATGATSAAAPLASSNIATAATVAAATKSPPAAGVAPTTLVGIAATGTTVAAAANGKATLKTTISSGAVAATAAGGNKAASVAAATATVAAGKTPAAAMALNVAASVKVSQTDKTAPLKTTISASVATAPGGTKASTAPSVATAAVVSVSSGATVPAAASKAAAPLKATAPPPSLAAVNATQAAKSTPVAAASALVASAPPAKSTSASVAKTNTNAGSKPTATLSTCKSDAPAAAASVGVTNGKVTPSGGATSTAQPAVNQKATAAAAAQKSQGATATATPTKTALNQKTIVPSAGSGKGDVPSSRSTDTPPPAKGAASSNISAKSTKAGKTQANETSPTKSAVKPIKAGSTSPTKAVVSKPGASAAKTAAASAATATATAAGSSSSNKKAATSTAATLGSQAKTKGNASGAGTKK

SEQ ID NO: 11680 - DNA, 4116 bp, DROSOPHILA
ataattggtgttaagtgcaatttgtgcaacgcctcacgtcccccggatgctattatcgctttcccaagccaaacaaaaaccaggccagggcacgtgtgcctataaccataatgcctagaatcggcggagaatgtaaacaagctgaatggcgatgtttgcgtatatgtggccactgaaaagctgacgcagcagcgttcataattgcaattagaattgcaaaacaacgagcagcaaatgcggttttattgatatcccctgtcccggttgcttcatccatctctctctcggcatttttggcatacccactctgatgatcgagtccaaagatcaatctcttgaccaatgctgggcaaaagtggagcacacaaaccgcctctatagtcaccggtggtcagtccgtcagctactggtcattaaaagcactcgaccagacatctttgacgcgcttcgacagcggtttatgtaaactatgtaaatggcttgctcgaaccactttattactttatcgtctgggggtcattagcagtactgcttcgacctagcttccaccattaactaaatgaccaggattccagctgagcgtcaagacaagtggtttttttttgttgggcctaaggttcattatacgtatgtatgtatgcacattccatgcgataattggtttttttttttttttttttttttggcaagtctcgaagttaaacacggcttatcttgcgagcttgaaaaattgctaattttatgaaatatatgccattttctgagtcatattggtagaggcaagatcgtttccattagctatttgtcaaggtctcgcggcaatcgttgcagtcttagttatcttagaatttattaaacttccacgaatggcagacaacatttccggaggtaactaataaggtcatgtttgcttgttcactggcacgcgcttgataaaaaaaaaaaaaaacaatgtatctattcttgtactgacatatctatcctccttccatcctcaacagctatgatatggtacacttcggacatgccaattctctgcgacaagccaaggctcttggcgataaggtaattgtgggcattcacaccgacgaggagatcaccaagcacaagggaccaccggtcttcaccgaggaggagcgcgtcaagatggtcaagggcatcaaatgggtggatgaggtggtgctcggtgctccgtatgtgaccacactggatgtgctcgaccagaacaactgtgatttctgtgtgcatggaggtgggtaacaaatttatgcatatatctggatgttactcaatcgagtgtatttgtttgcagatgacattacaatgacagccgaaggagtggacacatatcatttggtcaaatcagccaatcgctacaagtgagtttgaaaagatatatttttaagacatgtggcagtttattaaaaagggaatgcacacacacttaccttatgtacatcttgccttaacctttaataagctgccagttgtcttgtaaagcacgtactgcacatttttccaattactgaccttaaattttcttatgcaatccgcagggaagtgaaacgcacagctggagtctcgaccactgaccttgtgggccgcatgttgctcctgacacgcaaccacttccgtcaaggatccgcggaatatgatatcgagaaagaaggtagctttagcttgttccaacgcttttctggcacattttattttcattttaatgttcctaaatcacagcgagcactgtgaatttgtgcgccaaattcattgtttctaaccattactaactttaattttaagactactttttgtttgcactctttttgtctttcatttcctgctgtcgaacttgtttattgctcttgcatgctgtgcataaatcaaagtcgatcaatcagttacaagtatgaacaatattatacagatatattcagtttatacatgggctacgcacgattagtttatgcattttccccaatagattctttttaatttgccatagttgaacgcaaataacgccttggtttatggttgccctctacaactttactatttctcttctttttatttctatgtacgcactgttaaccactatcaaaaatataatataatgtatgaaacctatgaaaactatgctaaatgttttgtgcgtgtgcgcgcccgcgaaatgaatccaaatgccgaatgcccaatgaccaacctgcaatcaaaatatccaaatccgaatccaaatcgaaatcaaatcctaaacgtaaatttttgctcttaaatacacacttttgctcatttgtctgcgttgctttacaatacaaaacaaacaaaaaaagtgtcaattttaaaacgacaaataaaatcccatccaggttcttcgaacatgggtcaagattcggcagccaaaagtccgtggaccggttgtagtcagttcttgccgactacccaaaagatcatacagttcagtgatggaaagtcaccgaatcccggcgataagattgtaagtttagccctcattatatgtatataatgtataattcataattgtcggtatttgcaggtttatgtggctggcgccttcgatctcttccatgtgggtcacctggactttctggaaaaggctaagaaactgggtgactatctgattgttggcctgcacacagatcccgtggtgaactcctacaagggcagcaactatcccattatgaatctgcacgagcgcgtgctcagtgttttggcctgcaaggtaggattgcaatagattcttttttttaaatattatctcattttaaaacttcttttttcccccagtttgtcaatgaggtagtaatcggagctccctactgtgtcactgaagagctgcttgagcacttcaaaatcgatgttgtctgtcatggacgcacacccattgcgcttgagaatggcaagatcgatccatatgccgttcccaagacgcgagccatctttgagctgatcgattccggcaacgagatgaccacggagcgcatcgtggagcgcatcatctcgcaccgactggaatatgagcgtcgcaatcaggccaaagaaaagaaggaaatcgaagcctttgaggcacttcaacgccaaaaacagacccaaaaggccggctagccggaaccagattccgacctctcacactagacggatgttttttattttctagttgcgttcttttagtttgttttatttagtttgtcttgtttagtatgtcgtcccctgatgatggcgctttaattttttgttgcgtaaaaagcgaagcgacgctgcctgaggattcagcgcaccgctctctcgatttctagtacaattttagaatatctgcacatgcgccttaatgatataaggttatacacataattatatatttctaacacattaacgtagaatatttaaaatctaaattttatgtatgtaagctcaaaatttgtaaattccctttaaagtacgatgtaagtgtgaggaacaacaaaattgtacgaatagcatgttatccaaactgttgccgaattgaaaagccttgtacgacttgtatgtatatatattcagcaacggaagtaggatgcctggatcaggaagtagctgcttttatcaaatgtaatctctgatactttgtcctaatttattaatgcatatagtaagtgcgagttcaagttttatgtttccttgtttaatcttagacttaaatacatggccaaaaatattgcgaattccaaaaaaaaaaaaaaccggaagttttatatacttgcctcgctaatcactttcagttcgacggttagcgattgctgccaaacatctaaatccattagtggccggaggtcattcaagctgatgaggatcacgttgctgtcggtcttgatgaactcactgcaggattggttcgacgacagtggcagcattggacgagcttttatctgtctggtgtagtaacgtggcaggttggcaggttggaccagcaggcgcagagtgatggccacgccgtgcaaaggagtagccacccagatggccaggacttcgtgtttgacacgcttcctttcccacagcaccgagtgcatggtgcggcaggcgaagatcataagggcgctatgctgcgagaagcggcggtactcc

SEQ ID NO: 11681 - DNA, 1096 bp, DROSOPHILA
gctatgatatggtacacttcggacatgccaattctctgcgacaagccaaggctcttggcgataaggtaattgtgggcattcacaccgacgaggagatcaccaagcacaagggaccaccggtcttcaccgaggaggagcgcgtcaagatggtcaagggcatcaaatgggtggatgaggtggtgctcggtgctccgtatgtgaccacactggatgtgctcgaccagaacaactgtgatttctgtgtgcatggagatgacattacaatgacagccgaaggagtggacacatatcatttggtcaaatcagccaatcgctacaaggaagtgaaacgcacagctggagtctcgaccactgaccttgtgggccgcatgttgctcctgacacgcaaccacttccgtcaaggatccgcggaatatgatatcgagaaagaagtgtcaattttaaaacgacaaataaaatcccatccaggttcttcgaacatgggtcaagattcggcagccaaaagtccgtggaccggttgtagtcagttcttgccgactacccaaaagatcatacagttcagtgatggaaagtcaccgaatcccggcgataagattgtttatgtggctggcgccttcgatctcttccatgtgggtcacctggactttctggaaaaggctaagaaactgggtgactatctgattgttggcctgcacacagatcccgtggtgaactcctacaagggcagcaactatcccattatgaatctgcacgagcgcgtgctcagtgttttggcctgcaagtttgtcaatgaggtagtaatcggagctccctactgtgtcactgaagagctgcttgagcacttcaaaatcgatgttgtctgtcatggacgcacacccattgcgcttgagaatggcaagatcgatccatatgccgttcccaagacgcgagccatctttgagctgatcgattccggcaacgagatgaccacggagcgcatcgtggagcgcatcatctcgcaccgactggaatatgagcgtcgcaatcaggccaaagaaaagaaggaaatcgaagcctttgaggcacttcaacgccaaaaacagacccaaaaggccgg

SEQ ID NO: 11682 - protein, 362 aa, DROSOPHILA
MVHFGHANSLRQAKALGDKVIVGIHTDEEITKHKGPPVFTEEERVKMVKGIKWVDEVVLGAPYVTTLDVLDQNNCDFCVHGDDITMTAEGVDTYHLVKSANRYKEVKRTAGVSTTDLVGRMLLLTRNHFRQGSAEYDIEKEVSILKRQIKSHPGSSNMGQDSAAKSPWTGCSQFLPTTQKIIQFSDGKSPNPGDKIVYVAGAFDLFHVGHLDFLEKAKKLGDYLIVGLHTDPVVNSYKGSNYPIMNLHERVLSVLACKFVNEVVIGAPYCVTEELLEHFKIDVVCHGRTPIALENGKIDPYAVPKTRAIFELIDSGNEMTTERIVERIISHRLEYERRNQAKEKKEIEAFEALQRQKQTQKA

SEQ ID NO: 11683 - DNA, 2195 bp, DROSOPHILA
actaatattttggaaagttaatacattcaaactcaaatcattaagccatatgcatttttcttcccgtgtagcgagtgacgcatcgccgtggcgaatcaataacaggcattagtgcaataatggaatcatctctagcctggcaatccaatccactcactttgtattccattatgcagctggaagattccttgggttccttgtggctcttcagtagacgacttcacacgaatcagtctttctcctgggacttttttgcgaattcttcttgcgacgtcttgtcgcctctgcctgcttttgctaaataattcggattgggaggcactgcaccgaggtctcttttcagtgctctccggtttgcgctcggtgcagagcacaagttttacacacgaagaaaaatgagacttgtttttggatggcagaatctgaaggcagcactcggctacgtaaattaaatacacatattgtattgcttttggctcaaaatcgatcggtttttatctaatttcttttgttttaacatagaaggaatatttttgaattcttttcgaatttgaaatcgaaagtttttttttaattttaaagcatttgttatctgttttagataatggatgcgatgtattgcaacataggtacctgccatttccccgtttgaagccaatcttgtttctctcagtgtataagcttacgcgagcgcgagagagagcttttaattccgcttcaattggggttgcacttgaattccaaatcaactgattcattcggcacatttcttgaattaattaattaaaacctggcgatgagatcgtaaaagcttaaaatgtgcacaagcatctaggttttaatggaatttttaatgcgctttatgccgaaagagtcgaaaatggattcaagtgtcttggaaaaagtcgcttcaaatgttttcagatcttaaaaaacaaaatatcgaataaaatcatttctgagggtatacactttatatccgagccaaataatagacatctttttctcgtaggatatcttgtatagatattatgtttatttaatcttgttaaataggcttcgctataatacatttacatttgggctctactaaaacaaacaatggattaccaatcaaatatgcgggtagttctattcttatgtatatatatatgtacatatgtatgtatgtttgtctatattctgtcaagtagagaatgttgcagtttcccctgatttcttggcgacttttaagtgattctgagcacttggactgcaattgagttttgagttctgggttctatacagtagcgggatcccaaaaatacaacttaaattttgttctaggacgatcctgtaagcttagcaaaagtggtatcgactattaactatatcgtcctagatctcgtcaccctggttcatcttgatctcgctaagatgggtgttgaaccgcgaccattcgtcgcgcgatggctgcgccaggttctcggccacgtcgtacacgtacagcttgccggcctcgtcgccgatgcacaggccggatggagtccaggagtcgcggcgaagggctggtgctccgtgtctgggttgagttttatcaggtccaggcggccgctgccgtcgcacgggcgaccaggcgatgtactgctcaaaggagtacagcggcttggtgtcctgaaagagtgggcatatttgaattaattccggagacgacagaaaactggcaacttgatatgggtacctttagcgaccagagcttgatggtccagtcaatggacgaggttaggaagaggtggccaaagtccggcgacagctggttgtagtgcgtggatatgccagtgatagggccaagatggcgttcgtaaacctcgttgaccccggagcgcaggccgtggcgcgaggcggagtagacgtagccgtcctcactgcccatcaccaggctattgatctcgttggccgggaaggccatcgatgtaatggcaatggccttagactggcgctgctgcagctccagcgtgtcctgtggttgcgacagcatgtccagcgaccaggagcacagcttgccgtccgaggatatggagatgacgttgtgcgcattctgggtgcccaccatttggaggcagtagacgggatgcgtgtgcgccgcggcactgaggggcgtgcgctgtatgggcgtgcgcttctgcacgcgattgtcccacagcacaatctggccc

SEQ ID NO: 11684 - DNA, 1128 bp, DROSOPHILA
gggccagattgtgctgtgggacaatcgcgtgcagaagcgcacgcccatacagcgcacgcccctcagtgccgcggcgcacacgcatcccgtctactgcctccaaatggtgggcacccagaatgcgcacaacgtcatctccatatcctcggacggcaagctgtgctcctggtcgctggacatgctgtcgcaaccacaggacacgctggagctgcagcagcgccagtctaaggccattgccattacatcgatggccttcccggccaacgagatcaatagcctggtgatgggcagtgaggacggctacgtctactccgcctcgcgccacggcctgcgctccggggtcaacgaggtttacgaacgccatcttggccctatcactggcatatccacgcactacaaccagctgtcgccggactttggccacctcttcctaacctcgtccattgactggaccatcaagctctggtcgctaaaggacaccaagccgctgtactcctttgagcagtacatcgcctggtcgcccgtgcgacggcagcggccgcctggacctgataaaactcaacccagacacggagcaccagcccttcgccgcgactcctggactccatccggcctgtgcatcggcgacgaggccggcaagctgtacgtgtacgacgtggccgagaacctggcgcagccatcgcgcgacgaatggtcgcggttcaacacccatcttagcgagatcaagatgaaccagggtgacgagatctaggacgatatagttaatagtcgataccacttttgctaagcttacaggatcgtcctagaacaaaatttaagttgtatttttgggatcccgctactgtatagaacccagaactcaaaactcaattgcagtccaagtgctcagaatcacttaaaagtcgccaagaaatcaggggaaactgcaacattctctacttgacagaatatagacaaacatacatacatatgtacatatatatatacataagaatagaactacccgcatatttgattggtaatccattgtttgttttagtagagcccaaatgtaaatgtattatagcgaagcctatttaacaagattaaataaacataatatctatacaagatatcctacgagaaaaa

SEQ ID NO: 11685 - protein, 215 aa, DROSOPHILA
MVGTQNAHNVISISSDGKLCSWSLDMLSQPQDTLELQQRQSKAIAITSMAFPANEINSLVMGSEDGYVYSASRHGLRSGVNEVYERHLGPITGISTHYNQLSPDFGHLFLTSSIDWTIKLWSLKDTKPLYSFEQYIAWSPVRRQRPPGPDKTQPRHGAPALRRDSWTPSGLCIGDEAGKLYVYDVAENLAQPSRDEWSRFNTHLSEIKMNQGDEI

SEQ ID NO: 11686 - DNA, 12425 bp, DROSOPHILA
atgacgtcgtcgccgccgggatgatcccttagaaagtgtgtcacatcgtagaccctatcgtagattaccacccagcaatcgtcgaagctgtcgtgctgggccacctcctccaatgcgatctccggcagatcttccagttttaaacgttcctttttgcttggtacaacgaccacctgattactggactttccatgtcccaagggcacaattctcagcgattgcaagaggttcgtcaacgcggatgacatgttgtaagtatgcaattactttcacttttactaatatttgatacaacgatttgtaatgccgcccgatcacttcagacagccggcaatcgattcaagttgagttctgcttggtcggcttcagttccagttttacttggggtcttgagtgtctttcgtgtgcagccaccggtactggagtgtcattcatgccttggattgtaatcgttttataaatgacaacacgtgagtcgatcgatggagccgacagcatggtgataagacttcgtgtccagagaagcgaagctcttatagatcggtttctatataatatataattatatatatatatatacatatatgtatgttcaaccgaactggtttgcatctacatatgttcatgggagggctaggcattgcactgagattgcgagattttgcaataatgttttgtggtcactcgtactcatatgagtcaatttccgaatatgctcgtaaagacgagcataaattatatatttctctgttaatcggattgctcagtgagctaattacttgctaccttataaatttaatgggccagcaattattaaaagggagacatttaacgcgcctatcagcattacaattgatttattggcacaagtcaaacgtgcatcgggcgaatcaattacgtctactcgaaccgtttgatcgccagtcattaaggcaatcaaaataaattttgggttaatagcctggagttatttacttttaatacttaaatgcgttttaagtttgccaaaaatcacgatttgtgtcaagccacgtttgttctaaattctaatgggaacagagataatgacttcaatattatcgctcactacaactttgaacttgaaattggaatggattcggaaattatgccacgcttttgaactatttgaaccatgggaatgattttaattttacatggagtgagtacgtttaatcaataattattacgaaactaaagatctgatgaaattattcagactatttaatttcccatttattaaattccagacagaacgccattcactaattctgtacattgtattgtataaatagaaaatattgcaaagctaaggaaatagttcaaactacgcaatataaaacataaatattattcaagtaaaaacaacaagaaattatttctaaataataacttttaagacgtcacgattcaattgttattgatcatttattattttcaattgagttcaagtttgatgtgtggttttaacaagatttggtaatctaatatgctagcatctcagtgttaagatcagcattatcacgttaagtaattaaccgcaaaaatattcaaagtcgtaactgaacgagctctttaaatgggctaaaccatttgactttgactttgaggtttacatgaactaggtgtatccatattaaatatctattgatggttagaaaaagcctgcgaatagcattgctaataaaaggcagaatatatttcagttctaagaggttatcattctaagtgtgcgtgattgcgtacatttttgaaaaaaacgcgaatctttcttcgacaagaatatttgaataattgcctagtgttatcagagtagtctagaaatatgtaggggaagagattataatttagttctggcgattttttgcaaaaatgttaagataaggctgaataagtactaagtactttcaaaaccattgtcaagtccacggacggaattaaaagtgactattcattggtcttttcttgtatttgtatttaaagtttattagctatatcacttctaaaataagaataaatcaaagttcaacgaagtccgaatattataagttatattttcttttttaccataatcaaattttggcaaaacagggaaaagaagcaatacaaatatttaaatagataacgacaagaattgcaattcattataaataaatacaataaatatttaaaaagtattatataaataaatcaacagtcaggattatatgcatgtttcttaagtaaacacaatgattctgaaaataatattatatgagtcgtacaaatttatatatttcttttcatatatagaaataggtggcaacgcccaatgtaacggaaatgctaaaaagcttcttgaaaacataagcttttgggaaaggttaaccgattcggatttcgcgggcttttttctaaaattggccagctgttgctctttgggaagcttttgtataaaaaaaggcttttccttccggtagttggattactttttggctaaaacgggtggccaatatttaattattacttccttatattggtatattaagtatgcaaataaattttatttcgaaagacacttttttaaactagggattttaacggacatttccgtcagggactcgaagtttcccatttgcatttgtgtggtgtttccatcagcccatctgtgttttgggtgcgaaagtgtgagtgtgatggaacatgacatcgggtaactgcgtgtaatttttggtgaacaacaacacagtcgagtttcagcaacgctctggccaagttgttaaggcgcgtgaataaaaaaaaaagcgaaaattcaaccgcttccagttatctctttacttggctaaatttatttgatgtaattgaccaatgtgagcaggggattattgagttaaaaattaataaaagcccgctaatacggaaattgcttcgaaaactcgttaacaacacgcacaatatgcatgccactgtgtagagcaaattgcgcatacgccacgttgaactgtcgtattcgtattcgtattcgggatttcgtaaacatattgttgcggtaaattgcatgcagcaatttcaataagaaaattgtttgcacagtttttgttcggctttgtgtcaccgatttgcaaatatttaaggggtaagtgctgacacagctgtttgatccatgtgaactcaatttgcatacaaattcgatgttataatctgcgaaaatagttaagtcacgtttcgaaaacaagccattcaatatttaatggtttttacttgctttgaagtcaactgaaatcttcattgaacaatggtttcgtcgagcgaatgtaatacgaacttgttgaaccagtaaattgattttctagaccaaaaagaaagtgtaagctggcaaacttttattgttaaagtttagcgaatgtattttcctttgtaaattgccttgtaaaaagttctgtccaaggttctgaagaaatactttgagtgaaatagtttaataatgcaacataaattgaggggagttttcgatcttttccaattctcacaggagttgccagacaaaactatagtcatttcctaaaagtttacttcaatacgttcgcttattattgtaaaaggaaaaattttaatttccttgtgccgcactttgcttttaaagtcccttccattttacattttagcggaaccttaaatacgataggctcataaaagcatggcataataagtaatatgatatcagaaaatgatccacatcctttgatcccaatcagatttgtagaaaattgtttgctttggaaaatgagctaacctctcgagcattcaccgcgccagaaatgattgctgattgaaacgattgcattgcgtatacgccacgtggaacacgttgtgcattcggcgtgataaattccttcaaagcattggtattttaatgtaattagttcacagcgtttgtaaaacgtactccaaacatgtacgggatccttttctcaatttgccctattccgtttgaaaagactgtgagaatttcgttcggaattcctcagccgcgggctgtttaacctggtggagaagccaggacacgttggccacgctggcagccactcaaacacaacaaccatgtccttgaaacatccgtgtgtggccgtgactctcgacctccattccgtagccgaatcgagcgaccttcgtcatatatattctctgcctggaatattgcgtgtcagtcagtcaacaggctgcactaaagaaatgcatttattatagacatctctgggtgccgtaaagccatgaatatttatcccatgtccgaagattgatgcatttttaatgcaaaaacgtcgccagaagccacaggaaaaattgacgaggccataaagaagctcacagccagccatgtttgttaacttgttgagttattggcagctctttagcctgtgacccaccaccattggttcctttatgtacccacattggcagccgagcaggtttccctttgttccaaacccaagtattaatatcacacttattatttccgtagcccacgccaggacatgtttcttcttttatttttcttttttttgccatccgaagagcgcatgtaaacattttccgttgtttacttcttgggcattttcagcgttttaatgagcgttttattgtttatttttatgctaccgcccttagactggaggcgcataactttgggtcactttattaaattgctgtttatcttgctttcgccagtttctctcttatattttttattttcaatattttctgtgtcccgccggtcggatcccatggtttaatggcctgtggcgaattgacatatggttgttgattttaatgggatcttttattccacttttatcgcatatagctttggctttggcgtgtttttaaatgagagtgaaaggattggcaggattctgctgctgaatgacttacacatgctatctatagttgatctttgacttttaaaatgtcatgtagtagtagagcaaccttttttttgcttatacacttattgaatgtgcattagcatcaacaacattaacatcacagcaactatgctgtgactttcggcttaaatttcacttttaaatatgtgtatcataagaattcggttagttttagaaatcgaggcaaactaatcattattttctctaatcgaaactttgcaaaaggaataaaactctagtatcaagttattttctcttctcaagaagtttattaatcattttatgccttcgcccgggttccttggcaattctcagctgcttatagtacatcccttttatccccgccataagctataaatattcattgatggctaattagcagggacggcgatggggtcagcatccaattgccctgttgatcccattgacattgaggaccacaactggcgatgccattggcggcagataatcaactcgaataacaaaaacagacgcgttacgggcactcaaagggggcaacacgaagatgataatgatgttgccgatgtggacaaactagcgcctcgaatgtgtcattatggcgcgtattacaaattgctgatgcctgattattgacgggcaggacctccggatcctggaggacattgtggccctcgtgccgtgtatattagtttagcttgtgctgcttgtttatgcaaaccgaaggtttttcatctgttgctccagggaccgtatataaactgcactggatgttttgaaacgaaatgaaacttccacgcaggtgaggaaggacacgagctaatggattccaggtctgccggagccttcataagcttggttatgcaactgggcagagtttataaaacacaaacagacaaaatcaataagagaaagtgaaagttgctaaaaaataacattgcaaaaaagtccatatcttaaataaaatatacagataactttcatttatgtcaacttgcattattttgcatagaattgcctagcttctggcggcttatgttttcctatttttttttttagaaaaataattaaattgcagttccttttccacgattgcctgttgccatattttttctgagtgcaattgtttgcaattgccattgttttgtcctagtctcctttgtctagtgcaatccaggatagcagcaacacgcgcattctcgtggatgcgatgtcgtaatctaattactgttgccagggacaggtgtgcaaccagttcccggccaatgtttccgcaatgctctacgacaggataagccaaacaatggctgaggaaggccggaaggataaaaggataggggcaaagtacttccggaagtcaaaggaaatgaatgtttagcttataaaatgagctggtttgtgcaagtttagctacttccgctaaatcaaaacattttgccatgtgaacaggcgtaagattttttagtacgaagtaaaatgacttgctcttttctttattttaaagagtctttttcaacaaaaaatatctttatgagggacttatccctagcaaactcccctggcaacagaataatagggtgtttgccttgctgactactgcaattgtccacattctttgcaaaagcagcagggcgtggatttgaactggcagctggggccattcctcgagcttttgagtcacaaaacacttcattagactaatgagcataatttgccataattgcgcaattcaaaggcactgcgaccgttgaaaggcatcttaatctattatttttttttttttagcgcgaatgatgaaattgctaaccaaagctgggtgaaatcacgggaatgagctggcccacacacccaccgttttcccatgcattcaatgaaccattcagctggttttatcgattagataaacttaattttagtcgctcggtccacacattaggggacttggagggacgcgtttctggccttgactttgctgcgacgcaaacaaaatcgcaggcggaagtagtgcggtcttatctaggggttccagcgaaaagtgaaaatgtgcacgataatgccgcaaaatgatttacaaagccaaccgaataccaaaaccagacagtcgggccaaaagggggcctaagcgcggtttttgtattaaaatttatgacaggagcaataaatccctatgcccacaggcccacacacgtgtgaaagatgcatgtgggcaaataccaggcccagtaaaccggcggcagattttttaaaataccctttttagggcacttagctaacataagctataaaaatggattcgcgaaataattcgcctattccaaacacagcttttgagttttaatttttctaaatgatttaaaggactgactgactgagacttaagtattatttgacaatcttttcatttcttaaccttttttggaatttattgtacaatatcacaaaacccgttttaagtaagggtaggacattttgagcgagctgcgagtgtcaggatatgacctgacattcacatcctgacactcgcgcaggcggcacagaaggacacctcgactgactgaatattctgactgatgatgtggggtgcggcagtgcgatctgctcaatttgacattgattgggttatgtgtgatttacaaaagcgaggagtcgcctatgtggaaaaacggcaggtgatatcagctggctggcattttgccatatttctcggtggatttaggggcgattgactgggaaattgatttcactggaaatgtctacacaaagcgcttaaatgctactccacgaatttcagctaatttacagcactgtctactgccattccagcttccagcttcgcaactgtcaaagtttaaattaaaactaatttcataaattttccaaacagccacattaaggcccaagcacacttgtttgcacataagggcacataaatcattttccgcagattttccaagtaactaagagatagaagaagggaaacagggaattgaacccgcatacacacctcatgcaattgccataaaagaaaccgtagacccaaaacaaaagttagacgtaaataaataatgagcgaaaagtaaatttgcagaaattggacagaaaaagcggtgagggtgaggaacgaaaagggtcagaggtatggaatgaaacgcaggactcatccaaaggtggctttcaaatataaatatactaattaattaacaagtctcggctatacatttttgctttttcaacagacaacacttcatcttgttggcagttctctgcgctctttacattatttgtacacagaaaattcttatgataatatcgaaaaatacaaattttcttttaaaattggaacataattgcacaatttataattgtaactttatatactatttggctgaaattccttaaaatatttctggttttattgtaaggattttttctttttaattccattatgatgattaggtaactctttgacttagtgtcattttcagatctcatgtctgcatctctactttaatgaattaaagaataaacagttttcttcctttttacgtctaataaacctttagaaaaagcgcaactataaaactgtttagtgctgaaggaggtttagcgacgtacattctacgtcagttttttgttttaagtgtgtgtgtaatttggcggattttgtagaacttcttgggatgagggtcacctggcagtttgctcggttaattgcgaactaaccgaggaagagccgcctttatggcaattttgtgtggttgcggtcggagaaagacaaagcacggcacctcaattagcctcctggtggatccttgaagctggtgggtagctgtgggcacgtgccggtggtcaggattctgcggtgccgatgccccacaagcagcaccaccttaagccggtcaattaataacccacaaagccagggaccggagaagatgaatgtcgaacgtggggccccaagctttgatttatttatgagacacacatcccgaggtccagacttgctaatgaatgttttatgggtagattgggtatcattaggcaggtggagagatgacaacgcggggtcaggccgagtaattgacccgcattaccatctcatatgttttggagtaagcagagactatattcattcacattacttcttcattccagattcactctcagccggagaaatggacattgtcatacgtgaggaggacatttctttggcccaaattggcgtctatgcctctgtgtcctttctcgttgtttctgcagttggggcagcgctgtataccacctgctcaaaacgctatcgcctgaactggttcgaacaaaatctcctggagtccgccaacgaaaaggatgaagatcagcaaaggtgagtgtccaatgaaattgatgagggagcttgcttaaatgcttactgtataggaaaatcttaaataatacaaatgaaaagagaaaggctaaaacaattcttactctcagcaaaaatgtattttggtggtgttgcgttttcttttcttttatattatttttctcttcacccaaaggaatactttaatttggaaaaaattcgtttgacaaacctacttaaaagctgttccagcatcagttcgtgttgtaggggcacccttggtggtactaacctttaaaaaattgttttcgtttcgcccaaacagggaggctttggttgccggtgccgtgggctacaatgtggacaacgtgaacgaggtaccgcgtgggaaatacagcagcggaaatgccggtaacctcagccccacctctctgaaaagcgaggacaatgacccggccttttgggtgccggcttcagtcacctccacggcagccatccagcaacaagtgtccaataccaccgaggagtccgcaccgccaacatcacccaccgggagcctgaagtcaaacaccttgtcctactgttccaccacctccgtgccaatcgcgagatctgataagcatgtggtccttgctatgcatccgagccgtcccagagtttcctctatgaacgccaagctggatcacaccaaaatcgacatgaccttgtatagaagtgtgagtgaagaggactttctcattttaaaatcatgtattttatgttttttatttttattatttgttagcattctcagccgaagactatcaatccagtttcactcaacgaagttcggggtaatttgcatgtgagtcttggctacgatccagttggaggattgctaaatgttcgactcctggaggcccagaatctgcaaccgaggcaatttagtggaactgccgacccatatgccaaagtccgcttgctgccggataaaaagaacttttggcagacgcgtatacacaagaggaccctgaatccaggtaaatgctttaaaatatttgtattgggattttacgttaacatccaagccccttcgcagttttcgacgagcagtttgtttttgaggtaacagccggagtaattgacaagcgtactgtggaaattttactatacgactttgatgcttattcccggcacgtttgcatcggaggaagtaagctacatttggccaacttggatctcagcgagcaattgaagttgtggactcctcttagttctgcctcggcccaagatatgaaggtggatttgggcgatataatggtgtccctagcctatttgccatcagcggagcgtttgatggtcgtccttatcaaggcacgaaacctgcggattgtcgacgatgcccggaactcctcggacccttatgtaaaggtaaccctcctcggtcccggtggcaaaaagataaagaaacgcaagacgggcgttcaaaggggcaccctgaacccagtctataatgaggctcttgctttcgatgtggccaaggagactttaaaaaactgtgtactagaattcaccgtagtccacgatggcctattgggtaagcagagtttttacaatcgttgtatgtttgttttttccatttacctggctgttaattgttttactttattgatttttttttaattatttcgttttactttatttttattgtctatttagttgcctttaatttggtttaagtttcttcgactctaaaattgtttcctatcttgttggattgcttatagaataatgttattatgtatcatattttattataatgattttttcttcaaaaaatgtttgaaatcagtttacagtttcctaaattcaaacttcatatcattgtagaattggccttaatatttcaacactgtatttttaaacaaaaattaatagaatatcttttatggatatataatattataatatattgcaattttagttaagaataaatattttttttgcaggatcaagtgaaatattaggacgaactctcattggaaactctccggaagtacgcaccgaggaaaaaatattttttgaagaagtttttcgtgccaaaaatgctacggctcaatgggttccactgcaagaaccggcaaacaatttggccacatcggccaaaagttcaaagaactagagttttgtattattgtaaaggtatttttttcagtatttccacagatgtcatccttatttctaaggatgtgtgtgtactcggttgcaggcgataaaaaaataccaaaatatccttttgccttgtgtctcaaaagagacatcgatggtggctgtcttggatgcgtgtagaaatgtgaatgaagtgaatatccaaaccttttttgtgttagcactgtcatgttaataacatttaaagattctgtaatgcgaaagaacgagccacttattaaaacaagaaattatatatattattctgtgtatatatacgctttaacgatcggaagataatatatttaaaacttcgtcaacttttctccgatcgagcttttgcaattaactctcaaaaataaacgaatgaaccaaataccgaatgtggaaattgggaaaccgtttttaaaatacttaaagcattatgaaaagtgtaatggtcctttctttatattcgcgtaagctactcctattattgtgaatatagcggcacaagtatatcatatatataatgtataacaagaacttggcaacttgttaatcaaaaaatttaatgaaataagggaacttgcagggatacgtaataagaaggatatagagctgaaacaaaatgtcacaataagtgacaaatagtttcaaacgaggtcaaatataactcaatgaatgtgctttgtacggtatcaattaaaaaagaaaatatatatttaatatacattttatgtgtcagaaatgtcaagatgtacctaaaataaaaattattaccttgagcaaattaccgaaacaatatagaacgcaagtgatgattttttaaatatttgattttattttaagttacgaaatggtttcagggcacagagggcacaaaaataatagaattctagtttttttctcacattataagaatttgttgtatattataaagatgcacagcaagtataaaaatttgtagccaaaaaacaggattcttatatgca

SEQ ID NO: 11687 - DNA, 1685 bp, DROSOPHILA
tttgccaaaaatcacgatttgtgtcaagccacgtttgttctaaattctaatgggaacagagataatgacttcaatattatcgctcactacaactttgaacttgaaattggaatggattcggaaattatgccacgcttttgaactatttgaaccatgggaatgattttaattttacatggaattcactctcagccggagaaatggacattgtcatacgtgaggaggacatttctttggcccaaattggcgtctatgcctctgtgtcctttctcgttgtttctgcagttggggcagcgctgtataccacctgctcaaaacgctatcgcctgaactggttcgaacaaaatctcctggagtccgccaacgaaaaggatgaagatcagcaaagggaggctttggttgccggtgccgtgggctacaatgtggacaacgtgaacgaggtaccgcgtgggaaatacagcagcggaaatgccggtaacctcagccccacctctctgaaaagcgaggacaatgacccggccttttgggtgccggcttcagtcacctccacggcagccatccagcaacaagtgtccaataccaccgaggagtccgcaccgccaacatcacccaccgggagcctgaagtcaaacaccttgtcctactgttccaccacctccgtgccaatcgcgagatctgataagcatgtggtccttgctatgcatccgagccgtcccagagtttcctctatgaacgccaagctggatcacaccaaaatcgacatgaccttgtatagaagtcattctcagccgaagactatcaatccagtttcactcaacgaagttcggggtaatttgcatgtgagtcttggctacgatccagttggaggattgctaaatgttcgactcctggaggcccagaatctgcaaccgaggcaatttagtggaactgccgacccatatgccaaagtccgcttgctgccggataaaaagaacttttggcagacgcgtatacacaagaggaccctgaatccagttttcgacgagcagtttgtttttgaggtaacagccggagtaattgacaagcgtactgtggaaattttactatacgactttgatgcttattcccggcacgtttgcatcggaggaagtaagctacatttggccaacttggatctcagcgagcaattgaagttgtggactcctcttagttctgcctcggcccaagatatgaaggtggatttgggcgatataatggtgtccctagcctatttgccatcagcggagcgtttgatggtcgtccttatcaaggcacgaaacctgcggattgtcgacgatgcccggaactcctcggacccttatgtaaaggtaaccctcctcggtcccggtggcaaaaagataaagaaacgcaagacgggcgttcaaaggggcaccctgaacccagtctataatgaggctcttgctttcgatgtggccaaggagactttaaaaaactgtgtactagaattcaccgtagtccacgatggcctattgggatcaagtgaaatattaggacgaactctcattggaaactctccggaagtacgcaccgaggaaaaaatattttttgaagaagtttttcgtgccaaaaatgctacggctcaatgggttccactgcaagaaccggcaaacaatttggccacatcggccaaaagttcaaagaactag

SEQ ID NO: 11688 - protein, 494 aa, DROSOPHILA
MDIVIREEDISLAQIGVYASVSFLVVSAVGAALYTTCSKRYRLNWFEQNLLESANEKDEDQQREALVAGAVGYNVDNVNEVPRGKYSSGNAGNLSPTSLKSEDNDPAFWVPASVTSTAAIQQQVSNTTEESAPPTSPTGSLKSNTLSYCSTTSVPIARSDKHVVLAMHPSRPRVSSMNAKLDHTKIDMTLYRSHSQPKTINPVSLNEVRGNLHVSLGYDPVGGLLNVRLLEAQNLQPRQFSGTADPYAKVRLLPDKKNFWQTRIHKRTLNPVFDEQFVFEVTAGVIDKRTVEILLYDFDAYSRHVCIGGSKLHLANLDLSEQLKLWTPLSSASAQDMKVDLGDIMVSLAYLPSAERLMVVLIKARNLRIVDDARNSSDPYVKVTLLGPGGKKIKKRKTGVQRGTLNPVYNEALAFDVAKETLKNCVLEFTVVHDGLLGSSEILGRTLIGNSPEVRTEEKIFFEEVFRAKNATAQWVPLQEPANNLATSAKSSKN

SEQ ID NO: 11689 - DNA, 4106 bp, DROSOPHILA
agattggaatcgatctgggcctggaagggattggccgcctgtcgctggggctggtaggtgctgctgggatcaccacgcagctggctaaccggatgattgtcgtagcgctccgctggtgatagcggagccgaggggctagcaccgccacaggcaccctggttaatgttgctattggcctcctgggaggactgactgcccgtgggcgaaccagtcgcggtgggtggttggtccctgttgcccgaaaggtagttcttgaggccgccgaagacactcttcagaccagtcagatggcgctggctgaagcgcagcgtggagctgatctcgtccaactgatgtgatgtcttctccagttgctcccgctgcttggccagctccacggccgtcgccttacccacctcctgggtttcgtagagcagacctgggggttgtaggagagagacgcatcaataacgccccttaattggctggcaattgaccccatgtttacccaagcttttgttggtagagtccagagttcgctgctcaatggcccttcgcttctcagcataggccagtcgctgtgcggccactgatggcgacgaggttatctcctcttcgtcatcgtcatccatctcgaagggattggtgctcctctgctgcggaagcttggctgctcccgtccgtttgttctgcaggaataggtcgtcgtccacgtcctcgaatctgtccacgtcatcgaagtgatcgtgcactggctgcaggtagttatgggccatttcttgtggcgagggaaacttccaaaatgtcgaattttgttatgttttcgtaaacttttattttctttgttgttgtctggagttatcgattgcaatagcgatggtacaaatgtagtatttgtatgcagttcaatcgacttataaatagcttgacattgcagaggcttcaataaaataagttattataattaaaatgattttgaagatacgataaaaattgaatttgtatgtaagaaaacttgaagcttgatctaataaataaaaaatcgtgtaacgagcgaataccgaccgaatccccctaccgatgatctagcggggaataaagcggcttgccatctccgatggatatcgaaccagcacttctgtcaattttccagcaggcgtcgcagtttctgtaactttttggaactgaccaagacggaagctttagtttaatttaagaaactgtcgcagccgaacgtcacaggtttcaggacacgaatcggcggagcaaagcaccaaaacatcaccacatgcatagcacatcgtactttgtggccgcgacatgcgcggcgctgcttctgctggcggcgacggcgcagtcgacggcagcagcgcagtcaggactgcagccaggtggcaagttaatcgagttggacgaggacaactggcacctgatgctccagggcgaatggatgatcgagttgtgagtgcgaaagggtggctctgagtagtccctacccacatgaaaccccgctgcccctgacgtaacataaaggggcgtggtgcgccggctttctccagccggcaagctggttctttcgttctccgaaataccagacattcctttgcggcgacgatgactcatcggcagctgtgttaaacatatgtttctccctccattcacagctttgctccatggtgcccggcctgcaagaacctggctcccacctgggagcggtttgcccgcgtggccaaggatgtccaggtgcaggtggccaaaatcgacgtgacaacctcgccctcgctgagtggacgcttctttgtcaccgccctccccaccatctaccagtgagcaccacatagaccttttcaacccatgaaatacacatcgtcgtaatccacgtcaatcatttccagcgtaaaagatggcgagttccggcagtatcgtggggcccgtgatggcgacgccctcctctacttcgtgaagaagcagcagtggcagagcatcgaaccgctgtccgcctggaagaagcccgacaccacccacatgtccgtgctgtcctacttcttcaagctttcgcacactctgaaggtacgttcacctagcccattatcgcatcggttcactgcatgagacataagcggaagcttatcagcgggttgatcccgttgacccacaaaagattgccgcccatcactcattactctggtctttgctctctgctgttgtcttgtatgttgggttcatgtactaatagcatacgcaaaaactctttaaggacttcaacgggcgcctgcaggaggaatacggactgcccacgtggggctcctacgccctcttcgccatcgccaccatcttcgtgggcgctgccctggggctgctgctcgtgtgccttgtggactttgtctacccacccaagaagtcgcagcgccagagcttctccgagtcccaggacaatctgaccgagggcctggaggatttggcaaccgaggagatcgaggatgatggcgacgccgaggagaacgatgacgagcaacgcgatagcgacgaggaagaacaggaggacgacgacgaagaggaagaggacagcgaggagcaggtgggcgatctggccactaaagagaaggaggccgacagcgagccggaaaaggaagagaagccggagcccaagcaggccggcgatgctgcgcccgagaagacggaacaggtgcgcaagcgcaagcctcgcaaaggcgattaggtgcagcggggtccctgcggatcttcagccttagcgatcatcagaagcggcaacaaaaagactaacacactgaatcgagaggaacacaacctcttacccaagcatcattcgagcggacataatccgtctgctctgccttcgcgcacaaaaccgattgttttccctccttctaatcctagccagaaaacggcgccccatgtatttcataattatgtaaagcaaaattgcaatccattaagcgatagcaagcgtaacaataactaaatgtaactttagtcgtatatttttaccttttgccaagcatttttgtattttgtgttcaacttggtttccacacaattcatttctcttaagcatttcatttgtaattgtacttcaatcgcaaattgtattaaattttcgtattacaaaataataaaaaaaaacatacaatttaaactggctttgtttactttgcgcttctaaataatttggatcccaaagaaatttcacatatgcacgtatgtatatttgaaatggaaaatccattagtttcattcacagttaacaccacataaacaacatgaacattaatggttttacaaatttattatcagtttattgtaggagaatatgaaataagacaaaatccctgcaatttcgtgtgtgtaaaactacaaataattgttataagatgtgtgtgagtggtgctggtccaaaatggttcaaattttccaatacatgtggctgttttccaaacgcaaagaaatgggtaactgaaactgttgcttaaaatagttagctcgttgaggcgtacaaaaattcatgcctactatcttataaaaagagtacaaaagaatgattatacaaatacatatctgtaatctgtatcaaatgtgattcatcttcagcgttgcttgcctgatctgttggcacttgtgattgaaatcggaattaactggattaattacaacattttgattgttcaacaaataatagttctttcaacaaattgctatggctattgttggattcatttcgggggttgcggggataaggtacttgtggtgtgtgtgtatatataatttctatatttaaatatatatttgatatatattgtttggttgtaaaacttgtactattgcagcgtatggaggaagtttgttgggaggtcttttcgattgcggttgggatcgggatggggatctggatgcggatgaggatgggtatgggtatgggtaaggataagggtatgggtatgtgaagagtgcgtttcgggctgtggtaagttttcaaatactttaagtaattgtctgtgtgtgagtttggaaatttttctgttgtgaatttgggtttctcaggctggcttcagttaattcgttcgtatgcgtacaaaatggcgagatgtcaacaaaaacaattgttaatt

SEQ ID NO: 11690 - DNA, 1647 bp, DROSOPHILA
cttgatctaataaataaaaaatcgtgtaacgagcgaataccgaccgaatccccctaccgatgatctagcggggaataaagcggcttgccatctccgatggatatcgaaccagcacttctgtcaattttccagcaggcgtcgcagtttctgtaactttttggaactgaccaagacggaagctttagtttaatttaagaaactgtcgcagccgaacgtcacaggtttcaggacacgaatcggcggagcaaagcaccaaaacatcaccacatgcatagcacatcgtactttgtggccgcgacatgcgcggcgctgcttctgctggcggcgacggcgcagtcgacggcagcagcgcagtcaggactgcagccaggtggcaagttaatcgagttggacgaggacaactggcacctgatgctccagggcgaatggatgatcgagttctttgctccatggtgcccggcctgcaagaacctggctcccacctgggagcggtttgcccgcgtggccaaggatgtccaggtgcaggtggccaaaatcgacgtgacaacctcgccctcgctgagtggacgcttctttgtcaccgccctccccaccatctaccacgtaaaagatggcgagttccggcagtatcgtggggcccgtgatggcgacgccctcctctacttcgtgaagaagcagcagtggcagagcatcgaaccgctgtccgcctggaagaagcccgacaccacccacatgtccgtgctgtcctacttcttcaagctttcgcacactctgaaggacttcaacgggcgcctgcaggaggaatacggactgcccacgtggggctcctacgccctcttcgccatcgccaccatcttcgtgggcgctgccctggggctgctgctcgtgtgccttgtggactttgtctacccacccaagaagtcgcagcgccagagcttctccgagtcccaggacaatctgaccgagggcctggaggatttggcaaccgaggagatcgaggatgatggcgacgccgaggagaacgatgacgagcaacgcgatagcgacgaggaagaacaggaggacgacgacgaagaggaagaggacagcgaggagcaggtgggcgatctggccactaaagagaaggaggccgacagcgagccggaaaaggaagagaagccggagcccaagcaggccggcgatgctgcgcccgagaagacggaacaggtgcgcaagcgcaagcctcgcaaaggcgattaggtgcagcggggtccctgcggatcttcagccttagcgatcatcagaagcggcaacaaaaagactaacacactgaatcgagaggaacacaacctcttacccaagcatcattcgagcggacataatccgtctgctctgccttcgcgcacaaaaccgattgttttccctccttctaatcctagccagaaaacggcgccccatgtatttcataattatgtaaagcaaaattgcaatccattaagcgatagcaagcgtaacaataactaaatgtaactttagtcgtatatttttaccttttgccaagcatttttgtattttgtgttcaacttggtttccacacaattcatttctcttaagcatttcatttgtaattgtacttcaatcgcaaattgtattaaattttcgtattac

SEQ ID NO: 11691 - protein, 323 aa, DROSOPHILA
MHSTSYFVAATCAALLLLAATAQSTAAAQSGLQPGGKLIELDEDNWHLMLQGEWMIEFFAPWCPACKNLAPTWERFARVAKDVQVQVAKIDVTTSPSLSGRFFVTALPTIYHVKDGEFRQYRGARDGDALLYFVKKQQWQSIEPLSAWKKPDTTHMSVLSYFFKLSHTLKDFNGRLQEEYGLPTWGSYALFAIATIFVGAALGLLLVCLVDFVYPPKKSQRQSFSESQDNLTEGLEDLATEEIEDDGDAEENDDEQRDSDEEEQEDDDEEEEDSEEQVGDLATKEKEADSEPEKEEKPEPKQAGDAAPEKTEQVRKRKPRKGD

SEQ ID NO: 11692 - DNA, 4063 bp, DROSOPHILA
tggacgttctccggtttcttaaagtcactgactatcaccaggccaatggggtccagcagggtgaagctgatgtccaggtcaccgtgaccgccatcgattacctggtactcaaagtcaatggtctcgccctggcgcaccgagtggtataggcactctgttttgccggcgtccacgtagaccgtcatctccttgtcgtaggcctccgcatcctggacgcccagcagaagtgctgcgatggaaaggagcaggactaacccaggcattcccagccagatctggatgcagtgacgcaaaggtaatgagtaatggtggctaaatttagccggctctttatcttaccgcttgcattgtaagctgtttaacctaatattaaaaaatacaaaatgctcgctgtgccagtgtgcccgcagagttcggaagtttaataagtggtttcgcttttcgcggttttttagcgatgccatatcatctattttgtagccagatatgacaattttcagattttgtataaatatctcagccaagtaatattcctaatatgaaatgagaatatatagaattacgttcacattttgaataacataaatgaaaaatgtttattataaatgtaacctgtactaaagcaattacttcggcgaatttcataattttccatagtatttgatcaacatttagctagatttcagagcgaagatctggcaacgaaggcgataacggtttttgaattggcggcaaatttaaataagaaaaaatttatatgattaaaacaaacaactaaacaaattagaaatcctttttaataggtactttaacacttaggcctgtgtcggaaagggatggaataaggatccataataacaccaacatgataagcaatctcaaagatattattacagtaaaaatgtaaaatataaacaacatgtcgtattgcttatgttgtttcaaaacccttttaattagtattttacagtattgaaaactactttgcaaggtcacactgaccaggccaagaataagctcgaaagaaaacttggaaaaatagaagaaaaaacgtcaacaaaaaatcagaaaacccaggcgaaaaagagacaggcataccggattatatgtcagttttagctgatcacgtgaagagcttatttgccacgactaggttaaattcgcaaagatgaagatccgaaccaggaggagtctttccttttccggctgtggcttcttgggcatctatcacgtgggcgtggccgtctgcctacgccaacacgccccccaacttttgctggagaggattgccggtgcatccgccggtgccttggccgcctgctgtctcatctgtgatcttccgctggaatgcatggccggggatttcctgcgagttgtccaggagatacaacggcattcgttgggcgccttcagtccgtggttcaatttgccggagtgccttctcgagggcatgcgaagttggttgcccgaggacgcccatctactggccagcggacgacttcatatttcccttacccgcgtcagcgatcgccgcaatgtggtaatgtcggagttcagctcccggcaggagctactccaggccctcatgtgctcctgcttcattcccggactgtctggattggtgcctccacaggtgggtttcttaattattattggtgctatagaagccatcaggtattaattctattgaaagcaaaaatcacgtactgctcataaaatatctaataaagaaatgtaagcaatttaaatgattcttttctgcgaaattaagattatcagcaacgacaaaccaaaattttaaaccaggtgttccacttgaatatatatgaaatatatatgaaatatatttatgtgtcttatcaggtccgaggagttcgctatatggatggggccttttccgataatctaccgctgctggacgagcacaccgtcaccgtaagtccattctgcggggagagcgacatatgcccacgggatcagaacccccatctgcttcagctgaacatcaattgggcgaacacttgcatccgattgtccaggcggaatctgcgtcgcatggtgcgcatcttggtgccgggcagggcggatttcatggccaatttctgtcagcagggctacgatgatacgctccaatttctgcgcaggaatagcctactcaatgagggtttcaagatccaggagaagggcatgatcagttggatccatcagcagatggagagggagaaggagctgcgggagaccccaagggatcttgagaaggtgcacacaaatcgcatgactacaaacaatgtgcagcacaagaagcgaaggaatcgaaaacagaggactcaaagacaaactctgcagaggaccaagaaaaaccagcaggaaaagatcaggaacggaaggagtttagaaatggagatcagaaatcaggagaagaaccaccaagaaagcaccaacagcagcgttgagaatctgacaccgatcgcagagaaacgtctggagaataggccaccagaggagcacaatcactatggcagctcactcatgggctccacttggtcgctccttcgtcgggttatgttcgctccgccgctggccaggcacatggtccaagtgatcgcccgccatctcagccagagtctcacgctctgcgatcagccgcactttgatctcgctctgatgcaggcacctgccgcctgccatccctcgaccacctcctgccccccatccacgccactgggtgatagcgataacgacaaagtcaaggcccaatgtgtgtgcgaggccagccaaattgaatcggaagatcaggtggctgaggtggctgaagtagaggggacatccggtgttcattaggcgccattagctttatcagcgatcgtcccatcgatcggtttccaattgatttttatgcctgttcgcgcaattacttttattcaatggacaaacttcaaacttttccgcgttttgtttatctcaaacctcgtatttttaaatgttattttttttatgtactgactgctgtgaacaaaataaatttgatcaaatataattgtaatttatgtatagcaacaaattaaatgtacacgctttattcaaaatatttcagtacacaacataaatgagaggaagtccttagttaaatttgggactacataagctttttaaaaaaaaagaaatctttgcgaagattctaagtatttggctaccgaatttaaaatccgcttgttgcgttgcactcgattcttctagccgaataaactgatataacctccagatccgagcctctgacgcagattcttatcagttaggtgcaacgcaggagagaatgatgcacgacgagatcagagaagtcggcgcaataatacccatatatgtatgtatacatatacgtgcaatatcatactcaataatctgaagcgagagaatgaataataagaatcacgccactttctgcactttgcacctcgcccgtcttgctcgcactcgtgttgatcaaaggatgacacgccccttacgccgaaggcgggggctcatcctgaggctttaccaccacctgccccccaaccacttccgcaccaactctctttcttgggtctcttccctctcgtctgtgtttgtatttgtgtgtgttttataaagtcattcagtttttctttttttttttaatagtacttactcttgattacgtttatagttggaacgcctttatgggtccactctctcctctccaccgctcccccccccctttcaccgcgataagaattgtcgttgccaggcgaagactggaagaccagacctcgtcatcatcgctgcgagaagaatcggaatctgaacggggagaccggctcgagaggccaggtccaaagtccgggtccattaacatctttacacacggaggcccccccccctttggaagtgtacacaccttgcggttggcatttccattacattgggggctgtccaatgacgatcgttacctccatgatcatcgaacggaccgacaaacgatcgatgcattgcacttacacagaggatctacccatcaagaaagttaatcagcgaagatttacttatc

SEQ ID NO: 11693 - DNA, 1833 bp, DROSOPHILA
accaggccaagaataagctcgaaagaaaacttggaaaaatagaagaaaaaacgtcaacaaaaaatcagaaaacccaggcgaaaaagagacaggcataccggattatatgtcagttttagctgatcacgtgaagagcttatttgccacgactaggttaaattcgcaaagatgaagatccgaaccaggaggagtctttccttttccggctgtggcttcttgggcatctatcacgtgggcgtggccgtctgcctacgccaacacgccccccaacttttgctggagaggattgccggtgcatccgccggtgccttggccgcctgctgtctcatctgtgatcttccgctggaatgcatggccggggatttcctgcgagttgtccaggagatacaacggcattcgttgggcgccttcagtccgtggttcaatttgccggagtgccttctcgagggcatgcgaagttggttgcccgaggacgcccatctactggccagcggacgacttcatatttcccttacccgcgtcagcgatcgccgcaatgtggtaatgtcggagttcagctcccggcaggagctactccaggccctcatgtgctcctgcttcattcccggactgtctggattggtgcctccacaggtccgaggagttcgctatatggatggggccttttccgataatctaccgctgctggacgagcacaccgtcaccgtaagtccattctgcggggagagcgacatatgcccacgggatcagaacccccatctgcttcagctgaacatcaattgggcgaacacttgcatccgattgtccaggcggaatctgcgtcgcatggtgcgcatcttggtgccgggcagggcggatttcatggccaatttctgtcagcagggctacgatgatacgctccaatttctgcgcaggaatagcctactcaatgagggtttcaagatccaggagaagggcatgatcagttggatccatcagcagatggagagggagaaggagctgcgggagaccccaagggatcttgagaaggtgcacacaaatcgcatgactacaaacaatgtgcagcacaagaagcgaaggaatcgaaaacagaggactcaaagacaaactctgcagaggaccaagaaaaaccagcaggaaaagatcaggaacggaaggagtttagaaatggagatcagaaatcaggagaagaaccaccaagaaagcaccaacagcagcgttgagaatctgacaccgatcgcagagaaacgtctggagaataggccaccagaggagcacaatcactatggcagctcactcatgggctccacttggtcgctccttcgtcgggttatgttcgctccgccgctggccaggcacatggtccaagtgatcgcccgccatctcagccagagtctcacgctctgcgatcagccgcactttgatctcgctctgatgcaggcacctgccgcctgccatccctcgaccacctcctgccccccatccacgccactgggtgatagcgataacgacaaagtcaaggcccaatgtgtgtgcgaggccagccaaattgaatcggaagatcaggtggctgaggtggctgaagtagaggggacatccggtgttcattaggcgccattagctttatcagcgatcgtcccatcgatcggtttccaattgatttttatgcctgttcgcgcaattacttttattcaatggacaaacttcaaacttttccgcgttttgtttatctcaaacctcgtatttttaaatgttattttttttatgtactgactgctgtgaacaaaataaatttgatcaaatataattgtaatttatgtatagcaacaaatt

SEQ ID NO: 11694 - protein, 480 aa, DROSOPHILA
MKIRTRRSLSFSGCGFLGIYHVGVAVCLRQHAPQLLLERIAGASAGALAACCLICDLPLECMAGDFLRVVQEIQRHSLGAFSPWFNLPECLLEGMRSWLPEDAHLLASGRLHISLTRVSDRRNVVMSEFSSRQELLQALMCSCFIPGLSGLVPPQVRGVRYMDGAFSDNLPLLDEHTVTVSPFCGESDICPRDQNPHLLQLNINWANTCIRLSRRNLRRMVRILVPGRADFMANFCQQGYDDTLQFLRRNSLLNEGFKIQEKGMISWIHQQMEREKELRETPRDLEKVHTNRMTTNNVQHKKRRNRKQRTQRQTLQRTKKNQQEKIRNGRSLEMEIRNQEKNHQESTNSSVENLTPIAEKRLENRPPEEHNHYGSSLMGSTWSLLRRVMFAPPLARHMVQVIARHLSQSLTLCDQPHFDLALMQAPAACHPSTTSCPPSTPLGDSDNDKVKAQCVCEASQIESEDQVAEVAEVEGTSGVH

SEQ ID NO: 11695 - DNA, 3665 bp, DROSOPHILA
ctccgcgcacggtcgcgctcccgttcccgctcccgatctcggctgcgactgcggtcgcgatcccgttcccggtcgcggcgaccggcgcctccagatccggatcctccggctggcgctactccgatggcctcccgctcccgggaacggcgctccctgcgcttcttccgctcggatcgctccttctcgcgtctcctgtgcgccggcgaggcgggacttcggctgcggcccatggctccgtttcggtctctgcttgtgtggcggtttgagtgattgatgatggtttgcctgcagtggatttgagcggatgttagactccatgtactccaattgcaccgcacgcatcccgcttaccgttgcactaggctgtgtctagcattatttgggcgacaccggcggtgggtaaaaacgcgctaacttaaaactaaaaccaaataaacaacgcgcgttatctcgccgcgacgccgaaacggaatgaggaatgcagaatgcggatgatgatgcgagggatgcgatgcaagggcaaaacatggccacctatcggatatcgattgatggtcgattttatcttcgataaaaatgtatcctatgtatatcgcataccgaatgtttaaatcgatctgtttccttttgaatatgaactatgtatatatattaattaatattttttaatagcattacctatattatatttcaaattatgcccggactatgataaatttaacaaattcataattacaaatctttcgtcaataccacttccataaatagtttaaaatatcaaaatattacgaactttgccaatataaacgttatattttctacatttacacagtttcttctttttttttttgaagctattaaaccacatatttgctcacgatcgcagctgaaatgaactactatgttggatcttctagttcgatcttcaagaccgattcattttccaagtcgcgggactgccaactcccgcgaaatagaaagaaaatgcatcttgaagattaagatacacacaacaatccgtaagtgcgtcagaattttcagaacccgcggttcgctggaactctcgaaataaacaactaaatgccactgtacatctgaagctatcgcaagtggatagcgccgtagatatagaaaaacagcgatcgcaaccgatccgtccaaaacacgaaataatgtcgggactgcgaaacacctcggaggccgttgcagtgctcgcctccctgggactcggaatggttctgctcatgttcgtggcgaccacgccgccggccgttgaggccacccagtcggggatttacatagacaacggcaaggaccagacgatcatgcacagagtgctgagcgaggacgacaagctggacgtctcgtacgagatcctcgagttcctgggcatcgccgaacggccgacgcacctgagcagccaccagttgtcgctgaggaagtcggctcccaagttcctgctggacgtctaccaccgcatcacggcggaggagggtctcagcgatcaggatgaggacgacgactacgaacgcggccatcggtccaggaggagcgccgacctcgaggaggatgagggcgagcagcagaagaacttcatcaccgacctggacaagcgggccatcgacgagagcgacatcatcatgaccttcctgaacaagcgccaccacaatgtggacgaactgcgtcacgagcacggccgtcgcctgtggttcgacgtctccaacgtgcccaacgacaactacctggtgatggccgagctgcgcatctatcagaacgccaacgagggcaagtggctgaccgccaacagggagttcaccatcacggtatacgccattggcaccggcacgctgggccagcacaccatggagccgctgtcctcggtgaacaccaccggggactacgtgggctggttggagctcaacgtgaccgagggcctgcacgagtggctggtcaagtcgaaggacaatcatggcatctacattggagcacacgctgtcaaccgacccgaccgcgaggtgaagctggacgacattggactgatccaccgcaaggtggacgacgagttccagcccttcatgatcggcttcttccgcggaccggagctgatcaaggcgacggcccacagcagccaccacaggagcaagcgaagcgccagccatccacgcaagcgcaagaagtcggtgtcgcccaacaacgtgccgctgctggaaccgatggagagcacgcgcagctgccagatgcagaccctgtacatagacttcaaggatctgggctggcatgactggatcatcgcaccagagggctatggcgccttctactgcagcggcgagtgcaatttcccgctcaatgcgcacatgaacgccacgaaccatgcgatcgtccagaccctggtccacctgctggagccgaagaaggtgcccaagccctgctgcgctccgaccaggctgggagcactacccgttctgtaccacctgaacgacgagaatgtgaacctgaaaaagtatagaaacatgattgtgaaatcctgcgggtgccattgaattcaatttaccacttaggctaagcactatagcactatatatataaagcatttctgtgtagatgtccatctctgtactaatctcgaatatttttatacaaaaatatacagcgctgtacctaactgaagttcgtctcttgaggagtttcatttgtggctagtattaaaagatacttcttctttattgtctcacatctactcatgattgggatgcacaaatttcaaatatttcaaaacaacgatgatagacgcaatgtggtactaaaagtacgtattttgattctggttagctctcatttaaaattaacagtcatttcacagcaataaaaggcacaatcaagtcctatttggacttcggcacgcttctttggatcattcttaattattttaggactcaattagtagggaagcaggcaatatgcgcgaggaagcgggctttatcgcttgtgaatccagtggtggcggaaggcaaacaattccataatcaagttgccgacacgcttgtcaattagcgccgacatcaggcggccatcaaacaccggtgtctgcacattcaacgacacacacgcatctctgaaaggagagcacattagactggagtattctccgcaacttggattgcacttacaagatttcaaacaccggaatgttgtttcggaagtattcctgcaacataaatacaccattgacgaatttggctcgactaatgctgagcatcatatcgggatcctttctatacaggatcacaaagatgtgccggttgggcgtgtcgatgggtctgacaaacttgccgaggacactttcaataaaggctggcgtgttcctgctgtggaactcctcgcagtcgccgcctgcgtagagcacgaagaactgcctctcgatgaagtgcgaattgaaatggtgtggtttcgacagcatgttctcctccacttcccgggcccaactgaagtgggcgttaacggacaggaggtacaaggatggcagctggggcgtcggtagaaaggttatgggcggaggcttgaagaagcccacgaatccatcctcactctcgaagatcttcgatagcgtatcagtcagcacggtgtattgggaaactggctcgcagtctcggcgccacatgtccagc

SEQ ID NO: 11696 - DNA, 1665 bp, DROSOPHILA
aagatacacacaacaatccgtaagtgcgtcagaattttcagaacccgcggttcgctggaactctcgaaataaacaactaaatgccactgtacatctgaagctatcgcaagtggatagcgccgtagatatagaaaaacagcgatcgcaaccgatccgtccaaaacacgaaataatgtcgggactgcgaaacacctcggaggccgttgcagtgctcgcctccctgggactcggaatggttctgctcatgttcgtggcgaccacgccgccggccgttgaggccacccagtcggggatttacatagacaacggcaaggaccagacgatcatgcacagagtgctgagcgaggacgacaagctggacgtctcgtacgagatcctcgagttcctgggcatcgccgaacggccgacgcacctgagcagccaccagttgtcgctgaggaagtcggctcccaagttcctgctggacgtctaccaccgcatcacggcggaggagggtctcagcgatcaggatgaggacgacgactacgaacgcggccatcggtccaggaggagcgccgacctcgaggaggatgagggcgagcagcagaagaacttcatcaccgacctggacaagcgggccatcgacgagagcgacatcatcatgaccttcctgaacaagcgccaccacaatgtggacgaactgcgtcacgagcacggccgtcgcctgtggttcgacgtctccaacgtgcccaacgacaactacctggtgatggccgagctgcgcatctatcagaacgccaacgagggcaagtggctgaccgccaacagggagttcaccatcacggtatacgccattggcaccggcacgctgggccagcacaccatggagccgctgtcctcggtgaacaccaccggggactacgtgggctggttggagctcaacgtgaccgagggcctgcacgagtggctggtcaagtcgaaggacaatcatggcatctacattggagcacacgctgtcaaccgacccgaccgcgaggtgaagctggacgacattggactgatccaccgcaaggtggacgacgagttccagcccttcatgatcggcttcttccgcggaccggagctgatcaaggcgacggcccacagcagccaccacaggagcaagcgaagcgccagccatccacgcaagcgcaagaagtcggtgtcgcccaacaacgtgccgctgctggaaccgatggagagcacgcgcagctgccagatgcagaccctgtacatagacttcaaggatctgggctggcatgactggatcatcgcaccagagggctatggcgccttctactgcagcggcgagtgcaatttcccgctcaatgcgcacatgaacgccacgaaccatgcgatcgtccagaccctggtccacctgctggagccgaagaaggtgcccaagccctgctgcgctccgaccaggctgggagcactacccgttctgtaccacctgaacgacgagaatgtgaacctgaaaaagtatagaaacatgattgtgaaatcctgcgggtgccattgaattcaatttaccacttaggctaagcactatagcactatatatataaagcatttctgtgtagatgtccatctctgtactaatctcgaatatttttatacaaaaatatacagcgctgtacctaactg

SEQ ID NO: 11697 - protein, 455 aa, DROSOPHILA
MSGLRNTSEAVAVLASLGLGMVLLMFVATTPPAVEATQSGIYIDNGKDQTIMHRVLSEDDKLDVSYEILEFLGIAERPTHLSSHQLSLRKSAPKFLLDVYHRITAEEGLSDQDEDDDYERGHRSRRSADLEEDEGEQQKNFITDLDKRAIDESDIIMTFLNKRHHNVDELRHEHGRRLWFDVSNVPNDNYLVMAELRIYQNANEGKWLTANREFTITVYAIGTGTLGQHTMEPLSSVNTTGDYVGWLELNVTEGLHEWLVKSKDNHGIYIGAHAVNRPDREVKLDDIGLIHRKVDDEFQPFMIGFFRGPELIKATAHSSHHRSKRSASHPRKRKKSVSPNNVPLLEPMESTRSCQMQTLYIDFKDLGWHDWIIAPEGYGAFYCSGECNFPLNAHMNATNHAIVQTLVHLLEPKKVPKPCCAPTRLGALPVLYHLNDENVNLKKYRNMIVKSCGCH

SEQ ID NO: 11698 - DNA, 3983 bp, DROSOPHILA
gtactgaacacgccagaggttatggccatcgaaagacccgagcaccagtccagggtgctcgacgtatactgaatattggagttattaattgccctgaaatgtagttgtttaagaaaatgaaataaaagtctttaactatatttacatgtagtccacaatgatcttgtgactattgctgatggtaactgcctttggaaatcccgaggtgccggaagaactgagaatggccagagtgtgatcgatgccatctttgagacgaagtggttggaaattctgcatcactggagtggtcagaacatcctggatcctcactgatcccctcggatgattccgcatggtgactatcgttacctggaggtccttggtggccgatttaaccttttcatactcatcaccatcgcagaagatcaagcggggctttgtgattccaaaaagtttggcgatgcatgcctcttcgtaggcattgtgaagggcgtgtaagggggttccgttgaagaagcatgcatatgccacagctgattggtgagtcgtgtgtctgcccatgacccccactatatcagtttgccccaagcccatattcctcatataactagccactcgcatcgcattcatatgaagatcttcgcgggtgagtacgatgtcctccgtgatcgagatctggtggttcaatgcaaatctatacatttctctgatttcgagagaaaagaaactcacctgggcaatgagtttcggattgtttaccatatccccaaagattatctctccgattgataagtttggcgaaaataaacttggtgcttcacgaccactccagatcttgagtttatcatcataagtgcacatcgcgttcaatagtttttgttttacttccatttcagccattataagaaaatgctgagtcgattattagtttttaagtaaattatgctattataacccctcgtatcagcaatgctatttcacagcaataatgtacataattacgaaagatcagctgtattaacgattttgtaatcgatatgtgtttcggtattattttactcggcgaatatgaaaaaatgcctaagatggcgaacctcttaaaaagcttacgataaatacaacaaatacaaatacaaatacaataaaaatacaaatacaacataaacattacaataattaaatatgcaaaactaattcttctccataattcgtaaaaactcagcttttgtggccgctctgtttgcttttctattgccactctgaataatgtgatccacaatcaaagctcctccattcaactgcttaaatttggcaggtatacgtttcctcacatactccacaacatcctgggcctctagttgggttccttgtttcttgaccactgaagcggctgccttatctccataaacgggatcccaaatgccaaagacacaagcttccacaacatttggcatttcagcgatgacactttcaatctcgctggggtaatacatgatggtctgatacttgagcatatccttcaagcgatcgataatgaacaaatatccatcctcgtccatgtagcccaggtccccggtgtgaaaccagttctccgagtcctgcatcttcttcgtttcttccggattcttgtagtaaccaggccatttctgaccattattgaagcatatctcgcccacgacattgggtccttgtgcttcacccagctcgttgactattttgatttgaatgcctctaaccggacgacccactgaattgggtttctcatcgaagttgaagtttaggcatccggggctgttcaactcggttagtgtataactgaaatttacacattcgttgcttagacggctgcgaattttgttctggacttccagtgagcagtttgatccgccgtaaaagaaatacttcacggatgataggtccgccgcatagaattccgggcaattggacagcatcgccaattgcgaggaacttacgaacaccatcgatattcgatacttctcaattaggccacacaaattggcaggatcaaagtcacaatcttcaattatactagtcaagctaaacacggctgcattgatggtcatcgtgatgcctgatgcccaatccaaagtgtttgggttatactgaataatcgagctatccacgggtctgaaaataataaattagatgggtgtataaaattaaggtggtaatatttacagaaaactcccaataatctggtgactattgctaatggtgactgcctttggaaggccggatgttcccgaagagctaagaatggccagtagttgatcagtaccgtctttcagtcgcactggtcgaaagttcatctccacgggagtggttaaaatatcctgaattctcaatattcctgccgggtgattacgcatggttactatttgtacctgaaggcctttggtggctgcttgaactttctcaaactcatctccatcacagaagattaagcgtggcttggttattccgaacagtctctcgatggcagattgttcgtattcggtgtgtagggcatgataaggagttccattaaagaaacaggcataggccagagcagtcaagtgagtggtcaacctgccaatgactcccacaaagtcaccttgctccagacccagtttacgcatataacttgccaccttcatcgcgtttgtctggatgtctttccaggtcagctcagtgttttctgtaactgaaatctaaaggttttgtttcgatgaatataaatattgtttcttgtaaatttattaagtacctgggcagtgagcatagcattgcgctccatttgttgaaagataatttctccaatggacaaatctggtgagaataaactgcgtttttcgccaccactccagatctttaagttttcatcaaaggtgtttcttgtcttaaagggcgattttcccgcttgcaattcacccattttgtataatacgttaagaattaaaatgaaggcttataatttatatatctctctaacttctgtgatagtaataccataaaaacgaaagtgatagacgcaagaactcgaatttaaagcttcaagttaggtctcaccattatcaactgacttattatatcgatatttctttgagctaagaaagagatactaaaagttttgttcataagtgaatttatttcatctaccaatcaattattccgtcactgttgccatactaatcatatttactatttatgtttacttaagcaatgattaattgccaagactgttttcatgaccgctgataatccgattttgagattgcatcccatagtaaaatactcaaaaagatgtcgaaaagtgtttcagcaaatggtcagctgggctggactggaatctccaccaccaccaacaataagattatgataatgggcagccgtcaaagagaggattatgggttttggaaaacaagtggattaaggggttgacaattgggggaatgtgctgtcaggaatttggcttttgcgttttgcatttgtttttacgattatgaccgacatggatggatcggaatcgaaatcgttcagttctgctctgtcccattatgatgcgctattttgagtgaccctgtcctccgcaaacatagcgaaactaataagtaaaatgtgtttttcaaacattgatttcggccagtgcgtggtgggtggtgttttaggaaacacacacacacacacccccttttcgagacgacaacatttgtcataaggccaagacagcctcaacagttgttggcgattatcattttgacagttgcttctcgcttcgcttttgtttcagttcccttggctgcgttttgggccttgatttatgcatttttaagcggttcacttattgtttctgcgcacaaatatggccaagtatctcggtatctgcgagatacaatcccctagtcagcccttgccgcgtaatttgttgatttattgcaaggctgccactgcaggcatcttcattaagcagcactagcttccgttttttatccggccacgcc

SEQ ID NO: 11699 - DNA, 1811 bp, DROSOPHILA
atcacagaagttagagagatatataaattataagccttcattttaattcttaacgtattatacaaaatgggtgaattgcaagcgggaaaatcgccctttaagacaagaaacacctttgatgaaaacttaaagatctggagtggtggcgaaaaacgcagtttattctcaccagatttgtccattggagaaattatctttcaacaaatggagcgcaatgctatgctcactgcccagatttcagttacagaaaacactgagctgacctggaaagacatccagacaaacgcgatgaaggtggcaagttatatgcgtaaactgggtctggagcaaggtgactttgtgggagtcattggcaggttgaccactcacttgactgctctggcctatgcctgtttctttaatggaactccttatcatgccctacacaccgaatacgaacaatctgccatcgagagactgttcggaataaccaagccacgcttaatcttctgtgatggagatgagtttgagaaagttcaagcagccaccaaaggccttcaggtacaaatagtaaccatgcgtaatcacccggcaggaatattgagaattcaggatattttaaccactcccgtggagatgaactttcgaccagtgcgactgaaagacggtactgatcaactactggccattcttagctcttcgggaacatccggccttccaaaggcagtcaccattagcaatagtcaccagattattgggagttttctacccgtggatagctcgattattcagtataacccaaacactttggattgggcatcaggcatcacgatgaccatcaatgcagccgtgtttagcttgactagtataattgaagattgtgactttgatcctgccaatttgtgtggcctaattgagaagtatcgaatatcgatggtgttcgtaagttcctcgcaattggcgatgctgtccaattgcccggaattctatgcggcggacctatcatccgtgaagtatttcttttacggcggatcaaactgctcactggaagtccagaacaaaattcgcagccgtctaagcaacgaatgtgtaaatttcagttatacactaaccgagttgaacagccccggatgcctaaacttcaacttcgatgagaaacccaattcagtgggtcgtccggttagaggcattcaaatcaaaatagtcaacgagctgggtgaagcacaaggacccaatgtcgtgggcgagatatgcttcaataatggtcagaaatggcctggttactacaagaatccggaagaaacgaagaagatgcaggactcggagaactggtttcacaccggggacctgggctacatggacgaggatggatatttgttcattatcgatcgcttgaaggatatgctcaagtatcagaccatcatgtattaccccagcgagattgaaagtgtcatcgctgaaatgccaaatgttgtggaagcttgtgtctttggcatttgggatcccgtttatggagataaggcagccgcttcagtggtcaagaaacaaggaacccaactagaggcccaggatgttgtggagtatgtgaggaaacgtatacctgccaaatttaagcagttgaatggaggagctttgattgtggatcacattattcagagtggcaatagaaaagcaaacagagcggccacaaaagctgagtttttacgaattatggagaagaattagttttgcatatttaatgtaagctttttaagaggttcgccatcttaggcattttttcatattcgccgagtaaaataataccgaaacacatatcgattacaaaatcgtta

SEQ ID NO: 11700 - protein, 471 aa, DROSOPHILA
MKVASYMRKLGLEQGDFVGVIGRLTTHLTALAYACFFNGTPYHALHTEYEQSAIERLFGITKPRLIFCDGDEFEKVQAATKGLQVQIVTMRNHPAGILRIQDILTTPVEMNFRPVRLKDGTDQLLAILSSSGTSGLPKAVTISNSHQIIGSFLPVDSSIIQYNPNTLDWASGITMTINAAVFSLTSIIEDCDFDPANLCGLIEKYRISMVFVSSSQLAMLSNCPEFYAADLSSVKYFFYGGSNCSLEVQNKIRSRLSNECVNFSYTLTELNSPGCLNFNFDEKPNSVGRPVRGIQIKIVNELGEAQGPNVVGEICFNNGQKWPGYYKNPEETKKMQDSENWFHTGDLGYMDEDGYLFIIDRLKDMLKYQTIMYYPSEIESVIAEMPNVVEACVFGIWDPVYGDKAAASVVKKQGTQLEAQDVVEYVRKRIPAKFKQLNGGALIVDHIIQSGNRKANRAATKAEFLRIMEKN

SEQ ID NO: 11701 - DNA, 6231 bp, DROSOPHILA
ttagaaacctgtttgccaagcatttgcacacaaattaaatatggtgcgctactgcagcaaagtggtttccgctgcttccaattcaatcagaccagttagcagcagctcaaagccaacttagcagatacgttaatcgggcccaaacacaatttcttcatttgcccgagaactttttaatatcacctcgacgaagattatcatcctggatatgcggttgctaacctctcgctcacaaccgatagtcctgtttgctcaacaagttcatttcccctcggtggcaaggacactggggagtagtgccacacatgcactcgatgggcaataagcggcacattgccccatgctctgtgtttaagtgcgattccatatctggccttaaatactgcaataaacccagaatcgctttcactgggtcggaaaactcggctgtgactaatgtcagctcctggcattcatggcaataaaatttcactccttacaacatgtcaactccctcgaactctcacccggcgatccacttggtagatttgtgaggcttgggtttatgtttatgatttaattgtcaataaaataatcatttgcaagcattttgccactgcaaccgcagtacgtgccaaacagagttgaggcaaatttttaccaataaacgaatgtggcaaaaaggaaaagggcatatcgaagccacagacagctaaatggtacactaaaaataaataaaacctccagtacgaagagtataatatctttaaaaatatctgaagaattaaaatacaacttctatccatttcactctgttaagctgctcaacaataccctcaatcgtatcccagaacaagccttcttgaaaaatggcacatcctttattatatattcaccaatttgcgaacaaaagcaggtcctgtacgtatttctttgtgtgtagcacacacacacacagaccaaataacagactaaaactgtagggtgccacaggaactgagagccctggctggcacttaagttattgacgagataaagttgaggattttgtgtgcatttttgtgaagtggcagccgaagcccataatgacggagcaagtggaggaatatggagatgggaagctgggaatcagttggatatggagctgggaagctgggatgttggagctggctgagatgatggcgttgacgttgatattgtcgacagttttgatggcactgccggcagactcacgtagagagatgaagcaatatgtgcccgggctaaaggctttgagtgccttgtcctggctcgccacatacgtacgtatctatgtgtggttgtgtccgtgttggcaggtctagtctgtttgctcaaatgctgctcctttgctcatgacaccagaagcaggacaacagccaaatcaaacaagccaaaaaaaaaaggaaggcgaaggaaaccaataaaaagccaagcgaagcggaggcggaaaagaaaacattgtggccaaaacggtaatgccaacgtcccccagcatacacagaaaaatgagaaggatgttattaatctccaactatttatgttaatgacaaatttcacatttaccaataaaaaaatgtgcttttaaagtacattttggaatctagaataaaaagttcctaccaaaaccgacgattctttatgaatatatgggttaagttcctgatttttagaaatttaaagaaaaacttacccttcaccacaaatcataaattttgtcaaaatgatgtaaaaagcttttaagcagtgaaatattgactttttaacgtgattgattattttccgtgtacatgcaggcatcgcctcatcgattttcacttgaaccttaaacgcgactagaaaattctctggagtcgcacaaacaaatgcgcgtaaattttgcttagcgcgcaattcaagtgcaaatacttgacaccgccgcacctaaactgggaaaagtgcgggctgggcgatggtgaatgggaaatgggtggaaaaaaaggtggccagggactgatgaacgaacaaccaaacccactcggtcttgcaatgccatcaacgcgtgtgcctcgagagcctctcgatgcgtcctcgtcgtcgtcctggttcccgtcacacgtcaatatcctttttgtggtttggttttcccttgttttgcttttcccccgccccagtccggaaaggcaaaaaagcattggcaacttttccgcctcatctgccgccggcattccacctattatcgtttgtttgagccaagttttgcactgcctgatgtctgatttatttgcatttggcttgtggtccatgcagttaataaatttcacttacccattggcacacacgcacacatacacacactcacatatgtgcaaagtgttatctaactggggaaactggatggaaaacaacttttccgaaaagcaagtatccaaagttttggggccaaagtttgccgctgtggcaacttacctatgtcaaattgattagttgagtccgacagctgaatccaaatctgttccgattcgtaccgcttttcccccgaggcgattggggtatgcagataatttgattgtgtgatttatgtcacaatatatattcagaattaatgaagatgaaggagatttgcggttggcaaatgcaaactcaatctgccgagcattttgcacttcattaattgtggaaaaatgctgaataaaaactgaaagctgcaaaccgaaaaacaaggcgactttcatgattttcgactcgctgacaaccgcaaatgcaaatatttgagagcggaactgcgatgtctgttgactgcagactgctgactacaagccaaaactaattgttactgacactcgccgtttgccaaagcgccagacaaacgtcctgcagcaattgaaaaacaccaggatatcggggagtcctgaaattctgtgcgggaagcaaccgctcgccgacacagtaaagttatttgcggttcattattcacttttggattttatttccttgtggtgcctggttggtgcccgggacgagcacgatcgaagacagtgatggacagcagattgaagtccggtcgagacacgttgcccttctgctgaaccatcaaacccgtactatttcaaaagctgcatgcaaaatgacctgacaatgaaccgctgctgctcagcgaactgcatcgaggattcagggattcgaaccaggaggacgagacggcgacgtttaaattgggaaattttgcttggctgcattcgaagcagcaaagcagcaatcgaggagcatttttgctctttgcttattcatctagcaagttgaaaaataaattaataatgcgttcttgccactgacggcagctgcaaccgcaccagaaggaaaattcggggggtaagtccgtgcactgagacactgtcagggacttggaaaattcgtgctgagcttttttcctctcgcgctctatatatctaaatatctatacagatatacatacgtatatatatgtgcactctatatttgactcgtctttcgattcccccattcgtctcggagtccatgaccacgtccatctagatctccttcctttttttttttttgctcttctcctaccgacacccctggtcctaaaatttaattgcatctttttcaacaattctagcacgaaatgaaaattcatgcaaacgttggcagataaaaacggaatcccgaaaccctccgtccctccgcaaaaggacgaaagggacgaagcgtagcggtagtaggagcgaatggccagaggaatttaagctttcagtttagttcagtcaagatatgaatactaatagccactggaatgtttgagtagccaaaggacattgcaccgccgcatccctagattctctgtcaaggaactcggccagatcccaagacgctgaaggtttctccgcctcctgctctcactgctgcatgctgcctgctggctgcttcctgctcccaggatcacaggctcctttggctggcaatgtcattactcttatttgattccgtggacattcgcataaatgccagattgagtttatgcacaggcaaaagttgagtccttgaaatgcacccactggcgggcaaatttaaatgcaaaaagtcctgcgactcgactcgagactggtcctgagacaaaaacgtggcgaagaaaagcaattagcgaaattaattgctcaagtttcgctttgaaatattcatccgtgagattaattcgccggccgacaaagctccgtcatcgagcattgcccttcccctaacgtattccttagctaccccgcaatttgtggctttgtcaattgaatggctttgcggccgggctagctgattgacttggcccccttgcacgcgattgaatttgcaattgccaagggcccggcccgccaacttgggatcagtggtgccaattacggaacgccgaaaatttcaaagccaagaacttgacacagctactggagaagcactcatacggatggatgtgactagatattttcgactaagttaggatgaccaaaaatattaacgttgtaagatcgtcatgataaatccaccttatcaaaaaaaaaaatatatatatatatttttagaattatttctaattttagcttgtatccacttttagctttaaaatagccaaataggcagatccagctgcataggatgaagtgatagcattcgtgttctcaacttaccgctctcaaagtgcagggacaccactgcgatggccaggaacaggatgtggggcaggctccccacccggcgatcgcggatatgtcccggcttgctaattgtcctcgcttctgcggccattttgccggtcttgctgttttgcttgctgttgctgtggcactcgaatttgtaagcaattctgctgctgctgctgctacttctggtcggcaacttagtcaggtgcattgaattaattatttcattgctgcacacgaatttgcaggccgcagattgtgttgcgagcaatggtagctccttgctgttgtcctgcgatttcttctgttaccactccacagctgaaattgcaccaagcagcactcgcctttgtcgacgtcttcgactgcagcacttacggaattttaattattcaaaataggtttttagcacagcaggcggcggcaggatacgacgctaccaggatactaggatactgctacaggttcggttcgtggttgcggggctgcactgctttaattgcttgttttgctgcaatgcattttcctggggcgtttgtaaatttatagctgcaaaatagaaggaaaacgatatgcgttagttttctgcatgaccacagagagtccttcgtgtgtgcgtgtgagtgtgagtgtgtcgtggtctatgtatgtggcgatctatatgcctggtgtcctgtgtaatgcagctaagccgccgtgcccaaatacataattcctatgcaaataagcgtggcccaacactaaaatttatgtgcgcacagcgttttgcatatctgcacacagaatagaggcgaccaagagtgagataccctagtacactcgaaataaaaccaggggctcatatatatatatatatatatttaatcttaaaaatgtcattgagtttttaatccactcagcagttttcagggatcccaaaagacatgaaatgcattagactcgacatctatttgttaggtactttttttcaaccccccagttattgagtactttgatttgaaccaaagcaaaatacaaatcatttttttatgtgcaaaaataaaatacgtttttttttagtgcacatacgaacattcgtatatattcgagtcttcagtgacgttttttccacaggcgaataaaactcaagcagagcgtaaaaaaatataaacgacggcaggcaggccggcagacaaaaaacaaaatgccaacgcaggacaagctgccaaattaacagaaatttggatccaagcccgaacttttagtctccgcaggatagtgcacaggagcaggactctggcccccttaactcctgctcagttctccactggcagtgacagcaagccaactgaaataatcccgaaaaatattgtgtgcgcattttggatttgttgtctttgatttggcgcggtttttcaaccatatccgtgtgtgtgtgtgtgtgaatgtagccaacgttttatttgccgattttttattattttttttttttttgcatttccattacaatctctctacttaacatgttttggcagttgcgcaggctaaaacccgcagaatgaagtacaatgag

SEQ ID NO: 11702 - DNA, 941 bp, DROSOPHILA
cagctataaatttacaaacgccccaggaaaatgcattgcagcaaaacaagcaattaaagcagtgcagccccgcaaccacgaaccgaacctgtagcagtatcctagtatcctggtagcgtcgtatcctgccgccgcctgctgtgctaaaaatgcacctgactaagttgccgaccagaagtagcagcagcagcagcagaattgcttacaaattcgagtgccacagcaacagcaagcaaaacagcaagaccggcaaaatggccgcagaagcgaggacaattagcaagccgggacatatccgcgatcgccgggtggggagcctgccccacatcctgttcctggccatcgcagtggtgtccctgcactttgagagcgcagtctgcagtcaacagacatcgcagttccgctctcaaatatttgcatttgcggttgtcagcgagtcgaaaatcatgaaagtcgccttgtttttcggtttgcagctttcagtttttattcagcatttttccacaattaatgaagtgcaaaatgctcggcagattgagtttgcatttgccaaccgcaaatctccttcatcttcattaattctgaatatatattgtgacataaatcacacaatcaaattatctgcataccccaatcgcctcgggggaaaagcgatacgtacgtatgtggcgagccaggacaaggcactcaaagcctttagcccgggcacatattgcttcatctctctacgtgagtctgccggcagtgccatcaaaactgtcgacaatatcaacgtcaacgccatcatctcagccagctccaacatcccagcttcccagctccatatccaactgattcccagcttcccatctccatattcctccacttgctccgtcattatgggcttcggctgccacttcacaaaaatgcacacaaaatcctcaactttatctcgtcaataa

SEQ ID NO: 11703 - protein, 263 aa, DROSOPHILA
MHLTKLPTRSSSSSSRIAYKFECHSNSKQNSKTGKMAAEARTISKPGHIRDRRVGSLPHILFLAIAVVSLHFESAVCSQQTSQFRSQIFAFAVVSESKIMKVALFFGLQLSVFIQHFSTINEVQNARQIEFAFANRKSPSSSLILNIYCDINHTIKLSAYPNRLGGKAIRTYVASQDKALKAFSPGTYCFISLRESAGSAIKTVDNINVNAIISASSNIPASQLHIQLIPSFPSPYSSTCSVIMGFGCHFTKMHTKSSTLSRQ

SEQ ID NO: 11704 - DNA, 3948 bp, DROSOPHILA
cagccttagtgccagtatgggacctggcgttgtggggaacatgaatagcttctcctcatcgatgcagatgcagcagcaacagcagatgcccatgcagcaacagcagatgtcaagtggcggtctgctgggatctgtgctgggcactagtggcggtccaggtggcggcggcggaggaggaggtggtggcgggggcggcgtcggtgggagtctgcttatgtcgcagttttaggcaggatcctttagcaaaatagacttggctcattacctctcatcagcagacgcaccccaaatggcaacataaaaaaaacgcagagggcctcggtcctctacatgcaattttctcgatatcgtttcgtgtcctagttattaatttatgattattgtaaatgtaaaatagtttatttctgtaattagccaacaatttttcgttcgttttcgcgctagcttaatgagatttatttaaacgcaagttatggtacaaaacgcaagaacgttttcgctctcgattccagctcttccctccacacaaacacacccctcgccacgccgccacaaaaacgctgctttgcaacctctttaatttgcttaccaaccttgtaacgtgtgtagggtcagtatttcaattaaatttctgcaatggtttgttcttccagcaagtttataaacacaaaagaaagctgagattcaacaaaataaaaatgcctgtactataagtaattaattttagtgattaggcacataaaacaataaacaagcataaaaatgatcaaagtgtgtgtttacaatagtttggggagcttagttcatttttcgaatataagcatttgttgcacagaagttctgcttccaaggagcccttaaattcaaatttggcgccaaacacttgttagcactctgttgactttaacatggcgcattaacagctacgctgaaatctgacagatagtaacatagccttaacaggcgccaacagctgctttaattctcagggagtttctcgcaatcgagagtcaattaataaattaaaagtgatgtgtataagatagtcgtcgctgcaaagccatagatgagttgtaacttcgccagattttcgcgacaggcagctatcaacatgtacaagcagtcgtgcaccaatctcctggaattatcctccgccaaggtgaccgagtggctagcaggcttcgacagtgtaataaccgactgcgatggtaagtcggtggtggggatgagatactactaactcgcacccacccaggattccccccaggaagttgcgttacataaagatatgtgtataccacattctgcccaaatacgtcagcagccaatagtttctgtattgtggctgcgtcgtttatttcaatgtcaaagagtgaagtgcgtgatatggcgggaagtcgactttcggatgccctcatatcttgttaatcatcgttatatttagtaaagagtaaagcagtaaagagccgtttgataaattccctaatgctcatagtgatgagccctaagtttattaatattagacaatcttatcaattcaaggaaatcgttattatatacgcaatatcaaaagttgtgttcaaccccattatttattaattttatgcaataatgccttctttaatcataacagcttttatttcttttcgtttatgtatctttgcgaagttaccaatttacttaattggaattaatttcaaactgtcctctttgcctttgaatgattaatttatcaattttagaaataaattaccaacaatatgagtatactttttgtagatattgagaaatcaataacgccctttataaaactagcaatggcattaataaaactaacaactacaaagtgagaacctatttagcaccgttctttttttaattttaagaaaattcttctacaatattaatccattttttcacatcaggtgtcctttggatctatggccaggccctggagggctctgtggatgtgatgaaccagttgaagggtatgggaaagtcgatctacttttgcactaacaactcgacgaagacccggtcggaacttctcaagaaaggcgtcgaactgggctttcatatcaaggagaatggcattatatcaacggcccatgccacagctgcgtacctgaaacgacggaacttcagcaagcgggtatttgtgatcggaagcgagggaatcaccaaggaactggacgccgtgggcattcagcacactgaggtgggcccggaacccatgaagggatcgctggccgagttcatggcacagcatttaaaactggacacggacatcggagccgtggtcgttggcttcgacgaacacttcagttttcccaagatgatgaaggccgcttcctacctaaacgacccggagtgtctgttcgtggctaccaatacggatgagcgtttccccatgcccaatatgatagtaccaggcagcgggagcttcgtgcgggccattcaaacctgtgcggagcgggatcctgtagtgatcgggaagccgaatcctgccatttgtgagtctctggtcacggagaagaagatcgatccatcgagaactctgatgatcggagatcgagccaatacggacatacttcttgggttcaattgcggcttccagaccctgcttgtaggttccggaatccatcagctgaaggacgtggagcgttggaagttgagccaggatcccgaggagaagaagctcataccagacgtgtacctgcccaagttgggagatctgttgccgtcgatcgtgaacagcctgacggacttgaaatgaatcagtaatcagtaaatagtacggacatgtgtttgtatagattttacatttaacttcaatagacaggaaagattattaatacttaacgcaaatttatagtgcaatttataccacagaacaaagaatatttaaataaattcaaaagcattttgtgagacggatgatttaaccgatatgcccgactcaatttgtttttccgagcgagctttgtgcgaaagggagatagcagattttccccaatcaccgtgaatcgaaatcagccagcccgtcgccgtcgatttagttgagtcgcaagcatttggcgaagcggtctacgaagcaaaatgtccagaggcggtgctatcgacttgaccggcctatccgaggagcaggtgagcgagtggctccaaagtttcgacacggttctctgcgacggcgacggtgagtctcaagggcggctaaggtgccacagagagagggttcattgggcttgtgagtgctgctatggagcttttaccagagttgtcgcttcactgaaaaaacagagtataaaatatcgatggtaatttacatgggtaaggggaaaagcttggcgatcgcggtagctaaaagtttacatttcatcggcctgctacatcgattgttactgttattcattttgtaagtggataactttaaacgtaaaatcgttaataattagaaaaagttgataaggcttaacgctgctgaaatcattttacatttttaggaatatatttatacctgatcaataggaatatgtttatacctgaaaatctctctgatctctcgcagatcattccaatttaatgtataaatttcccatgtactattgggcttaccaaacagaaatttcgttcgtaattattttaaaataaagccaaaactcgtgttaattccaatattatttagttactttataaaatatatctctcatttcaaacctcttcaaatgacaccaaatcaaatatccattaaacgcacaggcaccatatggcaggatgacacggccatcgctggtgctccggatgtggtgaatgccctgcaggatcgatttgacaaaaaagtttacctgattaccaacaatggcctaaagacgcgacaggagctctttgagcgctcccagcgccttggcttccatttacccagcgaccgacacatcatttcgcccacgg

SEQ ID NO: 11705 - DNA, 1231 bp, DROSOPHILA
caatcgagagtcaattaataaattaaaagtgatgtgtataagatagtcgtcgctgcaaagccatagatgagttgtaacttcgccagattttcgcgacaggcagctatcaacatgtacaagcagtcgtgcaccaatctcctggaattatcctccgccaaggtgaccgagtggctagcaggcttcgacagtgtaataaccgactgcgatggtgtcctttggatctatggccaggccctggagggctctgtggatgtgatgaaccagttgaagggtatgggaaagtcgatctacttttgcactaacaactcgacgaagacccggtcggaacttctcaagaaaggcgtcgaactgggctttcatatcaaggagaatggcattatatcaacggcccatgccacagctgcgtacctgaaacgacggaacttcagcaagcgggtatttgtgatcggaagcgagggaatcaccaaggaactggacgccgtgggcattcagcacactgaggtgggcccggaacccatgaagggatcgctggccgagttcatggcacagcatttaaaactggacacggacatcggagccgtggtcgttggcttcgacgaacacttcagttttcccaagatgatgaaggccgcttcctacctaaacgacccggagtgtctgttcgtggctaccaatacggatgagcgtttccccatgcccaatatgatagtaccaggcagcgggagcttcgtgcgggccattcaaacctgtgcggagcgggatcctgtagtgatcgggaagccgaatcctgccatttgtgagtctctggtcacggagaagaagatcgatccatcgagaactctgatgatcggagatcgagccaatacggacatacttcttgggttcaattgcggcttccagaccctgcttgtaggttccggaatccatcagctgaaggacgtggagcgttggaagttgagccaggatcccgaggagaagaagctcataccagacgtgtacctgcccaagttgggagatctgttgccgtcgatcgtgaacagcctgacggacttgaaatgaatcagtaatcagtaaatagtacggacatgtgtttgtatagattttacatttaacttcaatagacaggaaagattattaatacttaacgcaaatttatagtgcaatttataccacagaacaaagaatatttaaataaattcaaaagcattttgtgagacggatgatttaaccg

SEQ ID NO: 11706 - protein, 330 aa, DROSOPHILA
MSCNFARFSRQAAINMYKQSCTNLLELSSAKVTEWLAGFDSVITDCDGVLWIYGQALEGSVDVMNQLKGMGKSIYFCTNNSTKTRSELLKKGVELGFHIKENGIISTAHATAAYLKRRNFSKRVFVIGSEGITKELDAVGIQHTEVGPEPMKGSLAEFMAQHLKLDTDIGAVVVGFDEHFSFPKMMKAASYLNDPECLFVATNTDERFPMPNMIVPGSGSFVRAIQTCAERDPVVIGKPNPAICESLVTEKKIDPSRTLMIGDRANTDILLGFNCGFQTLLVGSGIHQLKDVERWKLSQDPEEKKLIPDVYLPKLGDLLPSIVNSLTDLK

SEQ ID NO: 11707 - DNA, 3127 bp, DROSOPHILA
gcgaagtagttgtcaagataagccgcgcacggcataaaaagtttggcaagcaacatgcagggttttgaaatccccttctgaaattctgaaatcgtatatgcgatcataataatgctcagctatcaaagagtgaaagctaacaactaaccactggcaatgcgttcttatcgaaggaatttttgacactttggggagcgaccgcagtgacgaaagaggcggggagaatagagcaatatggtcagttactggtactggatgactaaatcagcccacttgggcacccacacatacacacacacaccccacctcagcccgcccagccgaagcagcgcactatctgttccactatctgcaggtatttgcggaagcttttggcgaggcactgggaattataggcgctattagtaaccttttaactgccaatgccgattaacggggcttctaattggctgcaggagtgtgcgtgcacgcagcaatccatcacacacacagcacacacacacacactcattgggcgtgcgtgtgttggtggaggggtgctccctgataagtgggcatatggtaatggaaccatttatgggctggaattggcgatcgaagtgatataggtgatatgggtgatagctgcggccattgcgttgggggaattggcactcaccgccttgctgaatcattgaaaacgaatatagactgtatcaaaacattgcagtatttattactgcgatggggtaatgcgagcaacttgttggagttgcagcctgcagacactgtggcacttagacgtagtcaacaatagcacatagatagatagttattgctaaaacacacggataaatgtaaaagtttatgttaattgttcgtaaatttcgtaaattaatggccgaccagtgtggccagcgtcgcgcaaaatatcgtgcaccagcgaggaatccagcgctatcgataacattcggcccgcgcgctttgggcacctccggtcactctaaccggttaaacttttcaacttcagtctattttgatagttttaaattgttgtaatagccattaattacttttctaacacaagaccatgattgcgcgcaccctgcgaacggtgggccggcaaggtcgcaaccttctgctaccgcgcatcaccgcctgtcgcccacttcacgctattccggccaacttcagcaaggcctacgaccacgacgggaagaccaaagtcaccatcttcaacaccgaaacggatctgggccttatggtcaccggctacagccagtacggcttccggctcaacaacgacatggtcctcattggccccatctccgtgtttcccaggtaggtggccttcgacggatgcattggctcacccaattatgtaaacaagtgcatgtgatttatgccatggcactctgatgatcatacaatcccaatcccaagcttagttatgcacgcctttgagtttattaaacagaagtcaaggatttattgggaaaagtcaaagagaatgacttcttcatttaaagtttcatacaaaaaaatgttgatgtaaaaactaccaatagttgttaaaggctttttgaatgctaatttaaattttaattatttcaataacttcttaccttatagcctctatttgtttaagttataagctttcgatggcttttaatagtgatattgtttataagtattaatatgtcataagttactatctgaagctaaagtttaattttatgttttactacttacagatcggttctgtcctggaacgtcaacagctttgaggacatcaacgaggacagcctcagtctcttccccaccctggagccaaagatcgacgtgcttatcattggcattggcgaccaagcaccgcccccagctctttccaagaggatcatcgagttcatgaagaagtacaagataaacgtagagatcctgcgcacggagcaggtaggtattaatcactccccgatctatatccatattgaatggcactctttgcaggcatgtgccaccttcaacttcctgaatgccgagaaccgaatggtggcctgcgccctgatacccccgctgcacctgtcctacaacgagaacgacattctgcaagcgaagctgcggaagaaggagctctacgagaccgaataggattagttagacacatctaatgattgtttgaaaggctggtgctctgttagaaattaaactgttttgtaaaattcagatttctttattcgtatagacgtagttgtaaggtgtataaaagctagcaatctcgcagttaaactgcactctcctccttgtcgattaattggcgatttcagtcggctgtggcgcccggatagcgctcaatgagcatagccacgccctgtccaccggccgcgcaggcggcgaccacgcccaacttgccatcctcgcgcaccaggcggttggcggtgtgcatgcagaggcggactcctgtggcggcgaaggggtggccgatggacagagaaccgccccagttgttccacttggacaggtcgggagtgccgaccttctcgttcaggcccaagtaagtcttgcagaaccagtcggagtccagggccttcagattggccacgatctgtccggcgaacgcctcgtggatctcccacgagtcaatgtccttcagcgtgagtccagccttcttgagcagcttgggaattccgtaggcgggtcccagcagcagctggttgacgggatcctgcgacacgaacaggaagtcgcgcagataggccttgggcttgaggcccagctgcttggccttctcctcggtcatgataatgcaagcagaagctccgtccgtgaggaaggaggcgttggctgctgtcacagtgccgtagggcttcacaaaggcgggcctcagctttgccaggctctcgggactagacacgcggatgccgttgtccttgtccacgatctggtccacgccggacaccttgaagggaaccagatcggtgaagtagcccttctcctgggcctccttggccagtgtgtgggatcgcagggcgtactcgtcctgctcgctccgggatacgttgaaggcggatgccaagcgatcggccgagtgtcccatggtctcgccggaggagaactccgcaacggcgggcagctcgggggccaggaagtc

SEQ ID NO: 11708 - DNA, 660 bp, DROSOPHILA
caacttcagtctattttgatagttttaaattgttgtaatagccattaattacttttctaacacaagaccatgattgcgcgcaccctgcgaacggtgggccggcaaggtcgcaaccttctgctaccgcgcatcaccgcctgtcgcccacttcacgctattccggccaacttcagcaaggcctacgaccacgacgggaagaccaaagtcaccatcttcaacaccgaaacggatctgggccttatggtcaccggctacagccagtacggcttccggctcaacaacgacatggtcctcattggccccatctccgtgtttcccagatcggttctgtcctggaacgtcaacagctttgaggacatcaacgaggacagcctcagtctcttccccaccctggagccaaagatcgacgtgcttatcattggcattggcgaccaagcaccgcccccagctctttccaagaggatcatcgagttcatgaagaagtacaagataaacgtagagatcctgcgcacggagcaggcatgtgccaccttcaacttcctgaatgccgagaaccgaatggtggcctgcgccctgatacccccgctgcacctgtcctacaacgagaacgacattctgcaagcgaagctgcggaagaaggagctctacgagaccgaatag

SEQ ID NO: 11709 - protein, 196 aa, DROSOPHILA
MIARTLRTVGRQGRNLLLPRITACRPLHAIPANFSKAYDHDGKTKVTIFNTETDLGLMVTGYSQYGFRLNNDMVLIGPISVFPRSVLSWNVNSFEDINEDSLSLFPTLEPKIDVLIIGIGDQAPPPALSKRIIEFMKKYKINVEILRTEQACATFNFLNAENRMVACALIPPLHLSYNENDILQAKLRKKELYETE

SEQ ID NO: 11710 - DNA, 2589 bp, DROSOPHILA
taaaataaatacgcatttttataggcctttgttcggtgcgagtaatgccttagcagaaatccatacagacgcgcattttaaagcgccttaaagtcggcaataaaactatttttcaatcgtttgaactcgacggcagacagagagggagatggggcgaaagggagacagcgacactttggagatttggggaaatgtatcgcaatttgcatgcaccgcacacacacatcgaggattttcgtggagcagttaaaaggcaagtgttggccagacacacacagacaatcgtatgcaaataaagggcaacattgtaattggaggaaatatatgtaaattattcatcattgcagattagaagaccagtcgaagacgcatgccaaagtaaaggaaggaggaaaaagcgaggaaaaggatacccaggatacccagaataccaaggagccagagacaaagctggagtcgcacgcttgttagccacatcgggttcggtctccggcaggaagtagttgagcaggacccggagccaaaggagcagcaatttgcatccgttcgctttctctctctctctctctctctttgcgtctgaatttcaggcagccactactccggtgggatgagcagggatgccggggcaaatggcagattagttttgattttttcaacgcccaaatttccactctctattgaatcttttgcccgtaaagccgccaaattgcagccgaacctactttgcatatttgagtggcccggacgcataaagcactaagcactaggcactaaggatgtaaggatatgttaatttgaccagcacacaacagtgtagactcgaaatgatggagcctaacaatggggccccagtgatttgagcccggccgcataaatttcgcccataaaattcccatggaacgtcaatctggattgggggtgattgggattgtgaactttgcataacaatgcaaacgccgaaagtggcgaaaagtcgttggcaaatttgtgagccggcctacttaccgagtatctcgaccgtgtgggtgatttcacgtggatccatagtggcaatctggcagatataatcgccggcatccgtgggcagggcgtcgcgtatctgcagattgaatccattgaccaaacgcactcggggatcaggcgtaactttcacggatccggcggttaatatggctattccgcgcttccaggccacaacgtacgtgtctgcaacaagagcaataagagcggattgaatttgagaatcactgctggaattatggcattataattgataaattatgttcgagagttattgaaacgaatggcggattcgagtgcttgcattgcagtggcagcgcaaattgaaaagtcaaaattcaaatgactcaattacgagccgcttcaaaggatctaaaaaggctagaaattcaatttggcatggactcgcaaacacacacacacactcatctacactcacatgcacactcagccagaggcggatccagagtggaatataaaccgcagacaggcggcatgaacaacactggatgagagtcagacaggcactcagtaacacccacttgatatccgctaatgtgcggcatttgcaatcatatgccagaatgagaggcagtcagacactcggatgctttcaacagcagtagctgtggcaggaccagcaggaggaggaggagcagaacctggctgccatgatgccagcggaaggatgccagccatccagctagatgagagccagggtggacctttagcttcaggcttgtctatctcattaaatgcaaagcatcatatacatatttataattccaaatatactcaatactgcttaagcgaaccaaactcattcagaaaataactggcatttaataaaatcctcttcttaccttaataatgatattctgtgtaatgttcatttatataatttttcataaaaagttaaaaaggatatctagtgacaattatggtccaccctagcgcatactaatacactcataggcacgctcaaacactcattcacgtacgacagtccaatggcaatggcgcattcatcgaactcattaattgtgattcctttttcaatttatgtgagttgctcgatgtaaatttccgagcgcgtgcaaagcatagatgatcgacaaggggggggggggaggatatggaaaggatattgggagcggaggaggatgcagagttggggcagcagaactgaagtattgaaatgtgtattgaagctaccggatttgctactaatgatgtatgacttccgtgtttcggcgccgatgagcggcgttcattaaaaattaaaacaattttgcccgccatcgacgaataagtgagcttttccactgccaaaaagatccggggtacgggaaaatgactaacagctgcgggcaaaattgtgggactgattcaaaaggattttacaactgcttaagggattagagacattttttcagctacttttgttactgagctacactttgaaagtgttccattttgcgaaaaaaagttaatcaataatatgaaatattaatgtcttaatgaagaaataatttcaaaagctttatacaatgtccgtctatatac

SEQ ID NO: 11711 - DNA, 336 bp, DROSOPHILA
atgccgcacattagcggatatcaagtgggtgttactgagtgcctgtctgactctcatccagtgttgttcatgccgcctgtctgcggtttatattccactctggatccgcctctggctgagtgtgcatacacgtacgttgtggcctggaagcgcggaatagccatattaaccgccggatccgtgaaagttacgcctgatccccgagtgcgtttggtcaatggattcaatctgcagatacgcgacgccctgcccacggatgccggcgattatatctgccagattgccactatggatccacgtgaaatcacccacacggtcgagatactcggtaagtag

SEQ ID NO: 11712 - protein, 111 aa, DROSOPHILA
MPHISGYQVGVTECLSDSHPVLFMPPVCGLYSTLDPPLAECAYTYVVAWKRGIAILTAGSVKVTPDPRVRLVNGFNLQIRDALPTDAGDYICQIATMDPREITHTVEILGK

SEQ ID NO: 11713 - DNA, 3260 bp, DROSOPHILA
ggagaccaagcgactaggtgtatggactcacctgggtgatttcgcagcgacccgtatagatgaagtcaagcaggatgtgcaggatatcgccgtcgattgtgtgcagcacaacggatttttgcttgacctcatttaacccgagctcgggtcgaaacatggcctcgaagtaggcactggctgcactcaggacagcccggtgggcactcaatgttgccattccggcgatgatctccacgtcgcagaaacgggactgctcgcgcagttggttgagattggaaagcaccttgaacggatattgggcgttgcagtaggagggcaggtttgtgcgatggctggccgctgtggctccagatcccagattttggccaaagaagtcaccgtcgccgccgccgccggtgggattctgattggcgttctgattggcattcgcattcggactggtattgccattgtattcgtgtatctggtatgttttcaacggtggcatttcgtcaactgttgggtttttacttttcggcgatcttgaatccgatatcgccttaataaatgcacttttcgggggcgacagcacagctcagactcttcgcattcaattgtttggcttaattaaacttaattgctgcactctgcgctcacttcaccctttgttgttgctgctgctgctgttgttgttgtcgcagtccgtttatttttctccaatcaaaaggcgagcacacacacccacacacgcaatacaaacgactgcaggcaaaaggttagcatatcacaaattaaaacaaccgaagtccgctactaagacagctatttccccattaagatgaaatagtgtttttaatatttacaaactggcatatttctttgacttttcaatgcactttagtatgtagctggaactggagtcgatgtttttgggcgactatcgatgttgatagaagttgcactatgcctgaatatcgataagttcagtttttatccagaacttattgatagtaatcgctgctatcatctttggtccacctcttgttgttatttaattatttgtattttattttcaatgaattttcaatgaaaagctgacaaaatgatatcgcgcaaactactaaaccttcgactgggttacctggcacgccgttgggccagcacggatccgctgagcattcagaacgagaagctgcaggcttatttggagtctctacgccaggaatactacgccgtgcgagtcaacgccgccggaaacagcaaatcctacgcccgtctcgcccagctggagggcgtggtcagtgccctggagcagcgacgcgtactagaacggcacatcaccagcgccaaggacatggaagcggagaaggacgaggatatgcgtgagctaatgcgcgaggagaacgaagtctatgtggatctactgggcaagcaggatcaggccttactgcaggagctgcttacgctctctgacgatgaggagtatccggctctgatcttcggcctgaatgccggcgccggtggccaggaggcaatgctattcgcccaagaattgtacgaaatgtacaccggctatttcgagcacatgggctgggagtgggaggagtttgccagcgagggcaccgacatcgggggtctgcggcacgctagtctgatggtgagcggcgaggatgccttccgctggctgcgctatgaggctggagttcaccgcgtacagcgggtgccggccactgaaaagtctggacgcatgcacaccagcaccgcctcaattacagtgattccccgacccgccgacatccaagtgcacatcgctgagaaggatctgaagatcgagacgaagcgagcgagtggagctggtggacagcatgttaacaccaccgactcggctgtaagaattgttcatctgcccacgggtctggcggtggaggcgcaatcggaacgctcccagctcaaaaaccgggagctagcgatgaagcgtctacggtcgcgacttgtgcaacagcagttggagagcgttgaggctagcaaaatggccaccaagaaggcgcaacagggtagtctcaatcgcaatgagaagatccgtacctacaatttcgtccaggaccgcataacggatcatcgaattcaaggcggtacgctgcacaacctcaatggtttcctcaagggcggcgaccaactgagtggactaatagagaagttgcaactggaacatcgaagggaacgactaaaggagctcttggataggtgggagccaccaaaagaagctattgagaaaaactagagctactttcgtttgttactacatttatacgcctgtgttttagaggataattgtgcttttgcaacagaaattatattaaaagagagcaagggcagccatctgaatacaatgttaaagacactatttaatttgtaaatgttggttcctttttattataattgttgcccttcaattgtaaaaaacgacaagattggaatagaaaagattactttatttcaaccaactttcgcaaagtcagaggcactgcccatgtgcagaaggtgctccttgactgctgcctccagaatgtcccttatttcgcggcaacccgccatagcagtctcgatgacggtttccaagtgatcgatgtggaaccgctcactcatctcaagaaaggcgattttctcggcggtaggcaaggcagccacggttagtttcggtccgccggatacctcctcgaactgagagatgtctgtgagcgggatgttcgatttgctcagtgaggcggtgcaggcgacaatgaactcattgaggcagattcccgcatcaattagcgccagtgtggcggcattaagagccaccgcatagttggcgccgtcgtcttggagcacctccacgtatatgtctatctgggagcggggatatagttctgatttaatggcagcacttagcgcctgctgcaggtacaacttgaactccagagatttgcgatcgccgcgcggcctatttttgcgctccgccgtggagaaggttgcctgactgtactgacagttgatgacggactctgtctgattgcccttggcctggtggggtccatagacggcagccagaaccttggtgtttccctgctccatgtaggcacttccatcgggctgctcgaagactcccagtttgcacttgatgcggcgcaattcatgaggacgtcgtccgtccagacggaggccctgctcactgagcagatcgtatttaccagacatattttgaaactttagaaatacaattattttgattttaactaaat

SEQ ID NO: 11714 - DNA, 1260 bp, DROSOPHILA
tatcatctttggtccacctcttgttgttatttaattatttgtattttattttcaatgaattttcaatgaaaagctgacaaaatgatatcgcgcaaactactaaaccttcgactgggttacctggcacgccgttgggccagcacggatccgctgagcattcagaacgagaagctgcaggcttatttggagtctctacgccaggaatactacgccgtgcgagtcaacgccgccggaaacagcaaatcctacgcccgtctcgcccagctggagggcgtggtcagtgccctggagcagcgacgcgtactagaacggcacatcaccagcgccaaggacatggaagcggagaaggacgaggatatgcgtgagctaatgcgcgaggagaacgaagtctatgtggatctactgggcaagcaggatcaggccttactgcaggagctgcttacgctctctgacgatgaggagtatccggctctgatcttcggcctgaatgccggcgccggtggccaggaggcaatgctattcgcccaagaattgtacgaaatgtacaccggctatttcgagcacatgggctgggagtgggaggagtttgccagcgagggcaccgacatcgggggtctgcggcacgctagtctgatggtgagcggcgaggatgccttccgctggctgcgctatgaggctggagttcaccgcgtacagcgggtgccggccactgaaaagtctggacgcatgcacaccagcaccgcctcaattacagtgattccccgacccgccgacatccaagtgcacatcgctgagaaggatctgaagatcgagacgaagcgagcgagtggagctggtggacagcatgttaacaccaccgactcggctgtaagaattgttcatctgcccacgggtctggcggtggaggcgcaatcggaacgctcccagctcaaaaaccgggagctagcgatgaagcgtctacggtcgcgacttgtgcaacagcagttggagagcgttgaggctagcaaaatggccaccaagaaggcgcaacagggtagtctcaatcgcaatgagaagatccgtacctacaatttcgtccaggaccgcataacggatcatcgaattcaaggcggtacgctgcacaacctcaatggtttcctcaagggcggcgaccaactgagtggactaatagagaagttgcaactggaacatcgaagggaacgactaaaggagctcttggataggtgggagccaccaaaagaagctattgagaaaaactag

SEQ ID NO: 11715 - protein, 392 aa, DROSOPHILA
MISRKLLNLRLGYLARRWASTDPLSIQNEKLQAYLESLRQEYYAVRVNAAGNSKSYARLAQLEGVVSALEQRRVLERHITSAKDMEAEKDEDMRELMREENEVYVDLLGKQDQALLQELLTLSDDEEYPALIFGLNAGAGGQEAMLFAQELYEMYTGYFEHMGWEWEEFASEGTDIGGLRHASLMVSGEDAFRWLRYEAGVHRVQRVPATEKSGRMHTSTASITVIPRPADIQVHIAEKDLKIETKRASGAGGQHVNTTDSAVRIVHLPTGLAVEAQSERSQLKNRELAMKRLRSRLVQQQLESVEASKMATKKAQQGSLNRNEKIRTYNFVQDRITDHRIQGGTLHNLNGFLKGGDQLSGLIEKLQLEHRRERLKELLDRWEPPKEAIEKN

SEQ ID NO: 11716 - DNA, 4192 bp, DROSOPHILA
aatatatgggtttacaatatcgtttgcgagaattggtggtttcaggtgctaccttagtatcttggaaccgatcttatgtaacttgcctcctgagggatatatatatataaataaatctctatgggaaattggatatgtggcattgtatgagaccccctggaaaatgcgtctgtgccccagattggggatcatatcgggcctgttccaagtttgagtgggtctccattaaacggcagacatctaatcagacggcgaattgcctcgtttcaattcattttcgtctgtctgcctgaaagacgctgacaaaccaacgatcctacaagcatacgcacatggatacttgtatgtatatatgtatgtatattttaatgatttctgcggttttcgtacacatgctgatagtgataatatagttggccccacgcattcaaagcgtgaaatgttcgctctcttctttttcctatctgtctgcttccgtttccccctcccttgtcatcaagctggtgataattttctttaaactatgaaattggtattaaataccaaatgagctgtgcaaataattagtagacattcaaatgaatcgagtgatttaatattaattaactgccatgtttaaagaatttaaggttattatcagtggctggttgaaatataggtggctctcttaatgtataatttgctaaaaagcgatcgctagatggcgccttgaaatcttatgaaatctattaccatgtagataatcatatgaagaacaagtgaagtctttttttttaagtctgttactttatgtggattttcgttgcccaaattggcttgaaaaactgctgcgggaataccacataaatggggttgatgggcagtatttcctttaaattattaataacgtgtaaatgaggtcaattgagggaaccatgtcacctgttgtgcctcctcggcaaatcggccttcttggccacgcaataacctccagactgttgacgaacaaggaacgctcgccatggacaacggaccgatggatgccacgcccactgccgccgccttccggctgattttgcttagcaaatcgaatcccgtgatgggttgctacatgttctggaccagtctgctcgtgctgaagatgctcgttatgtcactactcaccgcccgccagcgcatgaaaaccaagacctatgccaacccagaggatttacgcctgagtcggagcacggaggttcgattcggggatcccaatgtggaacgagttcgtcggtaagtgaaaatagttggacatataaataaaggtacattataaccacatactcttagctctcatcaagttctatttagcaaactaagattacctaaattttggatatccgaatgtataaaactggtatatctccttttcagtgctcatcgcaacgacctagagaacattttgccctttcttctgatgtcgctggcctatgtggccagcggaccgaatcccctgaccgcccgtctgctcatccggatcggtgcaagtgcccggctgatccacacggtggtctacgccatcatcccggttccgcagccagcaagagccctggccttcttcaccaccttcgccatcacctgcttcgaggcgggctacgtgctcgtctgctgtatcaagtacatttagactaatgctgaccccactttgccaactaactactcacccactcgcattcatagcaccagtgatgtcaaggtacaggttttgggtgctcattttcagtgaaacgtatggttaatttagcagcttttgtcctataagtaggaagtataagtcacctataattgctataattggttggtacgttaaagaatatataggtaatgcaattggttaacaaaattttgatatagattatatacacaaaattaaaacttattaaaaaacataataatgtgaagacatgataataatcatttatcatctaggttttaacaagtaagatttcaaaatgttcagagggaaaataatgaaatttgcattagttttataattaattacttttaattatatattaatctctttttttttttttttgcaaatatgtaaaacgtcttgtaagttctaagaaatcaatttaaatactagtgtaccctgcgtagaagtgtagtttagctggcccacatggacaaagtagagagataccacttgtcccatggctgcacagcaccttagatttgtttcgacgcaattcgtaaccagtttggtcgcatgcttatgatcaccaatctccacattgagctgagagtgcggctcagccatttgtcgaagtcggctcaaagcgaacgcacacacattccgcatccgccatgtcggccgcagctagtaattccagcaagatgatgacatcgcccggcgatatgtttaccctggagaatcctgtcttttgctgctatcttttttggtccacagtcctggtggtgaagatgctgctcatgtcgctgctaacggccgttcagcgtttccggtataaggtaggctgaagatatgaagataaaattatgtctgtgcacttgctcaaaggtcatcatcattccaccattcaattcacagctgctggcgatcgtaccgttggcactgcggcgcagggtaataacttcaaatctccatgtcatcgcgatcacattcgattatttagattaacctgttttagtctcgttctaaaaatggttattttccgctcttatagatctttcccaaccaggaggatctgttcttcaagaatcttgaagtgcaattcgatgatccgcatgtggagcgggtcagaaggtgcgttattaccattaatctactaaacaagaagttttgtcatgagaaagttagaaactagtatttgacttaaccatgatttagagtagttcgactgcgggctatgcaactgtaggttcacatcctaataaccttatactttacgttttagggcccatcgcaatgacatggagaacattctgccgtattttatcatgtccttgatttatatcagtaccaatccgaatgccgatgtggcctgcatactgttccgagtggcctccgtggccaggatcatacacactctggtttacgccgtttatccggtgccgcagccatcgaggattctagccttcgccaccatgctactgatcaccttctacatggccgccgtggtcgccctgcgtaccctaagctttatatgaataaattcaagtccctttcggcttaaccctcaaatataacacgagcttttcaagaagattaacattgagtatctagtttcttggctaaaggagggaaaaattaataatttcccgcctaaattgctaaatttttagggaccctcatttgcgagcatagttagaactcttcagaactacttttcaaatgactaaagaagtacgtatttccttattgaccaattaaaagctagctagctaactgctacaagcggcatccttgaacaagaaaattacaaaccggttggttttcaattaatttagttctataattagcttgagatgcaacaaaaacaaacagttgaaggggctggggatccgaggagtggcactggggggagtgtgtgcaggactagtgttatcctataatcctggtgtcctcatcccaggatgtgtcggtatatctagatattgaagccggcatcgcgcatgcacttcttgtgcgcctctatcagcgccaagcaattctcctcgccgttctccacaatgctggtggggatttggtatcgaaattggataagaattttgttgttagccatgtggttgcgtcatgggatgcaaaaggtgcacactcaccaggcgtcacgtgccctcttggtctccgggcaggcgcaacaggccttgcacttgggcttctcgccggatgcggtggctgcggatgcggtggttgtggatgcggtggctgcggatgcggtggtcaacgggtgggccgccgaaacacttggagctgcaactccttgagatgcactgttgcccattcttcaatcgggtatcggtcaaaagcggctgagaaacaatattatggacgttactgaaccgcctcacgtttgtttatataataaaactcacttcgagacggatatttcaccacaattcggtttatcggcgcacagcacacgaaaataactaaattcaagttcagcgaacagggctgtcaatggctgacaaatatcgccgtgagtgc

SEQ ID NO: 11717 - DNA, 747 bp, DROSOPHILA
atggacaacggaccgatggatgccacgcccactgccgccgccttccggctgattttgcttagcaaatcgaatcccgtgatgggttgctacatgttctggaccagtctgctcgtgctgaagatgctcgttatgtcactactcaccgcccgccagcgcatgaaaaccaagacctatgccaacccagaggatttacgcctgagtcggagcacggaggttcgattcggggatcccaatgtggaacgagttcgtcgtgctcatcgcaacgacctagagaacattttgccctttcttctgatgtcgctggcctatgtggccagcggaccgaatcccctgaccgcccgtctgctcatccggatcggtgcaagtgcccggctgatccacacggtggtctacgccatcatcccggttccgcagccagcaagagccctggccttcttcaccaccttcgccatcacctgcttcgaggcgggctacgtgctcgtctgctgtatcaaggcccatcgcaatgacatggagaacattctgccgtattttatcatgtccttgatttatatcagtaccaatccgaatgccgatgtggcctgcatactgttccgagtggcctccgtggccaggatcatacacactctggtttacgccgtttatccggtgccgcagccatcgaggattctagccttcgccaccatgctactgatcaccttctacatggccgccgtggtcgccctgcgtaccctaagctttatatga

SEQ ID NO: 11718 - protein, 248 aa, DROSOPHILA
MDNGPMDATPTAAAFRLILLSKSNPVMGCYMFWTSLLVLKMLVMSLLTARQRMKTKTYANPEDLRLSRSTEVRFGDPNVERVRRAHRNDLENILPFLLMSLAYVASGPNPLTARLLIRIGASARLIHTVVYAIIPVPQPARALAFFTTFAITCFEAGYVLVCCIKAHRNDMENILPYFIMSLIYISTNPNADVACILFRVASVARIIHTLVYAVYPVPQPSRILAFATMLLITFYMAAVVALRTLSFI

SEQ ID NO: 11719 - DNA, 9213 bp, DROSOPHILA
tcctataatgggatagcaaagggtaggatgcaaatgtaggcggcgtgtgcatttcaaatgagcgatcgtaaaggacttacaaaggaagcaaataatggaaggatgacggcttattggggatcaaggtgaaatttctttagcatgccagtaaaattaatgtctacgtttgtacagatgcaaattgagcattgagattttctaccctttttatttatatattttttatttaagtttaaacaagttttttatttcagttgtagaacataatcgaaagctcacattttgtcgggaaatgtccaaagctccgcctccgcgagagacagttacagtgggtgaacaaagtatattaacaggtgaaatgatctccgtgatcgctggatcactgtaaggaaccgttattgttgttgttgctggtcggtgggctgtggaggtgacgccaccagtaggaagtcatcagaaccaggaccaggacacgtcagtggcaatggagcttcactcaaatattgctttcgttcggcgatgggctggatggggatggtggtgttggtactgtgggcgcggattttaaaatgttctccgctaacttcttgatcatcagcgccatttgtctacgcgacgttgggtctgaatcgtcaaaatcgcgagcctctataaggtcagcccaaaagcgtaagcttgttacagttaagttcttcatgttggacgtgaatcttaatcttgtgaaataacgaaagatacgccaaatggaaatctaaaaagccaatacagatcttattgctgtttttatcgataatataaatggtatttttattgattgtgtctttttacattttagctaatattaaactaaatcatgattggaacataaataataaattacaaggtagcttaggagacttagagaatgcttttctgttatcgatatcggtatcgatacatcgaccgagcagcgcgccgcagcgatcgtaatttctttcccgatcccgcacagtcaaaaaaaaaggctccgagtgaacggacgtgcgcgcgcgcaaactgaaagtgtaagcacaaacagagcgaagcaaagcaaggcaaaagcaaaagcagaagctgaaatcgaaaatcgagagagaggcaagagatcggattctccgtaccgctcccactcgcagtcgcgctcgcgccagaaaaagttttaccaatcaagttttttatttcgcaataaaacaaaaagaaaaaacaaaacttcaacctagttaaagttaatgttgacgttgtagttgtagttgtgccgttgtagtgaactttagtgagtgtgtgtgtgcttgtgcgagcgttaccagtgtgttggtggatatttcttgcgttgcgtcgcataaaaagcagaagaggcagcaggaaaagccaaagagaaattttaaaatctgctcctgtgaaaatataaacaaaccatggtcaatgaaatcgaaagtttccactaagcaagcagccagcagtaaatggccgatcgcagggattaggcgatcagaacagaaagtgcgcaagtgaatagcagtgactatattcatcctgggattaaccaactgctgaacatccaacttaatgaaagaggtaagtctgccgttcggcagcaagcttttccccgagattttcatcatctttgggcattgcaacatcgctgagatagataaaagtcggggttggggttttgggtctgcgatacgtgtgtgtggcttgtggctctttgtgcacctaagcacacaaagcagccaaggtcagaaactaacttaatagtggtagagaaaacagaaaacagaaaagcagaaaactgaaaacattccaagctcggtttggatcgcatcgcatcgtatcgtatggtatcgtatccaaaactttgcctcgaagcttcggttcgtggcgatccaatcttcgtcgtcatgaacatcattagcactgcaacaacaactgaacccagaggaacaacaacaactggagacaagaaaggcttagtgaccttcatcgcgtgcttttgtctgcgtaataccgtccgtgtattggtgcgctcgtatgcatgtcatggaatttgaagacacatatctgcgtacatatgtacgtacattggcgcacgcactcgaccaacttaactgctttccaataagagtgaaggtgaaaaagcacagacactcaatcacacacacacatgcatgcggttacacgatcgcgcagatgttacaaaatatgctgttagcaaagccacgggcgtgggtttctcagcgtgagggggattttagtttaacgggtcgtgggagggggtgggggaacttggaaaggctattgtgaggagatctttgatttccccgttctgttcgccttatctggcaaatacatattttaaaacgtagatccgttgacggcgtctacgaaactagcgcattgcaaacccctcacgggcccctttcctatctttctccgtatcgcccagcttatggagttatgcaattcaaatttgggtcacttttacgagtgtagcatttacaacaagtacgaaagaagacaacgacggcgacggcgactctttgccattttccctcgcttcttttcggatcagcaagtcaaagagctttcgtgaaaggggaatggggaaaggggcagtggcagcgcgggagagagcgggaaaggaagagaatgcgatgcgatggagcgacagagacagagagggcaggaaaacgagtttgaacgcgcgctccgctccctttaacattttacctttgcgcgagcttataatactttcaaaaccccgcgtagctttctcttttgaggccttcgatcggataagatccgtgcgattccagttccatttcgatttccagttcccccttccctcttcaccccccgctcccgcttccgttcccttgccattctcttccacttggaaatagacacatgtgctttacattcgtaaacactcacgcaatctgcacactcacacaccaacaaacccatacaccgacaccacaatgcgcaggggaaagagtaattgtaaaactacatttacattacatgggaacgatgacgacgacaaaaatcggaaagtgtggaaatatacaaacgattgcgttctccgtctgtatgtcgctatgtgtgtttcgttgtttagcttataccccgatcgttggacatacagacacacatacacagcatagagaggagaaaagctttttgtgaaaggtgattttatgcgcgcattgtgagttagcgcgttttgttttcgtatcgccctcccctcgaccctcctccatgtccgccttgtccctttcattctcatttccagtttgcaaaagtgtgcgtgcgaatgtgtgagtctcgcgaagagagcggagaaatgttgggaaatacacaaacacatacatacgtacggatccctagcgtcttccatttaaggaattattaccatgaactttcaccttttgattgccttaaatgctgtaacgatctttagtcatgctctgctcgtaagcaaattcagattcgattgcgaaatccgccgagaaacttgtagaaagtgaatggccctgattcgtggaagcattaagtatacaagcacacacactcatagatacatgcatatatacatatgtatgttccgtcaataccgctttggaatttatctagcgttagaatgagcacaccagatcccccctttcctgcccctgctctcccccgccctctcttcagtggcagtgcaaaaagcgaaaaataaaagatccatgctcagctttcgcttgccattcccaagccaaatacaacattcccatttccattctcttgctctccgccaagccagtcattcaagttttattgaaagtgaacgtttcgttcgtctccatgctaaaggagtggtggagccagggggctggagcggggattggtggggagaagcagcagagcgtaacaaaaagcaagactatctttccgaagtttttcgttttttccgttttcgagatctgctgctgctgctgaactttagcttcgctttttggtttattacttttcgtggtgccatgcagacactcactcacactcgcgcagccgaaaagagcttacaagccatgctcttgcacaatacaataatggtggccccccagcaaacgcacacacttacaaaagccccgctgcactacacttccacgcaaacgcgacagaccttacacagatacagtcaactacacagaaagaaagggcagctcgatgttacacattttacattattttcaaacgacttctattatttgcatctttttttttggctagaaagtagtttacttaacagctcttcaaccttacaaaagctgaatttgatgtattaagcctaccattttcatccacatgtaaatgatccatccaaatttgaatggcacattcacctgcatgttattattatacataatagcatggcatgatgccacatttttctgcctgtgcacaacgacacaattgcacaggccagcgaatttcagtgtaacaatttcatcgcataaaagaaacagcaacaacaacaacagcacatcacagcgggaaagcttttttggaggcaacaccattaccacaaacaacaacacggtggagctctatgaagtgaagctttcatcttttccaacaaagcacacacacacacacacacatgtatgacgattgtgggttgcagtattacaaaaacaccaagtacagaaaaacctaaaaacctgattagtaaacatttactattgctttatgggaagtttgttaatgccagcacacacacacactcacgatcacatgctgaaattccagtaatgtgtcgcactaaaccgttatggaaagcactttccaatctctttacacgatcctttttctaacaacgcgcactgtgcgcctgtgtgcgtgcatgacacaatcgctggaaagtggtagagagagggggcacagagggagaaagagagggcgacacaggcggtgaaaggcggattgtgtaataccaaagcaaaaagatgcagacttcccattccacaactttctatttcactggccccacttttaccacatgctccacatacattcgttaataacttcataaagtagtcttgcagtttaacttctatagctcgaacttccgtaagtcggtcgttaagcagcggctcataactcattgatcgccaattatcttttgaaattacttaactttgggaactgtaacttcacactttctaaacgacactaatggttctagtttttgtgaaaaatagctaaaggctcattgctcgaaatctcctcaatgagttgattaagttcgtactatcaagctcttcgcaagagaacaatcgaaccataaacaatttcagaattcctgtaccaaacagctactgataacgttttcataatattacttgtcctaggtcaagattgcgtgttgggaaatggaatattacgtatacgtacaaattagtactttatttcggcgattgcgcctcagaatttgagcaagtttttccaagtaatacaattgagtagagctagagaatttgttctgcagttcatggcaatttgacacccatgatctgggccaaagaaatagcagaaatctaacgatacccgacatacttgctcttccacttgcagtttcaaagaatgttgatgttgcaatacagcaagcatggcgagtgcatactcaaagaaatcggagcagccttcagaggggagcacccggcggacctgaccatcgtctgcgagaacaaagtaaagctgcacgcccacaagttggtcctggcggccgccagtccgttgataaggtaatctacataaaacacatactctgcactgaaataatgcgtcgtttgtaccgtaggaacctgctggaggacacccacttgagcgactgctccaccaccgtatactttccggacgtgaatgccacctactttaagttcctgctggacttcctgtactcggggcagacgtgcattacctcacgggatgtgaactatctgcacgacctgctgctgctgctgcagatcaagtcggacagctggaagaccaccgactccgcctatctgagcagcaagtgcggcggcctgcgggatcgggccgacaggcggaagcagcagtacaccagcccacagaatttggagccggatcagacgctcaagtacgaggtggacagcgtggatgagtcgcgcaacgccgcggatttctcgtccgccttcaactccaacgacaattgcgagagtgcggccgagtgcgagcggagtggtggccacaacaacaaggaggaggacgaggacgactgcacccacaaggacaacaagagcgacaaggacacggacgaaattgtaaatctctcgaatgcaccgcccagcggcaccagcggcagtaacagcaacatcagcaccagcagcaaccaccagcagcaacagcaccaccaccatcaccaccacaaccacaacaacaacaataataataacaacaacaacagcagcagctcaaccataaatcccgtcaacctttcactcgaccttcggacgaaaagcgagaactcggcgagcagaaccctgggatccggatcagaccacagcggcatcgacctggcagtgacagcgagcgaaagcacgaaacggaagggcctgttcttcgactcgcacaaggatgtgatgaagccgctgtccgatgggtcggacatcaacagctcgccggagaactacgtggtaacgccgcatcggaagcggcgacccggattccacaacacgcagagcgacaaccagccgttcacttcgtacccacacagcctactggaggaactgcgcttggccaagtcgacgacgtcgcccatttcgggctttggatcggagaagaacatgctggcgcacctggaggacggagcactcaatggggacacactgacgccggacaggaagcatctgctggaggcgcagcgcaatcgagcccagagtcccgagataccgatgcacttgggcccccagttcgtgtaccagtggcagtccaaccagaacgcagccatgtccgcaatgcccaatctccagtcgcgactctctagtctgtcgcacatcagcctaaacctggatcatccggagggacgcagtgggtcggcctccggttcgggtgcgaacttggccggcagcaacacgcacgcctcctcggtccgggagtatcgatgcgagtactgtggcaaacagttcggcatgtcctggaacctcaagacccatctgcgcgttcacaccggcgaaaagccgttcgcctgccgcctttgcgtggccatgttcaagcagaaggcccacctgctgaagcatctgtgctcggttcaccggaacgtcatcaccaccaccaacggggcggatacggagaaccggtacagctgctgcttctgctccatgtgcttcgagtcggtacaggagctcgtccgtcacctgtccggccaccacaataacctgctgctgacaaagaatctgcgcgaatagtgtcccgggcatcggcaaccgcataatccgagagtatcccatctgtccgatccgatccaagtcgatccgaggtgattcgccggacggacaattgcaaagagacctgaattttaaatagtagcagtagcagatttaattgcctattgtataaatatgtaaaatctaaatttaaatcctaagtttacgcaacgcaacacattcacgcgactccgctcgttcatatttcacgcaacggcctggagctccacatctgaatccgcatgatcctcgatccacgatccccgatcggaggccactcacgttgatttctcatttaagttgtattcgacatccaatccctattccaattccccgcaaatgcaccactacctacttacaccccccttgctctagaagcccaatccaatactttttaagcggctggtccattcagtggagcacttatttgtaagcatatgtctatacgagaggtattttaattgctattgtatttccaactcgtctagcatgaacttcatggcccaaacttgtacctatatctacatttttgatagttttgatacactttttgtgttaagattttacgtattccctcctaaaatcgccaattaaagtgtgtaaattgtacagtataattcgcaagctcgtaataaaatcagaaaagcatttccgtttgtttatactctttcgatcatttttagaaatatattttactttaaaccgacgctgtgttgtgtgctattttaagaggaagagtgggtggtgtattttccattacaggttcttcatttctattctttcaggtcaaaataaaaacattctattttagtaatattgtcgcaatttgtaaagctttattcaaattttggcgccctagaaagccgttataaacttggtattttatgggtattttccaagtggattagtatattataagcgtgagttggcagcccagatgccaacaagtatatttcatttgttgtgtgtgctatataaaatatatatagtgacgtatttgggtggtccaaaccagccacttccattatttcaaagaaatcagtaatgcactctagtaattttccataacgtatcccagctgcgcagcattcgtttatctttggcagcgcagccgttcttgtaaacatcctaaagcctgacctaagcagatttgactgccctctttcaacgctacctaatcttaagaacccaagagcgaggctctcccgaaatacaaatattgttcaaatactgaggcttctcctcaatccaatttgcatttgatttttagtcttaagctgagatccaaagaataaagtcgtgaaactatttctcctaaaaactattttttatttcttggcgttgtccttagtcaactgacgggacattagttcgactcataaataaaacaacaattttactatattaattataacattctatttgatatatttttaaaaataattaaaagttcactttatcaattaagcaccccatacgatataaatcagtcattgaagcttaccaagcatacgtacgtacagagataatttgcgaaatacccgaacttagcagcaaatggagcactgtttaaactccgctttcgtaaagtaacggcttttggcgcccgagtggcgctgtcatcggaatcgcgattcgcaagcgaggcgacggttatagataatattcgcactgctggtcgctgaagtataacaaaacaaggagc

SEQ ID NO: 11720 - DNA, 3113 bp, DROSOPHILA
aaggctccgagtgaacggacgtgcgcgcgcgcaaactgaaagtgtaagcacaaacagagcgaagcaaagcaaggcaaaagcaaaagcagaagctgaaatcgaaaatcgagagagaggcaagagatcggattctccgtaccgctcccactcgcagtcgcgctcgcgccagaaaaagttttaccaatcaagttttttatttcgcaataaaacaaaaagaaaaaacaaaacttcaacctagttaaagttaatgttgacgttgtagttgtagttgtgccgttgtagtgaactttagtgagtgtgtgtgtgcttgtgcgagcgttaccagtgtgttggtggatatttcttgcgttgcgtcgcataaaaagcagaagaggcagcaggaaaagccaaagagaaattttaaaatctgctcctgtgaaaatataaacaaaccatggtcaatgaaatcgaaagtttccactaagcaagcagccagcagtaaatggccgatcgcagggattaggcgatcagaacagaaagtgcgcaagtgaatagcagtgactatattcatcctgggattaaccaactgctgaacatccaacttaatgaaagagtttcaaagaatgttgatgttgcaatacagcaagcatggcgagtgcatactcaaagaaatcggagcagccttcagaggggagcacccggcggacctgaccatcgtctgcgagaacaaagtaaagctgcacgcccacaagttggtcctggcggccgccagtccgttgataaggaacctgctggaggacacccacttgagcgactgctccaccaccgtatactttccggacgtgaatgccacctactttaagttcctgctggacttcctgtactcggggcagacgtgcattacctcacgggatgtgaactatctgcacgacctgctgctgctgctgcagatcaagtcggacagctggaagaccaccgactccgcctatctgagcagcaagtgcggcggcctgcgggatcgggccgacaggcggaagcagcagtacaccagcccacagaatttggagccggatcagacgctcaagtacgaggtggacagcgtggatgagtcgcgcaacgccgcggatttctcgtccgccttcaactccaacgacaattgcgagagtgcggccgagtgcgagcggagtggtggccacaacaacaaggaggaggacgaggacgactgcacccacaaggacaacaagagcgacaaggacacggacgaaattgtaaatctctcgaatgcaccgcccagcggcaccagcggcagtaacagcaacatcagcaccagcagcaaccaccagcagcaacagcaccaccaccatcaccaccacaaccacaacaacaacaataataataacaacaacaacagcagcagctcaaccataaatcccgtcaacctttcactcgaccttcggacgaaaagcgagaactcggcgagcagaaccctgggatccggatcagaccacagcggcatcgacctggcagtgacagcgagcgaaagcacgaaacggaagggcctgttcttcgactcgcacaaggatgtgatgaagccgctgtccgatgggtcggacatcaacagctcgccggagaactacgtggtaacgccgcatcggaagcggcgacccggattccacaacacgcagagcgacaaccagccgttcacttcgtacccacacagcctactggaggaactgcgcttggccaagtcgacgacgtcgcccatttcgggctttggatcggagaagaacatgctggcgcacctggaggacggagcactcaatggggacacactgacgccggacaggaagcatctgctggaggcgcagcgcaatcgagcccagagtcccgagataccgatgcacttgggcccccagttcgtgtaccagtggcagtccaaccagaacgcagccatgtccgcaatgcccaatctccagtcgcgactctctagtctgtcgcacatcagcctaaacctggatcatccggagggacgcagtgggtcggcctccggttcgggtgcgaacttggccggcagcaacacgcacgcctcctcggtccgggagtatcgatgcgagtactgtggcaaacagttcggcatgtcctggaacctcaagacccatctgcgcgttcacaccggcgaaaagccgttcgcctgccgcctttgcgtggccatgttcaagcagaaggcccacctgctgaagcatctgtgctcggttcaccggaacgtcatcaccaccaccaacggggcggatacggagaaccggtacagctgctgcttctgctccatgtgcttcgagtcggtacaggagctcgtccgtcacctgtccggccaccacaataacctgctgctgacaaagaatctgcgcgaatagtgtcccgggcatcggcaaccgcataatccgagagtatcccatctgtccgatccgatccaagtcgatccgaggtgattcgccggacggacaattgcaaagagacctgaattttaaatagtagcagtagcagatttaattgcctattgtataaatatgtaaaatctaaatttaaatcctaagtttacgcaacgcaacacattcacgcgactccgctcgttcatatttcacgcaacggcctggagctccacatctgaatccgcatgatcctcgatccacgatccccgatcggaggccactcacgttgatttctcatttaagttgtattcgacatccaatccctattccaattccccgcaaatgcaccactacctacttacaccccccttgctctagaagcccaatccaatactttttaagcggctggtccattcagtggagcacttatttgtaagcatatgtctatacgagaggtattttaattgctattgtatttccaactcgtctagcatgaacttcatggcccaaacttgtacctatatctacatttttgatagttttgatacactttttgtgttaagattttacgtattccctcctaaaatcgccaattaaagtgtgtaaattgtacagtataattcgcaagctcgtaataaaatcagaaaagcatttccgtttgtttatactctttcgatcatttttagaaatatattttactttaaaccg

SEQ ID NO: 11721 - protein, 601 aa, DROSOPHILA
MKEFQRMLMLQYSKHGECILKEIGAAFRGEHPADLTIVCENKVKLHAHKLVLAAASPLIRNLLEDTHLSDCSTTVYFPDVNATYFKFLLDFLYSGQTCITSRDVNYLHDLLLLLQIKSDSWKTTDSAYLSSKCGGLRDRADRRKQQYTSPQNLEPDQTLKYEVDSVDESRNAADFSSAFNSNDNCESAAECERSGGHNNKEEDEDDCTHKDNKSDKDTDEIVNLSNAPPSGTSGSNSNISTSSNHQQQQHHHHHHHNHNNNNNNNNNNSSSSTINPVNLSLDLRTKSENSASRTLGSGSDHSGIDLAVTASESTKRKGLFFDSHKDVMKPLSDGSDINSSPENYVVTPHRKRRPGFHNTQSDNQPFTSYPHSLLEELRLAKSTTSPISGFGSEKNMLAHLEDGALNGDTLTPDRKHLLEAQRNRAQSPEIPMHLGPQFVYQWQSNQNAAMSAMPNLQSRLSSLSHISLNLDHPEGRSGSASGSGANLAGSNTHASSVREYRCEYCGKQFGMSWNLKTHLRVHTGEKPFACRLCVAMFKQKAHLLKHLCSVHRNVITTTNGADTENRYSCCFCSMCFESVQELVRHLSGHHNNLLLTKNLRE

SEQ ID NO: 11722 - DNA, 3739 bp, DROSOPHILA
gtttccaagtgatcgatgtggaaccgctcactcatctcaagaaaggcgattttctcggcggtaggcaaggcagccacggttagtttcggtccgccggatacctcctcgaactgagagatgtctgtgagcgggatgttcgatttgctcagtgaggcggtgcaggcgacaatgaactcattgaggcagattcccgcatcaattagcgccagtgtggcggcattaagagccaccgcatagttggcgccgtcgtcttggagcacctccacgtatatgtctatctgggagcggggatatagttctgatttaatggcagcacttagcgcctgctgcaggtacaacttgaactccagagatttgcgatcgccgcgcggcctatttttgcgctccgccgtggagaaggttgcctgactgtactgacagttgatgacggactctgtctgattgcccttggcctggtggggtccatagacggcagccagaaccttggtgtttccctgctccatgtaggcacttccatcgggctgctcgaagactcccagtttgcacttgatgcggcgcaattcatgaggacgtcgtccgtccagacggaggccctgctcactgagcagatcgtatttaccagacatattttgaaactttagaaatacaattattttgattttaactaaatatcacacgtgcggcgggatttgtttacaattttaacaacagtgtggaagtactaaaaataccgacagtccatgaaaaaatcctttttatactaacttcttttaatatgtacaccgtacgtatgtaagagtaaataaataattaagcatatattgccaaagtgtactacattaaatcacgatatatagaaatttaataaggattttaataagattctttaaatttaaatttgaacagtgtttgctttgattacccctactacaacattttggaatttaacaacactaacacatggtctaatcgatatccgataaccgaataccgataatcgttcaggatttgtggtaactctaaaatatataaatagtttcgagtgcaaaaaacggaatttatgggaataaaataaataaatagtagctgaatcgtgtaagaatctgtgcttgccagcaccagaaatacgcaaaatgtccaagtcaagcgcaggtgggtttataacatcgtgaaaacgaaacaaactgaacagacgcttccgggtgcgaaacaaaaataaagacctaaaaaatatcacacactttaaaaataatgaactcaccaccgaaaattacagcacgctgggtaaaattcttcaatgcggccggcatcccatctcctgcggctgccggctatgcccacgtcttcgtggagaaccgcatccaggacgacatgctgttggatcttaacaaggagtatctccgggaaatgggcataaccttgatgggcgatataatcgccatcctgcggcactcaaagaccgtctgcgaacagaatgcccgggaacaggtcctcacaacggaggtggttcaatcagttgtccgaccggtatcgccaaaacccaaagcgccggttgcaactccaaaagcaaaggtttatccgcctgcgaaacctgcaagacgggtgcttccggagcacgagggcaagtacaaggtgacactgccctcgggaaccaccgagcgcagcaaacagatcttagccaagcgggaaaaatgtaagattacagatttctaaagaacaagatcaaattttcaatatatcttcttttagtatactccgatcgtgtgagcagctccaaaaagtcggacatatttacgcgcctgcatgccgaggacgaggcgcaggagggcattgtctccagttcgggcgagagcagcgtccgcgtgcacgttgccggcgcatcaaaaacagcggccacctccagcaataattcggtcttcgctcgactcggtggcaagcagggcgctcttccggaggagttcacttcgaccagggaaatcaaatcgatccttaaaaacacacaccgtacagttggtggtggaggaggaggaggaggggtcaccaagaactcgcccattgtgaaagcgaagaaggtggccgctgtaacgcagcaaaaggtcatgctagttcacaaagtgcctcttaaaaaaggcgacgacgacgatgatagcatggacgatttcgaaagtgacgaagaggattacatgtccagcggagaagattttgatatgggagccggcgaaaagattgttaagttcgcctcgacagcggaggttcgggaaatcgttcccgaatcggcatacaaaaataggcagggcaaaagttttgcgaataatattaaatcaaggctcggaatgggtatgtttgcttcagagcagaagtggcacagtcaattaatttataacattttttttagtatccaaacttcatgccacgaagaagacatacaacctaaaggcatcgcctgcaaggaaaccacaggctcgactcagtcctgttaagggcaagaccatacgcatgcgcagcgacgagctgtttagccgacaggacacggtgcccgtccacaggaggcttggaaaaaccgcgacctccgctccccttagagctccaccagctccgccacatcgacagccgcgaccggagccacagaagaaatatgttccgccaaggcgccataacagcatgaatgctggtcacagcaggcagcgagatcaatctggctctgtttttgaccgccttggcttcaataactctatgtaaagtttaagtaaatgtgagcctcattaaatttgccagtacatgtttgaattaaaatagaagttgatttgaaatgtatgaaatgaatgagaaatggcaggatttttgatcctgatctcattatttcagtttaaactcctgattgttttgaatacccgattagtatccatcgcaagctgtcagaacataaaaccaattgattaactttatgatgaaaaactatttattttgtttaaaattatatgtatctacaattacgctagaatttcgcattcgttcatattgtacaatctgtccgcggtcacttaaaggtctatatcactggttgctaagcaaatcactccgtttcgaatgtgtttatgtgcgcatcaagctcattgctgcagcagagcctggagggcctggcgccattccagtggccaggtgttggcatccggattgatgttgagcagttgacgcatctggagcacggcacgttgcttttgtagcatgtaagcgtatgcctggtgattgaagaccggcgaatgggtgaccggaatttgggttaccggaacttgggtggcaggaagcggatgttgctggtgctgcggtggcgtggttggtggtgtgggaggcaatgagtggtgatggtacaatggttgctcctgcatctgctgaacctctcgctccgtctcctggcgacgctttcgtggtgtattttcgctgagggcatatggccggaataggggcgtggcattggctgggttgggggcgatatccttggagctcttcttgccaaactttttgtgcgtatagccggcggttttgaacttcttgtgggtgtagctctcgccaacttccgactcgttgtggtaatccatgttcgaaggtgccatgattggggttttaagttgtgttgtttgttgagttgttttcacgacggctgttaaggctcgactatgctcctgctgctgcgcaaccaggtttttataccaacgagatcagaggtcctacctgaaaacac

SEQ ID NO: 11723 - DNA, 1501 bp, DROSOPHILA
ttcaggatttgtggtaactctaaaatatataaatagtttcgagtgcaaaaaacggaatttatgggaataaaataaataaatagtagctgaatcgtgtaagaatctgtgcttgccagcaccagaaatacgcaaaatgtccaagtcaagcgcagcacgctgggtaaaattcttcaatgcggccggcatcccatctcctgcggctgccggctatgcccacgtcttcgtggagaaccgcatccaggacgacatgctgttggatcttaacaaggagtatctccgggaaatgggcataaccttgatgggcgatataatcgccatcctgcggcactcaaagaccgtctgcgaacagaatgcccgggaacaggtcctcacaacggaggtggttcaatcagttgtccgaccggtatcgccaaaacccaaagcgccggttgcaactccaaaagcaaaggtttatccgcctgcgaaacctgcaagacgggtgcttccggagcacgagggcaagtacaaggtgacactgccctcgggaaccaccgagcgcagcaaacagatcttagccaagcgggaaaaattatactccgatcgtgtgagcagctccaaaaagtcggacatatttacgcgcctgcatgccgaggacgaggcgcaggagggcattgtctccagttcgggcgagagcagcgtccgcgtgcacgttgccggcgcatcaaaaacagcggccacctccagcaataattcggtcttcgctcgactcggtggcaagcagggcgctcttccggaggagttcacttcgaccagggaaatcaaatcgatccttaaaaacacacaccgtacagttggtggtggaggaggaggaggaggggtcaccaagaactcgcccattgtgaaagcgaagaaggtggccgctgtaacgcagcaaaaggtcatgctagttcacaaagtgcctcttaaaaaaggcgacgacgacgatgatagcatggacgatttcgaaagtgacgaagaggattacatgtccagcggagaagattttgatatgggagccggcgaaaagattgttaagttcgcctcgacagcggaggttcgggaaatcgttcccgaatcggcatacaaaaataggcagggcaaaagttttgcgaataatattaaatcaaggctcggaatggtatccaaacttcatgccacgaagaagacatacaacctaaaggcatcgcctgcaaggaaaccacaggctcgactcagtcctgttaagggcaagaccatacgcatgcgcagcgacgagctgtttagccgacaggacacggtgcccgtccacaggaggcttggaaaaaccgcgacctccgctccccttagagctccaccagctccgccacatcgacagccgcgaccggagccacagaagaaatatgttccgccaaggcgccataacagcatgaatgctggtcacagcaggcagcgagatcaatctggctctgtttttgaccgccttggcttcaataactctatgtaa

SEQ ID NO: 11724 - protein, 455 aa, DROSOPHILA
MSKSSAARWVKFFNAAGIPSPAAAGYAHVFVENRIQDDMLLDLNKEYLREMGITLMGDIIAILRHSKTVCEQNAREQVLTTEVVQSVVRPVSPKPKAPVATPKAKVYPPAKPARRVLPEHEGKYKVTLPSGTTERSKQILAKREKLYSDRVSSSKKSDIFTRLHAEDEAQEGIVSSSGESSVRVHVAGASKTAATSSNNSVFARLGGKQGALPEEFTSTREIKSILKNTHRTVGGGGGGGGVTKNSPIVKAKKVAAVTQQKVMLVHKVPLKKGDDDDDSMDDFESDEEDYMSSGEDFDMGAGEKIVKFASTAEVREIVPESAYKNRQGKSFANNIKSRLGMVSKLHATKKTYNLKASPARKPQARLSPVKGKTIRMRSDELFSRQDTVPVHRRLGKTATSAPLRAPPAPPHRQPRPEPQKKYVPPRRHNSMNAGHSRQRDQSGSVFDRLGFNNSM

SEQ ID NO: 11725 - DNA, 3653 bp, DROSOPHILA
ctgaaaatgctgataatagataggtgttttgtcttcaagaacacagaatccctctaaaaatggcatattcaaataaatattatgccaatcagaaggaacgctaattatctcgaacgacaagagtgagtcagcatggaatacgcaagtagcgtatataaattgaaataaaatgagctgtaagttcatccgatcgataattgcgatagtcggagctggtttagtttcaagtcaacagccaaggcgagcggacacctgaagcgatgggaaaattagtactgtacggcgtagaggctagtccgccggtgcgagcatgcaaactgaccctcgacgccctgggccttcagtatgagtataggctggtgaacctgctggccggtgagcacaagacgaaggagttcagcctgaagaatccgcagcacacggtacccgtgctggaggacgatggcaagttcatctgggagagtcacgccatttgcgcttatctggttagacgctatgccaagagtgatgacctgtatcccaaggattacttcaaacgcgcactcgttgatcagcgcctgcactttgagtcgggtgtgttattccagggctgcatccggaacatagccattccgttgttctacaagaacataactgaggtgccgcgttcccagattgatgccatctacgaggcctatgactttctggaagcgttcatcggtaatcaggcttacctctgcggaccggtcataaccatcgccgactacagtgtagtttcctcggtctccagcctagtgggattggccgctatcgatgccaagcgctatcccaagttaaacggctggctagacagaatggccgcacagcccaattaccagtcgctcaatggcaatggggcacagatgttgatcgacatgttcagttcgaagatcacaaagattgtgtaattgtttgcactagcttaaaggttacaaacgcaacgtgttctgattacgtaacaataaagcttctatttgtataaactttacaaaaatgcttttaaataccagctcaattagctggttttttttttcgacacaagtatcacaacttaaagattaaactgcagtaataacagttaatgcaattctacgcacttattcgataggttggatttataaatcaaatattgcacatatatcccgtgttcgtctcttctctctaccactcgatgtcttctgtcaaaggccgctctgaatttagcaaaagttggtgggttaaacatttccagttttcaccatccggctggcttggacatcaaggggccactttgaatgcatcgttttcgttctggaatctttgctagcaagtttcactcactgactagctgtttgtcttgcgcttctccagtgccttccaaaccagtttcatgcgctgcacgcagtcgcgatgctgggactcccacagcagtgtagtaagtcgtccaacggtggccacaccgtccgccgagcttcgaatccactggagcaacagctggtatatcacctatagacgtagacacaaagcaaagtgttattttctgattttatgattgattttctaactcttaaaaatcattaaaatcttctggtactctaacaacagagttgtgacatttatacaccataacttgcaatctaatcagacaaacaagtggaatcactatcagtattatataaaataaatagctcacaataatgtaagctaatttatattatttttttttttaagttgaacaatccattcgtgtcaagcaatgaaatctaacagaaatagtggtatttgagtcattaaattagtctgatgcgtcacaatcatcttagcatagtctgttgttttacatactaatttgagtttgtatgttctgttcttgaatcaacattcaacaacaaataagagaagtttaaacttcaggggccttacctctctaatattgccatgcatttggtgatcgattatggcctggtcgatctgtccttccgacatgccaagatcccgcatcacctgcttccagccctcgcccaagtgcgtggaaaccacatcgagcaggcgcacatccggttcctcttgtgactgcatcatggccacaatgctgaccgttttgcgcgtcgcacttgcccgcggcttaccgtctggagaggcgaccgactcctctgcggtactggtgctaccctttcgcgagctgcaggcgctcaagttttggttgaagttgtagacggagccgaagtgcagattattggcattcgagaagttcatgaccacctgttgctgggcgctgtgtacgttcatggtgttgtttgtctggacgttactgagagtgcccggaatattggcggaatgcaccacatccattgaattgtagtttgggtcgctgagctcgcgcagcacggattcggtcagatccgaggaggctgtgggcgtgccagcggtggagggcagcgccagggctccgctgttgttgttatctggttcgttgtcgtccacgggagctgcgtccttttccaggcgtccctcgacgggtgtcggattctgtgcctccttcccgccaaagattgtgggcaacaggttcctgagctttgacatgctgctcgctgataactggtagctttgaatgtgctctcgcttccggaaattccacagattggggagttttttgcctttgtgtttctttgctctttttcaatttggtggtggtaggccaaggatggacctgactatcgatattccgagccgattatcaaccgatatttcacttacaactaaaaatttttagttttattaagaaattcaactaaatagcatttcttgtcttttccgtctgattgaaaaaatcaattatatttgactaacatacaaaacttaacatttgaattttaattcttaatcattatgtgcatataaggaaaaaatttaagcatttatatctaatctttattaatttgcatataaggaaacccccataataacgattatcatctttaaaaactggtgtttgttgtctaagtttttttttaatatattttttttattgttactattgaataattctttaattaatttttgaaaatccccaaaagaaggccatggtaatagacccaatagtcgatagttcgatttgacagttcgcgcttgcgattggtaagagcgacaaccctgcacccgctgcggcgtatcgcccatctctatttgccacgttcgctcatgttcattcacattttacttggagtcggtaacgttgagttccgcgtccgtgcgttctgccttccaatagaaagtctgggtgtgaatttaccaagattccagtgcgaaaatcaactcacattgctcggtgatccgtgcggcggtataattgcagccggaattgcataagttgcggcgagcgaaagagagtgcacggatttacagttataaagggccggcagcggtggggcggcgacggcagagcaagcagaagaagaagagacggcagtggcgaattaaaaaaaacgatgaaagaaaattcgggccgctaatttttcttcaaatttgtgtgcggtcggcgaaaaacaacgtgtttttcaatggttgataatacacacggacggcgcactcgcgctcacccacacagtcacaaaagtcggcgacgtcgacgacccacacgctcacatagggacgta

SEQ ID NO: 11726 - DNA, 1236 bp, DROSOPHILA
caaaaaactccccaatctgtggaatttccggaagcgagagcacattcaaagctaccagttatcagcgagcagcatgtcaaagctcaggaacctgttgcccacaatctttggcgggaaggaggcacagaatccgacacccgtcgagggacgcctggaaaaggacgcagctcccgtggacgacaacgaaccagataacaacaacagcggagccctggcgctgccctccaccgctggcacgcccacagcctcctcggatctgaccgaatccgtgctgcgcgagctcagcgacccaaactacaattcaatggatgtggtgcattccgccaatattccgggcactctcagtaacgtccagacaaacaacaccatgaacgtacacagcgcccagcaacaggtggtcatgaacttctcgaatgccaataatctgcacttcggctccgtctacaacttcaaccaaaacttgagcgcctgcagctcgcgaaagggtagcaccagtaccgcagaggagtcggtcgcctctccagacggtaagccgcgggcaagtgcgacgcgcaaaacggtcagcattgtggccatgatgcagtcacaagaggaaccggatgtgcgcctgctcgatgtggtttccacgcacttgggcgagggctggaagcaggtgatgcgggatcttggcatgtcggaaggacagatcgaccaggccataatcgatcaccaaatgcatggcaatattagagaggtgatataccagctgttgctccagtggattcgaagctcggcggacggtgtggccaccgttggacgacttactacactgctgtgggagtcccagcatcgcgactgcgtgcagcgcatgaaactggtttggaaggcactggagaagcgcaagacaaacagctagtcagtgagtgaaacttgctagcaaagattccagaacgaaaacgatgcattcaaagtggccccttgatgtccaagccagccggatggtgaaaactggaaatgtttaacccaccaacttttgctaaattcagagcggcctttgacagaagacatcgagtggtagagagaagagacgaacacgggatatatgtgcaatatttgatttataaatccaacctatcgaataagtgcgtagaattgcattaactgttattactgcagtttaatctttaagttgtgatacttgtgtcgaaaaaaaaaaccagctaattgagctggtatttaaaagcatttttgtaaagt

SEQ ID NO: 11727 - protein, 273 aa, DROSOPHILA
MSKLRNLLPTIFGGKEAQNPTPVEGRLEKDAAPVDDNEPDNNNSGALALPSTAGTPTASSDLTESVLRELSDPNYNSMDVVHSANIPGTLSNVQTNNTMNVHSAQQQVVMNFSNANNLHFGSVYNFNQNLSACSSRKGSTSTAEESVASPDGKPRASATRKTVSIVAMMQSQEEPDVRLLDVVSTHLGEGWKQVMRDLGMSEGQIDQAIIDHQMHGNIREVIYQLLLQWIRSSADGVATVGRLTTLLWESQHRDCVQRMKLVWKALEKRKTNS

SEQ ID NO: 11728 - DNA, 3406 bp, DROSOPHILA
tcaaggagaatggcattatatcaacggcccatgccacagctgcgtacctgaaacgacggaacttcagcaagcgggtatttgtgatcggaagcgagggaatcaccaaggaactggacgccgtgggcattcagcacactgaggtgggcccggaacccatgaagggatcgctggccgagttcatggcacagcatttaaaactggacacggacatcggagccgtggtcgttggcttcgacgaacacttcagttttcccaagatgatgaaggccgcttcctacctaaacgacccggagtgtctgttcgtggctaccaatacggatgagcgtttccccatgcccaatatgatagtaccaggcagcgggagcttcgtgcgggccattcaaacctgtgcggagcgggatcctgtagtgatcgggaagccgaatcctgccatttgtgagtctctggtcacggagaagaagatcgatccatcgagaactctgatgatcggagatcgagccaatacggacatacttcttgggttcaattgcggcttccagaccctgcttgtaggttccggaatccatcagctgaaggacgtggagcgttggaagttgagccaggatcccgaggagaagaagctcataccagacgtgtacctgcccaagttgggagatctgttgccgtcgatcgtgaacagcctgacggacttgaaatgaatcagtaatcagtaaatagtacggacatgtgtttgtatagattttacatttaacttcaatagacaggaaagattattaatacttaacgcaaatttatagtgcaatttataccacagaacaaagaatatttaaataaattcaaaagcattttgtgagacggatgatttaaccgatatgcccgactcaatttgtttttccgagcgagctttgtgcgaaagggagatagcagattttccccaatcaccgtgaatcgaaatcagccagcccgtcgccgtcgatttagttgagtcgcaagcatttggcgaagcggtctacgaagcaaaatgtccagaggcggtgctatcgacttgaccggcctatccgaggagcaggtgagcgagtggctccaaagtttcgacacggttctctgcgacggcgacggtgagtctcaagggcggctaaggtgccacagagagagggttcattgggcttgtgagtgctgctatggagcttttaccagagttgtcgcttcactgaaaaaacagagtataaaatatcgatggtaatttacatgggtaaggggaaaagcttggcgatcgcggtagctaaaagtttacatttcatcggcctgctacatcgattgttactgttattcattttgtaagtggataactttaaacgtaaaatcgttaataattagaaaaagttgataaggcttaacgctgctgaaatcattttacatttttaggaatatatttatacctgatcaataggaatatgtttatacctgaaaatctctctgatctctcgcagatcattccaatttaatgtataaatttcccatgtactattgggcttaccaaacagaaatttcgttcgtaattattttaaaataaagccaaaactcgtgttaattccaatattatttagttactttataaaatatatctctcatttcaaacctcttcaaatgacaccaaatcaaatatccattaaacgcacaggcaccatatggcaggatgacacggccatcgctggtgctccggatgtggtgaatgccctgcaggatcgatttgacaaaaaagtttacctgattaccaacaatggcctaaagacgcgacaggagctctttgagcgctcccagcgccttggcttccatttacccagcgaccgacacatcatttcgcccacggcggccatcgccgactatctggttgggagtccgaagttcgacaggacccggcacaaggtctatgtggtgggcaatgcggccattgcgcgggaattaaggcagcgcggaatcgacagctacggagccggcggaacagatgaactgcctccgggcgacaaatggccggactttgtgacacgcgagtttgggaacccagaggcggcgaaggacgtgggtgccgtggtggtcggctgggatgagtactttagctactgcaagatggcgcgcgcctgtcacatcctctgcagtaatcccgacgccgcctttttggtcaccaaccgggatgccgtgcacaagtatccatccttttgtatccccggcactggggcctttgtggccggaatcgaggcatgttcggagcgtgaagccctcgagatgggcaagccaaatccattggtccttgagccctttatcaaggccgagggactacgtaccgagcgaacgcttatgattggtgactggtatgcgggattaacacatcctttcaatctttcctaatgagtttctcccgtagcctcaaaatagatgtcggtttcgccagcaattgtggcatgctatcgcttctggtgggcacgggtcgttacaataatctctcggatgtccggctggaaaaagacaggctgccccagccagacttttatctgccccgtctgggcgatctgctgaacattttgtgagccataaatccatgggactctcgcgcagcaatctactcgttatcaacttcttaattcgacttttatttggccttagttgatgtgtttacacatagttgtacatattgtatctgccggcaagtacaataacattctctgatggatactttttttacatatatagagtggttgagaaattgctgggtctgaaagttatccatgaacaaaactagctaataaattttggaaagacgacaatgcatattgcacaaataaatcactaaccatttgcgaatattcatttttatgtccgtccccaaataattttcaggcccaataacttttctttgaattaacaatataggctgagtgacttattaaaatactagcttaaccttctattacttgccgggtcagaaaagcagagacggcaatttcttactcgttcctatatcttggtgatcccatgtaaaagttgtaatttgcaatgaactaaacaaattgcttaaataagtgcaagttccttgtgctgtgacttgcaaatcaattatcaatcaacgttaactatttaagacacacacataatcgaaactatacaacttattggttagctgtacaacaaatttacaggacacccatcgatgtgagctgctaattgtcaaaacaaagcaagcaagtatcacagaagttatatttttggcggtttgcttccgtgtaaaattgaaacaatcaaacacctgttttcgaaagttttttacgatattttgactgttgaagcacgacattttcgtgagtgtccgttttaacaagtcctctgatatgttagagttgagttctgtttt

SEQ ID NO: 11729 - DNA, 843 bp, DROSOPHILA
cgaagcggtctacgaagcaaaatgtccagaggcggtgctatcgacttgaccggcctatccgaggagcaggtgagcgagtggctccaaagtttcgacacggttctctgcgacggcgacggcaccatatggcaggatgacacggccatcgctggtgctccggatgtggtgaatgccctgcaggatcgatttgacaaaaaagtttacctgattaccaacaatggcctaaagacgcgacaggagctctttgagcgctcccagcgccttggcttccatttacccagcgaccgacacatcatttcgcccacggcggccatcgccgactatctggttgggagtccgaagttcgacaggacccggcacaaggtctatgtggtgggcaatgcggccattgcgcgggaattaaggcagcgcggaatcgacagctacggagccggcggaacagatgaactgcctccgggcgacaaatggccggactttgtgacacgcgagtttgggaacccagaggcggcgaaggacgtgggtgccgtggtggtcggctgggatgagtactttagctactgcaagatggcgcgcgcctgtcacatcctctgcagtaatcccgacgccgcctttttggtcaccaaccgggatgccgtgcacaagtatccatccttttgtatccccggcactggggcctttgtggccggaatcgaggcatgttcggagcgtgaagccctcgagatgggcaagccaaatccattggtccttgagccctttatcaaggccgagggactacgtaccgagcgaacgcttatgattggtgactggtatgcgggattaacacatcctttcaatctttcctaa

SEQ ID NO: 11730 - protein, 273 aa, DROSOPHILA
MSRGGAIDLTGLSEEQVSEWLQSFDTVLCDGDGTIWQDDTAIAGAPDVVNALQDRFDKKVYLITNNGLKTRQELFERSQRLGFHLPSDRHIISPTAAIADYLVGSPKFDRTRHKVYVVGNAAIARELRQRGIDSYGAGGTDELPPGDKWPDFVTREFGNPEAAKDVGAVVVGWDEYFSYCKMARACHILCSNPDAAFLVTNRDAVHKYPSFCIPGTGAFVAGIEACSEREALEMGKPNPLVLEPFIKAEGLRTERTLMIGDWYAGLTHPFNLS

SEQ ID NO: 11731 - DNA, 3939 bp, DROSOPHILA
cctctgccactaccagcactccctgcagctgccccacctgcccgacatggtgttccacaagaatcggctggtgttacagcacaaggacggcgccactctcgagttctgccccatggacgcgctggcgctggtggacaatgggaagcagccgctggaggtcgcttgtgctcaggagtggcgggaaacgcggtgggtactcccattgagattgggatatggatcgttctactgttgttcctctataaatcgcccaaatgattgaattctatactccagtaacgagcagacaatggaggagaagttcaagcctttcgactggacattcacctccacctaccagggcaccatgaacgaaaaagtgcgatcggagaccacgaatcagacgctgaacaagttcaagctgatgcagcgcgagaacatcatcttctaccacgatttaactctgttcgaggatgagctgcacgaccacggaatatcggtgatgagcgtgcgaatcgtaagtgctgataaatacaaattatagagcccttatcgaagaagcccaactctttctggcacagcgcgtgatgccctctggcttcttcatccttttgcgccactttctgcgcgtggaccacgtgctaatccggatgcacgacacccgcttccaccacgagatcgagaacgactttatcctgaaagagtacatccatcgggaggcgccttgcactgagcttcaaaactgtgtggccttctggaccaacccggatgaaatgcaagaatttgtgcccgtgaagtccaagcagttgcacaagctcttctttaagtagtcccgatgtccgatgctagatgccagatcccagatctctaggtttatgtcagtcgtcgcattggttacaactgctgctatatgcgtttatttattgccaacagtgtgcgcatgcgcagacgacattaaaagcgattttcctaaaaggcacactacgatcaaagctattaacacgaataaaatattgggcggaccagctgccacatcctcgggcctaggcggatccaagtagggctgtcagggcccgcttgtagtcaccagaggtctccgcctggaaagtaaagaaaggaacgtattgaagcgagatccaagttcttgcttttttggctatgccctctacactacaattactactttgcccgaaaatacttttttggcaagccaataatgagatatcgaaaaatgcccaagaaccagtttgcttcggcgttcttagaaataatttgatggggattttggcagcatatgtagcgtaaaaggaacacttgataacgtggagtaaccaagaccaggaatacatccgtttcaccaatggcgtggccaatacttacgtcctaggacaacacaaacaccgcaacaaatgccgacaagtacgtgaagagaaggggaaaggggtgcgttaaccatgtgcgaagcactcgcgattcttcgagatccacttaccaccacggcgctgtgcagcgtacggttgtagatccgctcgaactcctgcttaatggtctccaggtcgatctccgagcggctgacgatgatgcggatgagcgtggcgtcatcggtgccggcgccattcatggccttgtacaggcggttggcgaagaaggccgccggtgactggacgcactcaactaaaaggttaagaagtgtgtcatttaaccaagtgtctgttacaacaattacttataacggaacagttaaatatatactgacctatggccatcatggcctcgtgcagctcgtcggacatctcgtgcttgatggcctgctcgatggtctgcccggagagcaccttgtactcctcgaagacgagtcgcagctgcgggaagctggcgtgcgacatgatccggttgaagacctcctcgtccgttcccagcttggcctcgccggccgagtagagctgggcggcctgctccttggcctgaccgacgtcgacgggcgtgtccagtccgtcacgtactccggtcacgatcagcgtgagcaggcggcggaaaaagccggaggtctcgctgcacatctgctcggccagcgggcgctggtagcgctcctcgtagacggccacgatctgggccatctcctcgttggtcttggtgcacaggatctcgacgagcgtggcctcctcggttccgatgcccgccatggcggcgtgcagttgcttgcacaggtactccactggtggcatcattagacccacgatcacgtcctcgaacttgcctcccagctcgtccttaagatcgtccaccaggtcgcgctcgaactccgcttcgtaaaccgccttgatcgtctgcctctgctggttgctcctgccgacgagcacgtcgatgatttcctgctcgtcggtgccgaatcccttcatcgccgcccgcagcacctgggcgtcctgggaggcgtcgaagggagctgcgtccttaaccgtgggcacgggctgcacagtaaaaatttagttgtatattaaatataattttagcaaaaaaaaaaaagcctaatagtttagcagcctaacaaatattatggtcatattcaaatcattcatttacacatataacatttcaaatatcagaaagtagctgcatacaatgaggattgaacttcctatggtaactctctgttttcgatagaaactaatattttggaaagttaatacattcaaactcaaatcattaagccatatgcatttttcttcccgtgtagcgagtgacgcatcgccgtggcgaatcaataacaggcattagtgcaataatggaatcatctctagcctggcaatccaatccactcactttgtattccattatgcagctggaagattccttgggttccttgtggctcttcagtagacgacttcacacgaatcagtctttctcctgggacttttttgcgaattcttcttgcgacgtcttgtcgcctctgcctgcttttgctaaataattcggattgggaggcactgcaccgaggtctcttttcagtgctctccggtttgcgctcggtgcagagcacaagttttacacacgaagaaaaatgagacttgtttttggatggcagaatctgaaggcagcactcggctacgtaaattaaatacacatattgtattgcttttggctcaaaatcgatcggtttttatctaatttcttttgttttaacatagaaggaatatttttgaattcttttcgaatttgaaatcgaaagtttttttttaattttaaagcatttgttatctgttttagataatggatgcgatgtattgcaacataggtacctgccatttccccgtttgaagccaatcttgtttctctcagtgtataagcttacgcgagcgcgagagagagcttttaattccgcttcaattggggttgcacttgaattccaaatcaactgattcattcggcacatttcttgaattaattaattaaaacctggcgatgagatcgtaaaagcttaaaatgtgcacaagcatctaggttttaatggaatttttaatgcgctttatgccgaaagagtcgaaaatggattcaagtgtcttggaaaaagtcgcttcaaatgttttcagatcttaaaaaacaaaatatcgaataaaatcatttctgagggtatacactttatatccgagccaaataatagacatctttttctcgtaggatatcttgtatagatattatgtttatttaatcttgttaaataggcttcgctataatacatttacatttgggctctactaaaacaaacaatggattaccaatcaaatatgcgggtagttctattcttatgtatatatatatgtacatatgtatgtatgtttgtctatattctgtcaagtagagaatgttgcagtttcccctgatttcttggcgacttttaagtgattctgagcacttggactgcaattgagttttgagttctgggttctatacagtagcgggatc

SEQ ID NO: 11732 - DNA, 1113 bp, DROSOPHILA
caaaagcaggcagaggcgacaagacgtcgcaagaagaattcgcaaaaaagtcccaggagaaagactgattcgtgtgaagtcgtctactgaagagccacaaggaacccaaggaatcttccagctgcataatggaatacaaacccgtgcccacggttaaggacgcagctcccttcgacgcctcccaggacgcccaggtgctgcgggcggcgatgaagggattcggcaccgacgagcaggaaatcatcgacgtgctcgtcggcaggagcaaccagcagaggcagacgatcaaggcggtttacgaagcggagttcgagcgcgacctggtggacgatcttaaggacgagctgggaggcaagttcgaggacgtgatcgtgggtctaatgatgccaccagtggagtacctgtgcaagcaactgcacgccgccatggcgggcatcggaaccgaggaggccacgctcgtcgagatcctgtgcaccaagaccaacgaggagatggcccagatcgtggccgtctacgaggagcgctaccagcgcccgctggccgagcagatgtgcagcgagacctccggctttttccgccgcctgctcacgctgatcgtgaccggagtacgtgacggactggacacgcccgtcgacgtcggtcaggccaaggagcaggccgcccagctctactcggccggcgaggccaagctgggaacggacgaggaggtcttcaaccggatcatgtcgcacgccagcttcccgcagctgcgactcgtcttcgaggagtacaaggtgctctccgggcagaccatcgagcaggccatcaagcacgagatgtccgacgagctgcacgaggccatgatggccatagttgagtgcgtccagtcaccggcggccttcttcgccaaccgcctgtacaaggccatgaatggcgccggcaccgatgacgccacgctcatccgcatcatcgtcagccgctcggagatcgacctggagaccattaagcaggagttcgagcggatctacaaccgtacgctgcacagcgccgtggtggcggagacctctggtgactacaagcgggccctgacagccctacttggatccgcctaggcccgaggatgtggcagctggt

SEQ ID NO: 11733 - protein, 320 aa, DROSOPHILA
MEYKPVPTVKDAAPFDASQDAQVLRAAMKGFGTDEQEIIDVLVGRSNQQRQTIKAVYEAEFERDLVDDLKDELGGKFEDVIVGLMMPPVEYLCKQLHAAMAGIGTEEATLVEILCTKTNEEMAQIVAVYEERYQRPLAEQMCSETSGFFRRLLTLIVTGVRDGLDTPVDVGQAKEQAAQLYSAGEAKLGTDEEVFNRIMSHASFPQLRLVFEEYKVLSGQTIEQAIKHEMSDELHEAMMAIVECVQSPAAFFANRLYKAMNGAGTDDATLIRIIVSRSEIDLETIKQEFERIYNRTLHSAVVAETSGDYKRALTALLGSA

SEQ ID NO: 11734 - DNA, 2234 bp, DROSOPHILA
cgcaagcaataaaaatgattattaacaattgaagagccggcgactggcgccagacggctgagaagggaccggaaaaaaaagaaggaaaaggcgcttttgcgtactttgtatgctcgattcgggctttttggtagcttaattgccggcagcagtttccggcggcagggaatcaaagcaaatgaaacgaaatgaaatcagcgccaaagttgacatggccaaaatgttcggttagttgctttttgcaaagttgcgttaatatggctgcgtatggcgtatgcgcaatatggctgctatgctcgcaattacagctgacgttttggcccgctttgacctttttgcagcagattattggatttcatttggtttgaattattgaaaggtgtaacctggccgacatcgttttgtgcaaaaacaaaaaaaaaaaacaaacaaaaaacacgctgcaaagctatctagctgtcggtctatctgtgtctatttcttctgccatttcgttcgagtggtgtgacgtgagatgtgagcttgtttgtcgcttggctgactatccccgcactttgccaccaacgccccctccatatccatccgcctttgtctgcctgtgcccccttatgtgtgcgtgtgtttgatgacagctaatccaattaaaagtttcatacgttacgtttacgtttgctcactggcggctcggagagttgtccgtccgtccagctgtccgtaattcggttgccatgtcagtcaacgaaattaatctaataaagttactccgtgcatcatcatcatcatcatcatcgtcatcagccacatctaggggcagtgtctaatgtccaatcaggccggagcacctgacatttccaacggattttgcattttatgctcaattacaaagtcgtggcactgccgtagtcgcaattagccaacccacctggcgacccgaagcattgtccaagttggcacgtggcccaaactcgattcccatccatggccacttgcaatcgaaatcttacctgtccttgtactgactgattggcggtgaattaaaaacggccacgttcggttttccgctcaactggagggtcttgcgtgcctttcccagctgattttccgccacacaggagtagttgccaaagtcctgcggatgcactttgcgtataatcagcgtgtgccttgatccccgcgtctccatgatgtgccgctccgtggtatccaattgcatggtgtctttgaaccaaattacctgtaaataattgaaaacttggtcaatcgaggcgagcacgagtttcgaactggcgaatgtgtccaggtgagtggtgtgcgtgattgcgtttcaaccggtgtacctgggaccaggtcgaggttggagttttgtggtagagttttttttttaagaggggtttggtggtggaggttcaccggttggggggcaaaagttaagacgatttgcggcgagagtacttccactgccacttcgtgcggctgtcacttgagcgtcaattaagcgtaattcttgttgaaattgaaaaccagatcgacgtgccccaccgacgattattgatttcccatcagatttttacccccagcagttgtggccaacgacgtctggcatgaaattcatcttcgattcggcaacgaatcggcattgtttgtacctatttgtttgcaacatatttttgaagccagctacgacaacatgttttgtgtgtcaagtgcgagacccgaatcctctgcaaacaaatcctgaaaaaggactcacggtcatgtgaatgtgtttggatgccaactacgcagacggagaggaccgtgcgtgctttgtaaatgaattgagggcgcgagtcactgcagcgccgggctgtcgccgcgctgacagctcgtagacaggatacgcgaggatatggcagaatacgccaggatacggcaggatacggccggatacgggacgcagtcggcagataagcaaggacagaacgcacgaattaacaggggatacgggcagctccaaaagcaccacaacgagcagcaggtgcccgatgccatgacgcacataccgaaatccaatctccagtccccgtccgccacaaaggcacaaatattaaaacaaatagaggcaaacgtaaaaacaagatgagagtgagtggggcgatagtagccagctatctgtggcatttctatttgcaagtctagtatttatttgctcctatttggctggattagttaacgctagcggtgcttcgccgcat

SEQ ID NO: 11735 - DNA, 234 bp, DROSOPHILA
gtaatttggttcaaagacaccatgcaattggataccacggagcggcacatcatggagacgcggggatcaaggcacacgctgattatacgcaaagtgcatccgcaggactttggcaactactcctgtgtggcggaaaatcagctgggaaaggcacgcaagaccctccagttgagcggaaaaccgaacgtggccgtttttaattcaccgccaatcagtcagtacaaggacaggtaa

SEQ ID NO: 11736 - protein, 70 aa, DROSOPHILA
MQLDTTERHIMETRGSRHTLIIRKVHPQDFGNYSCVAENQLGKARKTLQLSGKPNVAVFNSPPISQYKDR

SEQ ID NO: 11737 - DNA, 2870 bp, DROSOPHILA
tctagctaattttcatggcgttctcatttcgtggcggctttcgtcaaggttcaaacccgccacaaagaaccacattttggactgggccaagctttttggcatcgccttcaacgcggtggattgttggctaatgatattgacagagatcggatgtggcgatatggagatatagacaaagtccaagcaaagcttcaagttcaattggccagtgagacggagttttgcaagcacacacagctcgaagcgcagaaatgcaattttcaatgttaggccagttggaaaaaaagaagaaaaaagccaaaaacaaaaaaaccaaatgcagccacaaaaaaaaaaactcaacaattaactgaaattgatgtttggctgcatggtacaagtgcaaagtggtttactgggttgttggagttgcgacggaaatttgcgccataggaagtcggactgccacaagtactatcaatgaaaattaaaagtaattaactgctcgcgcacagcgattgcgcaatcgccaaaagagttaattatgttatgtgcagggggcttccccggcagcatgaatacttcgactaaatcatagctcctatttttcactcacagcccgatgcagttggctgcatatgaggcgggtgcactcagtgacgaacatcagcctatgttttttccatcggatcacccgaacttcctcatagaccgttgattttctacatggttaggcattatgcaagttagctggagtgaaagcaaagttaggattgcaattggcttttctcttggtatgcatcgaaaccctttctttgtgacctcattctatgaaattagttagaattggccattacaaattgattaattaacaattacacgagtaaatattttaagaaattctatgaataagcaaacccttgaaattaatatcagttttcaattactttcaactcaagctagacaaatttgcaactaacaagctaacgttatttcgctgaattcattcacacttttggccatgttccggaatcagtatgacaacgacacaaccacttggagtccgcagggtcgtctcttccaggtggagtacgcaatggaggcggtgaaacagggagcagccaccgtgggactcaagggcaccgactatgccgtgctggccgccctgtgccgcacctcaaaggacacgaacacgctccagcggaagatcatgccggtggatgaccacgtgggtatgtctatcgcaggactaacggcagatgcccgcgtggtgtgccagtacatgaggacggagtgcatggcatatcggcactcctataacgcagaatttccggttcgccgtttggtttccaatctgggtaacaagctgcagaccaccacccagcgctatgatcgtcgtccctacggtgtgggcttgctggtggctggatacgatgagcagggaccacatatctaccaggtgatgcccacggccaatgtgctcaactgcaaggcaatggccattggatctcgttcgcagagtgctcgcacatatctggagcgaaatatggagagtttcgaggactgcgacatggatgaactgatatgtcatgccattcaggccattcgaggatcgttgggttccgatgatgtcgagaatctcaccataaatgtggccattgtgggcaaggatgtgccgtttaaaatgtttacggaagccgagaaccagaagtatgtgaaattggtcaaggctatggatccacctctggaggcggaccacgatcctctatccgaggagggaatgagcgatgatgacatgacggaccacggaccgagtagcagtggagttccacccaatgatacatctgacatggaaaccactgcatccaccggcggcagtgacgcacattgatctaatctgtgattagaaaccctgacagagtatactaaatttattgtttcgttaataatgttattaaagtttatagttattatgttgtatggctgcttcgtttttgtcaaagaaaaaaacaagaaacggttagcaaggaaattgaattctgaattagttttaatagcatgtatagcatatatattcatcttatggaacctaatcggattaaaataatggaaacactatagcacttgccattcctattaatacgttgaaattttccacagggattaggggttatgcaaatgaaagcctttagcgtgaccaattcgattacaatgtatttgaaaatatcgtagctactaatagctaaagtgtttagtttaactttaagtgcgacaatgacagctgagcgatggacgggaataggagtagttattatttaagcccacattcccgtagctgcggtttcaatcggtttacggctctattgccagtggtttgaccagggtgcagggttaatacccagtgaactttatccgactggcttgatattctccatggggggaggcaatagtcgatggggtcaccaataacgatttgctccaggggctgatgattgcctgtgacaccacgcgaactacccctggggattaattgggatttatttcgatggctccacgctttattatattttattaaatttatttatatatatttttaatatattcattgcttcattagcgcttgattactttttctgccaatgtcataaattaatatttataccatttttagaaggaagattaaaagtcaagcacacgataaaaaatcaattagccgtaaaaattaaatcctcatattttatttattaagaagttcctgcttaaccttttaaggcatttatactaaatatatactaaatttcttagcactaaaagttcttgaagaaacttaacaacttagcattaatataataactatataatacaatcctaaaaggagatggacgtatcta

SEQ ID NO: 11738 - DNA, 870 bp, DROSOPHILA
atgttccggaatcagtatgacaacgacacaaccacttggagtccgcagggtcgtctcttccaggtggagtacgcaatggaggcggtgaaacagggagcagccaccgtgggactcaagggcaccgactatgccgtgctggccgccctgtgccgcacctcaaaggacacgaacacgctccagcggaagatcatgccggtggatgaccacgtgggtatgtctatcgcaggactaacggcagatgcccgcgtggtgtgccagtacatgaggacggagtgcatggcatatcggcactcctataacgcagaatttccggttcgccgtttggtttccaatctgggtaacaagctgcagaccaccacccagcgctatgatcgtcgtccctacggtgtgggcttgctggtggctggatacgatgagcagggaccacatatctaccaggtgatgcccacggccaatgtgctcaactgcaaggcaatggccattggatctcgttcgcagagtgctcgcacatatctggagcgaaatatggagagtttcgaggactgcgacatggatgaactgatatgtcatgccattcaggccattcgaggatcgttgggttccgatgatgtcgagaatctcaccataaatgtggccattgtgggcaaggatgtgccgtttaaaatgtttacggaagccgagaaccagaagtatgtgaaattggtcaaggctatggatccacctctggaggcggaccacgatcctctatccgaggagggaatgagcgatgatgacatgacggaccacggaccgagtagcagtggagttccacccaatgatacatctgacatggaaaccactgcatccaccggcggcagtgacgcacattga

SEQ ID NO: 11739 - protein, 289 aa, DROSOPHILA
MFRNQYDNDTTTWSPQGRLFQVEYAMEAVKQGAATVGLKGTDYAVLAALCRTSKDTNTLQRKIMPVDDHVGMSIAGLTADARVVCQYMRTECMAYRHSYNAEFPVRRLVSNLGNKLQTTTQRYDRRPYGVGLLVAGYDEQGPHIYQVMPTANVLNCKAMAIGSRSQSARTYLERNMESFEDCDMDELICHAIQAIRGSLGSDDVENLTINVAIVGKDVPFKMFTEAENQKYVKLVKAMDPPLEADHDPLSEEGMSDDDMTDHGPSSSGVPPNDTSDMETTASTGGSDAH

SEQ ID NO: 11740 - DNA, 10637 bp, DROSOPHILA
caaccatcagcagtgtcatccgcatccgcgccagctatcacagcaccagcccaagccatccgatcagctcatccgccggctgcacgttcctaggcactactggtagtactttgggccgcccgcgcagtgcggccgcccgatcgtttgcgtctgcatggagtcaatgagacgtaacgaggcgaacactagccaccacccgaataaggtaagctaattgtggcaccttaatcggaaaactatccacgcatcatttctgaagcattttaatcatattcagtattgatttcttatcaataaattgatttaaattgtaaatttttatgctacaaagctaaacttttcaaatacctaagtgtatacatatcttgtaaatgtctgtatgtatttaagcaaagacgtcaggcgaagtaaacgtttttttttctttgaataccatataattttttattgcgagtaataacttactagtgggaagtacttatagcttatagctttggatctttaatacttggtaacactatttaccttcctccactgtatttagtgggtgataagagcgtaattattttattgtcatcattttggcccactcgagtggcgtttttttcgtgccagtttctcaagtagccactacacttttgcagtgtgcgataagcgaaaggggcgataatgaactgaccggcgaactacatgctttactcctccttagtttgttggtttattgggtcagtccaggaaactgatttattagttcaaagggtggaaaatgaaaaacaacaacaacgaagatcaacgtgcacttaaagttgtcagttgccactcgcgttttccaacactgaaagcgttttgttttgtttgccttcgtctctccgccgcttctcttccgctcacataatctctttctcgctctccctctcttcacccgttttcggtggttgctctccggctctttcctcttcttcttcactttttttttggttttccgttcagtctcatccgccaaacgaaaaaggacgccgcggagaaggctcgcgcaaaataatcgagagtaatacgacgttgcttatttatttattgtttttgttttttgtttttcttgtaaattgaagcgttaaaaatacgcgcacgcacaaaactatcaactaattatggttatggaatggaaaagaagttggcaaaggtaaagagcgaaagcggcgaaagaaataacaatttttgtttgagtttttttttttgagttttcttcacgtcatgccctactcctcacacttacgcactcacacccatgcatatgtatgtaagctacaacttattttgttggatttctttctttttttttgtgcaatcgcaggtggccctgaatagcagcaacgtagcaacggaaagcaatattaagaataataaattgttagctaatttaagtgcggcaggagcagctacagctacaacggcaacaacaggaacagcaacaacaacgacggcgacaacagcgaatcaagcgctgaatttcaataacaaaacgaaagcaacagcaaacgcgactgcagcatcggcgaataatcggcacaataacaacaacaattccagtgcgatcaagaagcacacaaatacgagtaagtaactgcaaatctctcgctgcctctcgctttttttttatcaacagtggcgtagacagcattgttttaaggggttacaaattaaattacagaaaaaagtgctatttcacacacacagaagtgtatagaaatcgatagcgtcctttcgattaatgtgaattcccccctcccccatttttattattaattcattaaaagaattgaaaataagtaattaatataataaaaattaaatgaattaatcataaattttacaaatttggagggaccgtttaaaaaaatatttaaactaaatacaattcagcaactccccatttagtacgccactgacctctaagctttaatgcgacaactccaatctaatccatctctcctttttcgcagaacaactagctggcaagagccccgcgtgcaactcctcctcctcgtcgctctcctcgtcgagcagctccaactcgagcgagtcgaaggacacgaactttgagtacgaggacgagtggaatattggcggcataccagagctgctggacgacttggacgcggatattgagaagtccgcgcattcttcgggtggtggcaaccaggctaccgcgctaaatgccaagcaggcaaacagctcctccacatcctcctcatcatcctccaagggcggcgcttcatcctcgtcatcctcagcagcagcgacgggatcatcatcgtcgcataaatcgcacaaaaccacattgcacagcaatttgtcggccacatcgccaaccacaattaagttcacacgccaaccggtggccattggcggagctaactcctcctcatcttcatcagcagctgcagcgcccagtggtggcagcgcgaacgtggtggccaagggatcatcttcttcctcgtcctccacatcttcctcatcttcggggaagcatcatcaccatcaccaccatcactcaaactcaagcagcagtggaagcagttccaagggctacaagtccgctttggtggctcaactgaacagtccgagtccactgaacagtaactccaagtccctgagtggatcggggagtggaagcgggaacacaaacggagcagcgggagctggagccggcagcacattgtcatcctcgacatttgccggtttctccaaaggcggcagcttagtgtcttcgtcggcaggagcagcagcggctttagcggctggcagtggacaacagggctccaaattctccgctggcggcatgtcctcgcaaacgggcagcggcagcggcggcaacaacactagcaatagcaacaacagcagcagcggaagcggaggcagcggctcaggtagcagcacagggaacaccgccagcggtagcgggaacaacaacagcacaagtgccggtgggccgccgagttcgcaaggcggcaacaacggaaacggtagcggtagcagctccagctcctccagtggtaaatcgagcgcaaagatgtccatagaccaccaagcgacgctcgacaaaggactcaaaatgaagatcaagcgcaccaagccgggcaccaaaagctcggaggccaaacacgagattgtgaaggccaccgatcagcaacagaacggagccctgggcgccggatccaataactcggccaacgaggatgggagttccggttccagttccaccaacgcgtcttccctggggagcaccaattcatcgagcagcgcaagcagcggcagctcctccagcagcggcagttcttcgagcagcagcaagaagcacctaaacaatgccagtagcggtagtggctcctcctcttccggaggagggagccaaaacaatgccagtggccatgccagcggagggggatcctccggtagcagtcagtctacgccgcagggcactaagcgcggtagttcgggtcatcggcgtgagaagaccaaggacaagaacgcacattccaatcgcatgtccgtggacaagtcagcagctgctgcctcggcggccggcgagaaggatacacctgagaagtgttccggtacgggagctggtggatctccctgctcctgcaacggagatgtgggagctccttgctcacatcatgcctgcattcgccgtgccgcacacatgtccaactccgcaggcaatgcgaattcgagtgccggcactgggcaatccggtggttcatcctccatgtcagcagtgccaccgggtgtgttcacaccttcagcgggctctccttccaccggttcaccatcgaccgtggtgcctgccgctgcctcacttctggcagcgaccggagcagcctcctcctccgcctctcaaatggccagcagtagtgccggcggcgttggcggttcgggaggaggtgccaatgcaccaggaccgccgggtaaggagtctgccggcagcatcaaaatctcctcgcacattgccgcccaactggcagcagcggccgcttccaatagttacagcgggagtggagccaacacgaatcaaggccagaacagcaatgctggcggcaacggcggttcggagagcaaagcagcagcggctgctcaggccaagttaatggcacccggcatgatctcagccaccatgcaccatacgatctcggtgccggcgggcacaggaacaggcgacgacgataccaaatctccgcctgccaaaagggtcaagcatgaggctggcgctagtggagcaggaggcggcaaggagatggtggacatctgcattggcacctcggtgggcaccatcaccgaaccggactgcctgggtccctgcgaacctggcacttccgtaaccctcgaagggattgtgtggcacgagaccgaaggcggcgttctcgtggtcaatgtcacgtggcggggcaagacctacgtgggcactctgctagactgcacccgacacgattgggctcctccaaggtgagttggtgtggcttgggaattgagttgaggcttatgttgacttgcttttcaaactgtttccaaaattattgtagagactagataaatgaataaagatgcctttcaatattatgttgcaagttgatttatttttattataaattatcttttctatctacccattgttttggggatcagtttgaaatatagtctatggtttatatacgagaaacataattatcaaaactcagtggcgtttaagtaaatttgtcagcaccttatctacttgcctaatatttgcatcaagctgttaagttatttgtaaatttaatctaaatctgatgcaacagcaatcatttgccgttcgtttactgatgcgattatttattaagtgcttaatgtgccactcaagatttccacgaatgtacatatgtagtttgttttgattgaagatatgtgatatctgtagggggattgcaaacatcactagttttagattttaccgattactcattcattttcgttgctttcagattctgtgattcaccaactgaagaattagattctcgaactccaaagggacgcggaaagcgcggacgcagtgcaggtctcactcctgacctgagcaacttcaccgagaccagaagttcggtaagtaaagcatacagaattcagttttaggcttttgaaagcagaaataaatacgatggttaataatatatatctctcatcaaatcgttacagatttacttctcacacgcccaggtgcactccaagctgcgtaatggtgccacaaagggacgcggtgcgacacgcagtgcatccggtaatgcggcagcgaacagcaacagcagttcatcgggcaacggaggcggggccacgcccagcacatcgccgacggcatttttgccgccacggccagagaagcgcaagtcgaaggatgaggcgccttcaccgcttaacggcgacgcctcggatggagcgtctgttggcggtattggtggagccggtggagtgaacatggtgaacgccagtggcatccccatatcggccagcggcggtggcctggccacgcagccgcagagcctgctcaatccggtcactggtctcaatgtgcagatcagcaccaagaaatgtaagactgcttcgccctgcgcgatctccccagttctgcttgagtgtcccgagcaggactgcagcaagaagtacaagcacgcaaatgggctgcgttatcaccagtcgcatgcccatggagcgggcggtggcgcaagctccatggatgaggactccatgcaggcgcccgaggatccggccacgccgccctcgccaggagtcgcaagtggaacgggatcaggagcatctgtagcatcatcggcagtaccagcgacagcaccatcagcgggtcaaggaactgtcgcagtgtccccaaacacacccctcgcaaattcaagcaaccccgtcaccaatggcaatgttgcaccatcggcaccagctactggatcggtaactatcgccgctcccaacactactccctctgtggtagagacgcaagcgccgcttactggtcctccaccagtcacgccaccagctccaactcccatctgcgcagttgcaacacccggagcggagcaatctgtatcatcagtattgcccctgggaaatcttccactgacggcaggtccaaatagcgcgacacaacagcaacagcctcctacacagcagcaacaaccacagttgctcgtcccaggaggcagtgcggcaagccttcagcagcagcagcagcagcagcaaccagtggccggaggcagcatcactgctggaatctccggacaggctctgtcacagcatcaacagcaactaatgggtggattgcctgccatgttgtcagaccagcagcagcaggcattgttgcagcagggagcacgtaagtattcgatttttctaccttttggaaaagatgtgattgaaattatattaatcgtactaaattcttatctatttcttttttagttaaagcgggtgtactgcgttttggcccgccagatggaaatcccctgcagcagcagcctggtcaagcatcggttaatccacagacacaacagtctcctccaaggcctcccagtcatgtccaggatcaacagacgccatcggcctacgcccagcaggcaggtttaaagacatcgcctggatttggctccgttggcgtgggtgccgctagcagcaaacaaaagaagaaccgcaagtcacctggacccagtgactttgagggccgcgtatcgcgcgaggatgtacagagtccggcatacagtgatatctccgatgactccacgccagttgccgaacaggaaatgctggacaagtcagtcggccaggcggtgacggcaaagcacatcgaattgatgggcaagaagccgacggaagtgggcgttggtgttccgccaccaccagctcccaatatgtatgtgccgggaatgtatcagttctatccggcgcagcagcagtcagcacctccaccacagcaacagcaacaacagccgcaatacatggtgcagacagagccaggcaaaccaccaggattgccacctgctttgacacaagctcagcagcagcaacaattgcagccgggtgctcctccgcctacctcacagcccccgagtcatttgctaggtccacccggtcagcagtcggtggctgcccacctggcagactacagtggcaagaacaaggatccaccattggatctgatgaccaaaccgcagccacagccgggtcagccgccttcacagcagcagcagtcgggccaactgtcggggcaggaaaacaatggcaaggatgttggaccgcccacctctcagccaggatctcagccgccgccggttaacctaagtgcagtggctgggccgccgccaggaagcctgccacccggtttgggtggtctctcggctttgggagcagccggtctaggtggtcctggaccgggcaagggcatgccccacttctatcccttcaagtaagttgttgatcaatcgctaaggtcagttgccattgcataactaaccaatcgtttaccttttagttttattccgcctgcgtatccatacaatgtggaccccaactttgggtcagtttctattgttgcttcagaggaggccgccaagctgagtgggcatccgggtctgccacccagctcacaagcgcagcagttatccggcataagtatcaaggaggagcgtctgaaggaaagccccagtccgcacgaccagccgaagcacatgccatctcagcaacaggtaagtccttaccaacgttataatattttggcaaaactaatgcaatatgatttcatatcctccgcagatgatagccagcaagctaatcaagcaggagccgatgaccaagcaggagatcaagcaggagcccaactcaaatccgggccagcagcatccgcctccgcaacagcagccagcgcctcagccgcagcaacaacagccgccacccccgcagccacaacagccgcatgccctgcatcccaaggatttacaggcactgggcgcctatcccgccatctaccagcgccattccataaacctggccgtgcagcaggctcgcgaggaggagctgagacggtaagtgaagtataagcatcataaacgcgtctttgaggaatacaaatcataataaatttaaaattgtttctaacttttggaagttgtaactaacttgtgcatcttttcacatcaggtattacatgttcactggacgacagaattcggcagccgcagcagcagccgcagcagctcaaaacgctgccagtggtggtcttccaccgcatcccggcatgatgcacaaggatgagcctggcatgggatcggcggcgcaacaacagcagcagcaacaacagcagcagatgcaaattgcacagcagcagcagcaggccattcagcagcatcatcagcacctgcagcagcagcaccaggcccagcaacagcagcagcagcaacaacaccagcagcagcagcaacaacagcagcagcagcaacaacaacagcagcagcagcaacaacagcaaaagttaaagcaatcgcaggcggctagtgcgggggcaaataataaggccaccaacctgacgaaggattctcccaaacaaaagggcggcgatgacgatcaaccgctgaaggtgaagcaggagggccaaaagccgaccatggagacgcagggtccgccaccaccacccacgtcgcagtacttccttcacccctcatacatttccccgacgccctttgggtttgatcccaatcatccgatgtatcgcaacgtgttgatgtcagccgccggaccgtataatacggcaccgtaccacctgcccatccctcgcccgtaccatgccccagaagatctctcgcgtaacaccggcaccaaggcgttggatgcactccatcacgcggccagtcagtactacaccacccacaagatccatgagctcagcgaacgggccctcaagtcgcccaccagcggcagcggccccgtcaaggtgagcgtcagcagtcccagcatcgggccgcctcaaccaggcggacccacgagcagcggccccggatccggaccagtttccggtgtcctcggccccggcagcggttccaaccagcagcccggctcggcacctgggtctgcgggcggtgtgccgctgaacctacagccaccacccggaggaatgggcccgtcacccggcagcaagccggatctgtccggcccgaaaggacatggcggagtgacgcccggctcgtcattggacggccacaagcagtcgatgcccggaggtccgccaccgaacgggccatcgggcaatggagccgttggcggtgtgggaggcgctgccggcaatggcgcagcgggaggcggcggtgcaggtgccgccgactcacgcagcccaccaccgcagcgccatgtgcacacccaccaccacacgcacgtcggcctcggctatcccatgtacccggcgccgtatggaggtgagtccccaactgtgctattcagttcggaaagttgaatgctaatcatttaaatgtttactcccatagcggctgttttggctagccagcaggcggctgctgtagctgtgataaacccgtttccgccgggtccgtcgaaatgagatccactgaacggtaacaacgagaagaaggcgtataacgtaaagaacaactagtgtggagcggaaagtcatggtgcccgccccatagtgcatttgctattttctgagatccccagacagacagatagaatgggagaaggataaggctttgttccccgttggattccaacttcttcccgtcgaaacctgtcacagtcttggctgcctcaacgagtcctttcgatgctgatgcatcggcggtcgaggaaccgagaggaacacagaatcgactatttatatgcataagtattttttgatgtttcgttcgatgtggttaactataactagcctaaggtatcactactattaccacatacaacctatacatatataaatatatatagcataactacatatagcgactttttcctaagtgtatttgcatctgcatatagatatctatatttatatttatatcatacgagagaggcgtaatccgaacatgaacaaacacaaccaacaaacagattacatgaaacatgcaaaaaatgaaagggaaaaaaacgaatcaaactcgatactgtagtgtgttgatttctttgtaaaaaaaaataaaaactaaacgtacgagaaatgaaattaagaaaagatcgaaatgtatgaatattgtttaactaaatgattaaattatgcaagtagaacgtacaagattagcatttagcgtgtgtattaattatccttatctgtgttgcggatggagctgcgcgggatttgcatctaaaagacaaattgggcgcgccgcccattcaattcttataaatataaatatatattatgtgtatctaaatctatatctgtgtgtgtactactcgtatccgtagtttctactttataagttctccgtgaatgactacgatgaatttttcggccagcagccgcacattaattttaattgtttctaagcatcaatttgtactttaaatatttatacgcatatgctgcatatatgatatgataacga

SEQ ID NO: 11741 - DNA, 7002 bp, DROSOPHILA
caaacgaaaaaggacgccgcggagaaggctcgcgcaaaataatcgagagtaatacgacgttgcttatttatttattgtttttgttttttgtttttcttgtaaattgaagcgttaaaaatacgcgcacgcacaaaactatcaactaattatggttatggaatggaaaagaagttggcaaaggtggccctgaatagcagcaacgtagcaacggaaagcaatattaagaataataaattgttagctaatttaagtgcggcaggagcagctacagctacaacggcaacaacaggaacagcaacaacaacgacggcgacaacagcgaatcaagcgctgaatttcaataacaaaacgaaagcaacagcaaacgcgactgcagcatcggcgaataatcggcacaataacaacaacaattccagtgcgatcaagaagcacacaaatacgaaacaactagctggcaagagccccgcgtgcaactcctcctcctcgtcgctctcctcgtcgagcagctccaactcgagcgagtcgaaggacacgaactttgagtacgaggacgagtggaatattggcggcataccagagctgctggacgacttggacgcggatattgagaagtccgcgcattcttcgggtggtggcaaccaggctaccgcgctaaatgccaagcaggcaaacagctcctccacatcctcctcatcatcctccaagggcggcgcttcatcctcgtcatcctcagcagcagcgacgggatcatcatcgtcgcataaatcgcacaaaaccacattgcacagcaatttgtcggccacatcgccaaccacaattaagttcacacgccaaccggtggccattggcggagctaactcctcctcatcttcatcagcagctgcagcgcccagtggtggcagcgcgaacgtggtggccaagggatcatcttcttcctcgtcctccacatcttcctcatcttcggggaagcatcatcaccatcaccaccatcactcaaactcaagcagcagtggaagcagttccaagggctacaagtccgctttggtggctcaactgaacagtccgagtccactgaacagtaactccaagtccctgagtggatcggggagtggaagcgggaacacaaacggagcagcgggagctggagccggcagcacattgtcatcctcgacatttgccggtttctccaaaggcggcagcttagtgtcttcgtcggcaggagcagcagcggctttagcggctggcagtggacaacagggctccaaattctccgctggcggcatgtcctcgcaaacgggcagcggcagcggcggcaacaacactagcaatagcaacaacagcagcagcggaagcggaggcagcggctcaggtagcagcacagggaacaccgccagcggtagcgggaacaacaacagcacaagtgccggtgggccgccgagttcgcaaggcggcaacaacggaaacggtagcggtagcagctccagctcctccagtggtaaatcgagcgcaaagatgtccatagaccaccaagcgacgctcgacaaaggactcaaaatgaagatcaagcgcaccaagccgggcaccaaaagctcggaggccaaacacgagattgtgaaggccaccgatcagcaacagaacggagccctgggcgccggatccaataactcggccaacgaggatgggagttccggttccagttccaccaacgcgtcttccctggggagcaccaattcatcgagcagcgcaagcagcggcagctcctccagcagcggcagttcttcgagcagcagcaagaagcacctaaacaatgccagtagcggtagtggctcctcctcttccggaggagggagccaaaacaatgccagtggccatgccagcggagggggatcctccggtagcagtcagtctacgccgcagggcactaagcgcggtagttcgggtcatcggcgtgagaagaccaaggacaagaacgcacattccaatcgcatgtccgtggacaagtcagcagctgctgcctcggcggccggcgagaaggatacacctgagaagtgttccggtacgggagctggtggatctccctgctcctgcaacggagatgtgggagctccttgctcacatcatgcctgcattcgccgtgccgcacacatgtccaactccgcaggcaatgcgaattcgagtgccggcactgggcaatccggtggttcatcctccatgtcagcagtgccaccgggtgtgttcacaccttcagcgggctctccttccaccggttcaccatcgaccgtggtgcctgccgctgcctcacttctggcagcgaccggagcagcctcctcctccgcctctcaaatggccagcagtagtgccggcggcgttggcggttcgggaggaggtgccaatgcaccaggaccgccgggtaaggagtctgccggcagcatcaaaatctcctcgcacattgccgcccaactggcagcagcggccgcttccaatagttacagcgggagtggagccaacacgaatcaaggccagaacagcaatgctggcggcaacggcggttcggagagcaaagcagcagcggctgctcaggccaagttaatggcacccggcatgatctcagccaccatgcaccatacgatctcggtgccggcgggcacaggaacaggcgacgacgataccaaatctccgcctgccaaaagggtcaagcatgaggctggcgctagtggagcaggaggcggcaaggagatggtggacatctgcattggcacctcggtgggcaccatcaccgaaccggactgcctgggtccctgcgaacctggcacttccgtaaccctcgaagggattgtgtggcacgagaccgaaggcggcgttctcgtggtcaatgtcacgtggcggggcaagacctacgtgggcactctgctagactgcacccgacacgattgggctcctccaagattctgtgattcaccaactgaagaattagattctcgaactccaaagggacgcggaaagcgcggacgcagtgcaggtctcactcctgacctgagcaacttcaccgagaccagaagttcgatttacttctcacacgcccaggtgcactccaagctgcgtaatggtgccacaaagggacgcggcggggccacgcccagcacatcgccgacggcatttttgccgccacggccagagaagcgcaagtcgaaggatgaggcgccttcaccgcttaacggcgacgcctcggatggagcgtctgttggcggtattggtggagccggtggagtgaacatggtgaacgccagtggcatccccatatcggccagcggcggtggcctggccacgcagccgcagagcctgctcaatccggtcactggtctcaatgtgcagatcagcaccaagaaatgtaagactgcttcgccctgcgcgatctccccagttctgcttgagtgtcccgagcaggactgcagcaagaagtacaagcacgcaaatgggctgcgttatcaccagtcgcatgcccatggagcgggcggtggcgcaagctccatggatgaggactccatgcaggcgcccgaggatccggccacgccgccctcgccaggagtcgcaagtggaacgggatcaggagcatctgtagcatcatcggcagtaccagcgacagcaccatcagcgggtcaaggaactgtcgcagtgtccccaaacacacccctcgcaaattcaagcaaccccgtcaccaatggcaatgttgcaccatcggcaccagctactggatcggtaactatcgccgctcccaacactactccctctgtggtagagacgcaagcgccgcttactggtcctccaccagtcacgccaccagctccaactcccatctgcgcagttgcaacacccggagcggagcaatctgtatcatcagtattgcccctgggaaatcttccactgacggcaggtccaaatagcgcgacacaacagcaacagcctcctacacagcagcaacaaccacagttgctcgtcccaggaggcagtgcggcaagccttcagcagcagcagcagcagcagcaaccagtggccggaggcagcatcactgctggaatctccggacaggctctgtcacagcatcaacagcaactaatgggtggattgcctgccatgttgtcagaccagcagcagcaggcattgttgcagcagggagcacttaaagcgggtgtactgcgttttggcccgccagatggaaatcccctgcagcagcagcctggtcaagcatcggttaatccacagacacaacagtctcctccaaggcctcccagtcatgtccaggatcaacagacgccatcggcctacgcccagcaggcaggtttaaagacatcgcctggatttggctccgttggcgtgggtgccgctagcagcaaacaaaagaagaaccgcaagtcacctggacccagtgactttgagggccgcgtatcgcgcgaggatgtacagagtccggcatacagtgatatctccgatgactccacgccagttgccgaacaggaaatgctggacaagtcagtcggccaggcggtgacggcaaagcacatcgaattgatgggcaagaagccgacggaagtgggcgttggtgttccgccaccaccagctcccaatatgtatgtgccgggaatgtatcagttctatccggcgcagcagcagtcagcacctccaccacagcaacagcaacaacagccgcaatacatggtgcagacagagccaggcaaaccaccaggattgccacctgctttgacacaagctcagcagcagcaacaattgcagccgggtgctcctccgcctacctcacagcccccgagtcatttgctaggtccacccggtcagcagtcggtggctgcccacctggcagactacagtggcaagaacaaggatccaccattggatctgatgaccaaaccgcagccacagccgggtcagccgccttcacagcagcagcagtcgggccaactgtcggggcaggaaaacaatggcaaggatgttggaccgcccacctctcagccaggatctcagccgccgccggttaacctaagtgcagtggctgggccgccgccaggaagcctgccacccggtttgggtggtctctcggctttgggagcagccggtctaggtggtcctggaccgggcaagggcatgccccacttctatcccttcaattttattccgcctgcgtatccatacaatgtggaccccaactttgggtcagtttctattgttgcttcagaggaggccgccaagctgagtgggcatccgggtctgccacccagctcacaagcgcagcagttatccggcataagtatcaaggaggagcgtctgaaggaaagccccagtccgcacgaccagccgaagcacatgccatctcagcaacagatgatagccagcaagctaatcaagcaggagccgatgaccaagcaggagatcaagcaggagcccaactcaaatccgggccagcagcatccgcctccgcaacagcagccagcgcctcagccgcagcaacaacagccgccacccccgcagccacaacagccgcatgccctgcatcccaaggatttacaggcactgggcgcctatcccgccatctaccagcgccattccataaacctggccgtgcagcaggctcgcgaggaggagctgagacggtattacatgttcactggacgacagaattcggcagccgcagcagcagccgcagcagctcaaaacgctgccagtggtggtcttccaccgcatcccggcatgatgcacaaggatgagcctggcatgggatcggcggcgcaacaacagcagcagcaacaacagcagcagatgcaaattgcacagcagcagcagcaggccattcagcagcatcatcagcacctgcagcagcagcaccaggcccagcaacagcagcagcagcaacaacaccagcagcagcagcaacaacagcagcagcagcaacaacaacagcagcagcagcaacaacagcaaaagttaaagcaatcgcaggcggctagtgcgggggcaaataataaggccaccaacctgacgaaggattctcccaaacaaaagggcggcgatgacgatcaaccgctgaaggtgaagcaggagggccaaaagccgaccatggagacgcagggtccgccaccaccacccacgtcgcagtacttccttcacccctcatacatttccccgacgccctttgggtttgatcccaatcatccgatgtatcgcaacgtgttgatgtcagccgccggaccgtataatacggcaccgtaccacctgcccatccctcgcccgtaccatgccccagaagatctctcgcgtaacaccggcaccaaggcgttggatgcactccatcacgcggccagtcagtactacaccacccacaagatccatgagctcagcgaacgggccctcaagtcgcccaccagcggcagcggccccgtcaaggtgagcgtcagcagtcccagcatcgggccgcctcaaccaggcggacccacgagcagcggccccggatccggaccagtttccggtgtcctcggccccggcagcggttccaaccagcagcccggctcggcacctgggtctgcgggcggtgtgccgctgaacctacagccaccacccggaggaatgggcccgtcacccggcagcaagccggatctgtccggcccgaaaggacatggcggagtgacgcccggctcgtcattggacggccacaagcagtcgatgcccggaggtccgccaccgaacgggccatcgggcaatggagccgttggcggtgtgggaggcgctgccggcaatggcgcagcgggaggcggcggtgcaggtgccgccgactcacgcagcccaccaccgcagcgccatgtgcacacccaccaccacacgcacgtcggcctcggctatcccatgtacccggcgccgtatggagcggctgttttggctagccagcaggcggctgctgtagctgtgataaacccgtttccgccgggtccgtcgaaatga

SEQ ID NO: 11742 - protein, 2280 aa, DROSOPHILA
MEKKLAKVALNSSNVATESNIKNNKLLANLSAAGAATATTATTGTATTTTATTANQALNFNNKTKATANATAASANNRHNNNNNSSAIKKHTNTKQLAGKSPACNSSSSSLSSSSSSNSSESKDTNFEYEDEWNIGGIPELLDDLDADIEKSAHSSGGGNQATALNAKQANSSSTSSSSSSKGGASSSSSSAAATGSSSSHKSHKTTLHSNLSATSPTTIKFTRQPVAIGGANSSSSSSAAAAPSGGSANVVAKGSSSSSSSTSSSSSGKHHHHHHHHSNSSSSGSSSKGYKSALVAQLNSPSPLNSNSKSLSGSGSGSGNTNGAAGAGAGSTLSSSTFAGFSKGGSLVSSSAGAAAALAAGSGQQGSKFSAGGMSSQTGSGSGGNNTSNSNNSSSGSGGSGSGSSTGNTASGSGNNNSTSAGGPPSSQGGNNGNGSGSSSSSSSGKSSAKMSIDHQATLDKGLKMKIKRTKPGTKSSEAKHEIVKATDQQQNGALGAGSNNSANEDGSSGSSSTNASSLGSTNSSSSASSGSSSSSGSSSSSSKKHLNNASSGSGSSSSGGGSQNNASGHASGGGSSGSSQSTPQGTKRGSSGHRREKTKDKNAHSNRMSVDKSAAAASAAGEKDTPEKCSGTGAGGSPCSCNGDVGAPCSHHACIRRAAHMSNSAGNANSSAGTGQSGGSSSMSAVPPGVFTPSAGSPSTGSPSTVVPAAASLLAATGAASSSASQMASSSAGGVGGSGGGANAPGPPGKESAGSIKISSHIAAQLAAAAASNSYSGSGANTNQGQNSNAGGNGGSESKAAAAAQAKLMAPGMISATMHHTISVPAGTGTGDDDTKSPPAKRVKHEAGASGAGGGKEMVDICIGTSVGTITEPDCLGPCEPGTSVTLEGIVWHETEGGVLVVNVTWRGKTYVGTLLDCTRHDWAPPRFCDSPTEELDSRTPKGRGKRGRSAGLTPDLSNFTETRSSIYFSHAQVHSKLRNGATKGRGGATPSTSPTAFLPPRPEKRKSKDEAPSPLNGDASDGASVGGIGGAGGVNMVNASGIPISASGGGLATQPQSLLNPVTGLNVQISTKKCKTASPCAISPVLLECPEQDCSKKYKHANGLRYHQSHAHGAGGGASSMDEDSMQAPEDPATPPSPGVASGTGSGASVASSAVPATAPSAGQGTVAVSPNTPLANSSNPVTNGNVAPSAPATGSVTIAAPNTTPSVVETQAPLTGPPPVTPPAPTPICAVATPGAEQSVSSVLPLGNLPLTAGPNSATQQQQPPTQQQQPQLLVPGGSAASLQQQQQQQQPVAGGSITAGISGQALSQHQQQLMGGLPAMLSDQQQQALLQQGALKAGVLRFGPPDGNPLQQQPGQASVNPQTQQSPPRPPSHVQDQQTPSAYAQQAGLKTSPGFGSVGVGAASSKQKKNRKSPGPSDFEGRVSREDVQSPAYSDISDDSTPVAEQEMLDKSVGQAVTAKHIELMGKKPTEVGVGVPPPPAPNMYVPGMYQFYPAQQQSAPPPQQQQQQPQYMVQTEPGKPPGLPPALTQAQQQQQLQPGAPPPTSQPPSHLLGPPGQQSVAAHLADYSGKNKDPPLDLMTKPQPQPGQPPSQQQQSGQLSGQENNGKDVGPPTSQPGSQPPPVNLSAVAGPPPGSLPPGLGGLSALGAAGLGGPGPGKGMPHFYPFNFIPPAYPYNVDPNFGSVSIVASEEAAKLSGHPGLPPSSQAQQLSGISIKEERLKESPSPHDQPKHMPSQQQMIASKLIKQEPMTKQEIKQEPNSNPGQQHPPPQQQPAPQPQQQQPPPPQPQQPHALHPKDLQALGAYPAIYQRHSINLAVQQAREEELRRYYMFTGRQNSAAAAAAAAAQNAASGGLPPHPGMMHKDEPGMGSAAQQQQQQQQQQMQIAQQQQQAIQQHHQHLQQQHQAQQQQQQQQHQQQQQQQQQQQQQQQQQQQQQKLKQSQAASAGANNKATNLTKDSPKQKGGDDDQPLKVKQEGQKPTMETQGPPPPPTSQYFLHPSYISPTPFGFDPNHPMYRNVLMSAAGPYNTAPYHLPIPRPYHAPEDLSRNTGTKALDALHHAASQYYTTHKIHELSERALKSPTSGSGPVKVSVSSPSIGPPQPGGPTSSGPGSGPVSGVLGPGSGSNQQPGSAPGSAGGVPLNLQPPPGGMGPSPGSKPDLSGPKGHGGVTPGSSLDGHKQSMPGGPPPNGPSGNGAVGGVGGAAGNGAAGGGGAGAADSRSPPPQRHVHTHHHTHVGLGYPMYPAPYGAAVLASQQAAAVAVINPFPPGPSK

SEQ ID NO: 11743 - DNA, 3553 bp, DROSOPHILA
ttctgatggattaataataaacgttaattttgtttaggaatgaagtcttttttaatatcattagttgctaacgaattaatctagttatgtctatgcactgcctaggggtatgatgaagctcatatagtccgctgtggcgccccaggctgtgcgatttgtctggaatattattatccaggcagttagtactatcagccagaatagagtccccactgcagagtatataacatctggaggaaggtaggaaagaaattgtggaatattagactgtatggcatgggcatctattcatatattgacttacatctctttatttggctctgctccgaaaatggtggcttatggaaggcctccgtgaaaaaccagcaaacgttaatggcccacacaaagggcagaaatgcaaagccagctaagttcgagacaaatagaaagtaacttggttaaaatccaatcattactcattggtagtaactcttaccaaagaagtatttgcgacacagctccagttttcgcggatttggtgcctttgagatgtccatgattaatcctcttcaaatatgtgggtgtttgctcctttgttttcgaatctgtttccggcccaggaaagttttttcgtacttatatgtaaattgtatgtaatatgtaaattgtaatagcttatattttcacttcaatttttgcttttgttgatttgtgttttagtttttagtccattggagcgcaatcgatatcgataagttatcgaaacagaggtgagctaaactgcgactcttggatcactgtttcatttgccaatatctaacgtaaataacgatataataatatagcatagatgttttattacgtttgcacgattttgcgatgtgtgcgatgattagtatgaaacatcattccttgtgttccctttttttaaaacgccaaaactgttacaagtcaagcccacttcagtgttgtatatcccctaaaacagaatcatcgataggtaatactgctgccatcactattttagcacacaccgcgtaaaagcgacgccgatttcaattttcaacgaattattaaaagtgtgcgaaaaaccatacaatggccgatgtggacgattttgattctctgtccaatgctgagttgcgcgccaagatgctggcacaggggctgcccaacatccccgtgacggatagcagccggaaggttctagtaaagcgtctgcgcgcctccattggtggccaggcgtcgccggccgctagtcccaagaagaccaacaggcgggagaccctggctcccgcacctggtgcaccatctgctccggcggcagcctccacgccggtggacaagctggatggcaacaaggtggcgcccgccacaaaggctcggcgcacaattaccgctgcagaggccaaggaaccagtgcgtcgattacccgaggaagctatacgccgacgccccgacgaagccgaccgcctacgatccgaggagcccgttgccgccaggaagccaacaactgctcctgctgctcaacccgtacagacccggcgcacttccacctcctcggggtctgaaaggaaagtagtggagcccttgaggaagccagaaaccattgttgagcaaccggcttcctcgaagcgcgctgatcgagaggagaattatcttaaggtcaactccctgattgtcctagagtccgatgaagaagaggacgagcagctagtccaggctgcagatctggtggagcaggagcacgcggccagacagaagaccacgaagctcgcaagcagcggcaccactacgtacgagtacaaaagcaaggttgtggagcctccacgccgacaggtctatgaagcgacagcagctcccgtgctgccgccatctgtgccatctgccagagcgcagaccaccagttccaccaggtcctatgactatgcgagcaacccagcacccggtcgctatagcagttttgtgcgtactgcagcccaaggctatgtgactgcagaggctccgccggtggcctcctactcatccagctacaagcgtacctatgctaacgagctgagcgacgacactgattccaaggaagaccagtacgaaagcacatttgccaggaatctagctcgtttgcgagccgaacggattggagatcgcatcagcccgtattccagacgcactctggccagtggaaacgcgggtagcggttctctcggctatgagccgcgtgccaggcgctccttgcgcccgaatgataacagcgtatccgaggcctttaaccgttggttgaacagcctggagcagaagtatcacatcaagtcgaagctgttcattgtactcctcgtccttttgttaatcggcgtttattacatattctactgaccggcgcatcattgttcttatttcgaatttgtaatctagtttgtataccatgttggatatgttttgtaaacaagactgccgccgcggtctttgtatgaatcttgttttgatgtaacttgagcttgagtttgactagcatttaagctgcgtgttatccgtgttcaaataaagcccacttgcagggaatctccacagttgaacacttgctctgatgttttttctccaaacggctttcgattcactgcgctccacttgtggcaggtgtttgcccagattggatcaagaaacagcagcaaacgacgatcggctaatgatggaaaagtatctggaatgcgtgtacaacacttgtcggcatgactctgaccaaatgtaggcgcaatggcaaccaggcaagcgcagctcttatctgagctaaattgttcctgctgcgatctgatctgcgatccttgcaatgccttgcaatcagaattaataagaattttacaagtcggctcggcggccggtgtgcgttattttaaaatccttgcccgagttgggctgtttaattttattaactggaaatcgcacttgcgcgtatttctttattttcttaaggaaatttcgcgccatatttagcggtaacaagcgcgaccggatccgggtctgacttgcatgccagcaataagttatgaaaattgcaacatcagtggctcgggggaaatgccagttgtgctggggatgttgctgccacggctgccacggccgccacgaccgccagtcgccgccgatgatgaattccacaaatgcatggaacagccaggcggcagattccttgaaaaacaaagccatggcccatacaatatatcgtgtggctaataaatacgccgcgcattgctagttgctcttaatgaaattaacttccaggaattacctacatggcagcaacgatgcagacgacaaccacgatcactttgacgactgtcccgaagtgcaacaaagcaactgcaacagtcgcagcaacagtcgcagcaattcgaaaaggcaacaatggctgcttaggcaaatgcaacaagccatcggccatggaaattaaatggaagcctgcaaaaagtttcacgcactcgacacgttaatagagtcgtagcacccagagcaacatcaggtccaccagctgcagcagcagcagcagcaaaaccaccagcaccaacacccaacacca

SEQ ID NO: 11744 - DNA, 1553 bp, DROSOPHILA
ctattttagcacacaccgcgtaaaagcgacgccgatttcaattttcaacgaattattaaaagtgtgcgaaaaaccatacaatggccgatgtggacgattttgattctctgtccaatgctgagttgcgcgccaagatgctggcacaggggctgcccaacatccccgtgacggatagcagccggaaggttctagtaaagcgtctgcgcgcctccattggtggccaggcgtcgccggccgctagtcccaagaagaccaacaggcgggagaccctggctcccgcacctggtgcaccatctgctccggcggcagcctccacgccggtggacaagctggatggcaacaaggtggcgcccgccacaaaggctcggcgcacaattaccgctgcagaggccaaggaaccagtgcgtcgattacccgaggaagctatacgccgacgccccgacgaagccgaccgcctacgatccgaggagcccgttgccgccaggaagccaacaactgctcctgctgctcaacccgtacagacccggcgcacttccacctcctcggggtctgaaaggaaagtagtggagcccttgaggaagccagaaaccattgttgagcaaccggcttcctcgaagcgcgctgatcgagaggagaattatcttaaggtcaactccctgattgtcctagagtccgatgaagaagaggacgagcagctagtccaggctgcagatctggtggagcaggagcacgcggccagacagaagaccacgaagctcgcaagcagcggcaccactacgtacgagtacaaaagcaaggttgtggagcctccacgccgacaggtctatgaagcgacagcagctcccgtgctgccgccatctgtgccatctgccagagcgcagaccaccagttccaccaggtcctatgactatgcgagcaacccagcacccggtcgctatagcagttttgtgcgtactgcagcccaaggctatgtgactgcagaggctccgccggtggcctcctactcatccagctacaagcgtacctatgctaacgagctgagcgacgacactgattccaaggaagaccagtacgaaagcacatttgccaggaatctagctcgtttgcgagccgaacggattggagatcgcatcagcccgtattccagacgcactctggccagtggaaacgcgggtagcggttctctcggctatgagccgcgtgccaggcgctccttgcgcccgaatgataacagcgtatccgaggcctttaaccgttggttgaacagcctggagcagaagtatcacatcaagtcgaagctgttcattgtactcctcgtccttttgttaatcggcgtttattacatattctactgaccggcgcatcattgttcttatttcgaatttgtaatctagtttgtataccatgttggatatgttttgtaaacaagactgccgccgcggtctttgtatgaatcttgttttgatgtaacttgagcttgagtttgactagcatttaagctgcgtgttatccgtgttcaaataaagcccacttgcagggaatctccacagttg

SEQ ID NO: 11745 - protein, 424 aa, DROSOPHILA
MADVDDFDSLSNAELRAKMLAQGLPNIPVTDSSRKVLVKRLRASIGGQASPAASPKKTNRRETLAPAPGAPSAPAAASTPVDKLDGNKVAPATKARRTITAAEAKEPVRRLPEEAIRRRPDEADRLRSEEPVAARKPTTAPAAQPVQTRRTSTSSGSERKVVEPLRKPETIVEQPASSKRADREENYLKVNSLIVLESDEEEDEQLVQAADLVEQEHAARQKTTKLASSGTTTYEYKSKVVEPPRRQVYEATAAPVLPPSVPSARAQTTSSTRSYDYASNPAPGRYSSFVRTAAQGYVTAEAPPVASYSSSYKRTYANELSDDTDSKEDQYESTFARNLARLRAERIGDRISPYSRRTLASGNAGSGSLGYEPRARRSLRPNDNSVSEAFNRWLNSLEQKYHIKSKLFIVLLVLLLIGVYYIFY

SEQ ID NO: 11746 - DNA, 3545 bp, DROSOPHILA
cactttgcaccaccgaaaacattgccaaaaaactgtgatatatatacgtacatctatatatccggtaaaatcgcacatatgtagtttatttcccgctacagctgaatgttatctaaaatcttatttatttaaaacctccaaacattgcaaattagctagttatatagcatagttaaatgcctgagaaatgtgtaaagtaatagtaataggctactttattacaaattcaaatagtaaaataggaaatacgtgtgcacctcccgtgaaaatatcccgcaaggcacttagctatataaatatgagtcttttaacccgtcaaaccctgagtctgaactaaacagctgtcttttcctaccttcaacacaatttgtatatttttaagcatttattgcacgtactttccatatattttagcgacttcccctagtgaccatattatgtcaagttcaagactgcttacgcacatgctcggcttgggaaattaaacaatttatttaaattcgactcgagcagtagtatttgctcagcttagaagagtgaatagcagtttcttttaagagtataaatagctcatagctgggaaagagaattcaattaatagttggcccattcaaagtaaattaagtaaggtgatcatgaactaagggtacggcgctgatttgtttcttggaacaaataaatgttgaactaaagctactaaaagaaactgttattataaaaacgtgatattgatttcgttgccgttttgaagtcttaaaaccaccttcgttcacgcttgaccaattaaacaatttgcgtaaatgctaaagcttttaaaaagagcaacattaatttttttagagacaaataagttgttgatttcttaggagaaactagatgagtttagattagagatagtaaatggtaaaaaaagttatgaagtgaatcaaataaatttgttggatttgcactaaaaatattaaacaaaagggttttttaatttttgtttagccggctcaatatgacggcaaccaagcagcaagaggctgaggccgaacatgatccccaagtggtggtcacccctggagacgcctctcgcagctctcgccaagatcggggtctatggcgggatcttacttcctactggatcctcggtctgtgcaacaactacggatacgtggtgatgctgagtgctgcgcacgatattatcaagcagtttaatccggtaattacaataggattatagcacttttaatacatttattaattgttcgcctgcataattttttctttttagaatgatgaatcggaagaaagctcgtcgggaagaaactgtcacttggtttcaacaggtgccatcttgctggcagacgtgctgccctcattatttgtcaagattctaatgccattctttccattttgggtgaagtgagtactatctacaatattaaataaatttgatttgatgcattaaacttgatatgatactaacacaaaatcgcattttatttattagtttccgtatagctcttgccgtggccttttctgcagctggtttcctcctggttggattcgccaatgccgaatggatggctcttttgggtgtcatcatcacttcggctagcagcggaataggagaaaccactttcttggcctattcttcgcgatacaataagtgagttgtctggtaaaagtactaaacaaaatatcattaattccatatgtttttcttaggaatgtgatctccacttggtcgtccggaactggtggcgctggagttatcggatccttgagctatgctagcttgagatccttagacttcagtcccagagatactatgctgattatgctgatcttccctgcgatcgaggcctttgcattctggttgctgcttcgtcgtccacaagttgatatattgccggttaccacggttgagtccacggaagtcctgatcagcgatgagaagccattagttgggttcaaggaaaagctcttctatatcaagcacctcttcaaatatatgttgcccctttgcctggtttacttcttcgaatacttcatcaatcaaggattggtaatttagctttctttaattcatacaaaaaaacattcattgtcatccatttttcagttcgaactggtttactttgaagatatattcctggacaaggactcgcagtaccgctggctaaatgtggactatcagatcggagtctttatctcgcgctcctctgtcaatctcttccagctggacaagatctggctgatgtccatcttccagttcgtcaacgtggtatacttcctcaccgaggttatctggtggtacacgcctagcatctggatcgtgttcgccatcgtcctgtgggagggacttctgggcggcggtgcttacgtgaacaccttctatcggatgtccaaggagatttcgccggagcgccagcagttcgccatggccatggtggtacagtcggactcctatggcattgctctggccggatttctggccattcccgtgcacaacgccatctgtggtcttccggccgcggccagaagccttgtttggtgatacggatcgaggatcagaatcaggatcagattatgcctttactgtgtgcgtgtttagccaaataagcgtgtgtgtctgtgcatgtccctatagtattaatcactggatcactggacatccggtaaccagatagatcgttgtatagttagtatgctgctgttagactactctataagtttagtttaataaaaaaaaaaaataaacactacactgtacattcgatttcatttaatttcaacgtacccagatgcaagcacttttccgaaaatgttttccttggcaaagtttggctttttcggcacaaagtgctcacggctaaccactttgataagcacactgatcccagacagaatgcgccccacttgctctgagtttattcaactgtctccaacaaaaagcctcttaaattgtacgtatttacactacctacacattataattacttagatggagctgctcggttattaaataaacttgttgcttgtggcttctaattcggtttgatcggtttcaaatcgaacgccaaacgatcggtttggcagtgagatgccggctgagacagattgggagatcgagacccaaaccgatttggggcgagatgttacgtggaccgctcgccgtttcagttgatcggtagctgccgtgcaaggcagtcgaatattacgcgattgtctaatacgtaagttgagtaaccaagatgcggggcttatcagcgtttctgcttttgctctgcctccaacgggtgaagtcggacgaatctgctgcagcacggcgccccaacataatcatcattatggccgacgacatggtgggactagtttcgccgtcataaatcaacccatttctaaagcaaacactctctcagggcttcgatgatgtgagctttcgaggcggacgggagtttctaactcccaatatcgacgccctggcctatcacggtcgtctactggatcggctctacgctccggcaatgtgtactccatctcggggagcattgctc

SEQ ID NO: 11747 - DNA, 1224 bp, DROSOPHILA
atgacggcaaccaagcagcaagaggctgaggccgaacatgatccccaagtggtggtcacccctggagacgcctctcgcagctctcgccaagatcggggtctatggcgggatcttacttcctactggatcctcggtctgtgcaacaactacggatacgtgaatgatgaatcggaagaaagctcgtcgggaagaaactgtcacttggtttcaacaggtgccatcttgctggcagacgtgctgccctcattatttgtcaagattctaatgccattctttccattttgggtgaatttccgtatagctcttgccgtggccttttctgcagctggtttcctcctggttggattcgccaatgccgaatggatggctcttttgggtgtcatcatcacttcggctagcagcggaataggagaaaccactttcttggcctattcttcgcgatacaataagaatgtgatctccacttggtcgtccggaactggtggcgctggagttatcggatccttgagctatgctagcttgagatccttagacttcagtcccagagatactatgctgattatgctgatcttccctgcgatcgaggcctttgcattctggttgctgcttcgtcgtccacaagttgatatattgccggttaccacggttgagtccacggaagtcctgatcagcgatgagaagccattagttgggttcaaggaaaagctcttctatatcaagcacctcttcaaatatatgttgcccctttgcctggtttacttcttcgaatacttcatcaatcaaggattgttcgaactggtttactttgaagatatattcctggacaaggactcgcagtaccgctggctaaatgtggactatcagatcggagtctttatctcgcgctcctctgtcaatctcttccagctggacaagatctggctgatgtccatcttccagttcgtcaacgtggtatacttcctcaccgaggttatctggtggtacacgcctagcatctggatcgtgttcgccatcgtcctgtgggagggacttctgggcggcggtgcttacgtgaacaccttctatcggatgtccaaggagatttcgccggagcgccagcagttcgccatggccatggtggtacagtcggactcctatggcattgctctggccggatttctggccattcccgtgcacaacgccatctgtggtcttccggccgcggccagaagccttgtttggtga

SEQ ID NO: 11748 - protein, 407 aa, DROSOPHILA
MTATKQQEAEAEHDPQVVVTPGDASRSSRQDRGLWRDLTSYWILGLCNNYGYVNDESEESSSGRNCHLVSTGAILLADVLPSLFVKILMPFFPFWVNFRIALAVAFSAAGFLLVGFANAEWMALLGVIITSASSGIGETTFLAYSSRYNKNVISTWSSGTGGAGVIGSLSYASLRSLDFSPRDTMLIMLIFPAIEAFAFWLLLRRPQVDILPVTTVESTEVLISDEKPLVGFKEKLFYIKHLFKYMLPLCLVYFFEYFINQGLFELVYFEDIFLDKDSQYRWLNVDYQIGVFISRSSVNLFQLDKIWLMSIFQFVNVVYFLTEVIWWYTPSIWIVFAIVLWEGLLGGGAYVNTFYRMSKEISPERQQFAMAMVVQSDSYGIALAGFLAIPVHNAICGLPAAARSLVW

SEQ ID NO: 11749 - DNA, 5325 bp, DROSOPHILA
atattgactatcggcccccttctccctggggccaccacaaatctggctgcattgcttaatgaaaaaccagtttctcggaggtaaaaattggtatcgcattcgggccatattagcattgccttcttttatgacgctaccgtgcaaataaataaataaaactgaaaaaaaggcaaatgaattgctagctcagacagcggattgtgggagggatgggatttgtgaagcccagagctcagagaacgctttgattttgatctagtcattgtttggccgctcgaaaaaagtacacaccccctcgtctaggggcatttgggtttttttttttcttctcgcagctgccttctgtggcgtcactagtcgcaaatcgcaaacttgataaatgagaaaatcaatgccactccgagcttagtaagcctcttgctcttgtctcgtcggcttcgcttccagtgccaccgccatcggtggataactaaggttaagctcagttccaaactcaatcagaaccgaatcagtagcgaatcagatccgaaaatttccataccttgtcaggtaggtgctgcgagtacgaattagaaaggcgtccgcacatacgcaaaaatccaggtggaatcgaagaaataaaactaattaactttcatgggcgtgataatgaagacaggtggccgcaattccacatctcagatcgccggataattagtgaattcccggcaagatggcgacagcaaagttttgattttcaattagcagcctggccctctttttttttgggtaacttttgttcttgcacttagagaaaataaatagaatcgtgaccaatgggtaaaacatttgcagagatacatattaaagcctatttttttgtaaagtaaacatcttacacaaaagatgaaggatcacttagagatttttaaaatctatttttaatacaaaattaggatagcttctacatatttgttactgtgtatttatctttggcacaactttctttccatctctccagatgcctcacagtccgcagctgaagccacatcagttccaggcccacacgccgacggatcagtactcatcctatgcggacaacttcgacctgtcgctgctgccgcaggagtccgcatccattcccaccacagtcttccagtacaacgccccccagatcaaggtcgagtgcgcctgggatagccagcccatccagcagcaacagcagcccactgcgccctataccaacccctccagccaccagctgattcctccgcccgcctatccccacagtgcctatccctctccgcaatccagtccgctgcagtcggagttcgctgcctatgggcttggcagatttggcggtagctacgacagtctgaacagcccatcgccctcgctggaggcggttagcatcaagcaggagctgcacatcctgccaccctctccgccggagtccaactgcgagacgccatcacccagatcctcctgcggggagagcatcaaggccgagcccttggatgcggacatcgagagcctcatcgatctgaactctctgctgcagcagcagagtctacaaagcccacagaatctgcaggacaccaagcccgatcaccagctactgcgggagtgcctcgaagacaccagcttccagaagcgccacaatctgaagcctctggctctggaatccttcatcggaggcttggccgaagtgcgcggcgactttgagcccgtcatttcactggccctagagcatgccaaacgagaggcggacgccatctgcgcggagctgcaaatatcgcagggtgagtggggagtacacgagtccttcgaaaagtatactataacctgaatggttcctgcagatcccaatggctggtcgcccgcccaggtacacgcatggctccgatccaccttggcccagttcagattgccgccggtggccgatttggagctgcacttctgcgaaaacggagccgcactggcattactcagcgaggaggaattcgtgcgccgactaccagaggtgagtccgaaagtcaatcacagactttattgaagaggtgtcacagaaatctctaggggttttccacttgactggcaaaagtcttggaattccatctgttaatatttcattgcttccatcgagttataaagagggggcgccaagaaatgtatttttagccttataatgtgtgaactggtttgatttaatgggagccactagatacttcacatattataagccgttttgttaacgaaagtacattggagagtttaaagttctaaacttaaacaacgggttttaaattatcaaatcgaagaaagacgtaaatgcaaattttaagtggccaaaataaattttatattaaacaagtcacttggtcaaatttcaaaaaaagatgacacataaaaaagattccactcaatggacacacggtttgttgaagaaggtaatttcaaaattccacgaaaatagaagaaacctctgattaggaattgtgttgaaatgtaggcaggccataagaagtgtgactcaaaatcacacgtatgacttaactgggcgagtgccaaaatagttgggcatattacaaaatcgatcagcacaaagcaacgggccaatagcccatggcatataaaacaataacacaatgcaaatgccaatagcaaagagccaatatgcggagaggcccaatcaatgcgattgaattgaatttcgcgtacgggtcgaattgcaatggaaatggctaacaacataaacaacaaaaccaacgaagagcaaaacaaaacgaaacgataccaaacgatacgatacgaaaactaaaacgaaacaagtttcgtaactggcgttgacgtcatggctgccagccagatcggcttacaggcccattcggaatcagaaatcagaaagcaaaacgcaaaactaaagagccagagctcggtcctcaaaatcaaaaacttgaaacctgttgccagcaattaggcagagctggcggctgggcatctatctaaactactccacatccacatccacaacccattcccattaccatccagcgagcatgtgctctcggctcgtcgagagttttgccaaaaatatatcaatgattacattcgcctaggcttgttaggtgctgcttttgcttttggcgctgcttggactttggcaatcgcagagagtgcagtgagaaaggcagaaaacaaaagacttaggcgacgaacgcgcacgacaacgaaatcggagagcagtctgtcgccaaagaaaccaaaattagtaaccgtggtcatggctgtaaaggtgaaagaatgtgtgaaggttgtttggtgaaactgcagcacttggacggatgattacgagccatcgtcgcggctggggagggggtagaagaggggcacgagcgggactggcagcactcgaactgagccaacgaccagcaacgacattgcaaggtgaaagtaagtcgtcgccgttgtctctggttgttgctgccactacatactaagagcaccaatacttcttctgctgctgctgtcggtgcagcctttgcaccatggagactgcacataatttatgcacttggatagcccaagaatttccaattgatatgccgtctagattgcgatctggccaaggattaaggctttgtacccattcgaaatgtctcactttcgcctctcttttgcagagcggcagcacgctgcacgcccagttggaaatttggaagatggcctacgcggaccagcccgctcatcagcagcattcccagcagtctgcgagcactgatcactggccagcaagctatgcgatgccccatttggacctggactacaacgaggacagcgaaggtgagttcgatcaggcgaatactatttgcatagacttcaaattgatttgatcttggaagtttgactgactcgaatattcctcttctacagatgacgacgacatggaagcagatgcacaagttgcacccctgaacggcagtaccacttcaccgcccgctaccaacgcttccaacggcggtacggcgacagtaaaacgaccgaatggtggacggaccggcggtgggggctcccacatccacctgtggcagttcctcaaggagctgctggcttcgccccaggtgaacggcacagccatccggtggatcgaccgaagcaagggcatcttcaagatcgaggactcggtgagggtggccaagctgtggggtcggcgcaagaaccgaccggcgatgaactatgataagttgtcccgctccatcaggcagtactacaagaagggaatcatgaagaagacggagaggtcacagcggctggtctaccagttctgccatccctacagccagtagtttagattacaggccagttatttattgctagttataagtggcacacctgaccgacccacctgatccaagattccagatcccagatccgatccgatccaatcgatccgctgactattctcgactagccttgtgggcctagcgagcattagttttagtccttgtacataaccactcacaatcttgttaggcacgaaggtaagttcgtgcatcgattaagtttggccctagactaaggtaaaatccgcgtccgctggcgaaggtaagttcgccgtggcagggttttaagtgacccccagtttcaccgcaatcgatcgtagatctaactctgatcccgcactgcagctggtcattcggctgcatctgcgcatgtttgacttaccggcgacatctttattcaactgctgtcggtccacgcgaaggataatggctcaacaggtggatgtccggtgactggagtgcatcctggagctggaccgccattagtagtccgaggcgaaattggcctgaaggtctcagtgtccagagcactcaaagcaaacagttacaatcgaaggactaacctgacttgagcatccttcgctggcagcatgaaggtgtcgaggtaattttaggaaccatatatctatgatatatcaaaagtaagttctatgaacaacttaataagcgaacaaatgttaaatagtagttgtaaggctcgattagccgtaggttttcttgaaagttttttctcttcccctcaacgaaaaaaaaaaaaaagttaaaaatctttcgacctcgtccgattatgctatatatctcataactttatcaattatttattctttaccgggtggcggttcaatttagacgtatttcgtttcaacttattttgattatacgcaattagcataattcgtgcataattttctctagtttcgtttatgtgacgggtagcgagtttaagttaattttaatatttattcgctggcccagccgagcggtgaaattatggaaagtcaat

SEQ ID NO: 11750 - DNA, 1515 bp, DROSOPHILA
atgcctcacagtccgcagctgaagccacatcagttccaggcccacacgccgacggatcagtactcatcctatgcggacaacttcgacctgtcgctgctgccgcaggagtccgcatccattcccaccacagtcttccagtacaacgccccccagatcaaggtcgagtgcgcctgggatagccagcccatccagcagcaacagcagcccactgcgccctataccaacccctccagccaccagctgattcctccgcccgcctatccccacagtgcctatccctctccgcaatccagtccgctgcagtcggagttcgctgcctatgggcttggcagatttggcggtagctacgacagtctgaacagcccatcgccctcgctggaggcggttagcatcaagcaggagctgcacatcctgccaccctctccgccggagtccaactgcgagacgccatcacccagatcctcctgcggggagagcatcaaggccgagcccttggatgcggacatcgagagcctcatcgatctgaactctctgctgcagcagcagagtctacaaagcccacagaatctgcaggacaccaagcccgatcaccagctactgcgggagtgcctcgaagacaccagcttccagaagcgccacaatctgaagcctctggctctggaatccttcatcggaggcttggccgaagtgcgcggcgactttgagcccgtcatttcactggccctagagcatgccaaacgagaggcggacgccatctgcgcggagctgcaaatatcgcaggatcccaatggctggtcgcccgcccaggtacacgcatggctccgatccaccttggcccagttcagattgccgccggtggccgatttggagctgcacttctgcgaaaacggagccgcactggcattactcagcgaggaggaattcgtgcgccgactaccagagagcggcagcacgctgcacgcccagttggaaatttggaagatggcctacgcggaccagcccgctcatcagcagcattcccagcagtctgcgagcactgatcactggccagcaagctatgcgatgccccatttggacctggactacaacgaggacagcgaagatgacgacgacatggaagcagatgcacaagttgcacccctgaacggcagtaccacttcaccgcccgctaccaacgcttccaacggcggtacggcgacagtaaaacgaccgaatggtggacggaccggcggtgggggctcccacatccacctgtggcagttcctcaaggagctgctggcttcgccccaggtgaacggcacagccatccggtggatcgaccgaagcaagggcatcttcaagatcgaggactcggtgagggtggccaagctgtggggtcggcgcaagaaccgaccggcgatgaactatgataagttgtcccgctccatcaggcagtactacaagaagggaatcatgaagaagacggagaggtcacagcggctggtctaccagttctgccatccctacagccagtag

SEQ ID NO: 11751 - protein, 504 aa, DROSOPHILA
MPHSPQLKPHQFQAHTPTDQYSSYADNFDLSLLPQESASIPTTVFQYNAPQIKVECAWDSQPIQQQQQPTAPYTNPSSHQLIPPPAYPHSAYPSPQSSPLQSEFAAYGLGRFGGSYDSLNSPSPSLEAVSIKQELHILPPSPPESNCETPSPRSSCGESIKAEPLDADIESLIDLNSLLQQQSLQSPQNLQDTKPDHQLLRECLEDTSFQKRHNLKPLALESFIGGLAEVRGDFEPVISLALEHAKREADAICAELQISQDPNGWSPAQVHAWLRSTLAQFRLPPVADLELHFCENGAALALLSEEEFVRRLPESGSTLHAQLEIWKMAYADQPAHQQHSQQSASTDHWPASYAMPHLDLDYNEDSEDDDDMEADAQVAPLNGSTTSPPATNASNGGTATVKRPNGGRTGGGGSHIHLWQFLKELLASPQVNGTAIRWIDRSKGIFKIEDSVRVAKLWGRRKNRPAMNYDKLSRSIRQYYKKGIMKKTERSQRLVYQFCHPYSQ

SEQ ID NO: 11752 - DNA, 5856 bp, DROSOPHILA
tttatctcgcgctcctctgtcaatctcttccagctggacaagatctggctgatgtccatcttccagttcgtcaacgtggtatacttcctcaccgaggttatctggtggtacacgcctagcatctggatcgtgttcgccatcgtcctgtgggagggacttctgggcggcggtgcttacgtgaacaccttctatcggatgtccaaggagatttcgccggagcgccagcagttcgccatggccatggtggtacagtcggactcctatggcattgctctggccggatttctggccattcccgtgcacaacgccatctgtggtcttccggccgcggccagaagccttgtttggtgatacggatcgaggatcagaatcaggatcagattatgcctttactgtgtgcgtgtttagccaaataagcgtgtgtgtctgtgcatgtccctatagtattaatcactggatcactggacatccggtaaccagatagatcgttgtatagttagtatgctgctgttagactactctataagtttagtttaataaaaaaaaaaaataaacactacactgtacattcgatttcatttaatttcaacgtacccagatgcaagcacttttccgaaaatgttttccttggcaaagtttggctttttcggcacaaagtgctcacggctaaccactttgataagcacactgatcccagacagaatgcgccccacttgctctgagtttattcaactgtctccaacaaaaagcctcttaaattgtacgtatttacactacctacacattataattacttagatggagctgctcggttattaaataaacttgttgcttgtggcttctaattcggtttgatcggtttcaaatcgaacgccaaacgatcggtttggcagtgagatgccggctgagacagattgggagatcgagacccaaaccgatttggggcgagatgttacgtggaccgctcgccgtttcagttgatcggtagctgccgtgcaaggcagtcgaatattacgcgattgtctaatacgtaagttgagtaaccaagatgcggggcttatcagcgtttctgcttttgctctgcctccaacgggtgaagtcggacgaatctgctgcagcacggcgccccaacataatcatcattatggccgacgacatggtgggactagtttcgccgtcataaatcaacccatttctaaagcaaacactctctcagggcttcgatgatgtgagctttcgaggcggacgggagtttctaactcccaatatcgacgccctggcctatcacggtcgtctactggatcggctctacgctccggcaatgtgtactccatctcggggagcattgctcagcggccggtatccaatacacacgggttagtatcgattaccttttgtataccagggattgttattatcaatgatttgaatcaaacccacacaattcatatattgattaccgcaggcacacagcactttgtaatcagcaacgaagagccttgggccctgaccctcaatgccacattgatgccggagatcttcaaggaggcaggctactccaccaacctggtgggaaaatggcatctgggcttctcgcgcccggaatacacgcccactcggcggggattcgattaccacttcggctattggggcgcttatatagactacttccagagacgatccaagatgccggtggccaactatagtctgggctacgatttccggcggaacatggagttggagtgccgggatcgtggggtttatgtaactgatttgttaaccgccgaggcggaacgattgatcaaagaccatgctgataaggagcaacccctattcctgatgctcagccacttggctgcccacacggccaacgaggatgatcctctgcaagctcccgaggaagagattcaaaagttttcctacattaaggatccaaaccgaaggaaatatgcaggtaattacactttaataattaaatgcttatcccaaacatgacttatcacatatctaatctaacccctagcgatgatctccaaactggaccagagcgtgggacgtataataaccgctctgtcttctacagatcaactggagaatagcatagtgatcttctactcggacaatggagctccatcggttggtatgttctctaatacgggttcaaatttcccactccgcggacagaagaatactccgtgggagggcggcgtacgggtggctggtgcgatttggagctccgggcttcaggcacgcggctccatcttccgccagcccttatacgtcgccgactggttgcccacgctttcacgtgctgcggacatagagctggatagctctctaaaactggacgggatcgatttgtggcccgagctatccggatccgcagatgctccccacgttcctcgagagattttgcacatcttggacgacgtttggcgactttctgctcttcaaatgggacagtggaagtatgtgaatggcaccactgcctccggtcgatacgattcggtgctcacctaccgagaactggacgacctagatccccgcgacagtcgctatgcagttacggtgcgcaactccgccacctcaagggccctttctcgctacgatttacgacgactgacgcaacaacggatttctctcacccgtcgattggccgcagtccgttgtggagacctccagaggtcatgtaatcctctgttggaggagtgcttgtacgacatcttatcggatccctgtgagcagaacaatctggtttactccgagaggcactccgacgttttgaccgccctgcgaagacgtgttcaagaactaagagcaagtgcatcacgcccgggcaatcgtgccagcatgccggaggcagatcccacattgcacacctgcgcctgggagtcctttgaagtgctgaagccgagaatcggtaagtagaagttaacaatcggtactattttaagatttcttaccgagtgtattatataatagttcccttggaatgcgactacgtaggcgtaccttgttaataggccaaaaagtagaggaattaagtatacgatgcagactattggattacatcgtaaagttgtcagcataaatatatcacgtttaagttttttttagttcaataaaaacaaaagaggcaaacagaacagtttcgaaaataacgattatgcttttgctctgtaacagtacagtttaagcctaacagttccataacgactgttaattgtaactgcatctggcagctctgtattttgaaatgtaaaatgttagaaatataacaattcatgagttttcgaattttagtgattcaataaaaaatacaagactataaaccttgaaaacaacaaaaaaaaaaaaaaaaaaaaaatttttccacaccaccaacaccaaaacagctgactagcaatatgcacatgcccgtcgtgaaaagggggttgaaaagccgggcgacaggacgcaaaaaatcataaaacgaggcaaaacttcggagattgcaaacgtcatggaggaacgcgctgtgctcgctaacattgcgtccataatcaccaaggacttgctgattgatcagccgtccgtggacatcaattcaggcatttatccgctgttgaccttcgacgaggacgacgatgaggcagagattttcgctttgatgcagcgaaaacgggcgttggcttccggccggaagcgcaggaactcccaagaaccggaggaccggaaacaggacctaaagatgcccaagctggagtggcaccacccggaactcaacctactgcaccgctacacggatgcccagttcgagtcctaccttcacatgcgcaagctaacattcctggtgagtatggactgctgttcctccagttaccaggatgtgcaaagaatgtctacatcctgttaggctgttgggtattctattcgcaattttcacgatcttttaacggacggtacattcgtttcagaaaatccagcaagccctagagaaaactttatgtggaatcgcgttgccaggctatcccagtccgccggcgcagaccatggtgtccttggccctgtggaagctgtccaccgacgagcacttcgaggagatcgcccgcaagtttcgactgccctgggctctctgccagcaggtggtgcgggcattctggcactgcatctccgataattacgagagctttattaagtggccaaactcactggcggcccagcggagcaccctgcagggatatcagagactggacaaactgcgctgctttcgggaactgtttggcataataacgctgaggcgactggacgtatttctggagtcggagcacgccgatgtgcctgtggtgctccagttaatatgcaatgccgagcgaaagatcgtcgactgctacgttgagctggccatggagtacagcttcgaggactcacccattggccagacattggccctgaatccgaggaccatgccggcgggcagctatctcatcggaaacgatgtgtttcctctcaaatcctacctgatgcggcccattgaggccgagtgcttccgcaaggatgcgatgttcaacgaaatgctgcgtcccgccttcgagctggcggaacaggtactggacaccttggcacgacgtttcaataccctgtacgctttggaggcccgggatttgaacgaggtgcgcctcattgtggagagcatctgtgcgatgcacaacatctgcgaagagtacgaggacgatggactggaggatcctgggcataggtcctttagttggggcggggtggcggagggtgtcaggggcagtgagaaggactcgaagggactgcagcgaagggttgagctccttgacgaactggtggccatcgagcctggcgaataaagtaatgtttcgctcaaaataaataataattttatgtatatatgtatatgttatttttttgtaatttatttgtaagctttttatgggcttctttacagcaagagaataattttgatattattccatattcgtttaaaaaatattattttaagtttggtcagtaaggggttaatttgctcttgcagttaacagccccctggtatgtaacattttttaccgatctggtagcactgtgcctaaatcaaaacaattgcacgtgcgttgttttcaggaaaatggatgagcacgatatatttaaattgattacggcgggcgttcgcttcaccaagaagtcaaaggtaagtgaacttcagtaaaggcaaggttcacatgttaaatacatcgtttgcagaaggaaccttcatcaaaacaacaactgcagccactgccggaggtttctaaacatgaggagccggtgaaaagcgaagagtcagataaagatgatgaagatatcacagagttccgtctcttggacggggattccagcaatcaaccgaaacgcaagaagccgaagaaagagaagacactatcccccaaggaattagagattcaaaaggcagccgaagaggcaaacgagacgcggaagcagtatggcattagggtgttgggcaagaatgttcctccaccggtggacagtttcggaacattgaccagggactttaagatgctgcctcgcctgcagcagaacctactgtctcgcaactttgaccaccccacgccgatccagatgcaggccctgcccgtactcctccagcgacgggcgctaatggcctgtgcacccactggatccggcaaaacgctggccttcctcacacccatcataaatggcctgagggcgcacaagacaactggactgagagctctggtccttgctcccactcgcgagttggcccagcaaatctaccgcgagtgtgcggaactcacccgtgaaacgggtttgcgcacccacttcataagcaag

SEQ ID NO: 11753 - DNA, 3039 bp, DROSOPHILA
gcagtcgaatattacgcgattgtctaatacgtaagttgagtaaccaagatgcggggcttatcagcgtttctgcttttgctctgcctccaacgggtgaagtcggacgaatctgctgcagcacggcgccccaacataatcatcattatggccgacgacatgggcttcgatgatgtgagctttcgaggcggacgggagtttctaactcccaatatcgacgccctggcctatcacggtcgtctactggatcggctctacgctccggcaatgtgtactccatctcggggagcattgctcagcggccggtatccaatacacacgggcacacagcactttgtaatcagcaacgaagagccttgggccctgaccctcaatgccacattgatgccggagatcttcaaggaggcaggctactccaccaacctggtgggaaaatggcatctgggcttctcgcgcccggaatacacgcccactcggcggggattcgattaccacttcggctattggggcgcttatatagactacttccagagacgatccaagatgccggtggccaactatagtctgggctacgatttccggcggaacatggagttggagtgccgggatcgtggggtttatgtaactgatttgttaaccgccgaggcggaacgattgatcaaagaccatgctgataaggagcaacccctattcctgatgctcagccacttggctgcccacacggccaacgaggatgatcctctgcaagctcccgaggaagagattcaaaagttttcctacattaaggatccaaaccgaaggaaatatgcagcgatgatctccaaactggaccagagcgtgggacgtataataaccgctctgtcttctacagatcaactggagaatagcatagtgatcttctactcggacaatggagctccatcggttggtatgttctctaatacgggttcaaatttcccactccgcggacagaagaatactccgtgggagggcggcgtacgggtggctggtgcgatttggagctccgggcttcaggcacgcggctccatcttccgccagcccttatacgtcgccgactggttgcccacgctttcacgtgctgcggacatagagctggatagctctctaaaactggacgggatcgatttgtggcccgagctatccggatccgcagatgctccccacgttcctcgagagattttgcacatcttggacgacgtttggcgactttctgctcttcaaatgggacagtggaagtatgtgaatggcaccactgcctccggtcgatacgattcggtgctcacctaccgagaactggacgacctagatccccgcgacagtcgctatgcagttacggtgcgcaactccgccacctcaagggccctttctcgctacgatttacgacgactgacgcaacaacggatttctctcacccgtcgattggccgcagtccgttgtggagacctccagaggtcatgtaatcctctgttggaggagtgcttgtacgacatcttatcggatccctgtgagcagaacaatctggtttactccgagaggcactccgacgttttgaccgccctgcgaagacgtgttcaagaactaagagcaagtgcatcacgcccgggcaatcgtgccagcatgccggaggcagatcccacattgcacacctgcgcctgggagtcctttgaagtgctgaagccgagaatcgtacagtttaagcctaacagttccataacgactggggttgaaaagccgggcgacaggacgcaaaaaatcataaaacgaggcaaaacttcggagattgcaaacgtcatggaggaacgcgctgtgctcgctaacattgcgtccataatcaccaaggacttgctgattgatcagccgtccgtggacatcaattcaggcatttatccgctgttgaccttcgacgaggacgacgatgaggcagagattttcgctttgatgcagcgaaaacgggcgttggcttccggccggaagcgcaggaactcccaagaaccggaggaccggaaacaggacctaaagatgcccaagctggagtggcaccacccggaactcaacctactgcaccgctacacggatgcccagttcgagtcctaccttcacatgcgcaagctaacattcctgaaaatccagcaagccctagagaaaactttatgtggaatcgcgttgccaggctatcccagtccgccggcgcagaccatggtgtccttggccctgtggaagctgtccaccgacgagcacttcgaggagatcgcccgcaagtttcgactgccctgggctctctgccagcaggtggtgcgggcattctggcactgcatctccgataattacgagagctttattaagtggccaaactcactggcggcccagcggagcaccctgcagggatatcagagactggacaaactgcgctgctttcgggaactgtttggcataataacgctgaggcgactggacgtatttctggagtcggagcacgccgatgtgcctgtggtgctccagttaatatgcaatgccgagcgaaagatcgtcgactgctacgttgagctggccatggagtacagcttcgaggactcacccattggccagacattggccctgaatccgaggaccatgccggcgggcagctatctcatcggaaacgatgtgtttcctctcaaatcctacctgatgcggcccattgaggccgagtgcttccgcaaggatgcgatgttcaacgaaatgctgcgtcccgccttcgagctggcggaacaggtactggacaccttggcacgacgtttcaataccctgtacgctttggaggcccgggatttgaacgaggtgcgcctcattgtggagagcatctgtgcgatgcacaacatctgcgaagagtacgaggacgatggactggaggatcctgggcataggtcctttagttggggcggggtggcggagggtgtcaggggcagtgagaaggactcgaagggactgcagcgaagggttgagctccttgacgaactggtggccatcgagcctggcgaataa

SEQ ID NO: 11754 - protein, 996 aa, DROSOPHILA
MRGLSAFLLLLCLQRVKSDESAAARRPNIIIIMADDMGFDDVSFRGGREFLTPNIDALAYHGRLLDRLYAPAMCTPSRGALLSGRYPIHTGTQHFVISNEEPWALTLNATLMPEIFKEAGYSTNLVGKWHLGFSRPEYTPTRRGFDYHFGYWGAYIDYFQRRSKMPVANYSLGYDFRRNMELECRDRGVYVTDLLTAEAERLIKDHADKEQPLFLMLSHLAAHTANEDDPLQAPEEEIQKFSYIKDPNRRKYAAMISKLDQSVGRIITALSSTDQLENSIVIFYSDNGAPSVGMFSNTGSNFPLRGQKNTPWEGGVRVAGAIWSSGLQARGSIFRQPLYVADWLPTLSRAADIELDSSLKLDGIDLWPELSGSADAPHVPREILHILDDVWRLSALQMGQWKYVNGTTASGRYDSVLTYRELDDLDPRDSRYAVTVRNSATSRALSRYDLRRLTQQRISLTRRLAAVRCGDLQRSCNPLLEECLYDILSDPCEQNNLVYSERHSDVLTALRRRVQELRASASRPGNRASMPEADPTLHTCAWESFEVLKPRIVQFKPNSSITTGVEKPGDRTQKIIKRGKTSEIANVMEERAVLANIASIITKDLLIDQPSVDINSGIYPLLTFDEDDDEAEIFALMQRKRALASGRKRRNSQEPEDRKQDLKMPKLEWHHPELNLLHRYTDAQFESYLHMRKLTFLKIQQALEKTLCGIALPGYPSPPAQTMVSLALWKLSTDEHFEEIARKFRLPWALCQQVVRAFWHCISDNYESFIKWPNSLAAQRSTLQGYQRLDKLRCFRELFGIITLRRLDVFLESEHADVPVVLQLICNAERKIVDCYVELAMEYSFEDSPIGQTLALNPRTMPAGSYLIGNDVFPLKSYLMRPIEAECFRKDAMFNEMLRPAFELAEQVLDTLARRFNTLYALEARDLNEVRLIVESICAMHNICEEYEDDGLEDPGHRSFSWGGVAEGVRGSEKDSKGLQRRVELLDELVAIEPGE

SEQ ID NO: 11755 - DNA, 7004 bp, DROSOPHILA
acgcgcagcgaaatctcaccgtccccggctccgatatccagcaacgtgacctacgatatgatggcagatgagtagtggtcaagactaaaggcttttactcatcttacaggttcttgaccgctggcaggctgaaagccgcctgctactagcagcttgcgaaactgttcctcggacagtatgaacatggagccgcgcttcaggaacccgttgatgtccgtctgggtcatgaagaactgcaggattgagcgagccagggcgtgccacaagtgggtccagatgtttgccgaaagcgccttggtgcgctccagccagctcacggtggtggcatccggctcgagcggcacgaacttggactggaatctcggcggcagctcgtggttcaggcagtaccactgaaatgcatccagaatttaggaaaaatcatattgtttcgggatttcgagttaccttccgagtgtctatgtcctccagagagttgtcgttgtggaatttggcgtggattaccctggccagggtgccgcggggacgatacacagccatgctaacagaatagtctataattgtgcttttatttacattttctacttctgtgtgtttaacttagttgtgccatcatttttccagtttgaagaactggagtacggtatttttccagggctggattgcagagttgcactttgatcagctgaatgcgattggtaaaggtatatcgatatgtaggcgtgacagcctaatgtaagtgtattattatttataatgtataatttcagaaattaattaattaatttgtagccgcataaaaaaaattaaaatatgatgttatatttgatttgccatttaaaagtataaatactttgtaatataaggaagacttttatatttatatctaataattgtactactcgctctgcaaacgaacgcacatcgttctcgacaacattgacgcctgttcgataacattggggcgcgatgcacgttgacattttatttagctgtcgagtaatgtatacaaaataagcggcggctattttttgttattttaatgaaacgcatcaatccgcgatgagcacgaacgttgttgtgagcatggaggagaaggcggtggccgacgacctgccgtacttcccggagaagtttccgggcaaggtgtgctgtttatgcaatctcggcgagaagagtgccttgggccagggcgagattctacaactgaaggcgcccgcgcccgccgagatcaaggataaatatccgacggatcggctgagggaggacggatccaggctgttatacgggcctaagcaggccgcttctagttcgggcgattgtcactacgagctggacaagattggacagccggacgtcgtgcatcccgccgaatttcttgacgaggggttcgtctacgtgcaccgcatgtgcatcatgtggtcgctgcgcaaaagtcagataagcgatgcagatggcgcgtactttgccacccacttcgcggagttcctggagcaaaagtgcaacttttgtggacgctacggggcctccatcaactgcaagatgaactgccgccaggtgcaccattggccgtgtgccgccgctgctgggtgccttctgatcctcgagagctttacggtcttctgcacggaacatttgagccaggtgcctgtgatatgtaagtgattcttgggcagcaaactctcacagaaactaatggaaacaaatgacttacaggcagcgacaataatgtggagtgtctgtcctgctcctcgctgggggatctgtccaagctgatcatgtgtagtacctgcggagaccactttcattcgacctgcattggtctggccaatttgccgggtaactactgtcaagtaccatcgtaccattggtttacatgtttacatgtttaatgcttccatagatacgcgttctgggtggaactgcgcccgttgcacaaaatgccagatttgcaggcagcaagactcgaacgacaccaagtacgttaagtgtgagcaatgccagaagacttaccacgcctcctgcttgcgaccagttatctcagccatccccaaatatggctggaagtgcaatgtaagcagatattgacggatattaagtgttatccaatacttatggtatttatgttccttctagcgctgtcgcgtctgtacggattgtggttcaagaactcctggcggcggcagctcctcccgctggcatagccactacacaatctgcgattcgtgctatcagcagcggaacaagggcttttcctgcccgatttgccagaaagcgtacagggcagcatcgcacaaggaaatggtcaagtgcagctggtgcaacaagtacgtttcactcgcttctgcctgattagtcttgcttattatatggattcgtttcagatttgtgcacagtacgtgtgacgaagaggcggatttaacggcctaccacaagaagaaggagcaaaacccagattacgactacgtgtgtccgaattgcaagagtaattcgtcgggcccgggatcatcccaacagacaatcgactcgatcgtgctgtccgccatggattcgtcgtcggagcaactgagcctcaaggaaatcgaacttgacccgctggagggcaaacccacaatggatccatcgagcgatgagctccacaagctacccaccggcaagaaaaaagtgtgccttacgagtgttcgcggtagaagcggaaagttcgtcctacaccgcatgggtgtgatgtcgcagatcaacaagaaacgcagcacccgaggcaaggggcgccagcttgcgctgcccaccatctcgagcgatcgctgcctgagtcgcagcatggaaacagatctgaccagcgacaaaaagctgctgctctgctcggcgcgggataagtttatccaagcgcaagacatctgcgtaatgtgcggctcgctgggcattgagagcgattccgtgatgatcacctgcgcacagtgcggccaatgctatcatccgtactgcgccggcgtgaagccttcgcgaggcatcctgcagaagggttggcgatgcctggactgcacagtgtgcgagggatgtggcaagaagaacgacgaggcgcgcctgctcctgtgcgacgagtgcgacatttcgtatcacatttactgtgtgaatcctccgctggaaaccgtgcccacgggcaactggaagtgctcgttctgtacactgtgccagaaatgcggtcgcaatcccaccgagaagagcgagttcggggactccaacatgctcgagtgcccatcctgcaccagccaatcctcgtgtcccgtctgcaaagtctcgtacagcaacggcgagatgatcatccagtgcgagcactgcgagctatgggcgcacttccactgcgactctgtcaatgcccagctgaccattgaccactacgacaacaatgtgtacaagtgtttcaagtgccgctgctcgacgaggagcactaactccctggcggatgccaagtttggtaacgaggattcgctggccataactccccagggcagcaaaccatttgtgcacatcacagcctcctccgggccgtctttcgattctaagagtggtgccgagcgaaatcatcctaccttatccggcgatatgcccgagtctgctccagaagcgctccactggattgacggagtgtgcctgagcgaaagcggattgggcatgatcaagtcattgtccacggagatcaaacgcaagcgcaaaatgcgacaagccctcggcaatggcaaggatggacaattggaggccgccgccgaggaagcgctggaaaagtacaaagacggcatggtctgggatgggacggagaacgctattcccgagggtttcaccatctccattaacgacgagggagtgaacatattacgcaagaagcgacagcgcaatctgcagaagctgggcattggtggattctccgttcgcaaccgaggtctcaagaaggacagcgaggagacgacggccgttgaccaaataaattcccttatgaccatggacaaaaagaagaaaatcatacgaaagaagcagaagaacaagctgattgaagcctatcccgtgtacttgcaagaggccttcttcggaaaacctctgctggaaggtggagagcttgtcatggccgatacagattcctctgacgaaattgatgcgtccatgaaggtttacttcacgcggcccgagggcaagagtcctgccaaccaggacacactggcggtgaacaagagtccagcgaagaccgtgaagaaagttaaagctgagttgaaaactgagaacaaaactgttttcattcagcaaatgcccatgggaatccagaacaaaaacggaacgacgccagtgtctaatgtttttggtaaatgtttaaccaacccactgaccactttattcccaggttgtatcgtttaccatttttgcagatcccttgcaagcggagatttcgaacactgtctttgctaaccggcatcctttggatgcgttggcttcaccaaatgttccggaactggacatggctaactctgttagtacggttccatcagctgaagtcattgaaaaaccaatgcggtgagcctcatgtccatatgccagtctattctaagcttattaatttgttcttttttctttctcaaagggaatcacctgcggtcctggtcgacagtttcatggtccccaaccagttgccacaggaacagaagtttcacaatcagctatatttgggcggaaatactttggttaatcccgcccagcagcttcagttccgtcagcaggcaccacaaaatgccaataagcagaatatgcaaactataatgagccaagtcgttttgcaaaccgaaaagagaccagaggaggagcagaaggttgtggagcccgtgacggaaaccctgaacgctggcactcaaaagacggcggagaaaatgcgcaaggatgagggtatgagggtgcatttaaatagtgtaggattcaaatgctcatcaccccatttgttttgcagatcttgggctcatggccaccatttcggccgtgctgtatgccaatactgagcatcccaacctgaaggagttgtttccgatttggaacgaccgctgcaagcagattctgaagaggtggcgctcgctgtgcaacgagaagaaggcgccgttcttgcagaaggccaaggacaatcgctcagcactgcggcagaggcgggaacagaacaaaatacctatgccaccgaaaccacagaagcaggaggaaatgggaagagtgtggaaacaaccgcccaagctgaaggaagaccagccgaacatgtttgtcacgtacagtaagtgctgcagctcaagacttgttttagttgctctaacccttgttttttcgtctagatggaaacgcctacgatatgggcaactatgttggtggctcggcgcaggcagcgtccaataatcccaatccgcatcacgtgatgccgaacgttaacgataatctggtgattaaggccacgatgcaaaggactcaggtgcacacgacagcagccagcaccttgaaaatgaccaccgtggacaataggctggagttgaacacggcggtgtacggcacggaacccattggcgacaagaagctcaggaacctgctgcagaagaacagcacggagccgatgctcatgggggccaactcggacttgttcttgggcaacgatgtaatgcggctgggaatgatgcagaacacacccattacgcagaacaatcccatgctgagcataagtggaaaatctcagccatctgaaggcaggtccttggagcaggatgtgaagttgggcgagccgcaggaggcaacctcttccgccgtggagttggagaatgtcggattcagcgaccttctgggaggactcggcgagggcgacgacgacgacctactcaagtcgctcacttccgaaatgggagacgacttcaatatcctggagtacgcggacccagaactggacgtcaatgttctcaactccctagattttgatgacaatgaaaagtgctctacataggagaagcggaatcgtttaaattgaaataaagaaaatgcaatatttaatagaaagcgccacttttgaatgcagcctcttttggcgccaaaccccattcttcatcgattgccgtataccatatcgaatttgtatctcttcggcacagaaaactggttttctacgcggtttgcactgttgttactttttattttcagctaaccatccagatgaccagataatgcagttgttcagtagtttccactcaatcctaattgtttgctgtgttctcttaattgatggaacgcactcgaaactgaatcttaaatatgccattttgaggcaaaagcaagcagcaaaggcaacgcaaaatgacactttgggtatggatgtgggagaaagtttctgctggacgagcgtatcatgtcgatgtttttgtttatgaagcccaccagcagagaatcaaatatgatgcccagaagaccatgaaggtgatgttctacaagaacaacaccaaaaccatggagacttcggcctacgacgatgcctacgatctcagtggctcgggttgctcgcccacggacaagtttgccatagttctgcatggatggatccaaagttgttcggacgagtgggcgctgtcgcttattgaaagtgagcattttttgcatttttttcaatgccaaagttgaaagctactcgaaatatgcattttaggactcagttactaccgcggcggatgcgtgatatgcatagactacagtgtggtcgccagttcctcgtacatgcggtgggtagtagtagtagtctgaccccaaattctcattatccgacttttaaaggctgtacacaaactttgacaccctcaccggcgccatatcgtccattatcctaacactgttcaggcagggattcgatccaaaacgaggctatatgtttggcttcagcttcggcggacaactggcttcggcggtgggaagatccctacggccacaccacattatcgagagcatagacagtcggt

SEQ ID NO: 11756 - DNA, 4417 bp, DROSOPHILA
taatgtatacaaaataagcggcggctattttttgttattttaatgaaacgcatcaatccgcgatgagcacgaacgttgttgtgagcatggaggagaaggcggtggccgacgacctgccgtacttcccggagaagtttccgggcaaggtgtgctgtttatgcaatctcggcgagaagagtgccttgggccagggcgagattctacaactgaaggcgcccgcgcccgccgagatcaaggataaatatccgacggatcggctgagggaggacggatccaggctgttatacgggcctaagcaggccgcttctagttcgggcgattgtcactacgagctggacaagattggacagccggacgtcgtgcatcccgccgaatttcttgacgaggggttcgtctacgtgcaccgcatgtgcatcatgtggtcgctgcgcaaaagtcagataagcgatgcagatggcgcgtactttgccacccacttcgcggagttcctggagcaaaagtgcaacttttgtggacgctacggggcctccatcaactgcaagatgaactgccgccaggtgcaccattggccgtgtgccgccgctgctgggtgccttctgatcctcgagagctttacggtcttctgcacggaacatttgagccaggtgcctgtgatatgcagcgacaataatgtggagtgtctgtcctgctcctcgctgggggatctgtccaagctgatcatgtgtagtacctgcggagaccactttcattcgacctgcattggtctggccaatttgccggatacgcgttctgggtggaactgcgcccgttgcacaaaatgccagatttgcaggcagcaagactcgaacgacaccaagtacgttaagtgtgagcaatgccagaagacttaccacgcctcctgcttgcgaccagttatctcagccatccccaaatatggctggaagtgcaatcgctgtcgcgtctgtacggattgtggttcaagaactcctggcggcggcagctcctcccgctggcatagccactacacaatctgcgattcgtgctatcagcagcggaacaagggcttttcctgcccgatttgccagaaagcgtacagggcagcatcgcacaaggaaatggtcaagtgcagctggtgcaacaaatttgtgcacagtacgtgtgacgaagaggcggatttaacggcctaccacaagaagaaggagcaaaacccagattacgactacgtgtgtccgaattgcaagagtaattcgtcgggcccgggatcatcccaacagacaatcgactcgatcgtgctgtccgccatggattcgtcgtcggagcaactgagcctcaaggaaatcgaacttgacccgctggagggcaaacccacaatggatccatcgagcgatgagctccacaagctacccaccggcaagaaaaaagtgtgccttacgagtgttcgcggtagaagcggaaagttcgtcctacaccgcatgggtgtgatgtcgcagatcaacaagaaacgcagcacccgaggcaaggggcgccagcttgcgctgcccaccatctcgagcgatcgctgcctgagtcgcagcatggaaacagatctgaccagcgacaaaaagctgctgctctgctcggcgcgggataagtttatccaagcgcaagacatctgcgtaatgtgcggctcgctgggcattgagagcgattccgtgatgatcacctgcgcacagtgcggccaatgctatcatccgtactgcgccggcgtgaagccttcgcgaggcatcctgcagaagggttggcgatgcctggactgcacagtgtgcgagggatgtggcaagaagaacgacgaggcgcgcctgctcctgtgcgacgaaaatgcggtcgcaatcccaccgagaagagcgagttcggggactccaacatgctcgagtgcccatcctgcaccagccaatcctcgtgtcccgtctgcaaagtctcgtacagcaacggcgagatgatcatccagtgcgagcactgcgagctatgggcgcacttccactgcgactctgtcaatgcccagctgaccattgaccactacgacaacaatgtgtacaagtgtttcaagtgccgctgctcgacgaggagcactaactccctggcggatgccaagtttggtaacgaggattcgctggccataactccccagggcagcaaaccatttgtgcacatcacagcctcctccgggccgtctttcgattctaagagtggtgccgagcgaaatcatcctaccttatccggcgatatgcccgagtctgctccagaagcgctccactggattgacggagtgtgcctgagcgaaagcggattgggcatgatcaagtcattgtccacggagatcaaacgcaagcgcaaaatgcgacaagccctcggcaatggcaaggatggacaattggaggccgccgccgaggaagcgctggaaaagtacaaagacggcatggtctgggatgggacggagaacgctattcccgagggtttcaccatctccattaacgacgagggagtgaacatattacgcaagaagcgacagcgcaatctgcagaagctgggcattggtggattctccgttcgcaaccgaggtctcaagaaggacagcgaggagacgacggccgttgaccaaataaattcccttatgaccatggacaaaaagaagaaaatcatacgaaagaagcagaagaacaagctgattgaagcctatcccgtgtacttgcaagaggccttcttcggaaaacctctgctggaaggtggagagcttgtcatggccgatacagattcctctgacgaaattgatgcgtccatgaaggtttacttcacgcggcccgagggcaagagtcctgccaaccaggacacactggcggtgaacaagagtccagcgaagaccgtgaagaaagttaaagctgagttgaaaactgagaacaaaactgttttcattcagcaaatgcccatgggaatccagaacaaaaacggaacgacgccagtgtctaatgtttttgatcccttgcaagcggagatttcgaacactgtctttgctaaccggcatcctttggatgcgttggcttcaccaaatgttccggaactggacatggctaactctgttagtacggttccatcagctgaagtcattgaaaaaccaatgcgggaatcacctgcggtcctggtcgacagtttcatggtccccaaccagttgccacaggaacagaagtttcacaatcagctatatttgggcggaaatactttggttaatcccgcccagcagcttcagttccgtcagcaggcaccacaaaatgccaataagcagaatatgcaaactataatgagccaagtcgttttgcaaaccgaaaagagaccagaggaggagcagaaggttgtggagcccgtgacggaaaccctgaacgctggcactcaaaagacggcggagaaaatgcgcaaggatgaggatcttgggctcatggccaccatttcggccgtgctgtatgccaatactgagcatcccaacctgaaggagttgtttccgatttggaacgaccgctgcaagcagattctgaagaggtggcgctcgctgtgcaacgagaagaaggcgccgttcttgcagaaggccaaggacaatcgctcagcactgcggcagaggcgggaacagaacaaaatacctatgccaccgaaaccacagaagcaggaggaaatgggaagagtgtggaaacaaccgcccaagctgaaggaagaccagccgaacatgtttgtcacgtacaatggaaacgcctacgatatgggcaactatgttggtggctcggcgcaggcagcgtccaataatcccaatccgcatcacgtgatgccgaacgttaacgataatctggtgattaaggccacgatgcaaaggactcaggtgcacacgacagcagccagcaccttgaaaatgaccaccgtggacaataggctggagttgaacacggcggtgtacggcacggaacccattggcgacaagaagctcaggaacctgctgcagaagaacagcacggagccgatgctcatgggggccaactcggacttgttcttgggcaacgatgtaatgcggctgggaatgatgcagaacacacccattacgcagaacaatcccatgctgagcataagtggaaaatctcagccatctgaaggcaggtccttggagcaggatgtgaagttgggcgagccgcaggaggcaacctcttccgccgtggagttggagaatgtcggattcagcgaccttctgggaggactcggcgagggcgacgacgacgacctactcaagtcgctcacttccgaaatgggagacgacttcaatatcctggagtacgcggacccagaactggacgtcaatgttctcaactccctagattttgatgacaatgaaaagtgctctacatag

SEQ ID NO: 11757 - protein, 630 aa, DROSOPHILA
MEEKAVADDLPYFPEKFPGKVCCLCNLGEKSALGQGEILQLKAPAPAEIKDKYPTDRLREDGSRLLYGPKQAASSSGDCHYELDKIGQPDVVHPAEFLDEGFVYVHRMCIMWSLRKSQISDADGAYFATHFAEFLEQKCNFCGRYGASINCKMNCRQVHHWPCAAAAGCLLILESFTVFCTEHLSQVPVICSDNNVECLSCSSLGDLSKLIMCSTCGDHFHSTCIGLANLPDTRSGWNCARCTKCQICRQQDSNDTKYVKCEQCQKTYHASCLRPVISAIPKYGWKCNRCRVCTDCGSRTPGGGSSSRWHSHYTICDSCYQQRNKGFSCPICQKAYRAASHKEMVKCSWCNKFVHSTCDEEADLTAYHKKKEQNPDYDYVCPNCKSNSSGPGSSQQTIDSIVLSAMDSSSEQLSLKEIELDPLEGKPTMDPSSDELHKLPTGKKKVCLTSVRGRSGKFVLHRMGVMSQINKKRSTRGKGRQLALPTISSDRCLSRSMETDLTSDKKLLLCSARDKFIQAQDICVMCGSLGIESDSVMITCAQCGQCYHPYCAGVKPSRGILQKGWRCLDCTVCEGCGKKNDEARLLLCDENAVAIPPRRASSGTPTCSSAHPAPANPRVPSAKSRTATAR

SEQ ID NO: 11758 - DNA, 6913 bp, DROSOPHILA
agatcgaaaaacaaaagcaaaagacatgacatatgtagttagctgatatatacaaaacttctgttcttctggttagttgcaatactttgttgttatatataaaacgaaagcctttattcacgtaaaatacatttatttaatgatttatgtagttgaccgcctaaatcgcttacgactcgcgcttatttcaatattcacaacaattacaataacgaattttccttgaaattaagcctaactacaaaaaagagttgagaggaaaagcacaaagttcggtattccttgctgtcgatcgattcaacattcacaattagtttacacttataaaaaatatgctagcgtcgagtaatcggacttgtcctcttacttacaatgaatttttgttatcaagtgcgctgggccaagcggtttgccggtctcgccaatatgtcttagttctaggagttaacaaaaggagttattgcacttaaatcgagtaaagcgagaaacgaagctctatgcaaaaaaggctgctcttgtacaaactagtgttaaaaaccgactgatcgttaatcgtgttaaagtagtttgatttaaaatacatcgtacatcgtacatcgtcgtactacgcctaacatttacactcggctacacttaatccaaaaaatttgtcatacaaatattgcacaaaaatggatcggactgtgagtttgcacacccatgtgcgcactcgtgtttcaatgtgcagcacatggcaaaaccttcaatcaagtggtggtacgtgttcacatacataatcactaaagtacggtgttcggaaacctaaagaccacaatatacatatacaatatatacaaatgaagatgcaattttcgctaaccatccgtccatcccaccgtgtctggtataaaaatatatagtatagcgtaggccaaaaaagcaattgctgcattcagctggcgacattttaaagatgcggtgcgatgcgatacgatgcgatatctgatccctcaatacccgattacttaagtcgctgtgtcacattggccagagccacggcgaaggcctggagggcggagaaaggatactggaaatccagggtataggcatttccatcaatgcgaccgaattgcatgacctgttaagtggattcaaatgttatttgtgtgctcctgcagattgcctgcgatgctcagctcacctgcttgccacgaaactcgatttggaagttcttggctgactcctgggtaacgcgtccgccaaagtccagctggtacacctgactcatctcattccacatgggcgccttgttgtgcatcacaaattcacgacgcactggcgccggattggcacaactagcactgccattgggttcaatcttgccgcgctttagctgtggataaagagttgtccatcaaaatattatgagaatattgattgatcagcttaccttctgacgcagttgagctttttggaaggtctccaggtcgcgatactgcttgccattgcccgcattgttgctctcctcaccggatccattggtctggttaccctcatcatcggagctctcgataatgctctgttttttgcgctgacgccgattcaaaagcggtgaattcaatatgtggcgaatgggagagttgctctgctgccttttgttctttttgctggctgccggagatgcaggagaacttcgaggcagtcgttgtggggttgaaggaggcgtcaaacgaccctcgtctagatctcgaaggcggcttattatgttctctaaagtggtgagagcctagaatatcaaatatgggttactaaagttcatccatacgaacacaattcactcacctgagtatgcagagaaaccgaagccttcgcctccactggtgtagcttccactgtgccacaagcggcacctgtgatctccggctgtggctgacgctctaaagtactggcattactagaaccattaacttgcgcctgtgctggctgttccttgcgcctccaacgcacctcggacagctgcttcacaaagctgaagccattgtcctgctttctgcccagcagtggagtggagttttcagtgccagccgtttccttactgcggccgattccaaatcgatgtttcctcgtaaaaagtggcgagtctgtgaagctagtgataacatcgaagcgtttcttgggcgctggcttggcctgcaccgcaggagactccttggccggctccaccgcgggcacgactgctgtaatctcatccaggacggagctcgccgagggctgacaccgtttgcaggcactgctggggctcatgttgttgcggcacttgaagcacaatgtgttggccgcactgctgcaggcgctgctatcggatatctcctgcagcttgcgcaccacctgctcgtgctccttgctggacagcttagtctgtagggacaacaggtcgcaggagtctaggctcttggacttcccagtttgctgcagcttgtggcgccgggcatcctcctgctgttgccttttccggcgattcctcttcttgtccaccaatatcagccgcttgtttggcgcatccttacgcagagcggacagcgcttcgtcggatggcgtgatggcaaccgaatccagatagccgacgctgcagctgcgtgtgatggaatcgggcaaagcaggagctattgaaaccaccgttggcgttcgtttcatgctgctgctacttggcgtaggcgttggcgactgcgtctcctcatcgatatacaacatttcccgtcgcttggccgtcgaagatgtggttggtgccgtgcacttaacccgtgcatccattcgctccagatttagattgaggttcagcggcactggattcacatggctgttggccgagcgcacgggctccgacatcagagcattcttcacctgaaccacattattggcatagtccgcattgctcgagtaggacatcagggtggtctggccagcggcgggcactgctggacgctcgaagatgatgtccgaaggagccactgcattcttgggactctgcagcgtgggcactgctccatcgcagtacagtggcgagatggcgtgacgcgactggcagctggaattggagctggagcggctgtagctgtttttgaagctgctgatagttttgggacgcgttatgctcttactgcagctgggtccaggacccgagccattcgagggcgcctggtgcagtagcacagtggttgactggctgcctgcagctcctgcctcctgggattcattggatgaatcatcatcgtagctctccgctcgcgctaggggactcaagcccgccgacgagccagatcctcgttctccgttcacagtcaatgagttcttgtgtcgcgccaggattcgatttggacgtggtgacatgggcgctatcaatggtgcagatgctccatcggtgaggcgacgttgcggtattataggcggctttaaggaagccccatcctgagcggtgatcacattaacctgcggcactgcatcgtgatgtattccctggtgctggtgatgctcatcctcgtcctcagagaatatgttcggattaaagctgggatcgggaccaggtggaaaatcgtcgcgcagctcggtgatgaccagcgtcatttgacgcggctgcaaatgcagtagggacgtcttataagttacttggcctaaattggctgggacggttttggcaagtccatggatcttgaacttggttccccaaatgttggaggtcacctcgaccagcttgacttcctgcttgagaaaacgaaaagaatcagtgatggcgtgggtcttctctggcagtgattggcccctacctccggcagtgtgtccacataggccagttcatccaggctatcgggatcgttgcttaccccgccaccagaagcgctcagccgatcgcccgcctgatggcgtctctttggacgcactcgcttcttgcgaggagtgcgtggggagccaaaccgtgatctctcctcgaagtcactgtctgatgagtcggtgcgcccactgttccccgtggtggtggactggctggagcccgaggagctcttggcctcggcggagtattgaaagtacaagggggaatctgccaaaggaatttatattaaatagcattgtatttctttagttattgaaatatttaccattaacttggggatcgaagattacaaactcaggacgaatcttggaggtgcgcttgcccttgagcagcggcaccaagccgcccagatactccagatacagcgtatagcatgtgccggagctcagattggagtcgtcgtcgtgccggatcatggtgcagtgcagccgagtggagcagagcggtggtcgcgaaacaaaatcccgcagcgacttgaggtcaggtacacagcactgtatatcaaataatttaattagtaaagcataataatgcgtaataaacataacttactcttatcgtttgagcaaacagattgccaatgagagacttaatcctagaaggcaacggcagcaggggcagcagcgactcggatccgacgctcgcctggatctcgaggcggcacagcagctgcagggaggccacccgtctggagacccaggcgatgtgaacctgtgtccccgtggcgatgaacagtcgcttgtcgttgtggccccaggtgatggccgaaacggtggcggagctgcatggaatgtgagcctgatacagacaggtgcccgtttccgtgtagaacttgaccagattcgtgtagcaactgggcgtgcccatgtcttctgtcttcgttccgtcgactcccgttcgcagggttcccgcgacggcgagcagctcgcgagagttgctccactccatgaccatgccaagggcgccattaaggcatgtgttgatatgtgcgggtgagacgtcgtcaaacgactttagcaaatagatatatccattctggaagcttactgccaggacaaaggaacgcttggctatgggaaagggaaataatgcggtattacaaagtttaacattttccattttggtcactcacccgcattggttacaccgggctccgcctcctcgccctcctccatcttgaacttctcgcaggaccaggccatcgaggtgatgggcacatcgttggacagctgaacctgcgacaccatcgctccgtgaacatccatcacaataacctgaccctgggttgtgccgaagtacacctgctggtcgtcgggcgtccaaatgccgcaggtaatggtggactctagattgagcatggatgaccaatatcgctgcccagccacggatcctaccagaacgaagccatcctggtagcagatcagcgccatgcggccatcgtgtgaccaggagaagtgggtcaccggtgtgttccgatcgttgatcagctcgatggaccagcgaccctcgtacttgatccacacaaagatgatgcccgaactatcgcaggaggctagcttttgatacggctcattccacttgaccaggataacctgttggccaaatattataggcgctttaaaactctgtattgtgactacacaacttacatccgatctatgcccgcgcaggttgtagttggtcctcaacggatagtccatgttcttgcggcaatgtgaggtggtaaaggttacgcccacaatgccgcgcacattgcccgtggccagccatccctcctggtagtagttggtgcggttcaacttccatccctcgtcctggaaaaaaggagaagaaaaggaaagccacttgaatacgatgtccacagctgccgacagctgcttggcagttcgcctaagcagtcgccaattgcgagtcaagtgcccgtttactggcttccaaaacggattaccgcaggctagagacccgtcgtccctggcccattcacacatcttccaccatcgacaggcggccggttggcttggtaaatatgctccactttccgactgcatcactttattcctcactctttgagccgatcaacccaagccagctgcctatttcacagcccgaggctgggcttttttactcaactgttgtggattcctaggaatgcctcagcagctcaccatggcgatgacaaggaattctctttaatttaggcatgtctcagattctggctccattaggagcttaagtaaaacaatccttttttattcatcaattaacgaagtaagcccctcggagtaaactgagcatcatgtttataatctcatgtaataaagtactttatgtgaaactacatatatgggtttgagtttcttttgcttaactatatttaaactctgctcaagttctttgtttttacaaaaatctcaattaattccctttttgtgcaatcaaaatcagcaatcaatcagtacgtagctcaaaacgaattcgcttatataaaggtaaatgagaaacttgcacttgtttgggaatgaattgaaagcaattatgccatccaattaacatttcaaaagcttcactcagtcgccgccagtggagcattcattctgcaacttttaactgggtttgtttgcctgctgggcattttcccgctgcgggctttctttgggaaaactctttgccagtttatcaactgcagcagcagctgctcctcctgctcctcctgctgcagtggcactcaaccgcagttcctcctcctgttttacaatttgatttgattgtcgagagccgccaaccaccccaaaccaaccggaattgattgtttttccgggcggggcccgcccacaaaagcttagcctacatttcggcgcgcagcgaggaatatttcaatttaaaccaaatttcgggcgctttcagcattttggctaatccccgctaagccgaatgggcgttttttggcgcccaaatccaatttgtggggcataaattaaaatgccgccgcagtggcaaaaacaaaaatgacgaaaatttgtaatttccgttttgggcagtggacattgg

SEQ ID NO: 11759 - DNA, 4437 bp, DROSOPHILA
atgcagtcggaaagtggagcatatttaccaagccaaccggccgcctgtcgatggtggaagatgtgtgaatgggccagggacgacgggtctctagcctgcggtaatccgttttggaagccagtaaacgggcacttgactcgcaattggcgactgcttaggcgaactgccaagcagctgtcggcagctgtggacatcgtattcaagtggctttccttttcttctccttttttccaggacgagggatggaagttgaaccgcaccaactactaccaggagggatggctggccacgggcaatgtgcgcggcattgtgggcgtaacctttaccacctcacattgccgcaagaacatggactatccgttgaggaccaactacaacctgcgcgggcatagatcggatgttatcctggtcaagtggaatgagccgtatcaaaagctagcctcctgcgatagttcgggcatcatctttgtgtggatcaagtacgagggtcgctggtccatcgagctgatcaacgatcggaacacaccggtgacccacttctcctggtcacacgatggccgcatggcgctgatctgctaccaggatggcttcgttctggtaggatccgtggctgggcagcgatattggtcatccatgctcaatctagagtccaccattacctgcggcatttggacgcccgacgaccagcaggtgtacttcggcacaacccagggtcaggttattgtgatggatgttcacggagcgatggtgtcgcaggttcagctgtccaacgatgtgcccatcacctcgatggcctggtcctgcgagaagttcaagatggaggagggcgaggaggcggagcccggtgtaaccaatgcggccaagcgttcctttgtcctggcagtaagcttccagaatggatatatctatttgctaaagtcgtttgacgacgtctcacccgcacatatcaacacatgccttaatggcgcccttggcatggtcatggagtggagcaactctcgcgagctgctcgccgtcgcgggaaccctgcgaacgggagtcgacggaacgaagacagaagacatgggcacgcccagttgctacacgaatctggtcaagttctacacggaaacgggcacctgtctgtatcaggctcacattccatgcagctccgccaccgtttcggccatcacctggggccacaacgacaagcgactgttcatcgccacggggacacaggttcacatcgcctgggtctccagacgggtggcctccctgcagctgctgtgccgcctcgagatccaggcgagcgtcggatccgagtcgctgctgcccctgctgccgttgccttctaggattaagtctctcattggcaatctgtttgctcaaacgataagatgctgtgtacctgacctcaagtcgctgcgggattttgtttcgcgaccaccgctctgctccactcggctgcactgcaccatgatccggcacgacgacgactccaatctgagctccggcacatgctatacgctgtatctggagtatctgggcggcttggtgccgctgctcaagggcaagcgcacctccaagattcgtcctgagtttgtaatcttcgatccccaagttaatgattcccccttgtactttcaatactccgccgaggccaagagctcctcgggctccagccagtccaccaccacggggaacagtgggcgcaccgactcatcagacagtgacttcgaggagagatcacggtttggctccccacgcactcctcgcaagaagcgagtgcgtccaaagagacgccatcaggcgggcgatcggctgagcgcttctggtggcggggtaagcaacgatcccgatagcctggatgaactggcctatgtggacacactgccggaggaagtcaagctggtcgaggtgacctccaacatttggggaaccaagttcaagatccatggacttgccaaaaccgtcccagccaatttaggccaagtaacttataagacgtccctactgcatttgcagccgcgtcaaatgacgctggtcatcaccgagctgcgcgacgattttccacctggtcccgatcccagctttaatccgaacatattctctgaggacgaggatgagcatcaccagcaccagggaatacatcacgatgcagtgccgcaggttaatgtgatcaccgctcaggatggggcttccttaaagccgcctataataccgcaacgtcgcctcaccgatggagcatctgcaccattgatagcgcccatgtcaccacgtccaaatcgaatcctggcgcgacacaagaactcattgactgtgaacggagaacgaggatctggctcgtcggcgggcttgagtcccctagcgcgagcggagagctacgatgatgattcatccaatgaatcccaggaggcaggagctgcaggcagccagtcaaccactgtgctactgcaccaggcgccctcgaatggctcgggtcctggacccagctgcagtaagagcataacgcgtcccaaaactatcagcagcttcaaaaacagctacagccgctccagctccaattccagctgccagtcgcgtcacgccatctcgccactgtactgcgatggagcagtgcccacgctgcagagtcccaagaatgcagtggctccttcggacatcatcttcgagcgtccagcagtgcccgccgctggccagaccaccctgatgtcctactcgagcaatgcggactatgccaataatgtggttcaggtgaagaatgctctgatgtcggagcccgtgcgctcggccaacagccatgtgaatccagtgccgctgaacctcaatctaaatctggagcgaatggatgcacgggttaagtgcacggcaccaaccacatcttcgacggccaagcgacgggaaatgttgtatatcgatgaggagacgcagtcgccaacgcctacgccaagtagcagcagcatgaaacgaacgccaacggtggtttcaatagctcctgctttgcccgattccatcacacgcagctgcagcgtcggctatctggattcggttgccatcacgccatccgacgaagcgctgtccgctctgcgtaaggatgcgccaaacaagcggctgatattggtggacaagaagaggaatcgccggaaaaggcaacagcaggaggatgcccggcgccacaagctgcagcaaactgggaagtccaagagcctagactcctgcgacctgttgtccctacagactaagctgtccagcaaggagcacgagcaggtggtgcgcaagctgcaggagatatccgatagcagcgcctgcagcagtgcggccaacacattgtgcttcaagtgccgcaacaacatgagccccagcagtgcctgcaaacggtgtcagccctcggcgagctccgtcctggatgagattacagcagtcgtgcccgcggtggagccggccaaggagtctcctgcggtgcaggccaagccagcgcccaagaaacgcttcgatgttatcactagcttcacagactcgccactttttacgaggaaacatcgatttggaatcggccgcagtaaggaaacggctggcactgaaaactccactccactgctgggcagaaagcaggacaatggcttcagctttgtgaagcagctgtccgaggtgcgttggaggcgcaaggaacagccagcacaggcgcaagttaatggttctagtaatgccagtactttagagcgtcagccacagccggagatcacaggtgccgcttgtggcacagtggaagctacaccagtggaggcgaaggcttcggtttctctgcatactcaggctctcaccactttagagaacataataagccgccttcgagatctagacgagggtcgtttgacgcctccttcaaccccacaacgactgcctcgaagttctcctgcatctccggcagccagcaaaaagaacaaaaggcagcagagcaactctcccattcgccacatattgaattcaccgcttttgaatcggcgtcagcgcaaaaaacagagcattatcgagagctccgatgatgagggtaaccagaccaatggatccggtgaggagagcaacaatgcgggcaatggcaagcagtatcgcgacctggagaccttccaaaaagctcaactgcgtcagaagctaaagcgcggcaagattgaacccaatggcagtgctagttgtgccaatccggcgccagtgcgtcgtgaatttgtgatgcacaacaaggcgcccatgtggaatgagatgagtcaggtgtaccagctggactttggcggacgcgttacccaggagtcagccaagaacttccaaatcgagtttcgtggcaagcaggtcatgcaattcggtcgcattgatggaaatgcctataccctggatttccagtatcctttctccgccctccaggccttcgccgtggctctggccaatgtgacacagcgacttaagtaa

SEQ ID NO: 11760 - protein, 1478 aa, DROSOPHILA
MQSESGAYLPSQPAACRWWKMCEWARDDGSLACGNPFWKPVNGHLTRNWRLLRRTAKQLSAAVDIVFKWLSFSSPFFQDEGWKLNRTNYYQEGWLATGNVRGIVGVTFTTSHCRKNMDYPLRTNYNLRGHRSDVILVKWNEPYQKLASCDSSGIIFVWIKYEGRWSIELINDRNTPVTHFSWSHDGRMALICYQDGFVLVGSVAGQRYWSSMLNLESTITCGIWTPDDQQVYFGTTQGQVIVMDVHGAMVSQVQLSNDVPITSMAWSCEKFKMEEGEEAEPGVTNAAKRSFVLAVSFQNGYIYLLKSFDDVSPAHINTCLNGALGMVMEWSNSRELLAVAGTLRTGVDGTKTEDMGTPSCYTNLVKFYTETGTCLYQAHIPCSSATVSAITWGHNDKRLFIATGTQVHIAWVSRRVASLQLLCRLEIQASVGSESLLPLLPLPSRIKSLIGNLFAQTIRCCVPDLKSLRDFVSRPPLCSTRLHCTMIRHDDDSNLSSGTCYTLYLEYLGGLVPLLKGKRTSKIRPEFVIFDPQVNDSPLYFQYSAEAKSSSGSSQSTTTGNSGRTDSSDSDFEERSRFGSPRTPRKKRVRPKRRHQAGDRLSASGGGVSNDPDSLDELAYVDTLPEEVKLVEVTSNIWGTKFKIHGLAKTVPANLGQVTYKTSLLHLQPRQMTLVITELRDDFPPGPDPSFNPNIFSEDEDEHHQHQGIHHDAVPQVNVITAQDGASLKPPIIPQRRLTDGASAPLIAPMSPRPNRILARHKNSLTVNGERGSGSSAGLSPLARAESYDDDSSNESQEAGAAGSQSTTVLLHQAPSNGSGPGPSCSKSITRPKTISSFKNSYSRSSSNSSCQSRHAISPLYCDGAVPTLQSPKNAVAPSDIIFERPAVPAAGQTTLMSYSSNADYANNVVQVKNALMSEPVRSANSHVNPVPLNLNLNLERMDARVKCTAPTTSSTAKRREMLYIDEETQSPTPTPSSSSMKRTPTVVSIAPALPDSITRSCSVGYLDSVAITPSDEALSALRKDAPNKRLILVDKKRNRRKRQQQEDARRHKLQQTGKSKSLDSCDLLSLQTKLSSKEHEQVVRKLQEISDSSACSSAANTLCFKCRNNMSPSSACKRCQPSASSVLDEITAVVPAVEPAKESPAVQAKPAPKKRFDVITSFTDSPLFTRKHRFGIGRSKETAGTENSTPLLGRKQDNGFSFVKQLSEVRWRRKEQPAQAQVNGSSNASTLERQPQPEITGAACGTVEATPVEAKASVSLHTQALTTLENIISRLRDLDEGRLTPPSTPQRLPRSSPASPAASKKNKRQQSNSPIRHILNSPLLNRRQRKKQSIIESSDDEGNQTNGSGEESNNAGNGKQYRDLETFQKAQLRQKLKRGKIEPNGSASCANPAPVRREFVMHNKAPMWNEMSQVYQLDFGGRVTQESAKNFQIEFRGKQVMQFGRIDGNAYTLDFQYPFSALQAFAVALANVTQRLK

SEQ ID NO: 11761 - DNA, 2619 bp, DROSOPHILA
tgctggacgaccgggacgcgcaattacgtttttcacacaagaggacacgtccaatttgagagggtaactctacgctacaaaacgagataatggcgcctgatttaatcgcttttttatcccttagcatcgcgcttataataaaaaactctgggggaaccgttccggaatatatgttgcaaatgaaaaaggttcgcaaatcggaggccaagatgcgagccaagaaaccgttggatcgcgaggacatttcgaccaagatacgaccggagacgaaaggcgacgagaagcacaaatccaccaaattgaaaaaagttgaaagaaccgaaaaaatcttaaaaaatcgaaagggttatgaaaaggacttaaattcaaagcagaagaagctaggcaatattaaaacagaacttaagccagccggcaaaaggaaaggaaatgtagagaaaaaaacaaaaaataaaaataatcaaacttgatacgcgaaattaaagtaaagtgtataaaaatatcttgttttgcgtttggagctttcaaattttgtagttatacaaattttggaaattcggttgacactaaatgtttaacgtaacgtttatgttttgaatcagatatttcatacaaaaacagatttgaaaatattatactataattatatttataataatcttatggtggtacatttaccgtaaagtctcacatatactatttaggctataagaagttactaaataaatcatgttccatcgaaagttaaaacaaatggatagtaccttaaatgttaggtacttcttttatttaggaattcatgcagtaaatcttgtacctaggtgcaacacccaataacgttgtccaacacacaaaacattaaaggtttgcgtctttggttgaaagtgtggtatgtatattcccagtatatttaacatatgtttgggtgttttttgcgttgactcgcatgtattttgttgctagtgcagtacggtctcgcgcaatttcgacacgtcagaatattcttgaggatatttgtttttttgtgaagatatttgcacagttgttggcctgcattgcgcacaagtgggaagtacacgacagaaacacacactcgcagccatggtgcagaacgtggccctgctgggattggcactgattgcgatttccgcctcgattgtcgccctgcccgtgacacagaataagaaggatcacaaggaggcggcggagtcctccactccggccaccgccgacgtggaaacggccctggagtacgagcgctacctgcgggaggttgtcgaggcccttgaggcggaccctgagttccgtaagaagctggacaaggcgcccgaggccgacattcggtgattgccatttgctgcatgtcctttattgagtgcgcctcgtcgggcgacacagcaaccaaaactgggacaggcactggaactggaactggtaccggcaccggcaccggcaccggaacagccaccacatcgacaactgttgctccaacaaccacctctaccacgaccgcagaagcgaccgtgcaccacagaaggatacatcggcgcaggcgtcgcaacctaaggagactccgacacaggcgcgcagaggccgagcgaagacgccgattgggctagtcggtaaaaagtttaccttacatttttcaaagcctgcagacatgtaaatccacgcttttccgaaataaagtttctttaaaaaaatacaaagaattttgccatcactaaaagagggacaatgaaatagaatatttactgtgcatttttgaccgaataaaaagaaatttcttatttaacatgccttccgagtctttcaaattgaaacacacaatatatatactttgtcaatataaaaaaaatgtattcgacatttaattttaattaagatcttattgagtgcatccaatttattttagtttaattcctacatacatatatgtacaattatatctggtttggtgctttggaaaagtacatcgaaggaggaatttctcaattgcttaatgtggtaagtggtaagggaccctttttggtttatttattatatacaaggcttgcaaaattaagaagtgcgataaagaaattgtcgatagtagacggattctttggcacctttcgtgatacttgtttagaccagatgcggtgcccagagaaagccgatgatgagttgcactacatggtcaagtggcgcttccgccgcacggcatgaatacgttgtagataccataacccaaaaggactgggaatattcacaaggagcgccggctttcgcttgacgatgacccaatacgaaggcaacatgggtacacactcaggacgcttaacggctttcatttatggcgcagaatgaagaaggccgattcggcgaattccagtattttcgagttttagctccaccagaaggccttggcaatttgttttacaaaggagcactctctcaaatcgattctgtcagtcgcttttcatactcctgccgaggataacatgttggctatagctcagcctccagggctaacaactagccataatcgaaaacccacgtcgccgtgaagagttttaactgtcagcatccgcaggagtatgccagaacaattcggttgagttaaattcttgtttccca

SEQ ID NO: 11762 - DNA, 6047 bp, DROSOPHILA
attcttgaggatatttgtttttttgtgaagatatttgcacagttgttggcctgcattgcgcacaagtgggaagtacacgacagaaacacacactcgcagccatggtgcagaacgtggccctgctgggattggcactgattgcgatttccgcctcgattgtcgccctgcccgtgacacagaataagaaggatcacaaggaggcggcggagtcctccactccggccaccgccgacgtggaaacggccctggagtacgagcgctacctgcgggaggttgtcgaggcccttgaggcggaccctgagttccgtaagaagctggacaaggcgcccgaggccgacattcggagtggcaagatcgcacaggagctggactacgtgaaccaccatgtgcggaccaagctggacgagatcaagcgccgtgaagtggagcgcctgcgggagctggcgaatcaagcatacgagctgtccaacgacattgaccggaagcacctgaaggtgtctcagcatctggaccacgacaacgagcataccttcgagatcgaagatctgcgaaagctcattcagaagacctccgacgacctggccgaggcggaccgcaagcgacgtggcgagttcaaggagtacgaaatgcagaaagagtttgagcgtgaggcgcagaaaaaggaaatggatgaggagtcgcggaagaagtttgagaccgagctcaaggagaaggaggaaaagcataaggaccacgagaagctgcaccaccctggcaacaaggcccaactagaggatgtgtgggagaagcaggaccacatggacaagaacgactttgatccgaagacattcttctccatccacgacgtcgacagcaacggctactgggacgaggctgaggtcaaagctctgtttgtcaaggaactggacaaggtctatcagagtgatcttcccgaggacgatatgagggagcgagcagaggaaatggaacgtatgcgcgagcactactttcaggagacgcacatgaaccacgccggcttaatcagcatcgacgagttcatggtgcagactaacaaggaagaatttcaaaaggaccccgaatgggagaccatcgaccgacagcagcagtatacacacgaggagtaccaccaccaggaggcgtggcctaccaacaggcaccaccgggcgcccaattgcactaccagcatcctgaccaagtacacgcccagcagcaacagcaatacgcgcaacagcaacagcaatatgcccagcaataccaacagcagcagtacggaaacggacagcagcctgtgcagctgcaacccaaccaggtttaccaacacgctggacagattccgcagcaacaacaaccggtataccaaaatcaacctgtgtatcagcaacagcagccagtctatcagcagcaacagccagtgcagcaacagcaaaagcctgtgcaacagccggtgcaacagcagcaacagcctgtgcaacagcagcagcagcctgtgcagcagcagcagcaaactgtgcagcaacagcaaccagtacagcagcagcagcaaactgtgcagcaacagcaaccagtacagcagcagcagcaaactgcccaacagcaacccctcatatatttacttcgctccccaaactaagttgatcgagtcgattgtggcagagctgaacgtaaataaaaccacaggatttgaaaactcgcacaaactttatgaagccttgcaggcattgagccaggtccatattaagcacaagtgtaaggaattcaataagacccagggggatatcaagtttccaccaattaaggaccttccttccccgccaatttttaagtcggacaactcatctaccttacaagatgtgggcataatgattattgtaatcattatcttctttgtggttgtcagcttgacaaagtccatcgtcgaggaaaaggagctccagcttaaggtgacactgaacctgatgggtgtgggctcttgtctgcagtgggtggcgtggtacatccagaccttcataatattcttgatcggatcatcgataataacgttgttctggaaactcgtcctaccaaattctgagatatcctttatgcccttcacccactggtcgatggcactgttcgttctgctagtgctcagccactgcacgatctgctttagcttcctgatgagcagtctaatctctacaacatatcgcatctcgctggttacttttcttgccttgattgccacctatcttccctttttgattttgcactcaaagggatgttcggaaggattgaacgtgttcctcagccttttcttgttgtctggactgcaagtgttggtcgtcggcatttgcatgtgggaggactacggtgaaggtctacagtggggtaatctcttcgagacctcatggccgggaggcacgctgagcgttggctatatccttttggtcatgatattggctagctttctttccctgcttctatgcctataccttgagaaaatccggccaggcccttacggtgttccccaaccttggcatttcccctgcacccgctgctgctccacagaaagtctcttgccctatagccgtctctttaacagaatattcggcatatatagcgcggccccagatgaggaacgtcccgacctccaattgattgaaccagatcccgtggacaagatcgccggcgttcagatcagaggtcttagcaagactttcggcaagatggaggtcgtgaagaacgttagcttcgacatgttcgagggacagatcacggtgctaatgggacacaatggagcgggcaagaccacacttatcagtatgctggctggattcatttcgcccacttcggggacggctctgataaatggctttgacatccggcaggaacgaagacaggcccagagatgcattggtctgtgcccgcagcagaacgtcctctttaagcaccttagctcggttagtcacattcagctctttagccgccttcgaggactccggggcgcggaagtgaagtcggaggtgcaaaattacctgaagaagcttaatctgcaggagaagaagagattggctgctcggaatctctccggcggaacccagcggcgtctaagtgtcgcctgttctctttgtgggggagtcaaggttctcatctgcgacgaacccagtaccggattggatcccagcgcccggcgggagctgtggagactaatactggaggcgaaggagggctgcaccatacttttgacaacgcaccagttggatgacggagaggtcctgggcgatcgggtggtcatcatcagcgatgggcagttgagatgcattggatcgttgccatttctcaagaaacaggtggatgccagctgcttgatcacctgcgaagccaggaagcgatgtgacctggagaagctgacttccctgatatctcgccatgtgggtacaattcaaccgttcagtattaagggcagagatgtctgctacaagctgccactcagcaagtcaaagtacttttcctcgctcttccgtgacttggagagccaaatgaacattttgggtgttcggggattcagcttaagctcagtgagtctggaagagattttcatgagctttggggcggaggacctcaattctcgccaatcggggggtgctgagaaaagagatgacgatgaccgtgacgatgatgaggaaaacgaggttcaggatggaaatgtgcgcagctgtaaaaagcaatggagagcaatgatgaccaagaaggttatggctctgtatgacaacaaggtttacttcctgcttttgctgttgactcccattgtctactatataacgacactaatgatggccacaaagcctcatcattcgggcaggcccacgttcaacatcagcgattacggggtagataagttcacaattttgctttcagtgccggtaagcaagtcatatacggaagaacgtcgtgcagactctattgcgtcgttgatcaagggaaagttaaagttaatagtcgtatcggaacaaattaaggactacgtggatgacaaatggaagtcgagagagggcaggcgtgagattaactttgtgtcaatggctattgacactggtgatcggacgggtctgatcggttgggtcggacccagacactacgttcatgcggcgccgatgatccttaatcttgtctataatgccttggcccaggagctcattggaccgaaaatcagcatagaggttaccagcgttccatttacgctgagaaaaaaggaggattttctaattagcaataatggagatatcccaatatacgtcataggctatgtgagcatcgccatgattatattctcgagtgccgtaatccaagagagggtctcgcacatgaagatgctgcaggaggtatccgggctggagatgatcacctactggctgagtcaccttgccttcgacatggtggtcttttttatcttggtgctggccctgctgcttcccctgtacggatatgccccatggtaccttttgctgtgcgtgctcttcttcaccggattagcgggtctgatatttatctacttcttgatatcgatgctttcggccacatttctagccgtgtctatgatcctactatctgatcccatgacatggcctgatatgctggtcatgcttgggactgccatcatactctttctgttgataatgttttttgagtacggcagttgtgtttggtacagatgtaaggggtgttgcccatacagctcaaagggctcaattgaggatcccaaagtgtccagggaggctgagaaaatcagagctatggatgctgatcaaataggaactcgggcattggtcgtcaatggggtttcaaagaagtatggctgcgatcaactagccgtcaataacatatcctttgctctgaaaccgagtcattgcgtgggacttctcgggcccaatggagctggaaaaacaaccacgttcaaaatgattgttggcgagcattcgatcgacaaaggaaacatatatatctcaggctacagcatgaggatgaaacggaataaggcgatgaaggaactcggatactgccctcaatctgactcctttttcgagtttctcactggccgccagttgctaaaagtcttccttctgatatggggctttccaagcaaagacttgaataaacgatgtgaaaaactggccgatcagttcggtttcaggaaacacttggataaaaagattacgtactacagtggaggaacgaagcggaaaatcaacgctgcagttgcctgtggagcaaactcacttatttgcttggatgagcccagcgcgggagttgatcccgcctcgcgacgtcacgtttggaccattatcaacgaggtggcccaacagggaaaggccgtcctgctcacctcccataacatggacgagataaacgccctttgctcgaaaagcgttatcctggtggatggcagcatatacgccatgggatcggttcagcacgtcaaaaacaaaatagccaagggaatgacgctcaagttggttgtaaatgtacaaccggataatatggtggcaatgctcactaagattgaggatgacatctatatgacctatcccaacgcagaactaaaggaaaagtacgagtttagtggcaggttaacatttcaaatttccaaagacactagttggtcggagatttttgaatatgtcgagggcaatcgcagttcctggcacctggaagactattccctatcacagccatccttggaagatgcatttgaggagatcgcagaggaaagaaggaaaaagaagagcaaccaaatgattgccatttgctgcatgtcctttattgagtgcgcctcgtcgggcgacacagcaaccaaaactgggacaggcactggaactggaactggtaccggcaccggcaccggcaccggaacagccaccacatcgacaactgttgctccaacaaccacctctaccacgaccgcagaagcgaccgtgcaccacagaaggatacatcggcgcaggcgtcgcaacctaaggagactccgacacaggcgcgcagaggccgagcgaagacgccgattgggctag

SEQ ID NO: 11763 - protein, 1981 aa, DROSOPHILA
MVQNVALLGLALIAISASIVALPVTQNKKDHKEAAESSTPATADVETALEYERYLREVVEALEADPEFRKKLDKAPEADIRSGKIAQELDYVNHHVRTKLDEIKRREVERLRELANQAYELSNDIDRKHLKVSQHLDHDNEHTFEIEDLRKLIQKTSDDLAEADRKRRGEFKEYEMQKEFEREAQKKEMDEESRKKFETELKEKEEKHKDHEKLHHPGNKAQLEDVWEKQDHMDKNDFDPKTFFSIHDVDSNGYWDEAEVKALFVKELDKVYQSDLPEDDMRERAEEMERMREHYFQETHMNHAGLISIDEFMVQTNKEEFQKDPEWETIDRQQQYTHEEYHHQEAWPTNRHHRAPNCTTSILTKYTPSSNSNTRNSNSNMPSNTNSSSTETDSSLCSCNPTRFTNTLDRFRSNNNRYTKINLCISNSSQSISSNSQCSNSKSLCNSRCNSSNSLCNSSSSLCSSSSKLCSNSNQYSSSSKLCSNSNQYSSSSKLPNSNPSYIYFAPQTKLIESIVAELNVNKTTGFENSHKLYEALQALSQVHIKHKCKEFNKTQGDIKFPPIKDLPSPPIFKSDNSSTLQDVGIMIIVIIIFFVVVSLTKSIVEEKELQLKVTLNLMGVGSCLQWVAWYIQTFIIFLIGSSIITLFWKLVLPNSEISFMPFTHWSMALFVLLVLSHCTICFSFLMSSLISTTYRISLVTFLALIATYLPFLILHSKGCSEGLNVFLSLFLLSGLQVLVVGICMWEDYGEGLQWGNLFETSWPGGTLSVGYILLVMILASFLSLLLCLYLEKIRPGPYGVPQPWHFPCTRCCSTESLLPYSRLFNRIFGIYSAAPDEERPDLQLIEPDPVDKIAGVQIRGLSKTFGKMEVVKNVSFDMFEGQITVLMGHNGAGKTTLISMLAGFISPTSGTALINGFDIRQERRQAQRCIGLCPQQNVLFKHLSSVSHIQLFSRLRGLRGAEVKSEVQNYLKKLNLQEKKRLAARNLSGGTQRRLSVACSLCGGVKVLICDEPSTGLDPSARRELWRLILEAKEGCTILLTTHQLDDGEVLGDRVVIISDGQLRCIGSLPFLKKQVDASCLITCEARKRCDLEKLTSLISRHVGTIQPFSIKGRDVCYKLPLSKSKYFSSLFRDLESQMNILGVRGFSLSSVSLEEIFMSFGAEDLNSRQSGGAEKRDDDDRDDDEENEVQDGNVRSCKKQWRAMMTKKVMALYDNKVYFLLLLLTPIVYYITTLMMATKPHHSGRPTFNISDYGVDKFTILLSVPVSKSYTEERRADSIASLIKGKLKLIVVSEQIKDYVDDKWKSREGRREINFVSMAIDTGDRTGLIGWVGPRHYVHAAPMILNLVYNALAQELIGPKISIEVTSVPFTLRKKEDFLISNNGDIPIYVIGYVSIAMIIFSSAVIQERVSHMKMLQEVSGLEMITYWLSHLAFDMVVFFILVLALLLPLYGYAPWYLLLCVLFFTGLAGLIFIYFLISMLSATFLAVSMILLSDPMTWPDMLVMLGTAIILFLLIMFFEYGSCVWYRCKGCCPYSSKGSIEDPKVSREAEKIRAMDADQIGTRALVVNGVSKKYGCDQLAVNNISFALKPSHCVGLLGPNGAGKTTTFKMIVGEHSIDKGNIYISGYSMRMKRNKAMKELGYCPQSDSFFEFLTGRQLLKVFLLIWGFPSKDLNKRCEKLADQFGFRKHLDKKITYYSGGTKRKINAAVACGANSLICLDEPSAGVDPASRRHVWTIINEVAQQGKAVLLTSHNMDEINALCSKSVILVDGSIYAMGSVQHVKNKIAKGMTLKLVVNVQPDNMVAMLTKIEDDIYMTYPNAELKEKYEFSGRLTFQISKDTSWSEIFEYVEGNRSSWHLEDYSLSQPSLEDAFEEIAEERRKKKSNQMIAICCMSFIECASSGDTATKTGTGTGTGTGTGTGTGTGTATTSTTVAPTTTSTTTAEATVHHRRIHRRRRRNLRRLRHRRAEAERRRRLG

SEQ ID NO: 11764 - DNA, 4423 bp, DROSOPHILA
cgcgcatccagcgggccaccacactcacctcgtccatgtccctgccggcggagtgcctggttctctccgtatccatgccctcgctcaactcggagcccaagcgtcccaagagcgcgggacccaagaagaagcccggccaggccgtccactcgaagccattccgcctatattgagcctgtcgaggaaggagctgctccacaagtcgcacgtgacgtcacccaatcgaagcactcagagatttgtgcacaagttgatatcgaggcacgcacttctaaaacatgcatatgcagaatacattttatcaaaccgttgattgtttagaaccgaaatggaaacgaaacttggcatttacaacataacaataaacgactaaatgagaggcaaagttaagcacaaaatacagctgtggtttgtttgtttgtttctttatataattacagtatatattttcgtaagtattaaatctgtttcacggctactacatcgctggagccaaacggccttcgtttacatttcatttacataagacttgcgtttgattttctatatataattagtacaaaaattgtcctgggatttcgttacgtctcattgcgtctttatcatcgtgctcattgtgtgtttggaaaactgtgtgcttttcttggtttctttaggttttgtattcgtttttgattcttgttcctttcgattattcgagtcgcgtcacatttaaatgcatttagttgcctttttccatttacatcatccttttgctctacttaagccataaaagttgtttatacaattcgtttttaaagttagggtaataaataggtcattataaaataataaacaacagttgttacattttcaaaagacatcgtcaaatgagcttcaagtgattatgattatgattcgagggtcgagttagaattaaaaaaatgcgcatgcttgaatatcataaaaagtggcttctctaagagctcgtcgtcaagtgaattggcctggtttcagatttggttagctgcggattggctgccttagctcatggctatatataactataatacatttaatgggaaactaggaaatgcatagatgctcgtgatatgcgaaaccaatgtttgctgcggttgttataattttctctttctgccagatactattcgtacaatacattcgattcaattgactagatttctacatatgtagtgcattagatttatgatttatctgtggtaccgattttgttaacaatgttttttttagttgttgcgggagggaatcgtggtttgccaaatgtgtgacagcaacgatccgcagaaaaaaacagccaaacaaagagaaatttcatacgaattttgatggcagtacatttcgattcacagaatttcgtacaatatttatcgtttgtttagagtttctttccgggttcggtgccttttacgagagtacggagaattttataaataaatacatgtaattgatttgtcgatgagggcgctgcgtgagtgtcaatttgttgtggccattgtgccggtgtacgtgtcgcttccgaggaatctctatacttcgccaaagccaataacattctaccttatttacattattaaacactttcgctggcgtcgctttagcggctctggtctgagcaccgcgcgcaccgcttcctcgaacacctgaatttgcaatcggagtgggaagggaaatttaatgatgaataaggggtaggtggagggtgtgccgggcaccgatgacttaccggcttgagaccgcgctgcgtcaaggcggagcactccatgtatttcacagcgcgtatcttgtttgccagcttctggccctgctcgcgcttcagcggcgtcagtccctgctctgccaggccgctgagtgtctctcgatcttcgcgcaaatcgattttggtgcctggaatacgcccaaagatatatgtatgattctcgttttctgattgcagttttcatgtcgcttggcaacttaccaactagaatgatgggcgcatcgggacagtggtgctttatctccggataccatttcgaggtgacgttctcaaaggacgagggactcgccacgctgtagcatatcaggaaaacgtctgtctgcgggtaggatagcggtctcaggcggtcgtagtcctcctgacccgccgtatcccacagtcccagcgagacctgtattgtgtccacttgcatgggcgccgagtagttgtcgaagctgtgaaagatatcatagtaaaagttagatatcgatctgcggtttgcggctatcgaggcacaaacttacactgtgggcacatattcgccgggaaagcagtctgtcgtgtaggagattagcatgcaggtctttccgacggtgccgtcaccaacgactacacactttatgggccttccggttgacatcgtgagtgtgctgagtgtgcctgtgccgatagctgtgtactgtctgtgtgctgtgggcaaaataagatggaagatgaatgtcttcgccagcttaattcaattaattaagttctattcgaggcaataaacccgccagtgccaactgaccgcaaattatttcacagtcgtacttccttaataaaaattctttaaaatagaaacaaatgctgtagaaatacatatatgacacaataaattatcctattcgttttattaggtttttataaataaattaactaccacatcgtttttggcgcgcaactacatatatataagataaacaattgcttaaatggaatttggcaacttttaaaatttgaatatctagacaaattgaatcaggatacttgcttcctgagtcgcaaactatttatattgtattaatggaagttatacttattggagtatgctacatcgtaaagtgggaatgtccaagctgtggaagtactactgtacagagtataatggcgaaggtctacggtatatctctgggatgatcaaaggcagggctctcgaaaggtgtgtcccggccgcaaaaagaaagcaaccgcagcggcggaggcccataaagcctaataaaacgaacgagggtctcatttcggttgcggtggcactttgttttcgcaaataaaattttcaaaaatagatcatgatgggcgacacagacggggaaaaacaaaaagcataaatgggagcagcggaccaaatggcgaccgcccctccagtggcgccccttcggcggtgggcggggtcgcccgagtgttgtggtgacgcggaagccaccggcagacgcaccgcatcgagaaaaagaaacacaaaatgggaaaatgaaccgcccgaaaatagacacaattaagttctcataaccgattcaattaaagttcaacacacagaggcggcacatattgcgccacatgcaacggggctgggcgtggccgcgggggcgggtgcggtagcaatgaaaatcttttgttgtggcacaacaccgaatgggaatacaatattattttaccgttttcaccaccacctatccttttcctttgtctgtcggcaggcggcgactgttttgtacttggcttatatcactgtgcgttttccggctaccgatatgcgttcgaggcgatggtccatgcggcgcatttaaataattgattcgcactatttcgcagcggcttttacttataaatatctgtttgagggacaaaacgcagcgtccccgaataattttcgtgtttttcctttttgtttccactccacacaaacacacacccacctttttgacagcgcagcgacgctctctctctcgccgttgacagtggtgccaacttagggccagaaaatagctgacggtaaatataaaaaaatcacttaaatgtatggtaccaataactaaacttaataagcatatcatccagtataaagtcgtttttctttttccaaaactaaaataaacttttttttacaattggcacttaaaaatcagctagacttggcgtgaaaaaagagagcgggtagtccagctccgctctctcgaaactgacaagcagtgctgcaaaaggtgcagggctcaggcggatttggcattatacaatactaataggcatggttgtgggagaggggttgcaaccaattttcacattgtaaacaaaattatttatttaattctatttcgagcagaatattgtaataattacctgttaattaaaaaattatcattttaaaattatcttatgtaagttcaataccctttaattgctatcgactacgcccatgctgcctatgtccactgttgttgtttcgagcgtcgtaatgagcagatttgtttataaacttttacagagtgcaaaccaaactagttcgggctgcagacgcatttctttggctactgtaagaaatgcggaaagcgaatctcaagagggtgcccctgcccgcacagttctggtggagaaggactcgcacataacacttattggcctaaatcgcgagca

SEQ ID NO: 11765 - DNA, 1414 bp, DROSOPHILA
cggtgttgtgccacaacaaaagattttcattgctaccgcacccgcccccgcggccacgcccagccccgttgcatgtggcgcaatatgtgccgcctctgtgtgttgaactttaattgaatcggttatgagaacttaattgtgtctattttcgggcggttcattttcccattttgtgtttctttttctcgatgcgcacacagacagtacacagctatcggcacaggcacactcagcacactcacgatgtcaaccggaaggcccataaagtgtgtagtcgttggtgacggcaccgtcggaaagacctgcatgctaatctcctacacgacagactgctttcccggcgaatatgtgcccacagtcttcgacaactactcggcgcccatgcaagtggacacaatacaggtctcgctgggactgtgggatacggcgggtcaggaggactacgaccgcctgagaccgctatcctacccgcagacagacgttttcctgatatgctacagcgtggcgagtccctcgtcctttgagaacgtcacctcgaaatggtatccggagataaagcaccactgtcccgatgcgcccatcattctagttggcaccaaaatcgatttgcgcgaagatcgagagacactcagcggcctggcagagcagggactgacgccgctgaagcgcgagcagggccagaagctggcaaacaagatacgcgctgtgaaatacatggagtgctccgccttgacgcagcgcggtctcaagccggtgttcgaggaagcggtgcgcgcggtgctcagaccagagccgctaaagcgacgccagcgaaagtgtttaataatgtaaataaggtagaatgttattggctttggcgaagtatagagattcctcggaagcgacacgtacaccggcacaatggccacaacaaattgacactcacgcagcgccctcatcgacaaatcaattacatgtatttatttataaaattctccgtactctcgtaaaaggcaccgaacccggaaagaaactctaaacaaacgataaatattgtacgaaattctgtgaatcgaaatgtactgccatcaaaattcgtatgaaatttctctttgtttggctgtttttttctgcggatcgttgctgtcacacatttggcaaaccacgattccctcccgcaacaactaaaaaaaacattgttaacaaaatcggtaccacagataaatcataaatctaatgcactacatatgtagaaatctagtcaattgaatcgaatgtattgtacgaatagtatctggcagaaagagaaaattataacaaccgcagcaaacattggtttcgcatatcacgagcatctatgcatttcctagtttcccattaaatgtattatagttatatatagccatgagctaaggcagccaatccgcagctaacc

SEQ ID NO: 11766 - protein, 195 aa, DROSOPHILA
MSTGRPIKCVVVGDGTVGKTCMLISYTTDCFPGEYVPTVFDNYSAPMQVDTIQVSLGLWDTAGQEDYDRLRPLSYPQTDVFLICYSVASPSSFENVTSKWYPEIKHHCPDAPIILVGTKIDLREDRETLSGLAEQGLTPLKREQGQKLANKIRAVKYMECSALTQRGLKPVFEEAVRAVLRPEPLKRRQRKCLIM

SEQ ID NO: 11767 - DNA, 3925 bp, DROSOPHILA
ctgggctctctgccagcaggtggtgcgggcattctggcactgcatctccgataattacgagagctttattaagtggccaaactcactggcggcccagcggagcaccctgcagggatatcagagactggacaaactgcgctgctttcgggaactgtttggcataataacgctgaggcgactggacgtatttctggagtcggagcacgccgatgtgcctgtggtgctccagttaatatgcaatgccgagcgaaagatcgtcgactgctacgttgagctggccatggagtacagcttcgaggactcacccattggccagacattggccctgaatccgaggaccatgccggcgggcagctatctcatcggaaacgatgtgtttcctctcaaatcctacctgatgcggcccattgaggccgagtgcttccgcaaggatgcgatgttcaacgaaatgctgcgtcccgccttcgagctggcggaacaggtactggacaccttggcacgacgtttcaataccctgtacgctttggaggcccgggatttgaacgaggtgcgcctcattgtggagagcatctgtgcgatgcacaacatctgcgaagagtacgaggacgatggactggaggatcctgggcataggtcctttagttggggcggggtggcggagggtgtcaggggcagtgagaaggactcgaagggactgcagcgaagggttgagctccttgacgaactggtggccatcgagcctggcgaataaagtaatgtttcgctcaaaataaataataattttatgtatatatgtatatgttatttttttgtaatttatttgtaagctttttatgggcttctttacagcaagagaataattttgatattattccatattcgtttaaaaaatattattttaagtttggtcagtaaggggttaatttgctcttgcagttaacagccccctggtatgtaacattttttaccgatctggtagcactgtgcctaaatcaaaacaattgcacgtgcgttgttttcaggaaaatggatgagcacgatatatttaaattgattacggcgggcgttcgcttcaccaagaagtcaaaggtaagtgaacttcagtaaaggcaaggttcacatgttaaatacatcgtttgcagaaggaaccttcatcaaaacaacaactgcagccactgccggaggtttctaaacatgaggagccggtgaaaagcgaagagtcagataaagatgatgaagatatcacagagttccgtctcttggacggggattccagcaatcaaccgaaacgcaagaagccgaagaaagagaagacactatcccccaaggaattagagattcaaaaggcagccgaagaggcaaacgagacgcggaagcagtatggcattagggtgttgggcaagaatgttcctccaccggtggacagtttcggaacattgaccagggactttaagatgctgcctcgcctgcagcagaacctactgtctcgcaactttgaccaccccacgccgatccagatgcaggccctgcccgtactcctccagcgacgggcgctaatggcctgtgcacccactggatccggcaaaacgctggccttcctcacacccatcataaatggcctgagggcgcacaagacaactggactgagagctctggtccttgctcccactcgcgagttggcccagcaaatctaccgcgagtgtgcggaactcacccgtgaaacgggtttgcgcacccacttcataagcaaggtgagcgaggccaagcagaaacatggtgcggagtgcaagcaacggtacgacatcctggtctccacgccaaaccgcgtgaggttcctcctgcagcaggagccaccactgctggatttgtcccacgtcgagtggttcgtgctggacgaagcagatcgcctgatggaggaagggcaaaacaacttcaaagagcagttagacgacatatatgccgcgtgctcaaatccaaccaagtgcgtggccttctttagtgcgacctacactgtgccagtggctaaatgggctctacgtcacctcaaaaacctagtgcgcataaccattggagtgcaaaatagcgccacggaaacggttcaacaggagctgctgttcgtcggatccgagggcggtaagctggtggccatacgagaccttgtgcgccagggtctccagccgccggtgcttgttttcgttcaaagcaaggaacgtgccaagcagctgttcgaggagctgctctacgacggcatcaacgtggacgtgatccatgccgaaaggagtcaacatcagcgcgacaactgcgtgaaagctttccgagagggcagcatttgggtgctcatctgtacggagctcatgggccgcggcattgacttcaagggtgtcaatctggtgatcaactacgactttccgcccactaccatttcgtacattcatcggatcggcagaacgggacgtgctggacgaccgggacgcgcaattacgtttttcacacaagaggacacgtccaatttgagagggtaactctacgctacaaaacgagataatggcgcctgatttaatcgcttttttatcccttagcatcgcgcttataataaaaaactctgggggaaccgttccggaatatatgttgcaaatgaaaaaggttcgcaaatcggaggccaagatgcgagccaagaaaccgttggatcgcgaggacatttcgaccaagatacgaccggagacgaaaggcgacgagaagcacaaatccaccaaattgaaaaaagttgaaagaaccgaaaaaatcttaaaaaatcgaaagggttatgaaaaggacttaaattcaaagcagaagaagctaggcaatattaaaacagaacttaagccagccggcaaaaggaaaggaaatgtagagaaaaaaacaaaaaataaaaataatcaaacttgatacgcgaaattaaagtaaagtgtataaaaatatcttgttttgcgtttggagctttcaaattttgtagttatacaaattttggaaattcggttgacactaaatgtttaacgtaacgtttatgttttgaatcagatatttcatacaaaaacagatttgaaaatattatactataattatatttataataatcttatggtggtacatttaccgtaaagtctcacatatactatttaggctataagaagttactaaataaatcatgttccatcgaaagttaaaacaaatggatagtaccttaaatgttaggtacttcttttatttaggaattcatgcagtaaatcttgtacctaggtgcaacacccaataacgttgtccaacacacaaaacattaaaggtttgcgtctttggttgaaagtgtggtatgtatattcccagtatatttaacatatgtttgggtgttttttgcgttgactcgcatgtattttgttgctagtgcagtacggtctcgcgcaatttcgacacgtcagaatattcttgaggatatttgtttttttgtgaagatatttgcacagttgttggcctgcattgcgcacaagtgggaagtacacgacagaaacacacactcgcagccatggtgcagaacgtggccctgctgggattggcactgattgcgatttccgcctcgattgtcgccctgcccgtgacacagaataagaaggatcacaaggaggcggcggagtcctccactccggccaccgccgacgtggaaacggccctggagtacgagcgctacctgcgggaggttgtcgaggcccttgaggcggaccctgagttccgtaagaagctggacaaggcgcccgaggccgacattcgggtgagtaggatggggatttccctgaactatgttttccacatcttgaaacgcagatgttgtcatttgttgctaaatttgcattacctttgcagaaatacatcgattagtagcagaatcatcttacca

SEQ ID NO: 11768 - DNA, 1811 bp, DROSOPHILA
attgcacgtgcgttgttttcaggaaaatggatgagcacgatatatttaaattgattacggcgggcgttcgcttcaccaagaagtcaaagaaggaaccttcatcaaaacaacaactgcagccactgccggaggtttctaaacatgaggagccggtgaaaagcgaagagtcagataaagatgatgaagatatcacagagttccgtctcttggacggggattccagcaatcaaccgaaacgcaagaagccgaagaaagagaagacactatcccccaaggaattagagattcaaaaggcagccgaagaggcaaacgagacgcggaagcagtatggcattagggtgttgggcaagaatgttcctccaccggtggacagtttcggaacattgaccagggactttaagatgctgcctcgcctgcagcagaacctactgtctcgcaactttgaccaccccacgccgatccagatgcaggccctgcccgtactcctccagcgacgggcgctaatggcctgtgcacccactggatccggcaaaacgctggccttcctcacacccatcataaatggcctgagggcgcacaagacaactggactgagagctctggtccttgctcccactcgcgagttggcccagcaaatctaccgcgagtgtgcggaactcacccgtgaaacgggtttgcgcacccacttcataagcaaggtgagcgaggccaagcagaaacatggtgcggagtgcaagcaacggtacgacatcctggtctccacgccaaaccgcgtgaggttcctcctgcagcaggagccaccactgctggatttgtcccacgtcgagtggttcgtgctggacgaagcagatcgcctgatggaggaagggcaaaacaacttcaaagagcagttagacgacatatatgccgcgtgctcaaatccaaccaagtgcgtggccttctttagtgcgacctacactgtgccagtggctaaatgggctctacgtcacctcaaaaacctagtgcgcataaccattggagtgcaaaatagcgccacggaaacggttcaacaggagctgctgttcgtcggatccgagggcggtaagctggtggccatacgagaccttgtgcgccagggtctccagccgccggtgcttgttttcgttcaaagcaaggaacgtgccaagcagctgttcgaggagctgctctacgacggcatcaacgtggacgtgatccatgccgaaaggagtcaacatcagcgcgacaactgcgtgaaagctttccgagagggcagcatttgggtgctcatctgtacggagctcatgggccgcggcattgacttcaagggtgtcaatctggtgatcaactacgactttccgcccactaccatttcgtacattcatcggatcggcagaacgggacgtgctggacgaccgggacgcgcaattacgtttttcacacaagaggacacgtccaatttgagaggcatcgcgcttataataaaaaactctgggggaaccgttccggaatatatgttgcaaatgaaaaaggttcgcaaatcggaggccaagatgcgagccaagaaaccgttggatcgcgaggacatttcgaccaagatacgaccggagacgaaaggcgacgagaagcacaaatccaccaaattgaaaaaagttgaaagaaccgaaaaaatcttaaaaaatcgaaagggttatgaaaaggacttaaattcaaagcagaagaagctaggcaatattaaaacagaacttaagccagccggcaaaaggaaaggaaatgtagagaaaaaaacaaaaaataaaaataatcaaacttga

SEQ ID NO: 11769 - protein, 594 aa, DROSOPHILA
MDEHDIFKLITAGVRFTKKSKKEPSSKQQLQPLPEVSKHEEPVKSEESDKDDEDITEFRLLDGDSSNQPKRKKPKKEKTLSPKELEIQKAAEEANETRKQYGIRVLGKNVPPPVDSFGTLTRDFKMLPRLQQNLLSRNFDHPTPIQMQALPVLLQRRALMACAPTGSGKTLAFLTPIINGLRAHKTTGLRALVLAPTRELAQQIYRECAELTRETGLRTHFISKVSEAKQKHGAECKQRYDILVSTPNRVRFLLQQEPPLLDLSHVEWFVLDEADRLMEEGQNNFKEQLDDIYAACSNPTKCVAFFSATYTVPVAKWALRHLKNLVRITIGVQNSATETVQQELLFVGSEGGKLVAIRDLVRQGLQPPVLVFVQSKERAKQLFEELLYDGINVDVIHAERSQHQRDNCVKAFREGSIWVLICTELMGRGIDFKGVNLVINYDFPPTTISYIHRIGRTGRAGRPGRAITFFTQEDTSNLRGIALIIKNSGGTVPEYMLQMKKVRKSEAKMRAKKPLDREDISTKIRPETKGDEKHKSTKLKKVERTEKILKNRKGYEKDLNSKQKKLGNIKTELKPAGKRKGNVEKKTKNKNNQT

SEQ ID NO: 11770 - DNA, 2529 bp, DROSOPHILA
taatgattaattaattggtctgattcaagaatttgtgtccacttatcaggcgagcagtctgccttatggctaatttcttgactggtagccactaagttgttaatgcattgtttatctgatgaatgcatctgggaatgcggcaaagttggtgctcgattaattaatttcaaaattaaaagtttgatcaataaagttggcaacggaatattaataaagtactgccttagctcgggtgtttgcctaattgtttttccgctgagtaaagtgtcgctagacacgcgacatgcaaatccccgtggatccgtgttgccctctaattaaagccacaaaagagttgtcaaatggctacggagcgttggcacctccaatccaatttcagttcaataaactcggccagggaacttgctttggaatctgcccgattttccaagacagttttcactttcttcagtaggagagggggggcgggagtctttagcctgggtgggttacccaatccaattcaatgcaagcccaattccattaccaattcccatcccagttggcttacaccgctttgggcagacgccgcataatttgttgttctgctggaagttgtgaccaagtccatatttggtataccagcccgttttggtcgacgtttcgtgcgtgcggctgccgcactgacaattgccacattttgtggcaggcaatcaataatcgaagtgcgtcaaaaatacaaatgttaaagttaccaaaccgcctgccagttcgaacataaatacggccatgtgcgacacgaaatacgcgccacctgaggtcctagtcaatatagccataaattttggatcttgattaattgataaggtgtcgatgtcaacttgggaatataggaatatgttacttattatactagcaaactataaaactcttttacctgcgaaatgcatttcaaaactaattgacacaaggaataaacacttttagaacgcatatgtatgaatgtaaaaaaaggtgcttatatcgtttttatgcaacaactatatttttccattattttaattgtcgtagcgagaagcacgaccgaaaccgccacgatattcgacccgtccggttccggcacccacatcgcctttcttgtccattccatatgcgcctggaccgcgtctgtagttcgatctgtcgtcatcggttttggaggcgcctccgaatcctcctccgggtcctcctggtcctccgcgcggacgcactgcgttcgatcgagtagtttgcgtcaaagtggagggcacaatctccgggggcaagtgcagatagcggcgcagttcctcgatgccctcgttggtcagcaaccagtagaagtggcgccaggcaaactgctccttgacccagccacgtgagttcagcgactgcatcaccttgatgacttgcagattgggaatcttatccagttcggagtgcttctggatgggcgagtccttcttggccacgagcacaccctccttgaagaggtactcgtagatggcgacacgattggcttttggaatgaacatcttgaaatagtctgatttaattcgaaaaattcgcagaaaatgaagatggagcttagtgtggccagcttaaattagtatttaccgaaacttctttcattcattcctcacgtttttgagcactacctattggtattggcaagcaccaataagtttttcataatttgaaaacaagtttgtagttcaatatataaacttgaggatcgtgataccattatttcctttcactttaagaacatttggctcagcccccttatgattttgaaaataaattatatgcgaagctttcttcattttctgtcagtgtgtttcctcctgcattttgctggattagctgcgttttaagctttcgcactcctgaggaggagctgtgattcatcttttgcgtcgcaggacattctgaccaaacatgcgcaatgcgagcggcggcaaccacatgaggaattcctcccccacaggaatgctgaacagaataatcaatgagcgaaacgcagacacaaattgaccaagggaagccaaccaaaaggaaggcatgccgatagatacaacgtaaacccaccacccaccgaccggctgcatccccccaaaaaaaaagctaaacaaatgccggaaggaaaggaaaacgaaagcgattagggggtggcaaaaccacccccccttggaaaagtgtcaacaaaaagcagtcgaccttgcttagcgtgcgcttccgattaaatgcacttgatttacataacatttgagtaattttctactaattaaaatggttaccaaatcgattattccattttagtaagttcaaataaagtggtaaactctaatgcataagctgtgttgggagagtataaaatctgcccttagccttgcatacttattgttaatatttatattagttaatttcgaattcacatggctgttacgtgcaagcagtgctggtttggatattagctcttcgctgggttgttgcattagattagcttggacggcaacctaacggcaaattgga

SEQ ID NO: 11771 - DNA, 529 bp, DROSOPHILA
atgttcattccaaaagccaatcgtgtcgccatctacgagtacctcttcaaggagggtgtgctcgtggccaagaaggactcgcccatccagaagcactccgaactggataagattcccaatctgcaagtcatcaaggtgatgcagtcgctgaactcacgtggctgggtcaaggagcagtttgcctggcgccacttctactggttgctgaccaacgagggcatcgaggaactgcgccgctatctgcacttgcccccggagattgtgccctccactttgacgcaaactactcgatcgaacgcagtgcgtccgcgcggaggaccaggaggacccggaggaggattcggaggcgcctccaaaaccgatgacgacagatcgaactacagacgcggtccaggcgcatatggaatggacaagaaaggcgatgtgggtgccggaaccggacgggtcgaatatcgtggcggtttcggtcgtgcttctcgctacgacaattaaaataatggaaaaatatagttgttgcataaaaacgata

SEQ ID NO: 11772 - protein, 163 aa, DROSOPHILA
MFIPKANRVAIYEYLFKEGVLVAKKDSPIQKHSELDKIPNLQVIKVMQSLNSRGWVKEQFAWRHFYWLLTNEGIEELRRYLHLPPEIVPSTLTQTTRSNAVRPRGGPGGPGGGFGGASKTDDDRSNYRRGPGAYGMDKKGDVGAGTGRVEYRGGFGRASRYDN

SEQ ID NO: 11773 - DNA, 3454 bp, DROSOPHILA
tccaaaggtaaccatgtgactttggtaggcgttgaacagtgcacacaaaaaaaacatcgatttgcaccgactatatcattttggcacccgacgcatcttatcagcgatggcgtccctgaagtctcgaaaatcgctgctgccctcgatttcgttgcgacatttgctctggatgcgatagagcccgctgctgatgtccgtgcgatcggcgctgagcatgcgcctggagagatcctgctccaggtcgtagggcaggcccagatcgaccagttcgtccacctcgtcctgggtgaaggtgcgctggtgctcagcgagaaactcggcgcacttctcgtagatgtccaagtactgctcggcctcgtccttgtcgccggaccgcctcgtctccatgaacttgcgcagcagtctggtggcctccgcatccagcagcgtctcgtgcacactgttcgacagaacatagatcctccgcacctcggcgacagtcatgttactgcatccgcagaagcaccttatcagctgtagggtcttgttctagcgatagcgcacaaaagtccgatgagtaattgacttccttgcccacctcttccttgtttctactcaccttgctcgaactgctggccatttcgaatgtttggtgtatcagcctcttaaattgggtgtatctctttatagattatgttcacttgacgacaggtggacccacaccttgtttactcttacttcctattgtattgctttttacttgtgaccggcacgatttttaacccacgaattttattggtcaacaaatagggcagtgtgattgcgcagaggtgtgccgaaaatacaacgattcccttggatgaactagatctggtcagtctgaatgaatttgaattgcgaatagcccgcgctattccaaaatattaatttattttaatttaattcattaaacaatgaattattcccacattaacaacgcactatgacaactataactactactcgatcatcgattaattgctggcttttggaatttctaaggaatctcatactttattaggaaaatacatacatacataaactgaaacgcttgtaaacaatagaaaactcagccactcaatcgcaccctacagcttggacttgagcgccttcattagcttctccagcttgagagccttctggaaatcgccgctgatcttcagcttgccggtcatgtaggcgggagccgccttcagtttacccgagaacatgtcgaagaagttcttcgagttcatggtgagcgtggcgtcgggagcggcagttggcgttccggcaccgcaggatccggagccgttcttcaggtccaggaaccaggtgccctgctcggcgccgctgatgttgaactggaagacagcctgcgtcttcgagacgatctcgggcgagaggagagattcgattttccggaacagctgcggaatcttgacgtctcctccacttgcgggagcagcagcatcttctgccgcagcttcattctctaccggagctcccttctcctccacgaagaagtccaccatcagcttgtcggcgttctcgcggaagcaggcgtattcggtgagatcagtgatgcccgccgattccagcacctcgtcgtccacaaagaactgaccagtagactgcctgggctcacgggtcaggattgcgtaggcggcatcggccatgatctccggcttgcgtgaccacttggcggaatctggacccgtcagcatctcgatggccgccgtgtgaatggcagtgcgcggccacagagcgttgacggagattccctcgtccttgaactccgcggccatgccgagcacacacatggacataccgtacttggccatggtgtaggccacatgcgggccaaaccacttgggcttcatgctcagcggcggcgagatgttgagaatgtgggcgtggttgctcttcttcaggtacggcaggcacaccttggacaccagaaaggtgcctcgagtattgatgttgtgcatcaggtcgtagcgcttcatgtccgtatccggggtattggtcagcgagatggcgctggcgttattgatcacaatgtcgatgccaccgaacttggccaccgcggcctcaacggcgctgcgcacctgttgctcatcccgcacatccacaacgcagggataggcctttccgccggccttctcgatctcctccgcagccgagtagatggtgcccggcagcttgggatgcggttccgccgtcttggccgccaccacaatgttggctccatcgcgggccgcctttagagcaatctccttgccaattcctcgagaggctcccgtgatgaacagggtccgtccggctagttttcctgtgttgatcatcctgtccaaagtttaaagaccgttcgctgtgagatctggattcacaccggtaacggtgacagtgttctcaatcgaagattccaagagaaagtccaaagtgcagattcaaccgatttgatccacacaacaagtcgtcgagtttcatgcacgcacacacactcaccactccacacgcacactgtcttctcctgtgcccggtgtggcaaccttcgcctttgacttgcaaaaatatggcagcactcgacatatttatttgaaaaataaacgcactgatagtggcgaatttttatgttagttaaagttaattcgtagataatttgcaagaaacaaaaaaaagattaactagtaaatatttcaattattatcagtttttataaattcacaactagcaaaatcatgttttttgtccgaaaactggttcgaaaacacgacaagtgatcacatctctaagttcgatactgatagccggtacttatcgataagccgttggtagctgagtgtagccatgtcatcaaattcaaattccagcgccactttttacatcgtcagtacttctcatcaaaaatgcggagtaaaacttagaacggctaccaagtacttttattagttctaactctacctatcttatacaaaaatggcacacaatggaaaacaacgattcatctataaaactcaacgcccaacaactaccttctgctgcatgtttaactaagtcctccaaagtccttttaataagtgcaaccatatgggttctaaagttcgtaggcccggtcgccgttctgtgattgttaaatgagggtgtcctcgtcctgtccctcgaagaccattaatagcgagtgctgcgagggtgagcggcccagggtcaacccacccaaggatccatccggcgagagcaggccagtctgcaggctgttgttgtcccgatagccagaggtggaggatgtctgtgaaacggagtcccaggaaatctcgcccagggtctttgcctgcgcctgcggggcctgctcctcctgcgaggtgacctttgaaggacatatgtatgggaatttcagggctaaaacatctctggtccacttacaatgctgggtggttccatgggcgtcaggcga

SEQ ID NO: 11774 - DNA, 1454 bp, DROSOPHILA
ttgaatctgcactttggactttctcttggaatcttcgattgagaacactgtcaccgttaccggtgtgaatccagatctcacagcgaacggtctttaaactttggacaggatgatcaacacaggaaaactagccggacggaccctgttcatcacgggagcctctcgaggaattggcaaggagattgctctaaaggcggcccgcgatggagccaacattgtggtggcggccaagacggcggaaccgcatcccaagctgccgggcaccatctactcggctgcggaggagatcgagaaggccggcggaaaggcctatccctgcgttgtggatgtgcgggatgagcaacaggtgcgcagcgccgttgaggccgcggtggccaagttcggtggcatcgacattgtgatcaataacgccagcgccatctcgctgaccaataccccggatacggacatgaagcgctacgacctgatgcacaacatcaatactcgaggcacctttctggtgtccaaggtgtgcctgccgtacctgaagaagagcaaccacgcccacattctcaacatctcgccgccgctgagcatgaagcccaagtggtttggcccgcatgtggcctacaccatggccaagtacggtatgtccatgtgtgtgctcggcatggccgcggagttcaaggacgagggaatctccgtcaacgctctgtggccgcgcactgccattcacacggcggccatcgagatgctgacgggtccagattccgccaagtggtcacgcaagccggagatcatggccgatgccgcctacgcaatcctgacccgtgagcccaggcagtctactggtcagttctttgtggacgacgaggtgctggaatcggcgggcatcactgatctcaccgaatacgcctgcttccgcgagaacgccgacaagctgatggtggacttcttcgtggaggagaagggagctccggtagagaatgaagctgcggcagaagatgctgctgctcccgcaagtggaggagacgtcaagattccgcagctgttccggaaaatcgaatctctcctctcgcccgagatcgtctcgaagacgcaggctgtcttccagttcaacatcagcggcgccgagcagggcacctggttcctggacctgaagaacggctccggatcctgcggtgccggaacgccaactgccgctcccgacgccacgctcaccatgaactcgaagaacttcttcgacatgttctcgggtaaactgaaggcggctcccgcctacatgaccggcaagctgaagatcagcggcgatttccagaaggctctcaagctggagaagctaatgaaggcgctcaagtccaagctgtagggtgcgattgagtggctgagttttctattgtttacaagcgtttcagtttatgtatgtatgtattttcctaataaagtatgagattccttagaaattccaaaagcca

SEQ ID NO: 11775 - protein, 412 aa, DROSOPHILA
MINTGKLAGRTLFITGASRGIGKEIALKAARDGANIVVAAKTAEPHPKLPGTIYSAAEEIEKAGGKAYPCVVDVRDEQQVRSAVEAAVAKFGGIDIVINNASAISLTNTPDTDMKRYDLMHNINTRGTFLVSKVCLPYLKKSNHAHILNISPPLSMKPKWFGPHVAYTMAKYGMSMCVLGMAAEFKDEGISVNALWPRTAIHTAAIEMLTGPDSAKWSRKPEIMADAAYAILTREPRQSTGQFFVDDEVLESAGITDLTEYACFRENADKLMVDFFVEEKGAPVENEAAAEDAAAPASGGDVKIPQLFRKIESLLSPEIVSKTQAVFQFNISGAEQGTWFLDLKNGSGSCGAGTPTAAPDATLTMNSKNFFDMFSGKLKAAPAYMTGKLKISGDFQKALKLEKLMKALKSKL

SEQ ID NO: 11776 - DNA, 3748 bp, DROSOPHILA
actgaggctgtggaggatttggccacagtgacggccgttaacaactggctggatgaggcagcctcgggtcccaagtaaccgctgcgtggcatgtcgatcttcttggcgcgcacaatgttcttcatccgctggatctcattcttggccaccttctcgttgcgcaggtcgatcttcttctggaacatgtccgtattgggatcggcgttctgtggcacctccagcacccaatccttggccttctcggcctcggcacgcttaaaaccatatgtaggcacccatttctataaagattcaaggtttagattgtgacttgacaagattaaagagcaaaaacttgcatccatggtctcatcgtaggtcttcttgtccttcttcttcttgctgatacccttctccttggcgaacttctcccatttggtgagcggacgtggacctggcggcttacggaggcggggcagtaccgtcgtgggttccggcagcttggccacaatgctctcgtctacccgttcggtgggcaactcccaaatggcattgaccaaaagttgggtgttctcccgtgtcagtgcggtcaggtactcctctttgttgtccctaaaaacaatggaactggtgaaaaatcagtattcctcgctagaaaccgccgcttacctcaattcccggtcatcgaaatcgttgggatctgtgatcagcaggctgccaacgtcgagtcggcattccaaatgcttttctactgtgatcggcttgtatttgtccaattccttttggtgtttggccagaacttctttaacaacatccattttcagggaattagcgtataaacagcaaaattcaattccacgtgctgacaactgtgaccatgcactagatttaacgaataggctaaaaaatactaaataaatgtaccaaactcgcaccgaagactcaaaccttgcagggaaacttggctatatacttatcagtctatcggcgccatttcaaaataagtttttaaattaattttttaaagatcctcgtttattttacgatctctacaacgtaacgtccagcgcttttccgcctcgtccaacgtttgtggcatcgtagctcccttggtctccggcagaaacaagattattaaagcgcctatcacggacaccaatgtgataataaacatgggcaagggacgatagtagcggtgggtgctgagtacaagtggtgagagtagggcacccatctgacccataatattgataatagccagtccctgaccgcgcagcacggttggcagtatctcagaggcccactgttgacccacattgtaggccattgtggcgaaaaatctggctgcaatcgctgccgttgatgcattccaatgtccttttagaataccaacgaagagactggatgctgcacacaatagcatgacagccgacatcatgggcttgcgaccaattcgatctagcaaaagcattggtacgattccagcaggaatttcaacgagcgaggaaagggaaaaggttataaatatatctgtgtccaggatttcgactacgcgaacatgggcatcgtatgctagggccacagtcatccatgtgacaatcaaaatcgttaagacgacgagcctgggaaatgtcttaaagagatccagactggtgtactgctttcccaattgctcgttggcaaatttaagttcatagcattcccgcatctcggaccaaacctcttcggaaatgatttttccattggctttggccgcttctttcatgacttcaatacaccggtccactttacccaccgacataagccaactgcagtgggaaatgaagtttagatagcttgaaaacctattgttatcattaatttaccttggtgactctggagccagcaagctggtcaatatcatgaatacaattggcagggcaacgaccatggcatagtgcctccaattactgatgacataggccagccagggaagcaagcaggcgcccaaggtgaagaagaatgtgagggctaagttccccaccagtgtgcgatacttgatgccaacgttctccaaagctgttgaaaagaatgtgatgatgatatttaaatttatgatttatgttaattgactctgcaacactcacttagaatataaatgggaacgaagcagtagttcattgacagtccagccacaaatcggctggcagcaaagcagggaaagtccttgcagaccacacttacgcaaccgccgatcatggaacaggagttggccagaaatagtgcaggcaagcgaccggaatgatcggttatgaatccaaagcagaggcaaccaacaatacagcccacaaagtagacaacgacgctatatgtcccgaaatcccttttgtcgcacacccaattgtactcggtagcgatggactcgtagggcacctccttgcgatcatagatccaaccattgttgcaaggtatcgggctccttgtctgattcgcatcgttggtcgcatttgagtcgtagggcacattgtacataaaacaattctcgaaactgccatcttgctttttggggattccccgattcttttgttcactttccggcagtccctctagttctcgtactctgcaccagtgattctttggcaacagtatcataaatatctgaccaaagtaggtgaatgcgaacagaaaggcggcgggcatcatccaaaacagcagtcgcttctgaaaggggccaaagtccccaatgaacagcaagaagttctcatacttttcacaatctctggggggcatttcgacatttaatattataaatatgtactaaacaaaagccaacttctttaaagccctctttttgaaccttaaatagttaaatatatgttattttgaataaaccattcaaatatcaactttttgaactccacttttttccgccaattttcgattactttctaggccttctattttagcttcatgttcggctggtcacacaaatgcacatagatatcgataattgacaacatccatatctaatttgcgcgcgaaaaaacttttaataacaatggatgtggatttactgccgctgagaaagcgaataacaaacaccttcaagctatgtggattcctgatccgctcggagaacagttcctacctggcggagcagctgctaccctttgacgcagcggaacgggacaaatggctgacggtgatcaccgagaatctccaaagccaaaagcttttgacgcctcatgtggagcgagccgccctggagaaggccatcaatgaacttaaccgggtgggattggatgaaggggagacggtctttgccctgatcgatgcctttacggtgccccgttttcggtacaaccagcggataaagaaattcgaactggacactcagccgcgccagttgctgaccgccccgcgcatgaaatcggactacatgcagcaacgatatgccatgttactacagaaaactctgcgacacgatctctttgccccagccgtcatacaggatggcgttggggccgaggcccaggccaagaaatttaagctccagttcgcggagaacctgctggccacgtcggcgatgaaggaggcagttgttttggggctacttacccagcttaaagagggcaagttctatgtcgaggatcccacgggttgcgtccagttagatctcactggagcccgtttccatgccggcttcttctgcgagggctgctttgttttagccgagggcaactataacaacggtgtgctcaagggtaagtagcccaaagtatttaataac

SEQ ID NO: 11777 - DNA, 1623 bp, DROSOPHILA
atgccccccagagattgtgaaaagtatgagaacttcttgctgttcattggggactttggcccctttcagaagcgactgctgttttggatgatgcccgccgcctttctgttcgcattcacctactttggtcagatatttatgatactgttgccaaagaatcactggtgcagagtacgagaactagagggactgccggaaagtgaacaaaagaatcggggaatccccaaaaagcaagatggcagtttcgagaattgttttatgtacaatgtgccctacgactcaaatgcgaccaacgatgcgaatcagacaaggagcccgataccttgcaacaatggttggatctatgatcgcaaggaggtgccctacgagtccatcgctaccgagtacaattgggtgtgcgacaaaagggatttcgggacatatagcgtcgttgtctactttgtgggctgtattgttggttgcctctgctttggattcataaccgatcattccggtcgcttgcctgcactatttctggccaactcctgttccatgatcggcggttgcgtaagtgtggtctgcaaggactttccctgctttgctgccagccgatttgtggctggactgtcaatgaactactgcttcgttcccatttatattctaactttggagaacgttggcatcaagtatcgcacactggtggggaacttagccctcacattcttcttcaccttgggcgcctgcttgcttccctggctggcctatgtcatcagtaattggaggcactatgccatggtcgttgccctgccaattgtattcatgatattgaccagcttgctggctccagagtcaccaagttggcttatgtcggtgggtaaagtggaccggtgtattgaagtcatgaaagaagcggccaaagccaatggaaaaatcatttccgaagaggtttggtccgagatgcgggaatgctatgaacttaaatttgccaacgagcaattgggaaagcagtacaccagtctggatctctttaagacatttcccaggctcgtcgtcttaacgattttgattgtcacatggatgactgtggccctagcatacgatgcccatgttcgcgtagtcgaaatcctggacacagatatatttataaccttttccctttcctcgctcgttgaaattcctgctggaatcgtaccaatgcttttgctagatcgaattggtcgcaagcccatgatgtcggctgtcatgctattgtgtgcagcatccagtctcttcgttggtattctaaaaggacattggaatgcatcaacggcagcgattgcagccagatttttcgccacaatggcctacaatgtgggtcaacagtgggcctctgagatactgccaaccgtgctgcgcggtcagggactggctattatcaatattatgggtcagatgggtgccctactctcaccacttgtactcagcacccaccgctactatcgtcccttgcccatgtttattatcacattggtgtccgtgataggcgctttaataatcttgtttctgccggagaccaagggagctacgatgccacaaacgttggacgaggcggaaaagcgctggacgttacgttgtagagatcgtaaaataaacgaggatctttaa

SEQ ID NO: 11778 - protein, 540 aa, DROSOPHILA
MPPRDCEKYENFLLFIGDFGPFQKRLLFWMMPAAFLFAFTYFGQIFMILLPKNHWCRVRELEGLPESEQKNRGIPKKQDGSFENCFMYNVPYDSNATNDANQTRSPIPCNNGWIYDRKEVPYESIATEYNWVCDKRDFGTYSVVVYFVGCIVGCLCFGFITDHSGRLPALFLANSCSMIGGCVSVVCKDFPCFAASRFVAGLSMNYCFVPIYILTLENVGIKYRTLVGNLALTFFFTLGACLLPWLAYVISNWRHYAMVVALPIVFMILTSLLAPESPSWLMSVGKVDRCIEVMKEAAKANGKIISEEVWSEMRECYELKFANEQLGKQYTSLDLFKTFPRLVVLTILIVTWMTVALAYDAHVRVVEILDTDIFITFSLSSLVEIPAGIVPMLLLDRIGRKPMMSAVMLLCAASSLFVGILKGHWNASTAAIAARFFATMAYNVGQQWASEILPTVLRGQGLAIINIMGQMGALLSPLVLSTHRYYRPLPMFIITLVSVIGALIILFLPETKGATMPQTLDEAEKRWTLRCRDRKINEDL

SEQ ID NO: 11779 - DNA, 3575 bp, DROSOPHILA
tgtccagcaatttcaccgctcgttcaaacggcggcggcatttgcctatggcttattttatttgccacgtcactcccgccgcacatgcgcattgctcagcgaatgtgacaggtgagccagggaaaaccttttggctgggaaaccacgggagcacgcgatccgatccgatacgaaacgaaacgaagcgagctgggcgatccaaaagtaatggaatgctcagcttcaagggtcattgtcatcgcatgcagactgaaggagtgactcccgtgtggcggtggttctttaattctccaattcaattaccgactgcattctcgacggccccacacggcgtcaccaagtgcaactgcgactgcagacaatcccatccagctgcaatttagctaacggcggttctgcattaggccatatttggctggatccggtaaatgctttcagacgccttgattgacagcccatagaaatcggggaaattgaggtgttgacagagtgtcaaccgaaaaggatctggcggccccaaattaatcaaaggtgctcagtctattcaccatggatctcgatacaaaacaaaacgtataaacagttgctatatctagcttagaaatgcgaactaatgggcttaaaaacatgcagttctatgtgttcctactaaaaatgattgaagcacgtgttagacagactattttttaaataataaaatacattgctggtaattaaaccttttaaaaaacctgtaataggtttttaaactcgtggtcgtctcataatgttttaagtttaatgtgaatggcaagtggacataattataataataccattacaatttatacgatttttaaataatcaatgggttgttttcaaagtgcagtaattatgtgctaaaaaacttaaatgttcgcgccaagctacgtactaaaatctaaaaataccaagcaagaataccaactgcatttgttgttaggccttactctggggtggatttattgaacaaccaaagtgcggtcacacttcaagctaatttggaaaatcttagcgaaaatttcgtaaaaagtggtgtttgtgtattgaaaagcctcagaattggtgtgaaaatgacgtcgctggacccggcgccaaacaaaacgtgggagctgtcgctgtacgagctgcagcgcaagccgcaggaggtgatcacggacagcacggaaatcgcggtgtccccgcggagcctccacagcgaactgatgtgtcccatctgcctggacatgctgaagaagacgatgacgacgaaggagtgcctgcaccgcttctgctccgactgcattgtgaccgccctgcgttcgggcaataaggagtgccccacgtgccgcaagaagctcgtctccaagcgctccctgcgcgccgatcccaacttcgacctgctcatctcgaagatctaccccagtcgcgaggaatacgaggccatccaggagaaggtgatggctaagttcaaccagacgcagtcgcagcaggcgctggtcaactccatcaacgagggcatcaagctgcagtcccagaaccggccacaaagattccgcaccaagggcggcggcggtggtggtggtggaggtggtaatggaaatggtgctgccaatgtcgcagctccgcctgcacctggtgcacccactgctgtgggtcgcaatgcctccaaccaaatgcacgtccacgacacagcctccaatgatagcaacagcaataccaacagcattgatcgcgagaaccgggatccgggtcattcgggcacatcggcagcatcggccataacgagcgcctcgaatgctgcgccctcgtcgtcggcaaactcgggcgccagcacatccgccactcggatgcaggtggacgacgcttccaatcccccctcggtgcggagcactccgtcaccagtgccctccaactcgagcagctccaagccgaagcgcgccatgtcggtgctgacttcggagcggtccgaggagtccgagtcggattcacagatggactgccgcaccgagggtgactccaacatcgacacagagggcgagggcaatggcgagctgggcatcaacgatgaaatcgagctcgtcttcaagccccatcccacggagatgtcggcggacaaccagctcatacgggcactcaaggagaactgtgtgcgctacatcaagaccacggcaaatgccaccgtcgatcatctcagcaagtatctggccatgcggctcacgctcgacctgggcgccgatttgccagaggcttgtcgcgtgctcaacttttgcatctacgtcgctccacagccacagcagttggttatcctgaatggcaaccagacgttgcaccaggtcaacgacaaattctggaaggtgggtttgcgctggcacattctaatgttcaccattctaatgtctgtatgcttttaggtaaacaaacctatggaaatgtattactcgtggaagaaaacctaagctgtacgaagcgttttagtattaggccgtttatttctgaaatggaaatatgtctagctgtagagcttaacacacgtatataaagcattcatgtaccacaaaatatatttaattgtaagtaaaaggtttcgttattgagttttcggaatccctcgctataagtccacagatctatattccttcgtcaacaatattttaggaatactcaatatatatgtgtatcggttgcattccgcatcagatttattatacttcctagtgcgtacaacattacaaggcatataaacaactatatttttaagttaagtaaagagtggctcttctgtgggtttagtagaatgtgaatgtttggtgagcttaggctctagcacgactcggaagccacaatgagataggaggacggtttccgtttcttcgttgtatgactatgactaaactgcggtcttctatacacttggacgattgtagaagcctccaaggcactgggaaaggtaaagataggagctgggtcaagtgcgatgctccaaaggtaaccatgtgactttggtaggcgttgaacagtgcacacaaaaaaaacatcgatttgcaccgactatatcattttggcacccgacgcatcttatcagcgatggcgtccctgaagtctcgaaaatcgctgctgccctcgatttcgttgcgacatttgctctggatgcgatagagcccgctgctgatgtccgtgcgatcggcgctgagcatgcgcctggagagatcctgctccaggtcgtagggcaggcccagatcgaccagttcgtccacctcgtcctgggtgaaggtgcgctggtgctcagcgagaaactcggcgcacttctcgtagatgtccaagtactgctcggcctcgtccttgtcgccggaccgcctcgtctccatgaacttgcgcagcagtctggtggcctccgcatccagcagcgtctcgtgcacactgttcgacagaacatagatcctccgcacctcggcgacagtcatgttactgcatccgcagaagcaccttatcagctgtagggtcttgttctagcgatagcgcacaaaagtccgatgagtaattgacttccttgcccacctcttccttgtttctactcac

SEQ ID NO: 11780 - DNA, 1518 bp, DROSOPHILA
gtcacacttcaagctaatttggaaaatcttagcgaaaatttcgtaaaaagtggtgtttgtgtattgaaaagcctcagaattggtgtgaaaatgacgtcgctggacccggcgccaaacaaaacgtgggagctgtcgctgtacgagctgcagcgcaagccgcaggaggtgatcacggacagcacggaaatcgcggtgtccccgcggagcctccacagcgaactgatgtgtcccatctgcctggacatgctgaagaagacgatgacgacgaaggagtgcctgcaccgcttctgctccgactgcattgtgaccgccctgcgttcgggcaataaggagtgccccacgtgccgcaagaagctcgtctccaagcgctccctgcgcgccgatcccaacttcgacctgctcatctcgaagatctaccccagtcgcgaggaatacgaggccatccaggagaaggtgatggctaagttcaaccagacgcagtcgcagcaggcgctggtcaactccatcaacgagggcatcaagctgcagtcccagaaccggccacaaagattccgcaccaagggcggcggcggtggtggtggtggaggtggtaatggaaatggtgctgccaatgtcgcagctccgcctgcacctggtgcacccactgctgtgggtcgcaatgcctccaaccaaatgcacgtccacgacacagcctccaatgatagcaacagcaataccaacagcattgatcgcgagaaccgggatccgggtcattcgggcacatcggcagcatcggccataacgagcgcctcgaatgctgcgccctcgtcgtcggcaaactcgggcgccagcacatccgccactcggatgcaggtggacgacgcttccaatcccccctcggtgcggagcactccgtcaccagtgccctccaactcgagcagctccaagccgaagcgcgccatgtcggtgctgacttcggagcggtccgaggagtccgagtcggattcacagatggactgccgcaccgagggtgactccaacatcgacacagagggcgagggcaatggcgagctgggcatcaacgatgaaatcgagctcgtcttcaagccccatcccacggagatgtcggcggacaaccagctcatacgggcactcaaggagaactgtgtgcgctacatcaagaccacggcaaatgccaccgtcgatcatctcagcaagtatctggccatgcggctcacgctcgacctgggcgccgatttgccagaggcttgtcgcgtgctcaacttttgcatctacgtcgctccacagccacagcagttggttatcctgaatggcaaccagacgttgcaccaggtcaacgacaaattctggaaggtaaacaaacctatggaaatgtattactcgtggaagaaaacctaagctgtacgaagcgttttagtattaggccgtttatttctgaaatggaaatatgtctagctgtagagcttaacacacgtatataaagcattcatgtaccacaaaatatatttaattgtaagt

SEQ ID NO: 11781 - protein, 435 aa, DROSOPHILA
MTSLDPAPNKTWELSLYELQRKPQEVITDSTEIAVSPRSLHSELMCPICLDMLKKTMTTKECLHRFCSDCIVTALRSGNKECPTCRKKLVSKRSLRADPNFDLLISKIYPSREEYEAIQEKVMAKFNQTQSQQALVNSINEGIKLQSQNRPQRFRTKGGGGGGGGGGNGNGAANVAAPPAPGAPTAVGRNASNQMHVHDTASNDSNSNTNSIDRENRDPGHSGTSAASAITSASNAAPSSSANSGASTSATRMQVDDASNPPSVRSTPSPVPSNSSSSKPKRAMSVLTSERSEESESDSQMDCRTEGDSNIDTEGEGNGELGINDEIELVFKPHPTEMSADNQLIRALKENCVRYIKTTANATVDHLSKYLAMRLTLDLGADLPEACRVLNFCIYVAPQPQQLVILNGNQTLHQVNDKFWKVNKPMEMYYSWKKT

SEQ ID NO: 11782 - DNA, 4081 bp, DROSOPHILA
atttacatttattttatgtttccatctgctcgctggtttcttttttcttagactgctccttcagccgctgcagcatgttataggagactaggtcgagtttcaggtgctgcacactgagcgcactgccgtcccaatcgcgcagcattttcagcttgagtggatcgcagaggttcatcagctccagaccgccagtgcggaattcgttgcgctccttctccagcgtcatggtgatcacatccttgcgggcggcatgctgattggcccgatgtttgccaatcgactgctttaggttaatctgctccagctcctcgtcgaatcgcgtaaaatagagctcaatcagatcctccagctcctgcggcctcagcggttcagtgcgtccctcatcgatttggccgagaaaccagctcaacttctcgccagtgatgttgcttttgatggcatgacccaaacggaccttgtgcttgttgttttggcgacgtgccttcttgcccagcgccttggttttccggctgttggggtgcttgcatttctccagttccttgcgcagattcgtctgggattttaagttgtggaaactttagttttagagataaattgcgatgtattaaccgcgcacttaccatttttacgtgtgctattgtttatcacgttgttagttctagtgttggttaacacgtgcaagcacatgttatgtacgatcagctggatccctagtggtgggcactttagcaatgatgatttaaatatattttcataatttaatatttactgaagaaataaaaatattcgtgtattgtgaatgcaataaatatatttagaaggggtttataattatttataagtgcagttcagttctatttttttctaagttttgcattggcgatcttgcatttatatcgatactttgtccatctcttctctgaatcatatgttgccgcatgcacacatacacacacacacacacaggcacagctgctcgatcgcatgaggctaaaacccacgatccgaaccgatccgcgtttttatcccttgcatttctaggttccaaagtcccgctaaatggcaacacacctcctccgaaacggcgctacatgttggctgctcaggaactgcatttcccaacgtgccgcggtgagtagcccccaaaaaccacccgccaatcggtggtcaaaagaaaaacaacaccgctgttatgtaatctcacaaacacctttcgcgcgcgaaagcgagaagaagaatatctctatactcttccaatcggcggaatttgtttttcttacacagaggaaaaaagtgagatcaaagatcatcaagattcggaatatatccaaaaattagtttattctcaaataattattgattacttatatatatatattgacatatatgtatgtcaatttttaacaataaaataaaataatatattagaagtcattttgtatattgtataattacgtctaattttaattttatatagcgcaatgcattagtaattgataattgaaaataattgtagggcatttcaaaaatcgctttctaaatatttcgataccaatatcagtatataacaataaaaaataattagaatagaaattcttagcatgaggtaaataattatacctttattccatccagttgagacgctgcctgcatgtgacctcaagcctggacaagacggtctccttcaacctcagcgacattggcgagggaatccgcgaggtaaccgtcaaggagtggttcgtgaaagagggcgacaccgtggagcagttcgacaatctctgcgaggtgcaatcggacaaggcatcggtgaccatcaccagtcgctatgatggcaagataaccaagattcaccacaaaatcgatgagattgctctggtcggcaagcctctgctcgatttcgatgtggtgaatgaagacgaagatgagccggaggactcttcttcctcttcctcctccacatcttccgatagttcagcaagcgaaaacgaggagaagcaatcagctgaagcatctgcgacgcccacagaaggtcgtgtgatcatacccgccacgccctcggttcgtcgtctggccaaggaacaccagttggatctggccaaggtgccagcaacgggaaagaatggtcgtgtgcttaagggtgatattctggagtttctgggccaagttcctcccggtactaacgttccacatcccacactattggcgaaaacgcctagtgctgctccaagtggagcagcaagtgtttctgtgcccgctgatcgcgtcgaagtgctcaagggagtgcgcaaggccatgctgaaatcgatgacggaatccctggtaagtgcttccacaaactaacaagcgctgattaattacttattatactcttttttgtcgccatagaaaatcccccattttgcttacagcgacgaaatcgacatgacccagttgatgcaattccgtaaccaactgcagttagtggccaaggagaatggcgtgcccaagctcacgttcatgccgttctgcatcaaggctgctagcattgcgctgtccaaatatccaattgttaacagctccctggatttggccagcgaatcgctggtcttcaagggtgcccacaacataagcgttgccatcgatacaccacagggtctagtggtgccgaatattaagaactgccagacaaagactattatcgagattgccaaggatctgaatgcactggtggagcgcggtaggactggctccctgtctccggcagactttgccgatggcaccttctcgctttccaacataggagtggtgagtacaagtgaatacttgtgaatgattgcaaaattaatcatgttctggttaatcttacagattggcggtacctacacacatccttgtataatggcgccgcaggtggccatcggtgctatgggtaggaccaaggcggtgccgcgtttcaacgacaaggatgaggtggtcaaggcgtatgtgatgagcgtaagctggtccgccgaccatcgcgtcatcgacggcgtgaccatggccagcttctccaacgtttggaagcagtatctggagaatcctgcccttttcctactacactagagagcctattactcgaaaacgcttacttttacggatgaggctctttcccatgcatttatctagacatatctaatattgtaaattgtacgacaatctgctttgagctggaacaggtgccatgtgccgccacccatccccaaaatgtgcatttataggaggtaagccactctgagcggctcctcgattaatttaagctcctggcgcacatggctaactttccgtttatttacttttatcgttgttaacctgcatttatatatcagttttttttttaagtttgttaagcaacaacttcagcgtacagtttaactgtaaccgcatgcatttatattaaagctttgtttcaatggctgtccaataaatatcagaaacggtttatgtaaagcccccatctttttgcatattacccggggaactaagtgagtttaaaactgtttgtaattgtcttacggctcagtcttgcgatgcctttccttgcttggtttaccttggatatcctttttaagttggaattaagtaagttagttgactgttgtggatattcttgaaatctgtttcgcttaaattttggatttaaggggaaacgattttaaaaacgctttggaacttaggattaatcttatctgtataatatagataaatcaagctattaatgttactatttattgggcttattggtcggtaatgcaggtttttaagaacacttttacgtttaacttgcctaactcgctatgcggatatgtacatgcgagctttaaaactttgttttgctgcaggtttaatttaatttgggcatccggtcgttccgttcagctcctccaggtcccccaaaatcactcgcaccaaacacgttactatatatgcatgtacatacatgtatgtacatacatatatgttgctacatgtttgcctaatatggtcaaaagtgccgctaaaaacataagctataaagccaagatcatacataacatttttgaatttttttatctcattagtaata

SEQ ID NO: 11783 - DNA, 1448 bp, DROSOPHILA
cgatccgaaccgatccgcgtttttatcccttgcatttctaggttccaaagtcccgctaaatggcaacacacctcctccgaaacggcgctacatgttggctgctcaggaactgcatttcccaacgtgccgcgttgagacgctgcctgcatgtgacctcaagcctggacaagacggtctccttcaacctcagcgacattggcgagggaatccgcgaggtaaccgtcaaggagtggttcgtgaaagagggcgacaccgtggagcagttcgacaatctctgcgaggtgcaatcggacaaggcatcggtgaccatcaccagtcgctatgatggcaagataaccaagattcaccacaaaatcgatgagattgctctggtcggcaagcctctgctcgatttcgatgtggtgaatgaagacgaagatgagccggaggactcttcttcctcttcctcctccacatcttccgatagttcagcaagcgaaaacgaggagaagcaatcagctgaagcatctgcgacgcccacagaaggtcgtgtgatcatacccgccacgccctcggttcgtcgtctggccaaggaacaccagttggatctggccaaggtgccagcaacgggaaagaatggtcgtgtgcttaagggtgatattctggagtttctgggccaagttcctcccggtactaacgttccacatcccacactattggcgaaaacgcctagtgctgctccaagtggagcagcaagtgtttctgtgcccgctgatcgcgtcgaagtgctcaagggagtgcgcaaggccatgctgaaatcgatgacggaatccctgaaaatcccccattttgcttacagcgacgaaatcgacatgacccagttgatgcaattccgtaaccaactgcagttagtggccaaggagaatggcgtgcccaagctcacgttcatgccgttctgcatcaaggctgctagcattgcgctgtccaaatatccaattgttaacagctccctggatttggccagcgaatcgctggtcttcaagggtgcccacaacataagcgttgccatcgatacaccacagggtctagtggtgccgaatattaagaactgccagacaaagactattatcgagattgccaaggatctgaatgcactggtggagcgcggtaggactggctccctgtctccggcagactttgccgatggcaccttctcgctttccaacataggagtgattggcggtacctacacacatccttgtataatggcgccgcaggtggccatcggtgctatgggtaggaccaaggcggtgccgcgtttcaacgacaaggatgaggtggtcaaggcgtatgtgatgagcgtaagctggtccgccgaccatcgcgtcatcgacggcgtgaccatggccagcttctccaacgtttggaagcagtatctggagaatcctgcccttttcctactacactag

SEQ ID NO: 11784 - protein, 462 aa, DROSOPHILA
MATHLLRNGATCWLLRNCISQRAALRRCLHVTSSLDKTVSFNLSDIGEGIREVTVKEWFVKEGDTVEQFDNLCEVQSDKASVTITSRYDGKITKIHHKIDEIALVGKPLLDFDVVNEDEDEPEDSSSSSSSTSSDSSASENEEKQSAEASATPTEGRVIIPATPSVRRLAKEHQLDLAKVPATGKNGRVLKGDILEFLGQVPPGTNVPHPTLLAKTPSAAPSGAASVSVPADRVEVLKGVRKAMLKSMTESLKIPHFAYSDEIDMTQLMQFRNQLQLVAKENGVPKLTFMPFCIKAASIALSKYPIVNSSLDLASESLVFKGAHNISVAIDTPQGLVVPNIKNCQTKTIIEIAKDLNALVERGRTGSLSPADFADGTFSLSNIGVIGGTYTHPCIMAPQVAIGAMGRTKAVPRFNDKDEVVKAYVMSVSWSADHRVIDGVTMASFSNVWKQYLENPALFLLH

SEQ ID NO: 11785 - DNA, 4223 bp, DROSOPHILA
caagaaatcggccatttaacacccccacatacgaccggctgacaaaacatttcgaatgataacaggcaagacctgagaaatacgtacgtttgccaaaaagacgatcagggtcgatgagtgtataaatatatacatgtataggccacatttatagtacatagccccatagccccatctaaacatctaaacataccccgtaaaaccccagcatggaagctcaatctattgcgcagcgctaaacaatcaattctcaaacccattctcctcccgcctgaatgagaaaatattatattatctgcaaaatcatctgtaacatcgaatgatattcaacactatccggctgggaatgccacaagcgattattattttgccttcacgaacgaaataaaaagaaatattcacagaatagccgaaaaaaaacaaaatgcttaaaaatagcccggctagagagcggacaacaaatggctctggctccataggagagcctcccaatatctggtggtcgttgggatccatgggatcccaaaagagagtggcattcgaaaaagttcccccaagatgaaagtaaattcttgccatcgcacatactacagcatatattttggtgtgtgtatagccttgcgcaggaaaagagcgagcgtttcgtcatccattcgtattcgtattcgtttttgaattcgttttcgaagctatagctgtaaatgtatctgtatctgtgtctgagtgctcggcgatcggctggttggctttcacctcagaattaccttgccgtactgccactgacgaataacgttcagtcgagaccgagctcatccgcgatacagttgattttcgcatcaaacagacaaaatggtgagtgcccagtcggccaaggagtcttcacacatcttccaccaatatccagtgatatagatgtacataaatatatgcagcagctgaaaactgaagattttccacactcgaactaatgccaaactctcaaatctttttcgattccgttgacaggctgatgttccaaagcgtgaagttgaaagtaagttaaaaccccgcacgaaaaggattatctttaacctcaaacgaaatccatcaaagttaaaccaacatattaaatgaacgaggtaacggaaaacccagcagaaaggactaaaaacaagtattataatatccataaaaatacagattacataatgtgcgcgtgtgagatacacaacaaaaagtacacaaaagtcggtgaacatatttcgtaatcacttggaatatatcgcatacatatacgcatgcctatatatataacactatgcggaaaattttcattaaggaatgctgtcgtctatatgcatcgcctgagctattttcatcgatcgaccatccaaaaccagaacggataaaggttgccaacacaattccggtagagaaaatctagtgcaaagttaagtttgatttgcgttatagaaaagccgcggaaaacaatgaaaatcgtgtgtgtatatgtcgcgaacccgaacgcgcgatcctcgtcttcgagccgaaatgcttctcgtttagagatctaattttggccaagttatttctttagatttattttcgatcaaacgcacagcgaaagagatgagcaaactatgcgactttgtgtgtgtatatacgcctatatactgtgtatatagcgcagacgagggcgaaggcgttcggttcgggtgtcggattacgtatacgtagtgtgttctcggggctggcaactctcccagatccgcactcacgcatacactcacacactaagtaggcaatgcccagcagccatgtcaagattttcatgatgaccaaaaatgtgcgtaccagaaatttcagggttaccacatcgaccccgttttcgaaaataaaaagggtggtcaacacccacctctgctaaagtatttttaaaaacaattaatgaggcagcataataaaatgaaacgaataaaaacaaaaatttgatgggatttacgtttgatcgactaacatgaacatgaagatgtaaatgctaatcgagttccttttgcgcagatgtcgaattcgttttcgaagtcatgggctcccccggtgagggcattgatgccgtcgacctaggtgatgccctccgcgctctgaacttgaaccccaccttggcgctgatcgagaaattgggcggcaccaagaagcgcaacgagaagaagatcaagctggatgagttcctgcccatctactcacaggtcaagaaggagaaggagcagggctgctacgaggacttcattgagtgcttgaagctctacgacaaggaggagaacggcaccatgctgctggctgagctgcagcacgccctgctggcgcttggtgagtaatcaacatgcatatatcctgggatatccctctaaatcattgtgtgcattacaggtgagagcttggatgacgagcaggtggagaccctgttcgctgactgcatggatcccgaggatgatgaaggatttatcccctactctcgtaagtattcgttcaatggacgatactcatctaatgttttttgtgcatatacgatttgtaaacgccgtttgtctattccacatgtcactctttgtctgcgcacaaaccaaaaaaatccccaccattctgcactgtgcactttgtaccaccaactcgacctgaaaaacaccaacaaacctaaaaatatgtgtatgcgtgtatccatgtttgcgtgtccattcctccaacactacactcgcaaaaaaaaaaaaaaaccgaccaactcccgaatgtcaaacgtatggtctctgcacggtgattgcgtcttgtttacccgccgtttgtcgccgatccacttgaaattgaatgaaaacagagttcgtccagcgcctgatgagcgatcctgtcgtcttcgactaaacagtaagtagggatggagcccatggccacttcgccgatctctggatgtctacttgtccaacaaatttggggaataccttgctaatatggcccttttcttcgtctactccacagcattcctcgccagaatgtgtgacagaccagatcagctaaaatagttgaaaacaacagcttcaacaacaaccaacaaacaacaacaacaacaacaacaacaccaacaaacttttagcgacaaccattctccatagatgttatattcatcgctaactctctctatctctctcgtatattattttaattaaaaattacttctgctactacaactgcaaaattgaacttcaagataatattattttttaaaaaataaaaaaatttaaattataaaataacgaaaacaaaaaaactgaaaaatattcaaagttttgtgcacattattttgttatgaattattttgttggttcagccaaaagcaaagcaatagttaatgattattttatatgagacgtgaataaaccaaatagcaaataatataatgtttaggcaaattcaacatccgaaagcgtccaaaaagggcagttagcaaaacgccaaatgtgtaaattgtggcctttttgcgttctcaatttaccaagtgaatgtgtgaaagtgaaataagtcaaatgtatttaaataaacactaagaataattgtgcggccgatgaggtgttgcacaatcaatataaaagaagatcagggtggtggaaaatttgggattatgctatataggcagccaatattaatacaagatgtggctgacttgtttaataaactaaaagtaatagagaaagtttaaaaatcttatactgaatccacaaagaaatatctagatattttcgccgcagactgcaatacttcagctgagacacaaaccaccaacgagaagcaggcgaaagactaaaataccgtgtactaaaatgtcgttttcgctttttctcaacgagagagagctttcgaaatgtttgttaagcttagagcttggttaatatggtttttgtctctactttcgtaattattatttatttattatattaaaatagtaagtgtaagaaggggtggaaatacccgcatcctggtatctaccttcctcgtctagtcaacaataacaattataaactaatcacaaaaatagcttgggggttgagattccgctgagcttttgcgtcgacgtcgaatcaaaaaagtgtcagaaaagtttcggttaaatacgacgactacgaatcagttgaaatcgagataacaaaccgacaagccgaccgagcgggagctgtctcgctttttttaaaaatttgcac

SEQ ID NO: 11786 - DNA, 685 bp, DROSOPHILA
gacaggctgatgttccaaagcgtgaagttgaaaatgtcgaattcgttttcgaagtcatgggctcccccggtgagggcattgatgccgtcgacctaggtgatgccctccgcgctctgaacttgaaccccaccttggcgctgatcgagaaattgggcggcaccaagaagcgcaacgagaagaagatcaagctggatgagttcctgcccatctactcacaggtcaagaaggagaaggagcagggctgctacgaggacttcattgagtgcttgaagctctacgacaaggaggagaacggcaccatgctgctggctgagctgcagcacgccctgctggcgcttggtgagagcttggatgacgagcaggtggagaccctgttcgctgactgcatggatcccgaggatgatgaaggatttatcccctactctcagttcgtccagcgcctgatgagcgatcctgtcgtcttcgactcattcctcgccagaatgtgtgacagaccagatcagctaaaatagttgaaaacaacagcttcaacaacaaccaacaaacaacaacaacaacaacaacaacaccaacaaacttttagcgacaaccattctccatagatgttatattcatcgctaactctctctatctctctcgtatattattttaattaaaaattacttctgctactacaactgcaaaa

SEQ ID NO: 11787 - protein, 151 aa, DROSOPHILA
MGSPGEGIDAVDLGDALRALNLNPTLALIEKLGGTKKRNEKKIKLDEFLPIYSQVKKEKEQGCYEDFIECLKLYDKEENGTMLLAELQHALLALGESLDDEQVETLFADCMDPEDDEGFIPYSQFVQRLMSDPVVFDSFLARMCDRPDQLK

SEQ ID NO: 11788 - DNA, 3750 bp, DROSOPHILA
acagcaacatattatttagttatagagcatctaaatgggaagctagtttaagtaggtttcaacctagttgtgggtgcaaatgagcctggaactacatgcatcgaacaagtatcaggttctattgagtcattctgaaaacaactaacgttagtttggaaaacataaagtaaagaaaaagggtttatcatgcataggtgtgtgttgcacttacacactaacttggtatagtgaaggctttttcttttgctaatcaccgagttggaacgactaactaagtctttacaaaaactcaagcatatggatatacttaaacctatgagtaactgaacggctaataccctaagatttattcaattgtaaacaaattcgagaaattcgacttaaaaatgccttctatcggaatttcaacagaattacaggaatgttaatgatccctattgccatggagacagcatattattaacgccaatcgttacaacagcccttaacttcggtcgagaagaagaaaaggtccttaaggactacgctcgacaccccctgtcctttaacggtcttgcatgttaccctcgactatccctagttgtaggagtgcgcctcagctgggcggccaactggttttcaaatagtcaacggcagctaggagcagcggagagtatcgaagcggaaaggttgtgtccaacccccacacatgcagggcgacttggttggtggtggtgcctggccagctgcggagcgatctccccacatgtccatgcaaagatcgtgcttgtgctccgagagtcgcgcacaagtcaagtggcacgggctatgcgaggaggaggagggttagggtaggaggatcgtgtgccggagaggaagtgccggcattatctcggctaaattcgaattcgtttggttacgctgcgtggtcttggccaagagctctcgttcctcatttctcggttttcagttttcggttctctggcggccaagagcatttagttgccttagttgtaccatgccgagcggaccgctgagttaggatcggttgagaagtctggcatacgagtggaagtggaagtgtagataggatagtgaccgttatggataccctgctgatcgccattctggccatcggactgctccacagaggtacagccagatcctgtggcgatccagccagcaaccgatatgggaaacgcgatttttaaattaagaaatgaaatcattcggaaggcgcatataaacgaatttcgaatgcgcaaaccttgagaaaaataatgacaaatcggatatctataaatacgaacgtatatccacattcggttctgagttaacatgtgctaaaacggaatataaacaatatataaacaatatataaacaatatgtgcagattcgattatcctttaatttgtggatttgaacgggctgaaggattttacgtgcaattattcgtgttcgaaactatatgtttttcaatgtggaaaaagcgccagtggttttgaagtcggagcaatagatgctaagtggaaagcaaaagattccagcgaaaggaacctaataaaattgaacagagttttcagaattttggcacacatgatgacaaactgccgaatgaaaaatgttcaattttctagcttttgtttgttattagtgtctatttttaaaacgaaacaggcatccgctcatcgcgttttcgcttctcgtaaatatacgctttcgccaaattatatagatttttgtgtacaatgtgttttggatttgcctgtgctgcatatgtacatatattccaaataataccgcgcgtgttctgtaatttcgagacctcgtcgtgctaaaagcttttcgtttcgtttctgaattctgcgttctaatcagtaatattcgctctcccccagatgcgctatgctatcccacgagggatgagtccgaggacaagattatagtccttcagaacgaggagatggagcccacgatcctggactgcgactacgaggtggaggagagcccgaagttcatcaccgtcaaatggtacagagacgacaagtccatataccagtggatcttcggaacacctccatatgccatcgtgagtgaaccaaacggtgtggtgcgcttaagatactaaccgctttcccctccttgatagcccgagttcaggaacgagattgacagcacctatgagagctccacggagccgagcaagcagtacagctcgctggctttgatcaaccccacgatcgccaccaccggcgactacaagtgcgtggtgcagacctcgctgaacaccttctccagccaccagagggttcaggtcatagacctgaggaactacaccctggagctgtcccacaagacgatccacaatgagacgcagctgaactgcaccgtgacgaacgtgtatcccaggcccaccatcacgataatgtaaggacgagcgcctgccttgtcgtaagacagccttgtagtaaacaacgtcccaactcaactccgctcctattacagatccaacgacatggacgtggtgaagcgggagcccatggtgtacgagaacgaggagggatacttcgatggcagcgccgtggtggcggcctacgacaccgacgacgatcccgatgcctaccagtgcgtggtgtccttcgagggatacggcaagaacctgaccacggtggccacgtccgcggcggcgggcaggagccacgtcgacttcagcctgtggctgttttgttttctgtactacctgctctgcaagctgaaggtattggcctaaataaaagcgttgttatttattgttactaaattaatgtttattgaattctgtttgccattcaactaccttttctacgccccttcggcctagttaaccattttgtaaataaatacgaatacttcacaaaaccaactacgttagttaactcttaaggttgctctggaaatggatgccgtccttctccggcggggcttctagattttaaatctacgactgcccttgtcggcttacagctattacattttgtaaattaactcggcttgaactcgaactccatgcgaacaaatgaaaatatgggctgcaattcggaaatgttgaatatttctgtttattgatatgtggagctggagtccagcagtagattggaacagccgttcaggtaggccttgtgcagcttgttggcaaactccttatcgttctggataaggtacgtgaaggcctggacgaactgcgtcgagttcagcagtggctgctgtggctgctgtggctgctgtggctccggattgccgttgttgggcgcgtcgaacatggtgggcggcatgagggccggcccgggcttgtcgccagccagcagtctccgcaagcacttgccggcatcgtcgttggccatcagcgccgacgaggacggggcgactgtcggagattgagccgtagcgtagcttttaccgatcttcaggtcgctcaggagctgaatgttaagctgctgcatcttctggaagggcgacagccggctctcgtgattgtccctgcctgccgggggcaacagatcctcgccaggcgtggctgcccgctgctgtttctccagctggtccacggagagcggctggacgcggtggaacagtgactctgccgtggcctgcttggccgattcgaagaacttcaacacattgccggccgttacgttctccgccgaaggcgtcttcggctgcccgccgctcacctgggcattgtagtccttctgggccttggtcagcatgttgaatatgctggccggctggct

SEQ ID NO: 11789 - DNA, 865 bp, DROSOPHILA
ccgagcggaccgctgagttaggatcggttgagaagtctggcatacgagtggaagtggaagtgtagataggatagtgaccgttatggataccctgctgatcgccattctggccatcggactgctccacagagatgcgctatgctatcccacgagggatgagtccgaggacaagattatagtccttcagaacgaggagatggagcccacgatcctggactgcgactacgaggtggaggagagcccgaagttcatcaccgtcaaatggtacagagacgacaagtccatataccagtggatcttcggaacacctccatatgccatccccgagttcaggaacgagattgacagcacctatgagagctccacggagccgagcaagcagtacagctcgctggctttgatcaaccccacgatcgccaccaccggcgactacaagtgcgtggtgcagacctcgctgaacaccttctccagccaccagagggttcaggtcatagacctgaggaactacaccctggagctgtcccacaagacgatccacaatgagacgcagctgaactgcaccgtgacgaacgtgtatcccaggcccaccatcacgataatatccaacgacatggacgtggtgaagcgggagcccatggtgtacgagaacgaggagggatacttcgatggcagcgccgtggtggcggcctacgacaccgacgacgatcccgatgcctaccagtgcgtggtgtccttcgagggatacggcaagaacctgaccacggtggccacgtccgcggcggcgggcaggagccacgtcgacttcagcctgtggctgttttgttttctgtactacctgctctgcaagctgaaggtattggcctaa

SEQ ID NO: 11790 - protein, 260 aa, DROSOPHILA
MDTLLIAILAIGLLHRDALCYPTRDESEDKIIVLQNEEMEPTILDCDYEVEESPKFITVKWYRDDKSIYQWIFGTPPYAIPEFRNEIDSTYESSTEPSKQYSSLALINPTIATTGDYKCVVQTSLNTFSSHQRVQVIDLRNYTLELSHKTIHNETQLNCTVTNVYPRPTITIISNDMDVVKREPMVYENEEGYFDGSAVVAAYDTDDDPDAYQCVVSFEGYGKNLTTVATSAAAGRSHVDFSLWLFCFLYYLLCKLKVLA

SEQ ID NO: 11791 - DNA, 22660 bp, DROSOPHILA
gccgagaactacaaaggagctgcttaaataaacggcaagggcggagtgggtggttgggtggttgggaaacaatcaaaatctaaatcgaaatcaagtgaaaatggaattcgtattaaacgcaataatttaattgattaaaaggcttcaaactaaacaaatatccattcgctttagttattgttacttgtgtttaccgccgtgtctgtctgtttgtgtgcgtgtttttaattgaaattgttttgtgttttgactagctgcaatcctataaatacgtatacgtactctatatatatttatatgtatgcttgcacgatataatatatatttatgtacgcttgtgtgtgtgtgttggttgctcgtgtgtttagtaaaaatgtgtgactttaaaaatgtgacgacgactcgcttgtatcgacattcaactaaatttatttcagaatttcgcgcttcttacgagccgatttgtcggacctcgtgtttgttttaatattaaatttaattcaatactagatttgcttagctaccactagttacgacttattggctaattaaatatagtttatcgtatttacttcacttatttatgctaaaaatagattggaattcaatgcgatttaattacacccattctgcgtgggcgcatttcatcagtgttttgtttttgctctgctaaaaataatgcgaaaaatatgcacaaataaataaaccattaaaattgattttcttcttcatatgtatgtatattgtggcacgcacacactcacacaatctccagcagaagcacccacactcacgcactgaacacatgcagtcagatttaaatttaaaatgcaattttaaaacattttcatttgtttttgcttctttttgttagctttgttgctttgtgttgtgtggaactttataactaaaagatgtaacaaggaactttttggcgctcaaaaatacaatataacttacaaaactccatacgctttttacaacactggttcgggaaccacctaaacatcttcgaccacacaatcatacatcaagtacatcaaaaaacttacaaactaatctccgctccgcagcgatcttgtggcttgcgtcgctgtccagcactgtcacggttaatcaacactacaaccccatcaaattacattacatacatattttgatcaactgctccaaaaacttgcctccattcgattgtatctcaattcatttcgcaatgttcacttcactcgcctcgcgcacatttacgatgggctccacgagtcatccgtttcgttggtgctgccaacactactcacaataacctttacagcactgccgatgacactgccactgtcactggcgttgctcatactgatgctgctgctgctgctgttagtgttgtacaacgccgaggaaatactcatggtttggctcatcgtatattatccacgatcatcgtcgcgagcggcgaacagggtccgcagcgagctgatgattagattccaccagccagccgcgaacccaagtggtcgctataaggtgttctcgctgcccatcttgagcagctcgaacttcttcttggcaatcttcgagtagagtatatcgatcggctgcgattggtcgtacaagctgggagcctgcaggataatcagcgctgtgccgaccacgcaagcgatcgcgaagatccacagaaacatacgatccaataccatggcaacgtacttccagtcctcttccacctgaaaggtgcggaaataaagtcatgatgagttagtacatactaacaaatagctacttcaaagcttttgtgctagcttgtcaatttaataattgcttatatataaataaaaaacgtagacaggaaaactaataagtctttcatggcttctaaccatcttcattaatcattttgccaatcgaataaaatggtcttggcacatccaaatcagatttgcggtccgggctttgccagttaaattgaaatgtttcagagcacacatcgattgcaactcaaagcccacactcaccgcacactccatctgcacacacgcatacacatagacgatgtacacaccaccacccttgcaaccaattgcacacccagcaattcgccaacaaatggcaaactgcagtgcaggaaccgcatgttgcaaactcttcgtatttgcgcacaaacaactcaatcactcaactccaaacggtggcgacagaccgattgcccttcactcggcactgctggcggtggcagagccaacgtgatccaaaaaaggatctgccagtggcccactcgtttgattcctgattagaaaggacgctagcaacgcgatttaaccggctccggttcgttttggccgtgcagaaatgggggatttttacggtcctaatgcgggttatcaagagcagacataaacactgcaccagacatgctggccaggtcatttctagtctggccagcagcggattcggagtccggactgcctgttccagctgcgagtgccagacaatgattgcggctgattggccaccaacggcgggtggttcgcccgttttgcaatgctgtgtggtgcggaggtgtggcacggattatttgattcttttcgcaacatggaaaattaataacatcgcggtgttgcaaaaggacgtaatgcgaattgtgaatcaggattgcgagaagaaacggaaatgcaaggatttgttttgcaatggaaaatgaaaggacacagcaacactagaagccatggactttaaatcttcatagctggcttaaaagttgttttaaatttgctggaattgttaattgctttttacttgtactattctgtctaccatgaatttaatcctcttaagcaagggttcttatgtttgttatgataattaactgaaaagcaatcttattttttcaatgtgctctttgttagcaaatataatttatgataaaaggtttaaataagcgaattcaatttaagtttagaaattaaaaagagtacggctgcatagttattactcacactctcaaacttatccttgttcttcacgtgctgcgcgatgaagcgggatccttcgatggtcttctccatttcgcgggcgtagggcttctcgaacgtaggactgagatcggcggcagcggcggctgcagcggccgggcagcagccgggactgatgtctccgttgaggcccgacgggctgaacagatcgtcgtcggcgcccgggagtggcagtgaggagggcagcggcggttctgcgaaacagtgggcgctaatcccgcccgccgcagccaaatcgaagcgatgcgaagcgggtagtgctggggaaaaagataaaaatatactgattaaaatctttaaaatccttaaaaaacgcacttcttttaacagaaattaacttcatagccttcattttctttgaagttgaaattactggtgtgtcatagaaagtatagcttcttgttaagtaagctgcttttacgttactttttaccgaaaccagggacccaattctgggtggatacttttttccgagtgtttgccagcattaacagcattaggcaaataaagttgtaaatgcaatttgcaacttttctgcattgtcttcgccgtcgcaatgctccttggcacaatgtccccgaaggaagtgagtagacaaaggaccctcaacctcgagggcggcccaacagaagcagagaagcaggacttcaggtccggggatacaataaggaaactcaataaatagttttctgcattctgttttccatttattttgctgggccatttgaaagtttcaggtcttttcttttgcgatttccctttcattttcgcgcgcttcgaaagccatttgaagtagaaattattttattctttgaccgtaagcttaaaattattgctccacgcggcgtatgcgcaatattacgtatacaccaagtgtgcgccttattaaaaaattgcttctttaatcttgactccattttaatgagccatctaaatgctgtcagtttggggcgacaaaatagcatgaaaggcatttcctagaacttataatgcctggacaaaactttcccttttggccggcgtccttgcagatgcacttgttaattgtcataaattatttcgccccgccctccgaacacggcatcattataaagcggtgtgtctgaatgcatataatttccatgttgttgtgcatatttaaaatggaatataaactggcaagttgcaagtttcccgtcgctcgctgcatgcaccgttggtaatgtgcccactaaagccagttgaaaacattcataaatttctcagctgcaggatggggaactacaagaagcccacgaatcccaagatgccaagttctacacagaaagtttgcatcaagcggagcgggaaaatgggtggaaaacttttgcttcttttgtatgggattcgcccgccagaaggcataccattgttatacggaattgggtttatggatgagatagtggttcgtacctggaatgccgtagtcgccgctgaaacgcttcgaatcgtagttgacaaacttgtccacatccggcggcaggtgatagacatcggtgagcacttcgggcggctggtcctcctcgggctcctccttcttgggccgctcgatgcagagcagcttgggcaggatctggatgaagaggcgctgcacccacggtgccatgcgatgcgtgacaggggatctaaagaggaagtgtaaggatgtgcaaaaatttaaatacgattcaataacacaagagactttttagtcatcttacctaaaattcacattgagcacggcaatggtgaccacgacagagagcgtgaccagcatcatggtgaagagcagatactttcccagcagcggcaccgtcagcgacgtgggcggaatgatctcggccagcaggaggaagaacacggtaagcgagagcaggatgctgatgcagagcgagatcttctcgccagagtcgctgggcaggtagaagaccagaacggacaggaacgagatgcccacgcagggtatgatcaggttgaccgtgtagaagagcgtcttccggcggagcgtcaggttgaacactatgtccagatacggctcctcgcagcagctgtagaacttctcgttccgcaccgccggcacacgcatgatgtcccactccacggagatgtagtagtcctgcaggtcgatgcccacctcgatgttgtccgagtcggcggtctgcttcaagtgcctcaagtccacctggaaaagattcgataaataactatttacttaagtgtactgcaaagtgtattatattttgtttacaaattacgttttaattgaacaactggcaactgattacatcgattcaagggtgagataatcaatatgcaggaccagctggtctttctttaaacttgctgatttatggccggcaactttggcaactgctgcacctgttcacctcgatccaacaccaacaccaggccaatcatacatctatttatgttgatttgttggcccatttccccagacgaagcatccttggaaacatttgggccaagtgccgcgctcacagaatcggaaaatcagaggtgatggaaaaacgtacttctgacaaatttttgacaatcgtcaattgcacggagaatcgtttgctgtgaacggagattgagtttgggatacggcaggtgaatggttcctattcctgttccggatcctaactcagcgacagatggcagggaatcgcgataagttcgactcacgtgcgaaccgaaacacaaatgacatttacgcttgttacctttatttcatttccatttggcttgatttgtcattggttgtctgttgctcatttatttatcagtgggtgggtacttctagtggagtgtttttcttataataacaatttattttctttccctaatatatcaggagacaggcttgaattcggtttatttaactttatttgaagtttttaacaacatctgtacccatcgaaatactgcgaattctgtgtttcaaactggtcaaatgaaaaaactttaaggacatctattcctatgagacaatcgtcattaatacctcgtcctgcatttgtgctgacactataaaagtcccaaaaagcgatccacaaatttcacaacccatacgagttgtagaaaagtcgaaagtcaatgaagcatgctcgaaatttgtgatgcgtaaaggggaggaaaacgaaaatttatatgtagaataatgtgctgtcatttttcgatttttccccccagcttccgattttccttcgcttttgttgttgcccataatgaacacaataataacgggaaagaggcgccatatagcaatatagcgcaacagttgtgtttttctcgaatcattttagccatacacttgaaataagcggggttgaaaagtggtgaatatatatatttttttggtatttgtagcagaattatacttggttatttgtttaattcaaagtagtcaaggacgcgggaaaagttttttaaataattttttacgttcaagcttcgtgtttcagttgcttattttttctttatacattaaaccttgccgacgcaaaaagttttccaaaaaggcgtgggcgtggctggttcattaaacgcagctgccagctgttatctcacaaaaacacaagaacacacacacatgtgcatggaaaatggaaaatgggagatggggcgagtctcccacttgatttatcacatgacagcaagtgaaacgtgtcaagtgtacaaaaaaaaaaagtagaaaaataaacaaagtaaacattaacggcagattccaaatgaaaaacgcgcacatatttaaccacgaaaatccacccgagtgaatcataaaaaagaaacgttcaatgccattattttaacatgtttaaatagtcgtttaaccgccactttcttttttccttttcctttaaattaatgtttttttaatcgagtcaaggcaacgtttgattagcactcagtcagatagaatcaagcagcctcgtactgggttttattttgcttcgattttgattgatgggccgggggataatctgttcgtggccagagctgccagctgttgcctcccttcggatgatggcttctgggtcatccccgccatcaaatccccaactcaccatgtaaccatcgtaggtccaggatccgaacttcatgaaacatgtctgctcgtcgaagggaaagtactcgacatcaatttcgcagaaggatttgtaaatggcgggcggtttccacaccactttgcccgtgtgatgaagaattgcttttgtcattattgtcacttcatagttgccatcggcgctgaaatggaaaaaaaaaaaaacgatggaaaatatgttagatttggaaacgatttacatattgattgaactaatattttaggtatatcaatgtgatatcctttaatgttatctttcaatgatttaactttcaaatatatatcaggacttaaattttttttgtaaagcattttgttggcgatagaaagtttttttctccacccgaaatcgactaaaagtgccgaactaattaaaaatacattttagcttctaattacgaattcattttagactgaaaaaactgcggctaatgctaggatgtttgcgtactgtatcctctggcaaggggccacgcccccctacataaggcatatagcatcggccgctgctgacgatggtccattagcagcaaggtccttttcggatcctctggctatggccactggccagagactcacactaaatctaaatccgaaagcaaagcgttttaaaatgttattacaacaacagcagtggcggtggcagtggcagcagcaaccattaatggctaaaaaccatttaaaatggctgtcggcagtgcacacacacacacacacacacagggtgagatggagatttaggatggaataaggggggagtggagcagcaggagtctggggcgacagagaaagaaaatcaacaaagcgaacaaaagtttataaccgaaaccgaaaaaaagccaaaaccacgcctgggggtcaccgcaattgcagccattatcttaacggtgattcacacacacagcgagcgacaagcccacacacagatatacatatatacatatgtatgtgtatagagccggacaacgcggcgtatgagtgtcatcgctgtagtcctggcagttatcctggccaagccgacggcgcctgccgcgtctatcagcgcgttaatctcagcgccgcacagcgagcgccatctttgtatctgtgccccctgcgcccagtcaaagttttcaggccacaaatcgaagcggtccacagtggggccagatgccatggaaagtgatcagaagtaatcagtgatattactttgagaatggtttgaaggcaaaccttaaccatatccaattaattgtcaaactatttgttatttaaacttgatgcaatgattagttgaagttcgagaatttccgcatacaaaggactacaaagttagttgtgtatagtattcgtgtcagctggctccactgtaccgtcacggaatcaagggagttggcaacccgctggcgggcaggaaaaactttttgctgactttgttgccgctgctcccgattccctggccatgtccttttccgtccgcttcccttttgaccaccgccaccgcctttgtcttgcttcttgtgctcaacccatccgcccatccgcatcccttcgtccttctggtacttcgccatgccatttttatttttataaatctaatgaaagataatgaaattttatttcgtttcttttgatttcaacgcagttgtcgtcagctttcatgctaaaaactaaaagccaacagcagttgaaaaagaatcatagataggggatgtaagaaggaggggctggtggctgaggagcaaccagagtcaccaccagaccaaccagacacccatctagcaacatacaataatagaattaaagtggctgcggctcctgttccactgattccactgtattagtatgggtgtggccctttggtcgaagcccgggcctcgcaaaagttcagctgataataaagttgtcaacaacattcatttaattaaagaaaacaaagccaaagcagagcactttgggaatagtaccgagttccgagtgccgagtgctgagtgcacgaagccagatccacatcccaatgtgaccaaaacgggcgttcgaacggggggagtctaatgcccaggcagagatttatggcgttcagctaatatggcatctcaaaatggtaatgcgtttcgcccatgactgagttggtgagcgaatgtgtgtgtgtgtatgtgtgtgtcggcttagtgggattatttttccagccaaatagggcagacgtatgtatgggcgtggtcctaaatctgttttaaacgcgctagccagaactatttgcgcacggaaaataaaacttaatgcgatcatgtatacgtcactttatcaaatgagattgtttttcacataagaataaaatcaacatttaatattttcatataatcaagtgataaaaatataaaagaagttgcaaatgttttgtttagtgtcgaatataaatttataatctgtggcatctgttcggggtataatatcatggaatcctcttaaatagcagagatatttgaaacgattaaatgaaatcaaataaatgtaatttagtgacacaaaatttgagcagaatctggacgaattttgctctccatgtcgacaaacagtaattattcgacggttgctaaataaactcatatgcgttatgtgtgcggcatgctggctaaccgaaataaaccactaaatgcggccggagtaagcatggttacggcttgaatacgaccaaaaccgaaaccggggtcttgagtcagtcgagtgcgattttaatatcttggatcaacatgaaaattaattgctggaattaagcggctttcacaaatataaacagcagcccaatcagtggatggtgctcgccgtctttaggggggggggcagtaattccaattccaagcagtcggtctattttggcggctttaagtggattccatagttgctttcggagtatgagtgtcatatagctttggtagtcagtcacgtctgccggctgtatgcgcatttgatgagctcacatgcgagtgctagacggataattaggccggatcccaggaggccactacaagctgagtggaaaacaaatgcaagtggtaattgcaattcaaaaattaacaaaatgttgccaaaaatgttgcaatttgctgcggatctggtcgaaaacaagaccgaatgccagaacgcgagcaataaataacaacttttgacgcttgttttgaattcttttgtggcatttccccagcattttggccctgaatgtgccgcgtttttgcaaggatatgaatgtatgagtgtgagtgtgtggcacaaatgccgcacgcaacgcacgcaggtatttttttttttttttttttgttctgtggtggttgtgaagggccggcacaaatttgggccatttacaaaggctggccaactatttattttgctgccattgcgcgtttagcagacaattaaacatttttcattgcatacaaatgggcgcacgaggcgcatggtattcccattccgccactcatacgcgtacaaaaagttgcatcgtaaaatagattgccatcgtccttgttgcacgcgtgtgtgagtgtgtaagtgcgacaataaacgcgttttcctccgccggctgctgcacatgtatttgcatttaaaattacagccagcgaacgcgtcttttttgcactgcaacacttggcgcttaatttctgcataaattttcatgcccgcttgtttgcttcaaggatctacgagcggaaacaaatcaaactgagagagcccaggaggcaggatattgatattgacattggacttacgtttattatccttgcggcaacattaaaagcctacaagataaatattcgactatcattcgtttaacttttatgaatttggttcagattcccggccgagattctatgcgtggaatgccataaagcggcccgtaagccatcaccttaacttgacactaaattaaatggactttggccaggccatttcgattgtcattttggagaagaggaaaagaaaaaaaaaaacgcaacacaattaagtgcgttgaacacaaaggacacttcaagttcaatttaatgtggcaacaaagcgaaagcgcttcattatggtgcgtacaaattatttgcagtttaaaaaagcgtaccaacgaccaaaaccctggccatataacacccatggcgttcttcggataacacccgcttccactttctttagttacaatgcctttgtcgcttgctggctggatggcaaatgaaatttaagctttttccaagcaataaattacgactttttatgacactgccgccaacgaaacaccccgaaagtattcaatgcgtatagttgccgctgccaagtcgctggagtacaaaatgtgagcaacaacacacacataaagggcccataaaacgcgtaagccgatctgccgcagcaacaacatcaacagcagcgatggccaagatatcctgaccgatgtcctgggaagagtactcgagcagcttggcaaatcgacaaagtcaagtgtccaggcaaccgaactgaagggctacagtgggccaaagtcctcaaaaggattgcaaaattaaattgggaagcacaaggaatcgatatgcttggctaagatatatttcaataaaattgagttccattttcccatgaaggcatttgccttgctgttgagttttaaaagttaatacgtttcgcttagaaacaatttcattgacttgccaagttcgctctcgtttctaattagttaaattatttgaatttgaattccttttaatttctcgacatattccattgcctatgtatcactatgtatccctggcttcactccagcaaattataataattataccgacccaacgaaaacgttcaatttgagagcactacggaccacgaactgtggattgggggccgaaaaggacctccccaggacacttagccagcctctagggcgagccgaaaggcaaccgcaatgctcaagttacattgaaataaaaatacgttaatcatcgcctgataaatggcctagtccaggaactgtacagcttggctttgatttatgccgccgcccattcggggcaattatgcaaatggccaagaatctccaggcttctagctcccggctccaggctatcggaggagccggcgatgctgactgcaggcaaatcccggagtcgatgagctgggcgaaaattagtttggtacttacttgttatagagcacaatatccggtagccatatatgctcggagggaacgtgcaaagtgtccacgccgccatagtcatccggattccatttcaatttatagtcgttccattcctgaaattgcaaaatgcacattgtaaaacagtggtacacacagggaacaacaaaagatgtcactatgcgatgggcaattatttatgcccgattgccataaataatagaaaaacaaatgtatatttgcggggtgaaaaattagaaaatattggcactttgagtgcggctattcagcgtttggtctatctataaatatttcattatacggttgagggcgtttaactctcgtgtatggctgcaatttcaatttcattaattatgcattaattcattggtcgctaagctgttggcattaaattacattttcataatacaattgtgcttcgatgttgggcttcaatgtttaagcacgaagtactatttaagccaggggtatataagtttttggtacccgctgaagctctacaattaaagtataagttttacttaatttcgcaatagattcaaattgtgatattttttaatcaatttccaattatacgctgacaaataggtaaatattaggttttgtgaggtatctgttagtcgctacgctttcatctgacatcgaacttctttttcattgctcatacgcataactgtaattatgttgattgccactttccatatatatatgtatatatatatttatacgaccacgccaagtgggagccatcacactggggattaccagagttgatattgggttggggtttcatggtggtcaaaggagcaggagcacgctcgctttcgtgctgaccaagcacgaaattccccgataattgcaaatataattgcagagtgggtttcccaaatggtttaatattgatccgacttacacacgaaatcgggtgtcaattgtccttacatgcgtttcagccattatgcgaagtaagtgagttactatgctgtttatctacctaaaaaagtattatacttgtgctaaatgctcctagccacaagaaattcgagtaatataacacatttaggccttatatccctgctttcgcactataattatggaaatacatggctcatttaactgcggttggccacctgcttaaatgcaagtgcatctgccaaatacgttggccaaatacacaaaagcttttatggcgctacgtgcgcaagcgtttgtggctttattgacagactgccgcccacttatgaatgggcgtggcataccacgaaaccaaatgagaaaacaaacaaattgcagtataattcatggtaatcggttcctgaatacgtccttatctggccatattattacacattatttggttgtttaagtggcagatattataccaacgtaacgtttaaacaaatgatccgcatattttctaccacttttttaagctttaaatatgtaaataatagatataactatatatgtcaatactcaagcatacttgtaacattaaatggaatctacaatatttgaattgctggcgaaatgcaattctggaacacaatgtgccattcaacatgcaacacacgctcataatgaggaccggaatgagcacttgcatttggctaaaacaaacacagatgcacacaattgcaaattgcttggcaaaagcataatttatatatcattttgtattccgcttttgttattgttttcggttttagtgaattgtcaaaccaaaaactttggataagctgctgccactattgactgcaatttgtgtgcgaggaatttgctgtgcatgttttatgcaaaaccggaaaactttaaagtccaatcccaacccacaaaaatttgaagagtgtttaaaagcagctgggataaaagaggcattacggaccaattgatattcctctggctcgtgcttttttcttttggatatttttttttttttgtgtttttgggcttgtggccaactgctgctcgccgcattagtgcaaagccaatggacatgtcgagtggcaagcgcacaggaactggaactggaagtgggagtgggagtggtagtggtcctggcggtctccaatgtcctggtggtcctgcgaaatggagcccggccacttggccaacttagaagtttggcataatgcgagcgcgtcgaaattggctggcacaaattattttgcattcgacgtcagcgaagcatgcaaatggcaaattcatgttcctttgaaagccaaatcacagttgagcaaacgccataatatatgtccaactatttcagcttgtgtgctgttttcactcttatagtacgtgtatgatataaacgaataacttacctgttccacccagacattggttgtcataatttgattctttagattctgcaagtaaacgaaacaaagtcgtacagatttgttagactcgaatgttaacaagtgtttcattaatttaatgctgacagtttccacttcagctgaattgggtggggcctgcatgggtggctttccagccaacagccaagcagcattgagtggcagagaccatcaaatagaactcgttgtgcccggaaaatgttgttttagtgaactgagctcgggcttcacttctactgccacctcgatgcagctcttggcgcttaacaaatctatttcgaagtgctccgaaaagtgcaagagggtggctccaactggggcaagtggaattgggttcgggatgtcgtgcagtgagcttcagtctcctataaccattcagttttaatcaatttatatgctagggatatcatcttcccctgacgataagcgaaacttttggctttaagagcagctaaaactttccgcttgctcaagtggccattgcggtgagccgctaatcgaacggaaaattgctaattgggaaaatgattgtggggagggttctttaaaatttcgttaatatatatatatcatcatttttagccaaagctatgataaaagaaaactatcgaaaatatcatattttagccaaatgtggttttccacatttttcggtaaataattatacggtccaaatggtccaaatattgaatggcatgtctcgataagctcggaattaaatcctcaatcggctggagttcaaaattacaaatttatttttttttgattttttttcaaatttttttaaaaaaattttttacctattataaaaattacaaaaaccgaaaaaattttttttgttattattttcaccttaatgtgaaaaaataattagcattgataaaaagttgtaagaaactgtattcattgcgtctgtatgaccatttttagccaagttatgctgaaaatcaatgttgaaaataacgaatttcatcaaggtagtttttgtcatttttcttcaaataataatcggttttttggacaaaactttgaaaataatgctccaaatatcgaatgtcatatctcgatgtactcgtaatgaaattcccaattgattagagcttaagtttggtgattttatttttttccaatttttccaaatttttatgatgttaccccttaccgaaattgcgaaaattgaaaaaaaaattttttttcaaattccaccaagaagtggtagaaataattagtattgaataaaattagtttaaagcagtttttaatatgtctataagaccatttttggctaacttatgctgaaaatccaagttaaaaataacgaatttcatcaaaagtagtttttgtcattttccgtcaaataataaccggttttttggccaaaactttgaaaataatagtcggaatatcgaatgttatatcttaatgtgctcgtaatgaaatccccaatcgattaaagtttaagtttggtaattttatttttttttcatttttttcaaatttttatgatgttaccccttaccaaaattgcgaaaattgaaaaaaaattttttttttcaaattccaccaagaagtggtagaaataatgagtattgattaaaatttgtttaaagcggtttttaatatgtctataagaccatttttggctaacttatgctgaaaatccaagttaaaaataacgaatttcatcaaaagtagtttttgtcattttccgtcaaataataatcggttttttggccaaaacttcggaaataatagtcggaatatcgaatgttatatcttaatgtgctcgtaatgaaatccccaatcgattaaagtttaagtttggtaattttatttttttttcatttttttcaaatttttatgatgttaccccttaccaaaattgcgaaaattgaaaaaaaattttttttttcaaattccaccaagaagtggtagaaataatgagtattgattaaaatttgtttaaagcggtttttaatatgtctataagaccatttttggctaacttatgctgaaaatccaagttaaaaataacgaatttcatcaaaagtagtttttgtcattttccgtcaaataataatcgggttttttggccaaaacttcggaaataatagtcggaatatcgaatgttatatcttaatgtgctcgtaatgaaatccccaatcgattaaagtttaagtttggtaattttatttttttttcatttttttcaaatttttatgatgttaccccttaccaaaattgcgaaaattgaaaaaaaaatttttttttcaaattccaccaagaagtggtagaaataattagtattgaataaaatttgtttaaagctgtttttcatacgtctataagaccatttttggctcacttatgctaaaaatccaagttaaaaataacgaatttcatcaaaagtagtttgaaactttgaaaataatagtccaaatatcgaatgtcatatctcgatgtacttgtaatgaaacccccaattgattagagtttaagtttgaaaattttatttttttccatttttttcaaatttttatgataaaaaatgcaaaaatcgaccttaaaatcaacatttctattttagccaaacaattatggggttcttttgccttggcaattaggtatataaaggagtgtttatatgatctttgtaatcacttttattctagttatgatgaagaaagcaccctattctatctggctcattcctaaaaatctctagggaagctactgaatctgctccttcatatttcgttgcgtggcgggcgaaactcattaaatgtggggaagctcaatagaaaaaattagaaaacgataaaattgcggaataaatcacttaagtgttgaaaaatgtaattaacgacagaatgataatgatgcggcgtaacgcgtttctcgcacttctttccgccgcagagtttggacctggaatctttgaaggatgggggtggaaaaccccagggaccgcggcaatatgtcaaggcacgcagtgttaatagatttttccagccacgcaacccaggctgccagctcccggatcctttatcctggtatcccctcggtaatcacccgctccgaggactcttagtccttctgtggacccgaccagaccagagcagagcagccagcccgtggaaaggtcattaggcgagggcgacgcggaaaaccggcaataaaacgacaaagccaagaaccaagcacaatgactaagaaaggcgatgagtatggcataaggaagagataaaatatgcggcatcatgggagctggaaagccgtaggatgcggaggatgcaaaggatgcggagggaagctgagccggtagcctttatgctttatgtgggacatccgttgcaaccagtggcagtaagcggagcacgctacaaaaaaaaatgggaatatactgtatttggaggttataccataagtaaccatatctaaaaagaaagtaaccaaaaatcaatgttccattgcgagatatgtacgagctaagcttttatattacactcctctattattcataaagctactgagttgctagaatattaatttctttaaattatttctttcagtgtggcaagcgcatcagcacagtggttgcgccgcagcttatctcataagaaattgagaaatttgcaatcaggatgccgccttccagagtagttgtagtggttgtactcgtattagtggcggtcctggggcagttcgcacctaggactgtaattggtgttgcttttgtcgttgttgcacgtctcgcctattcgcacttaggcgggggcagcggcaaggatacaagactttcccctcacccctctctaacacgatgcaggatatgcagcatttaaattgcttaagccaagtgctttaagcagtcgtcctgcagctggatttgcatcctctgtgcgggtgtatgaatatctgtgtgtgtgtatgtgtgtgacaggtttacctactcgagggatccggatcgcccagttctgggcaggaagaggattgcccggcgccgtgcccatgacttgcctgactgggcttgtttacaatttaaatcgaatttcctgtgtgctgtaaataaactttgcaaaaggcattccactcggcacacaaaaaagtgtcctgtgaccacaggagcaccaggagccgcctttgaaaaggcggtgtaagctgaataagcagtaaattaatttccgaaaatattatgaaatactggcttatttcaggaggcctctctaattccgacaattagtgggggaaatagtaagaggtcaagttaatgcacttggtaaaactcaaagggtctaggaaatacgaaataagtcctgactaaggttgtgagtatttttttgtaagccctaaaacgcaatatatagtaccattttaaattacatttatattgacctagttcaggtggcacttaagatatcctctcctggtatttccaattaaactgcagctctgtaaattccacaagccttttgcagcacatttatgtacctcagcatagaatgtgaaaagttaatttggttgggattgcaacaggagcacacaaaaggcttgggatttcccggctgaagagaacccaatttcggtctccgtttcaatttccccaataatatgtgtaatttatgggcaacatgcaattaactggcacgaaaatgtgcaacatttgccatttgaatgcgttttgggcgggcaaatgtaagccggtcttacaatacagctggtattgtgatggccaacaggaattgcctttctcgtcctgcatgcacagtatgtctgtcacctggtcgagcagcagttatgcaactaataagcccaaggtacctgaagccatactcagccatggatcaggtggccgaggagcaagcagatggaaaattgcaaattacaaattctacggccaaaacgcacggctgctttgttgctgcctcccccacatacttttcagcctcccctcgctcgctccctgtctctctttctctctcgtccttttgacagttgattgcaatttccaggacaacggaaaaaacaaaaaaaaaaaaacaatgtacacaagtagtgatttcagtgcggagaatttacaagcaattgtatgccaataaggaaaagcaggcaacaagtttgtcccacaacaacaggaccaaatggggaagtgaacggagtgggcgaagtgggtgtaaagcgtggactaccactagtggactattgcaataaaagaaattctgcgaatatttcaagccagtcagcagtcaagcgcacacaggacggctgtgcgatatttctctgtgcaccagctcgcacacagagaaaagcaatttcgatataagcaccttatgccagatgcccagttgccgcccagatgcgcccggtcacagtggagtggaaacaggcgaaatggctgaaaagggttgatttagccgaaatatatagtttggccctttttttgattttgtggtgatttggaaagaagtaggaactcttttgcaaatacataataaagatacctaaaagtaaatttacgctatcacttcgattagccaataaagcgtggaaaaagatatatgcatattctgttttgtgtattctctattcttcccttcaatcccagcaatagattaaaagaaccatttatcttacaactcctttttttgttttaattaaaccagattttggcgaagatcggtgccaatgtgcattgctatgactccttctgcatctgactgctgctgctcctgcatggcatgtcctttagtggtcttggtgcttagcgcgtgatttataacagcagggggaaaaaaaaaacaaataatagaagccaaaaaactaagccaaagaacaggcatcgcagggcaggaggcaaagagcaggagccaaagctcagcaccggaaagggagcctgagaacagggctactgtgtggccaacagcacgtaactgttagccggttccccatttccggctgtcatgtgcagccacaccgaacagaagattgtgctccatttgcctggccccaaaccgatctggcccagctgcaatttaagccagctcctcgatattgccacaaatgcatttgatatatgtacatatgcgcgtgggtaagtcgtcgtgttgcttaatttcaaatgccgatgccctcccaactggcaattgcatagttaatcaagaaaacaatcaactgggccaaagccattgatttattatgcaaacaacaaaaagcggcggaacaatgaggagtgggctggcttagtagcctggctttttaatcgccgggtaaacagttattaattgttcgccgattgtttgctgcggcttacacaaatgccgttgcctacttaccggcattgcgaggctttcgcgaattaatctgttatgattgtcatttgataagcttatcgtagagcaacgccgctggctgggcacacttgtcaaacaaatagatttctcagttgggcggcatcgttagcaacaaggatcaacaacaaggagtaggacttgctctccaattataaccatcaatcttgtaataactttccgaaatctttgccaactagataatgacattttaaatatttgaagctttgaaattaatttaaataagaataagcttagtggcaactcttctttaccctggacaaaacccgctttgaacacccctgagaactataaaattgaaagtttttcgttagccggctactattcagataaacgtcccattgatttatgtctgaaacgtgttaccagactttctttactgcaaaaaaaagggtaactttgactagaaagggatatggggctatcagatgtagcccgcacttaccacatcgatcagctgggagaggcgcagacccatcttgacggtgagacggtccgagttgttgcccacgggtcggatgaggcgattgtagttgctcagcaggtcgtcgtagagtcgcttcgcatctgggttggccaggccgccggtggcaaagtgtaatgctatgaatacagctgcgaatagcacgctacccatcttaggccaggtccaaccctgtaaagtggtggaaatagagaaaaaataaatatggaaataagttgcgggtaatgtcttttggcagtgcggatttagttcagcttgcattagcattatttcagtataaaacataaaaactttccactgcaattgtgcaggggaaacagagcggagtgcgagtcgtaaattttgcaaaagtgtcaaaagtcttggagctttgttccctttttggggacccaatagcagcatcgtacagccataaacaccatttaatctttggctcaaacactcaagacaccatcgcaaacaagcatgtccacatggctgagtgtgagtgtgtctgcctgtgtgtgtgtgtgtgtgtgctggaacatccttccgtttccggcgtctgctggctgccataccctgcgctcgacatttttgttattgttcaatcccggagtccagcccgcacaattacccatatactacacagcagacaccacccacccactcacccactcaatatgcgtttctgcattttatgcataaaaatcccagcgttatttcaacagacattctcaagtgctgtcgtgtacagctacattaggcgcaaacaagcaattattatcaattcctgggcattctggccaattagaaaagtggccaagaagcagagaagcgcagagaaagaatgaaacgatatatatgtagaccagtaaatattgacccaagtaattgagacaaaagcaataactgtttgcttgggcagaaataaaactgaaatatttggcaatgcaacttcatgtggcacaaacaaagcatatcacattgcacacgaagtaaatggttatttacatatatttacatattcttgagcagctcgatcaattctggctacttcggctaactcggaatggccacttgaccaagtggttttatgccgactcaagatttgcccaagcaaggcaactgtaacttaaaacttttataactgaaaaactgtatactcaaaagt

SEQ ID NO: 11792 - DNA, 2170 bp, DROSOPHILA
atgggtagcgtgctattcgcagctgtattcatagcattacactttgccaccggcggcctggccaacccagatgcgaagcgactctacgacgacctgctgagcaactacaatcgcctcatccgacccgtgggcaacaactcggaccgtctcaccgtcaagatgggtctgcgcctctcccagctgatcgatgtggaatggaacgactataaattgaaatggaatccggatgactatggcggcgtggacactttgcacgttccctccgagcatatatggctaccggatattgtgctctataacaacgccgatggcaactatgaagtgacaataatgacaaaagcaattcttcatcacacgggcaaagtggtgtggaaaccgcccgccatttacaaatccttctgcgaaattgatgtcgagtactttcccttcgacgagcagacatgtttcatgaagttcggatcctggacctacgatggttacatggtggacttgaggcacttgaagcagaccgccgactcggacaacatcgaggtgggcatcgacctgcaggactactacatctccgtggagtgggacatcatgcgtgtgccggcggtgcggaacgagaagttctacagctgctgcgaggagccgtatctggacatagtgttcaacctgacgctccgccggaagacgctcttctacacggtcaacctgatcataccctgcgtgggcatctcgttcctgtccgttctggtcttctacctgcccagcgactctggcgagaagatctcgctctgcatcagcatcctgctctcgcttaccgtgttcttcctcctgctggccgagatcattccgcccacgtcgctgacggtgccgctgctgggaaagtatctgctcttcaccatgatgctggtcacgctctctgtcgtggtcaccattgccgtgctcaatgtgaattttagatcccctgtcacgcatcgcatggcaccgtgggtgcagcgcctcttcatccagatcctgcccaagctgctctgcatcgagcggcccaagaaggaggagcccgaggaggaccagccgcccgaagtgctcaccgatgtctatcacctgccgccggatgtggacaagtttgtcaactacgattcgaagcgtttcagcggcgactacggcattccagcactacccgcttcgcatcgcttcgatttggctgcggcgggcgggattagcgcccactgtttcgcagaaccgccgctgccctcctcactgccactcccgggcgccgacgacgatctgttcagcccgtcgggcctcaacggagacatcagtcccggctgctgcccggccgctgcagccgccgctgccgccgatctcagtcctacgttcgagaagccctacgcccgcgaaatggagaagaccatcgaaggatcccgcttcatcgcgcagcacgtgaagaacaaggataagtttgagagtgtggaagaggactggaagtacgttgccatggtattggatcgtatgtttctgtggatcttcgcgatcgcttgcgtggtcggcacagcgctgattatcctgcaggctcccagcttgtacgaccaatcgcagccgatcgatatactctactcgaagattgccaagaagaagttcgagctgctcaagatgggcagcgagaacaccttatagcgaccacttgggttcgcggctggctggtggaatctaatcatcagctcgctgcggaccctgttcgccgctcgcgacgatgatcgtggataatatacgatgagccaaaccatgagtatttcctcggcgttgtacaacactaacagcagcagcagcagcatcagtatgagcaacgccagtgacagtggcagtgtcatcggcagtgctgtaaaggttattgtgagtagtgttggcagcaccaacgaaacggatgactcgtggagcccatcgtaaatgtgcgcgaggcgagtgaagtgaacattgcgaaatgaattgagatacaatcgaatggaggcaagtttttggagcagttgatcaaaatatgtatgtaatgtaatttgatggggttgtagtgttgattaaccgtgacagtgctggacagcgacgcaagccacaagatcgctgcggagcggagattagtttgtaagttttttgatgtacttgatgtatgattgtgtggtcgaagatgtttagg

SEQ ID NO: 11793 - protein, 552 aa, DROSOPHILA
MGSVLFAAVFIALHFATGGLANPDAKRLYDDLLSNYNRLIRPVGNNSDRLTVKMGLRLSQLIDVEWNDYKLKWNPDDYGGVDTLHVPSEHIWLPDIVLYNNADGNYEVTIMTKAILHHTGKVVWKPPAIYKSFCEIDVEYFPFDEQTCFMKFGSWTYDGYMVDLRHLKQTADSDNIEVGIDLQDYYISVEWDIMRVPAVRNEKFYSCCEEPYLDIVFNLTLRRKTLFYTVNLIIPCVGISFLSVLVFYLPSDSGEKISLCISILLSLTVFFLLLAEIIPPTSLTVPLLGKYLLFTMMLVTLSVVVTIAVLNVNFRSPVTHRMAPWVQRLFIQILPKLLCIERPKKEEPEEDQPPEVLTDVYHLPPDVDKFVNYDSKRFSGDYGIPALPASHRFDLAAAGGISAHCFAEPPLPSSLPLPGADDDLFSPSGLNGDISPGCCPAAAAAAAADLSPTFEKPYAREMEKTIEGSRFIAQHVKNKDKFESVEEDWKYVAMVLDRMFLWIFAIACVVGTALIILQAPSLYDQSQPIDILYSKIAKKKFELLKMGSENTL

SEQ ID NO: 11794 - DNA, 4582 bp, DROSOPHILA
gctgtttctccagctggtccacggagagcggctggacgcggtggaacagtgactctgccgtggcctgcttggccgattcgaagaacttcaacacattgccggccgttacgttctccgccgaaggcgtcttcggctgcccgccgctcacctgggcattgtagtccttctgggccttggtcagcatgttgaatatgctggccggctggctgctgtcctgctttggctgctggggcgcggagacgtgacgctgggcctggccattcgttccctgatccttggacttgagcagcccgttcaccaagccgctgatgcggtcgcactcctcgctgttgtagaaccagaagccgcggatgcgcgagcgctcgttgcggtagagcaggaacggcggctgcgactgcagctccaggctgccggtgatgggctccacgaaggacgtggtgttcagtcggttgttgatgaagatgctgtgaaagggctccgcgttgcggtggtatatgaagaaggctccctccacatcggtcttttcccactcgttctgcgacgagttgaacgtgtagaaggcgacgtgcgaggacgaatccacgatctccttggcgtacgggtcgatcttcttgatggccgccaggttcattcgcgtgatgctctcgtcggccattgtaaattgtatgtaatcttcagttttggctgtgctattgcgaattgcaattatttgtgaatttaacggcgctctggtcacactgccccgtggatgttttcccgtgtttatcaacgactgtgctgcggtcacaccgaatgacaataaactcttccttttgtctattaatgatttgtttgagaaatattaagtcgattgacttgcatataaaaatggccacaattgtacgtaataatatttctcaattatgtagcataaacatttaatttatgtttactaataaaattttcaacttcgatagcatttccatttcaatatatcgatactgaagaccagctctagaaactggcgggaactaattgcattgcaatttgtatttatttgaacacagaattgccacaaaatgcaaaagtctataacgtaatttacgatttaacaaatgctaagtattgccaatctaacaatcccccgtttcagctccttcttcaagaagaaatccgatgccaccgacagcccctcgccgcccaagaaagttcctaagtaaatggtgccgctgttttcttgtttcattactaaattcctcgacaaatcataggattgatgcgaagaccgaactcccagatgaaccccacatcaagagcgaaagtgcctccccggaaactaagcccaaggtagaacctatgtctgtggattccgaggagaagacaagtccggtgaaaaatgttaagaaggaaccaaaggaagtcgatgacaagaccactgacaagaaggtcacaaccataggtctcaactccactgccgctactaaggaggatgtggaaaactacgatccatccgccgactcctatcatccgctcaagaatgcctactggaaggacaaaaaggtgtaagtagtgcaggattttgagcctccaaggcgaattatatcaaaggaaacactttccagcactccctacttggcactggcccgcacatttcaagtaatcgaggagaccaaaggccggctcaagatgatcgacacgctgagcaacttcttctgctctgtgatgctggtcagtccggaggatcttgtgcccagcgtctacctcagcatcaaccaactggcgcccgcctacgagggactggagctgggcgttgccgagaccaccttgatgaaggccatttgcaaggcaacggggcgtaatttggctcacattaaatcgcagacgcagctaaccggggatctgggcatcgtggccgagcagtcgcgcgtttcacagcgcatgatgttccagccagcgcctctgaatgtgagggatgtgttccggaagctacgcgaaatagccaagctatccggtcagtcgaaaatggacctggtgtacaatatgtttgtggcctgtcgatcgtcggaggctcgcttctttatccgttcattgattggcaagctaagaattggcattgcagagcagagtttgctcacagcgctggccattggtttggtgaaaaagaaccacatcgatgattgcaaggctagcaaggtgccggatgtgtataaggatgaaatagtcgacaccactttgctgttgaaaactgcatactggtaagaactaacttaagaaccagctaataattcagatgctaacgaacttttgcagtcagtgtcccaactacgatatcattataccggccattctaaagtacgatattaaggagctgcaggaacgctgccccatgcatcccggcatgccgctgaggcccatgctcgcccagcccaccaagggggtccatgaggtatttgagagattcggcggcatgcaaatcacctgcgagtggaaatacgatggagagcgggcccaaatccaccgcaacgagaagggggagatcagcatattctcgcgcaactccgagaacaacacggcaaaatatccggatttgattgccaggagcactgccttgctcaagggcgacgtaaagtcctacatcatagacagcgaaattgtggcctgggatgtggagcgcaagcagattctgccgtttcaggtgctcagcacgcgcaaacggaagaacgttgatatcgaggaaatcaaggtccaagtctgtgtctacatcttcgatctgctgtacatcaatggcactgctctggtgaccaaaaacctgtcggagcgtcgcaagctcctgttggagcactttcaagaggtcgagggcgagtggaagttcgccactgctctggacaccaatgacatagacgaagtgcagcagttcctggaggagtctatcaaaggtttgccctgccaaccaacctaaaagttgtttacttaagctttatttcactaggaaattgcgagggcctcatggtcaaaacattggatgaggaggccacctatgagattgccaagagatcccgcaactggctgaaattgaagaaggactacctatccaatgtgggcgactcactcgatttggtggtcattggtggctacaaaggcaagggccggcgaactggaacctacggaggatttttgcttgcctgctatgacaccgaaaacgaggagtatcagagcatatgcaagattggaactggcttcactgatgaggacctgcaaacgcattccgagtttttgggcaaacatgtgaccagcgccgccaaatcctactacagatacgaccccagcctggagcccgatcactggtttgaaccggtccaggtgtgggaagtcaaatgcgcggatctgtcgctcagtccgatccaccgagcagccattggcattgtggacggagagcggggcatttccttgagattccctcggttcattcggatacgcgacgacaagaatagcgaaaacgcaacggacgccaatcaggtggcccacatgtaccagtcgcaggatcaggttaaaaataatcaaaagtcgagcacacaaatggagatggaggacgagttctactgaccggtctgctccagccatgtgtacacgatttatttaacaataaaagtctgttatcgctatttgacgctggtgctgctctcggaggatttggagaagcgacgagtttcgagctcacactccttcacctccttcggtttgggtttgttgcgccgattggggcgtttgttcctcttcgaagtcttctcctccaccacggaagcctctccatccgagccatctttgccgcctgcaccttggggcagctcatctgatgcacgaattcgggctttgggctggtaaatggcaatcgatggtcgatcctgtaaacatcaagcgggttagtaaaatgtcgaggggggtaataggtgagacccactttattccgaatgcgccgctcctctgaagctcgaaattgagcagccttgatggcttcctctgcagtttcgtgggcggaacctgctggctgcttgtctgcgccggttcttttttccttgcgaccacctctggcagccggtgtaaaaaccttgacagcagcttctggtgtctcggtgttttcagtcgcaggcttttctttcgaggcctccgcagcgttagaagtggatggcacgtccaaactctcgtttgattctggcttgtttgctttcttcaagataacgatgtccatggactttgaatttttgttctgcttgccgctggatggcttgcctttgtcctgtttgtcctgtttgtcctgcttgccctggccgtcatcctttttcttgtcccgcttgactagcttacgctgttcgtgttcctcgcgtcgcctctgatcccgctccgttcgtcgtttggagcgcgaggccttggcatcattggcttgggatccagatgactgcggatctttgacatcctttttggctggcttcttcgtgtctcctcctccgccgcctccttcggcctccttaagcttgctggcgtccgactgcgctgccaatcgcaacagcttctgctcctcgcgttgcttccgcttctcctcgttccg

SEQ ID NO: 11795 - DNA, 2302 bp, DROSOPHILA
ctggcgggaactaattgcattgcaatttgtatttatttgaacacagaattgccacaaaatgcaaaagtctataacctccttcttcaagaagaaatccgatgccaccgacagcccctcgccgcccaagaaagttcctaagattgatgcgaagaccgaactcccagatgaaccccacatcaagagcgaaagtgcctccccggaaactaagcccaaggtagaacctatgtctgtggattccgaggagaagacaagtccggtgaaaaatgttaagaaggaaccaaaggaagtcgatgacaagaccactgacaagaaggtcacaaccataggtctcaactccactgccgctactaaggaggatgtggaaaactacgatccatccgccgactcctatcatccgctcaagaatgcctactggaaggacaaaaaggtcactccctacttggcactggcccgcacatttcaagtaatcgaggagaccaaaggccggctcaagatgatcgacacgctgagcaacttcttctgctctgtgatgctggtcagtccggaggatcttgtgcccagcgtctacctcagcatcaaccaactggcgcccgcctacgagggactggagctgggcgttgccgagaccaccttgatgaaggccatttgcaaggcaacggggcgtaatttggctcacattaaatcgcagacgcagctaaccggggatctgggcatcgtggccgagcagtcgcgcgtttcacagcgcatgatgttccagccagcgcctctgaatgtgagggatgtgttccggaagctacgcgaaatagccaagctatccggtcagtcgaaaatggacctggtgtacaatatgtttgtggcctgtcgatcgtcggaggctcgcttctttatccgttcattgattggcaagctaagaattggcattgcagagcagagtttgctcacagcgctggccattggtttggtgaaaaagaaccacatcgatgattgcaaggctagcaaggtgccggatgtgtataaggatgaaatagtcgacaccactttgctgttgaaaactgcatactgtcagtgtcccaactacgatatcattataccggccattctaaagtacgatattaaggagctgcaggaacgctgccccatgcatcccggcatgccgctgaggcccatgctcgcccagcccaccaagggggtccatgaggtatttgagagattcggcggcatgcaaatcacctgcgagtggaaatacgatggagagcgggcccaaatccaccgcaacgagaagggggagatcagcatattctcgcgcaactccgagaacaacacggcaaaatatccggatttgattgccaggagcactgccttgctcaagggcgacgtaaagtcctacatcatagacagcgaaattgtggcctgggatgtggagcgcaagcagattctgccgtttcaggtgctcagcacgcgcaaacggaagaacgttgatatcgaggaaatcaaggtccaagtctgtgtctacatcttcgatctgctgtacatcaatggcactgctctggtgaccaaaaacctgtcggagcgtcgcaagctcctgttggagcactttcaagaggtcgagggcgagtggaagttcgccactgctctggacaccaatgacatagacgaagtgcagcagttcctggaggagtctatcaaaggaaattgcgagggcctcatggtcaaaacattggatgaggaggccacctatgagattgccaagagatcccgcaactggctgaaattgaagaaggactacctatccaatgtgggcgactcactcgatttggtggtcattggtggctacaaaggcaagggccggcgaactggaacctacggaggatttttgcttgcctgctatgacaccgaaaacgaggagtatcagagcatatgcaagattggaactggcttcactgatgaggacctgcaaacgcattccgagtttttgggcaaacatgtgaccagcgccgccaaatcctactacagatacgaccccagcctggagcccgatcactggtttgaaccggtccaggtgtgggaagtcaaatgcgcggatctgtcgctcagtccgatccaccgagcagccattggcattgtggacggagagcggggcatttccttgagattccctcggttcattcggatacgcgacgacaagaatagcgaaaacgcaacggacgccaatcaggtggcccacatgtaccagtcgcaggatcaggttaaaaataatcaaaagtcgagcacacaaatggagatggaggacgagttctactga

SEQ ID NO: 11796 - protein, 692 aa, DROSOPHILA
MSVDSEEKTSPVKNVKKEPKEVDDKTTDKKVTTIGLNSTAATKEDVENYDPSADSYHPLKNAYWKDKKVTPYLALARTFQVIEETKGRLKMIDTLSNFFCSVMLVSPEDLVPSVYLSINQLAPAYEGLELGVAETTLMKAICKATGRNLAHIKSQTQLTGDLGIVAEQSRVSQRMMFQPAPLNVRDVFRKLREIAKLSGQSKMDLVYNMFVACRSSEARFFIRSLIGKLRIGIAEQSLLTALAIGLVKKNHIDDCKASKVPDVYKDEIVDTTLLLKTAYCQCPNYDIIIPAILKYDIKELQERCPMHPGMPLRPMLAQPTKGVHEVFERFGGMQITCEWKYDGERAQIHRNEKGEISIFSRNSENNTAKYPDLIARSTALLKGDVKSYIIDSEIVAWDVERKQILPFQVLSTRKRKNVDIEEIKVQVCVYIFDLLYINGTALVTKNLSERRKLLLEHFQEVEGEWKFATALDTNDIDEVQQFLEESIKGNCEGLMVKTLDEEATYEIAKRSRNWLKLKKDYLSNVGDSLDLVVIGGYKGKGRRTGTYGGFLLACYDTENEEYQSICKIGTGFTDEDLQTHSEFLGKHVTSAAKSYYRYDPSLEPDHWFEPVQVWEVKCADLSLSPIHRAAIGIVDGERGISLRFPRFIRIRDDKNSENATDANQVAHMYQSQDQVKNNQKSSTQMEMEDEFY

SEQ ID NO: 11797 - DNA, 5433 bp, DROSOPHILA
tctggcaagtaactgaaaaactttttcacttgtttagtgaatgtgcgccgtcgagtgaacaacatctggatatcctccctccaaatccaccaatcgcaatcgccgacgttttgcgtcgaccaatggtgggcacttcaagatttatatgtatgtatgtactcccgtgtatacatacatccatatatatccggaatatgaactgcctttcatggtctagtgatccgtagttctctagatggttcagtcctgtttctggagtcaccttgaaaacttctcctaacaaaaagcacttcctaattgttacaaactttttgtaaaaaaaatataagctacttggtatattagttatagaaaaccacctatctttattttttcctgttatatatgtaaagcctacccatattaatatcataaaacatatttttcaacaaaccaataaccattaataggcacaaaatccatttcacatgtgatttttacaaaaattttattgcattcatttaatttattgataaatttgctctaatggtacatcattatatctgtgctttggtacagacacatataggcatcgcaaaaaatacgcttggcgtgttcaggtaatactttatcgttcgttgaagtttcatttatagatcgtgcgccttcttccgagagccactgtgttaattctggaacacacgtaatttcaggtatattgtatccattctgttcgcctgaaataacatttgcgtaagtataagaaacttgttaggttaaaactaagattttgcttgccttttcgatcagccattgaatcgaagaaacaccatggagcatctggtccggatccagacttgacaaatgccacgtagtgagatgtttctatgcaaacgactgcaaataactccatgtacaatcgcgggacaaccatgtgctcggccatgattttaaattccttcggactataaatcttcttcgacacatgattcgttctgaaagataggtttttaattggttttcattcatttatctatgaagatagctgaccttttgatgtgactgtgaaatgtcttgagacattttggacaaaaggcggtgcattccagtcctgatccagcctgcaagctgccaaagcaatcccggcactcgtattcagctagtttgccacaaagtgagcactgtcgaggagctgcaagttgaattttgttaagattcgaaatgcaaattgttatattgttgaacacctacaattttcaattatgtctgtgacatcaagaacctgcgatggcaatatccttggatacatcttgtagttctttccgaaacgaggcatttgaatgatgaaacaagaaggaacctcctttagttttatatccgatgagtgaaagctttgctcaaacaattgttgcacactcggtaatgttaacttctcatccttctccacaaagagttggtaaaaataagaatcttgccccgagcttagctacaaaaaaaaaaaaaaaaaaaaaacatgtaaattatttagtataaaaatctatgcaataatgagtacaataagcacctttagaaacggttcaactcgcattatttgtgagagcaaactatttaggaactcttcaggatccttttcctcgcaggtgagaccgctgaccgaacttagctgatctaggagctcgcgcagtttcatcacacgatcggatcgaacgaaaacgttttttcgcaatggattgacgatctcatcgcgcagaaccttttgaacctcactgtaatttcgaatatcctgttgaaaataaaataatttgttattggtgagctgggcagacaaatcgaataacttacttgtgggcccggacgtctgtacagaattgaatcgaaaacactggtgaaagtgaacatggaaaatagagttgcatcaaggtagcaggaattatggtgtccttgtattcctttgaactttccacatatgctagcaagctcatcggaattgtgtatttctggaaaacaaatagctgcatgaactcctttcctttattaaatgtttattgttatcttacgtaatggtggtatcgagccatatatggcaggacagtcagcgacgccaaatttctttgcgtgattactagaaactctgtttgcagaaatgctattatctacatcagcaaatcgccggtcagcggtgcatctgttggctggtacaaaaatagctcgaccatcatggcaagtaaataagctaaaacaaaacacaacacagaagatatttttcagttaagagtttttcttgtatgagtacctatttatgtgttttaaatgtttaaaagtatgacataccgtacgccattgtgtctcccatccgatgccactacatttttcaagttggattcgtcttctacctcgattccgacgagtacgtttttttgcgggccaggcggtatacctatccatctcacaacgccatatagatcttcacatactccaggattcgagacttcgacgagggaaccaatcgctagctcggttccaggtatttcaatcagaggttgataatcagcgattgtaaaacctaggacaagaataaaattaaaataaattttaatttcttagaaaatcaaattaaaaaaagcggaacgatttcataatagatcataccaagttcttcgggcaataaatttggtgaataaaattctagcactgttaatggaatattattgtggatatccgagtcagaagacaatttttgttggtatatattcatttttgaaagacgcacagcacaattttaatttctttactaatttttatgtttttttttttttcagcaattgagaactttgataaagtgcagaacaaataaaactcctcgacaaactgcatatatcaactcagagaactgccgttttacgtgaacgtaaatagaatatatgtatgtgtcgttatgtatttggccggcgttctataaataaatagacgttttcatttcgttgtcttttgcaaggaagcaaagtgaatacaagtcttacaacaactgtaaagtatcgagaataaaagattcaataacagtgaacgctatattcgaaagaagcgactattacatacctgtttactcagctaaaagaagtgcgatacacttgaaaatagacaaccagcacaaggagtgatgtagcaggcagaatttgaatgtcttttgcaagcagtacagaagactgcttgagtaattccactaactagaactagcttttacagttcctgagatctcgttatttatatggacggacaaacaggattaagattaagagagctagtaaacctgaccaagaatgtagcaggtcggaacagattccttccttagttcttaataatgatatatttcttttctttttgaagaaatgacagtaaaataaacttacgtaaaggttcctccggctctatttttaatatgggtgaggctggttttaaaattaagtctacagaattactaggatccgttttacttttgttgtttaagatcattgcagctggtcccgctcgttttggccaatttgtgcccaaaatgtctgccaaatccacatcctcaagatgttgattatcgacggcactatggttggcatcggtgtttctaaaaatcgctcattattagctttaaatgaattgaaacagttttactacgtactttaaaattccgttttttctgttaggaatctttttcgggtatacatgggtcttgtgctcgctctcgttggatagttcatagttttccagggagtccccgaatctatttgttatggtcagctttttttctttttctgcttcataatcggatttggaattcattatttccaactaaaggctataataacatttgtattagtaattaaataaaaaggatatacaaaatgtattggtcataagtgtttttttatgaaaaattttaaagagcatgctatatatttggcagagagtattctacagtcgagttaaaactgttaaacgaaataatcaatgatactcgatgtgacggattctgtttgtaactgcttagtttgcagtcgcttacatacatatgtacatatgcacgtaagtatgtaagagacatcaggttgctgtaacagtagttcaataaacattccattgtttttacgctaatttcaatcttgcattaaatatttatttgccaaggaggactgcacagaacaagtaacaggaaatacatgcataacaaacacaattcgttagcaacttttccctaattgataaaaacaatgacacacaacaatcgcgactacattggtttaataatattgctgttcgctgaaataccaaatgaccaattaagtttttagcgcaaccctgtttgagttttaatacaaacacacataaattgaactaacaaataaaaaggtgtttatatcctggatttttgtttagtatttataaaatttgtgtcttttagaatgcgattggaatgaattctggatatcgttatcgattttaccgcaatcgacaattgttgggggtaatcttgaaccaaaaaaatacaatacagtcaaaaaaacaaagtaataacggtttaaaaacggttttattatatagaatatgtaacagtatattgcgatttgtttgtcgttgcttgttaggcttagtatgttttattgcttatgaattttatcataaacttttaacaacaacaaaataaacaattttatatattctaatatgcattatattttatattaagcaacttattttttagcattttttttattgtggggaaaaagtcttttaaaagtctgtcaggtatataataattctctgaataggattatttacgctaaacatttgattagattatcacttttgagcaccttctgctgaagcggattggattggcagttccacatgtataggactttgaaaggccattggttggagttgtacaaactgaaatggtatggagaatggcataccgcgataggcattagccgattcctgtggacttaggtctacgttggagctattgacaaagtctggagcagagttggcggtctccaaatcctttcccgtgatattgaaaggagtagggggaccgacgagtttcagggaaaccccatcccgtccaggagaagtcgattcaatgctagttttgggtacgtattcctggttatactgcgaatcaaaactactttttgttacgtaatcgtgcttaaattgaggatcaatactacttttcgtcacgtaatcgtgcttaaattgaggatcaatactacttttcgtcacgtaatcgtgcttaaattgaggatcaatactacttttcgtcacgtactcgtttttaaactgctgatcgagattagttttcgttgcgtaatcgtgctttaactgtgtgggcacggagctttgatagtcctccatcctcggaggatgatccaattccctagatttgtatatcctgttgtagta

SEQ ID NO: 11798 - DNA, 1655 bp, DROSOPHILA
cattctaaaagacacaaattttataaatactaaacaaaaatccaggatataaacacctttttatttgttagttcaatttatcctttagttggaaataatgaattccaaatccgattatgaagcagaaaaagaaaaaaagctgaccataacaaatagattcggggactccctggaaaactatgaactatccaacgagagcgagcacaagacccatgtatacccgaaaaagattcctaacagaaaaaacggaattttaaaaaacaccgatgccaaccatagtgccgtcgataatcaacatcttgaggatgtggatttggcagacattttgggcacaaattggccaaaacgagcgggaccagctgcaatgatcttaaacaacaaaagtaaaacggatcctagtaattctgtagacttaattttaaaaccagcctcacccatattaaaaatagagccggaggaacctttacgttttacaatcgctgattatcaacctctgattgaaatacctggaaccgagctagcgattggttccctcgtcgaagtctcgaatcctggagtatgtgaagatctatatggcgttgtgagatggataggtataccgcctggcccgcaaaaaaacgtactcgtcggaatcgaggtagaagacgaatccaacttgaaaaatgtagtggcatcggatgggagacacaatggcgtacgcttatttacttgccatgatggtcgagctatttttgtaccagccaacagatgcaccgctgaccggcgatttgctgatgtagataatagcatttctgcaaacagagtttctagtaatcacgcaaagaaatttggcgtcgctgactgtcctgccatatatggctcgataccaccattacaaatacacaattccgatgagcttgctagcatatgtggaaagttcaaaggaatacaaggacaccataattcctgctaccttgatgcaactctattttccatgttcactttcaccagtgttttcgattcaattctgtacagacgtccgggcccacaagatattcgaaattacagtgaggttcaaaaggttctgcgcgatgagatcgtcaatccattgcgaaaaaacgttttcgttcgatccgatcgtgtgatgaaactgcgcgagctcctagatcagctaagttcggtcagcggtctcacctgcgaggaaaaggatcctgaagagttcctaaatagtttgctctcacaaataatgcgagttgaaccgtttctaaagctaagctcggggcaagattcttatttttaccaactctttgtggagaaggatgagaagttaacattaccgagtgtgcaacaattgtttgagcaaagctttcactcatcggatataaaactaaaggaggttccttcttgtttcatcattcaaatgcctcgtttcggaaagaactacaagatgtatccaaggatattgccatcgcaggttcttgatgtcacagacataattgaaaattctcctcgacagtgctcactttgtggcaaactagctgaatacgagtgccgggattgctttggcagcttgcaggctggatcaggactggaatgcaccgccttttgtccaaaatgtctcaagacatttcacagtcacatcaaaaggtcagctatcttcatagataaatgaatga

SEQ ID NO: 11799 - protein, 517 aa, DROSOPHILA
MNSKSDYEAEKEKKLTITNRFGDSLENYELSNESEHKTHVYPKKIPNRKNGILKNTDANHSAVDNQHLEDVDLADILGTNWPKRAGPAAMILNNKSKTDPSNSVDLILKPASPILKIEPEEPLRFTIADYQPLIEIPGTELAIGSLVEVSNPGVCEDLYGVVRWIGIPPGPQKNVLVGIEVEDESNLKNVVASDGRHNGVRLFTCHDGRAIFVPANRCTADRRFADVDNSISANRVSSNHAKKFGVADCPAIYGSIPPLQIHNSDELASICGKFKGIQGHHNSCYLDATLFSMFTFTSVFDSILYRRPGPQDIRNYSEVQKVLRDEIVNPLRKNVFVRSDRVMKLRELLDQLSSVSGLTCEEKDPEEFLNSLLSQIMRVEPFLKLSSGQDSYFYQLFVEKDEKLTLPSVQQLFEQSFHSSDIKLKEVPSCFIIQMPRFGKNYKMYPRILPSQVLDVTDIIENSPRQCSLCGKLAEYECRDCFGSLQAGSGLECTAFCPKCLKTFHSHIKRSAIFIDK

SEQ ID NO: 11800 - DNA, 3830 bp, DROSOPHILA
tccgcagactgctaacccaaactgcgttacccatttccagggagatcaaggagtgcttcgacggactggccactaatcccgactgccgggctatcgttttgtccgcctccggaaagcacttcaccgccggcatcgacctcaacgacatgataaacgtgggccaaacgctggccgagaccgatgactacgcccgcaagggcgtctccatggagcgaatgatcaaggtgtaccaggactcaatcagcagcctggagcactgccccaagccggtcatcacggcggtgcacaaggcgtgcatcggcgccggcgtggacctgattaccgccgccgacattcgctactgcaccgaggacgcctttttccaggtcaaggaggtggacatcggcatggccgccgacgtgggcaccctgcagcgtctgcccaaggcagtgggcagtcagtccctcgcccgcgagctgtgcttcactgggcgcaaattcgaggccgccgaggcccactcctcgggcctggtgagtcgcctcttcccagacaaggattccctgctgaccggagccctggccgtggccgagctcatcgctagcaagagtcccgtcgccgtaaagacaaccaaggagagcctcgtgtactccctggagcacaccaatcaagagggcttggatcacattgtgggtatcctaatatctcaacgaatttgcacgagctaaccacgcctcacgcctcacaccttgcagctcctgctgaacaagctcaacctgctgtcggaggacttcgcccaggctgtggccgcccagttgacgaaggacgataagccagtgttcgccaagctgtgatcggtaacctgtaatatgtaatctgcaatctgacagaatttaaaatgtatttgccatgtgtgcatttataaatacagcatctgcctttactttaggacccaaatcagctcataaggttgtcgggagaatgaaaggcttatgactaggaatttggttttcgttgtgagctcttaaaacgcctccgcggatgaggcaccggggttcttctgttgctgtttgcaaagctcctgcagggcgcgtggatccttgacgcacgcctcagttagaacttccacgtggccgttctcgttgatgagcagatcgtcttcgatgcggatgccgatgccccggaactcgggcggcacgtcgccgcaatcctggccaatgtagatgcccggctcaacggtgaagaccatgccgggcacgatgcgtgtgttgcgtggcacgtgcggtgtgtcgtgcacgtccatcccaaggtagtgggagacgtggtgcggacagaagcggtagccctggctgaccagttccttgtactcgctgaacgacttgcccaccagcccgatctcctgcaagtacttgcccagcttgtagcaggtggtctcgaacagctggtcgagcgtctcgccgcccggcttcatcacgttgccaataatctcctcctgcagctggtgcagcatgtcgtacagtgtgcgctgcggctccgtgaaaaccccactcgccggccaggtgcgtgtgatgtcgctggtgtagccgccatactcgcagccggcgtccatcagcacgagatcctgctgacccaacaactggctgttggccacgtagtggatcaccgtggcgtttttaccggcagccaccaccggcgggtaggccaggtagctggcgttgcgcatgcggcacttgtagtcaatcgcggcgaacagatggtgctccgactgacctggccgggtctcggccatcacttcgttgaacgagcgtgaggctatgtcgcaggtgcgccgcattaactgcatctcgtcgcgggacttaagcaggcgcatggcttctaggaaagtgtaggccggcagcagcggacgctgctgattgccgctcaatcgcagcatgttctccgccagggacggcaggtcggtgctcttctgatcgaaccagatgtgtggttttagggcgcctgcgcgcttggccagcaccgcctccagctgggacagcggatgggcctcagtgactccgaaaagcggcaccgcgagctcgggcccagtgcgcggaccatcccacagctcggcatgcgggtccttgggacgcataaacagctcggactgcacgttctgggcctcgtcgatggtcagcagtagcacggcgtccggctctaggcagccagttaggtagtagaagtccgagttctggcggaacacgtacgggatcttgccgctcatatacttcttggaggcggcgcccagaacgagctgtcagagattcaagtttatatattttgcttctctttgtagcctgcaggtcctcaccatgtgacaagaactcgagtgcccattgaactcgccgccgaaactgcgtgcataggcgcggatgttttgcatcagctgcgaacggcgttccttgatctcggtcagctccacgcccggaaccagctcgtccggctggataagatgtggatgcgagacgctggtgggctgtcccaggtttcccttttgctggcgcagaatctgagccacgccacgcacctcggccgcgtttactgtcgatttgctgctgggacttcctggggagatcgtggtggactggctcatccagcggtgtggccacaggctggtggaaatggcggcgctgcggcggacggtgggagcgatcaggcggtccaggcgccttaggatattcatcgtgctgccggttccggttcttgggttgccaactaaaatcttcacaatattatacacatcagaaaacggaactgttaaaaacactaacgatcctggataaaaacaaaacacatgggttgccagacgattgcttaacaagagtcccgccgattgacagatgtcgataactatcgttgtaaaattatacaactatgtgaatgtagtttcgccttacctatagcagctttcaaaaaacgcgattcatttcgaattgtgtacaaccacggcttatataagcttatgaatccactcaagtacgccaacttgattgctttcgccccatagcatttaaatattgcgctgcaatcgaaaaacctcgatagtaccgccgctaagctttagaagtaatcgacattggcatccctaacataataacaaaaatttttaacaggatcaatagggggctttggaacagtattttcgacttagacagacactttgaaatcatttgacatatctttagaatgtccatggaggaggtatgtgttggtatagcccagttccaatggccaaacactcaatgtaatcccgtcctgcagtgctttgtgccccggctgccggtggacagcgagttcatccagttccacgactgggccatcaagtatgagaagtcgcacatcctgaagagcagctgccaactgggcaccgccaagtgctgtcccaaggactcggccgaccgctgcgacctctgccactaccagcactccctgcagctgccccacctgcccgacatggtgttccacaagaatcggctggtgttacagcacaaggacggcgccactctcgagttctgccccatggacgcgctggcgctggtggacaatgggaagcagccgctggaggtcgcttgtgctcaggagtggcgggaaacgcggtgggtactcccattgagattgggatatggatcgttctactgttgttcctctataaatcgcccaaatgattgaattctatactccagtaacgagcagacaatggaggagaagttcaagcctttcgactggacattcacctccacctaccagggcaccatgaacgaaaaagtgcgatcggagaccacgaatcagacgctgaacaagttcaagctgatgcagcg

SEQ ID NO: 11801 - DNA, 1773 bp, DROSOPHILA
ttaagcaatcgtctggcaacccatgtgttttgtttttatccaggatcgttagtgtttttaacagttccgttttctgatgtgtataatattgtgaagattttagttggcaacccaagaaccggaaccggcagcacgatgaatatcctaaggcgcctggaccgcctgatcgctcccaccgtccgccgcagcgccgccatttccaccagcctgtggccacaccgctggatgagccagtccaccacgatctccccaggaagtcccagcagcaaatcgacagtaaacgcggccgaggtgcgtggcgtggctcagattctgcgccagcaaaagggaaacctgggacagcccaccagcgtctcgcatccacatcttatccagccggacgagctggttccgggcgtggagctgaccgagatcaaggaacgccgttcgcagctgatgcaaaacatccgcgcctatgcacgcagtttcggcggcgagttcaatgggcactcgagttcttgtcacatgctcgttctgggcgccgcctccaagaagtatatgagcggcaagatcccgtacgtgttccgccagaactcggacttctactacctaactggctgcctagagccggacgccgtgctactgctgaccatcgacgaggcccagaacgtgcagtccgagctgtttatgcgtcccaaggacccgcatgccgagctgtgggatggtccgcgcactgggcccgagctcgcggtgccgcttttcggagtcactgaggcccatccgctgtcccagctggaggcggtgctggccaagcgcgcaggcgccctaaaaccacacatctggttcgatcagaagagcaccgacctgccgtccctggcggagaacatgctgcgattgagcggcaatcagcagcgtccgctgctgccggcctacactttcctagaagccatgcgcctgcttaagtcccgcgacgagatgcagttaatgcggcgcacctgcgacatagcctcacgctcgttcaacgaagtgatggccgagacccggccaggtcagtcggagcaccatctgttcgccgcgattgactacaagtgccgcatgcgcaacgccagctacctggcctacccgccggtggtggctgccggtaaaaacgccacggtgatccactacgtggccaacagccagttgttgggtcagcaggatctcgtgctgatggacgccggctgcgagtatggcggctacaccagcgacatcacacgcacctggccggcgagtggggttttcacggagccgcagcgcacactgtacgacatgctgcaccagctgcaggaggagattattggcaacgtgatgaagccgggcggcgagacgctcgaccagctgttcgagaccacctgctacaagctgggcaagtacttgcaggagatcgggctggtgggcaagtcgttcagcgagtacaaggaactggtcagccagggctaccgcttctgtccgcaccacgtctcccactaccttgggatggacgtgcacgacacaccgcacgtgccacgcaacacacgcatcgtgcccggcatggtcttcaccgttgagccgggcatctacattggccaggattgcggcgacgtgccgcccgagttccggggcatcggcatccgcatcgaagacgatctgctcatcaacgagaacggccacgtggaagttctaactgaggcgtgcgtcaaggatccacgcgccctgcaggagctttgcaaacagcaacagaagaaccccggtgcctcatccgcggaggcgttttaa

SEQ ID NO: 11802 - protein, 545 aa, DROSOPHILA
MNILRRLDRLIAPTVRRSAAISTSLWPHRWMSQSTTISPGSPSSKSTVNAAEVRGVAQILRQQKGNLGQPTSVSHPHLIQPDELVPGVELTEIKERRSQLMQNIRAYARSFGGEFNGHSSSCHMLVLGAASKKYMSGKIPYVFRQNSDFYYLTGCLEPDAVLLLTIDEAQNVQSELFMRPKDPHAELWDGPRTGPELAVPLFGVTEAHPLSQLEAVLAKRAGALKPHIWFDQKSTDLPSLAENMLRLSGNQQRPLLPAYTFLEAMRLLKSRDEMQLMRRTCDIASRSFNEVMAETRPGQSEHHLFAAIDYKCRMRNASYLAYPPVVAAGKNATVIHYVANSQLLGQQDLVLMDAGCEYGGYTSDITRTWPASGVFTEPQRTLYDMLHQLQEEIIGNVMKPGGETLDQLFETTCYKLGKYLQEIGLVGKSFSEYKELVSQGYRFCPHHVSHYLGMDVHDTPHVPRNTRIVPGMVFTVEPGIYIGQDCGDVPPEFRGIGIRIEDDLLINENGHVEVLTEACVKDPRALQELCKQQQKNPGASSAEAF

SEQ ID NO: 11803 - DNA, 7278 bp, DROSOPHILA
atgtggcacgtgctgaggtcatagctcctccagtttaaagaatccctcgtcgtcctgtgcaattttatcgattcgcccgtcaaatgtaacacacaccaaaaaaaaaaaaaaagcactggaacttaatgcaaaagttttcggttttttctccgcattaagttaattgccaggcagtgccgagaaccagtctatatagacatagtccccgatccgaattcgaacagtagtaacccactcagatatgagtgataccgatgcggtgagttttgcttgaattcatatatattttggagctgcacttagcgcacaccgattcgcccatgcacaaatgatttacgagcataatttgcatagggaatgatccaggttaatggatgtattattccgccgaccttgcacatacatcattgtcagtggaaggaacccttttgcgaaacaaatcaaacagcgatttcttgtggcccgtcgatttgggccttagaactgccaaaacttttgttgaatcaataagccacaaaaacaatttgggtcacgttacagctggcaaccggatttcatgacaaaattccctaatggtaaccaaagaccgaacgcccgaacgccaaatacccaaatatccttatagccatatagccaagtagccaagtagtgaataccaaaacaataaaatgtaaacaaatgcagaaagagccatcaaatttgaaagcacccactcaatgtgaactatattgatacgtacgtctgttccgatacacgagctttagctccaccattggcactttggcaaccccacagttggcagaagtaaaagtaagcccacaacgatatatggccatacatatgcaaatgatatgggccagtttgccggggcagcggagcatgtgggtgtatatcgatggcattggccaccaaaaagtggctccgccacatattgggttaccagacacttgcacatttctgcaccgacaccgcaggcgagaagttctagtccttcgctaggatgtacggcacgggaaaggatcgctccggccaggagattatttctccacaggattacccagtgcagcagcagcgcgctcagtccaagtcagagtatgtcatgaattccgcatctgtagatcgtcctcagcagcagtcgagaccacaacccacgcaggattatgtgccttttgagtcctccgattcatctgtggaacgaaagaaagaacagccaagtgctcagttaagcacagattataccaatagcaacaccacttcggatagtgcctcctacggctcagattcagtttccaaacagcagatacgatctcagcagaatccagagtatcagaacaatgcctatgaggcacctagagatgaccgcagtcaactgcagccacagagatcccagccagctaccgattactctgcatatgaacgtcagcaacgtccgccaccaaccacactagactacaccaccggctataatgcaccacctaaagatcgcaccaccctgtcacgcaccaactcgcggcccaccctctcctcacccaatcccaagctccaaagtatacccaataccgagtatgtgcgaccaccacagaactttgtcttgccaccgcagatgcgtcccgccgtggggccaccacagccgcgtcctccgttcgccggagcccgacctatggtcggaatgggaccacgaccacccatgccgccgaacatggcggccaggccaccaccgctgcgcagcacagacagcaagagcaacctgctaatgggtccaccgatgcgaccgggcatgccaccgcaactcaatatgcagcaggctcgtctgcccaatgccggcggacagcttagcccgccgggccagggaccaccaaggccaccaggcggatttccttggaatccagccggggcaccgggaatgccacccggagcacgtccgccccagaatatgacgcgaccgccgccacctacttttgcacgcccgccgccgggacagccgctgcaggcacccttcaatcgaccgcctttcaaccagccgcccatgcaaccgcaacagcaacaaccaccacaacagctgcagcagcagcagcagcagcaacagcagcagcaacacatgcaacagcagcagcaactacgcccactttcggcagccagtgcacacaacaacaacgatgacgacgacgacgtggtcatgggtcccgcggtgaccccgctcaagaccttcaattcgaggcccgatccaatgggcgagcccctactggaggacatcgagccgcccttccagacgagccccccagccggagaatccaaaaaggggcccggcttcagtaagactcagatcgataagcgataaaccaaagaccattagtgaagccatttaagagtttatttttaaaatttaactatctcaatatgattcatgatatatccatccatgcctccctcatgtatcttttggtttatttcagagggcgacaatgacagcggcgtggatgagtccactcaggagaaggtgagttgttatcggttttgaaccagttaactagttagccataaattgttacctctgctgcgtctccgttaattgagaggaaattaactggaactggcaacaaattaatttaattccgcgtgcctttcctccgccatgagttctcaaatcataaatatctgtaaaaggccggggcaaccagcgggcgatcttcgagctacaagctccacgctccattagagaccatatagcagtatatcacatatgtagcatatagcatatagcatatagcatatagcatattgcctgcgacagttccgtcgctcagttcccaagttcgtgtgcagacgttaaagttcagactaagttttgtgttggcagacggcagttggcgcgtcggaaaaacccgcagaaagtgcgacaaaagtcgaagaaatcaaaagtatatgtactacatgtatatatgtgcaataagtgagcttcacaggtgcgagtgaaaaagtggcagaaagtagaaaaaaaagggcaaatatggccaaaacccgccaaagaaacatacacaaaaagcgatttatatgcctggtgatatctgcgcacagataagtgccaaacacgaaaacgagttgtggatttccaggggggtttgggtttttggggtaaatcgtagctcaaacttacacatacatacatatatccaagtcggaattgttgtctctataaatacccatccatatgcaaaggcgacacgaagcggcgacaatcgataaaacaatgcataaactataagtccttcgtaccgagacatccaaagccaaatcggcaggcgtacggccgcatggccataaatgccattggcattacgttgacagctccgtaaagtccgggagtgttgagagcccagtagtcgtaaatagataataaactcgaagtcaacacagatacttaccaggatgcatctcgttataatggccgatgcgacctacttgctagtaatccacatggtctaaccattcagcatagttagtttgctaaatcgtgcgctatgtttgtttctcggcaggatcgcaacggacccaactcgcccagttcgcccgtaaaaacgcccacatcgacctcatcgaagccggacaagtcgggcacgtcgcgtccaccgagtgccacgccctcgaacaagtcagcccccaaatcgcgcagcgcctccaagaaccgcttgctcctcaagaccccagagcccgagccagtgaagaaaggtgagagaccgtagttccatctatccacgtgaaatactttactatatcatatgatctacatatatatattatcattctgtttgcttcaccagttccaatgaacaaggtacaagtcggacatgcgccttcacccaatctgaaggcggtacgctccaagatcggatccctggacaatgccacctataagccgggtggcggccacgtgaaaatcgagtccaagaagatcgacatcaaggcggcaccgcgcatcgaggccaagaacgacaagtacatgccaaagggcggcgagaagaaggtatgttcgtattgttcatcctctagaccagcgttttaatccatgggagggatcggtgtatccatttaaagcatatattctgctccaagccagtacatgactctctcattaatctctgtaaatttctctcatctacaaaatggcttttaaagtacggagaaaatgtatctttctctgagcgcaagaaacgtaaagtatagtcgcgtaaagtaaagtaatgtaaagtaatgtattggctgaataaaagcaatttcacggtcgatttgctatttgagatttatgcccattatagatgggcaatcgtcagcacggtatcttgtatcttgtatctcgtatcttgttgtaggaaatgcaattaccaattcgcagcgacacttagcagcataattccgttgccttatgtagcgtattccaaatccatccgtatccgtagaactgggtgcgactctgacattgatgcggatatcatccgttcgatcgatattttgactttggcttataatcgttttacctaccttgtatctatttacaacaacttacgaccgaaacgaatcgcatcgaaaccgcacactctcgcaccaacaaatcaccacaaacaaaaaaaaaaacaaaaacactgcaaattcgtagatagttacaacaaagttgcagtggaacgccaagtccaaaatcggttcgctggagaatgccgcccacaagccgggaggcggggacaagaagatcgagaccctgaagatggacttcaaggacaaggccaagccgaaggtgggctcgacggccaatgtgaaacatcagccgggtggcggagacatcaaggtatgtggcaaacccctttcgtgacctttcaccccacgcctccgggcgatttcatgtttgagtttgacccagagagacgagaacgagtgttcatacataagtattgatttttgtagcggttaagcatgatttccgattgctgttggcttatgatggtttttttttggatgctccacctgagttaccaactggcatgggcatgggccgcatctattctattctatacttattatccgttcgtttctctcagtgcatgagctgcaatgttctcttcagttttaaacagcatgctgccacttctaaccacctttcaagggttattactattaagaaagactacatttagaactaacacccagaacaccaaaaaataccaaaaccttgaaccactttccagagctacgataggaagatgaacatcatctatggcgagggctccaaaatagtcagccattgcgccaataacaaacgtttggatcagaatttgtataatgaggaggagtagtgttttttttttagttgggtaggtaacaccccccaaaaatggtgctaaaacgaaccacccacacagacacctagtttagttttgggttaagcattgtacatacatatttactatataatcagattggagggaaattcattatgtttagttcctaaccataccgaccgaatcactatgaataattgagaataacttattgtttctccatccttattttaacgaaccgaaacatgtttaaaccatattttggaaactgtattttacttttaactaaaccattaaacaacgaattcgaaggataacaacccgaaggatgtaagtagtcgtgataactctcttttcccagtgtaataagtgtgcttttgtatagaaacctagatgcatatcgtttctttcatatttttggtatattttgaaaacacctaagcaacacttttcgagatcccaaaatcacagcaccatgtagcgtatttttgtaccattaaatttagacttaatttttttttgccatccatttgttacgttctgtgctctgccgtttctgtgtgtgaaaatttccaaatttcagttatgtccccgattggccgtttgtcgtgtgtccataatacgagtaataatcccacctgcaaaatcgaaaacaaaaaaacccggaaaatggaaatatactccatttgccaaattcaatctgaatctatggtcttgctaattgatttctgtacgttgccggtgccggtgctacttttcagatccaaacgcaaaaactagaaattaaggcacaaagcaaagttggctctttggataatgtaaagcacaagcccggtggcggtgagaagaagattttcgatgataaggattatttgaaaaatgttgaacactctgttgcactgacaacaccaccaacacaggtaaactacgtgtacataagctcaaagtagttacgtatgatatctagaaattagcattaaccctgatttattactagactctttatttgattaagaaagcaaccaaaagtaatcgatacgagtatattacaaacatctattatcgctatcccattttgtgtttacgtcgagaaattcatttttatgtaatctgtaatggtaatcaattacgttgcattttcgattaacactcatttattttaatatgcaactaacagagcaccacaccccaaaagaggcccacacaacacccaaaacacccaaccaccacccacagacacgccccacccgaaccgctttcagataactcctaccaactcccaaagatcaatccgtttaatggggaattgtgattataagaactaacaattggacaacgtattttggcacatctaggcatcgaattgtattttattgtgggcattcgtgacttttatcagatagagccaccgaaatctttagagatttgaaaccatctatgaagtgtctaaaagtatgctttgaaaaatagaaagtagctgcatacctttagacatttgttgaagtgattgcaaacctcttgaagttccgtagctaccattgattattatttgtttttgattttagatgatttattgtattatctattggtttctcagttcaattacacttactttacatttaaaaatgaatttctttcaaactcaaactgagattcattggcaacagcgctttccatccatgtgttcccgaaggtgtttgaagatttacacgcaattctctaaactataatctctctctttctttctctgttcccccctctcgctcgctctctgccaccccgccggctaactgtagtttgcgctacaagggcgcttgattgccacgatccatctagaattcggtctctgtaactcagactgtgtgtgtaacaatatatttgagtcgctttttaaatgaactctccttagctttaacccagacatccatcaactaactactgtactgtacct

SEQ ID NO: 11804 - DNA, 2104 bp, DROSOPHILA
atgtacggcacgggaaaggatcgctccggccaggagattatttctccacaggattacccagtgcagcagcagcgcgctcagtccaagtcagagtatgtcatgaattccgcatctgtagatcgtcctcagcagcagtcgagaccacaacccacgcaggattatgtgccttttgagtcctccgattcatctgtggaacgaaagaaagaacagccaagtgctcagttaagcacagattataccaatagcaacaccacttcggatagtgcctcctacggctcagattcagtttccaaacagcagatacgatctcagcagaatccagagtatcagaacaatgcctatgaggcacctagagatgaccgcagtcaactgcagccacagagatcccagccagctaccgattactctgcatatgaacgtcagcaacgtccgccaccaaccacactagactacaccaccggctataatgcaccacctaaagatcgcaccaccctgtcacgcaccaactcgcggcccaccctctcctcacccaatcccaagctccaaagtatacccaataccgagtatgtgcgaccaccacagaactttgtcttgccaccgcagatgcgtcccgccgtggggccaccacagccgcgtcctccgttcgccggagcccgacctatggtcggaatgggaccacgaccacccatgccgccgaacatggcggccaggccaccaccgctgcgcagcacagacagcaagagcaacctgctaatgggtccaccgatgcgaccgggcatgccaccgcaactcaatatgcagcaggctcgtctgcccaatgccggcggacagcttagcccgccgggccagggaccaccaaggccaccaggcggatttccttggaatccagccggggcaccgggaatgccacccggagcacgtccgccccagaatatgacgcgaccgccgccacctacttttgcacgcccgccgccgggacagccgctgcaggcacccttcaatcgaccgcctttcaaccagccgcccatgcaaccgcaacagcaacaaccaccacaacagctgcagcagcagcagcagcagcaacagcagcagcaacacatgcaacagcagcagcaactacgcccactttcggcagccagtgcacacaacaacaacgatgacgacgacgacgtggtcatgggtcccgcggtgaccccgctcaagaccttcaattcgaggcccgatccaatgggcgagcccctactggaggacatcgagccgcccttccagacgagccccccagccggagaatccaaaaaggggcccggcttcaagggcgacaatgacagcggcgtggatgagtccactcaggagaaggatcgcaacggacccaactcgcccagttcgcccgtaaaaacgcccacatcgacctcatcgaagccggacaagtcgggcacgtcgcgtccaccgagtgccacgccctcgaacaagtcagcccccaaatcgcgcagcgcctccaagaaccgcttgctcctcaagaccccagagcccgagccagtgaagaaagttccaatgaacaaggtacaagtcggacatgcgccttcacccaatctgaaggcggtacgctccaagatcggatccctggacaatgccacctataagccgggtggcggccacgtgaaaatcgagtccaagaagatcgacatcaaggcggcaccgcgcatcgaggccaagaacgacaagtacatgccaaagggcggcgagaagaagtggaacgccaagtccaaaatcggttcgctggagaatgccgcccacaagccgggaggcggggacaagaagatcgagaccctgaagatggacttcaaggacaaggccaagccgaaggtgggctcgacggccaatgtgaaacatcagccgggtggcggagacatcaagatccaaacgcaaaaactagaaattaaggcacaaagcaaagttggctctttggataatgtaaagcacaagcccggtggcggtgagaagaagattttcgatgataaggattatttgaaaaatgttgaacactctgttgcactgacaacaccaccaacacaggtaaactacgtgtacataagctcaaagtagt

SEQ ID NO: 11805 - protein, 700 aa, DROSOPHILA
MYGTGKDRSGQEIISPQDYPVQQQRAQSKSEYVMNSASVDRPQQQSRPQPTQDYVPFESSDSSVERKKEQPSAQLSTDYTNSNTTSDSASYGSDSVSKQQIRSQQNPEYQNNAYEAPRDDRSQLQPQRSQPATDYSAYERQQRPPPTTLDYTTGYNAPPKDRTTLSRTNSRPTLSSPNPKLQSIPNTEYVRPPQNFVLPPQMRPAVGPPQPRPPFAGARPMVGMGPRPPMPPNMAARPPPLRSTDSKSNLLMGPPMRPGMPPQLNMQQARLPNAGGQLSPPGQGPPRPPGGFPWNPAGAPGMPPGARPPQNMTRPPPPTFARPPPGQPLQAPFNRPPFNQPPMQPQQQQPPQQLQQQQQQQQQQQHMQQQQQLRPLSAASAHNNNDDDDDVVMGPAVTPLKTFNSRPDPMGEPLLEDIEPPFQTSPPAGESKKGPGFKGDNDSGVDESTQEKDRNGPNSPSSPVKTPTSTSSKPDKSGTSRPPSATPSNKSAPKSRSASKNRLLLKTPEPEPVKKVPMNKVQVGHAPSPNLKAVRSKIGSLDNATYKPGGGHVKIESKKIDIKAAPRIEAKNDKYMPKGGEKKWNAKSKIGSLENAAHKPGGGDKKIETLKMDFKDKAKPKVGSTANVKHQPGGGDIKIQTQKLEIKAQSKVGSLDNVKHKPGGGEKKIFDDKDYLKNVEHSVALTTPPTQVNYVYISSK

SEQ ID NO: 11806 - DNA, 3813 bp, DROSOPHILA
tcatttagccggagcataaagtcgaatttttctgtaactaaatatgcaatgtgcccactcaaaaaattaaattagtttaataaattaatactggcaattttttttaatatcaatatgtatcgatatatttagagaacattatcgcaagtgttgccgtttagcgggttgctaacgttgccacctgtgcataaacttttggccatatccagcacttatttattatgaatggcgcgatttttaaaaaatcttcaaataatcacttataaagcccatattatattaataccaaaaaaaaaactaaatattatatactttcataccgatttgtagcgggtattaactagaagcaaaacgctatactcttaatgaaagtgagtattcgtagtttacaacttttgagaagttttttcaacatccaaataaaatcattctaacttatttttcaaatattttaattttatttatttcattttagcgttcagatactgggattcttgatacagatactggattcagggattcttagatcgctagtcaaaaaaatgtaatgcttagagtaattgaaataatgtaggcactgcgagctgctgaaaagaaagtcagatggggaaaataatgtctacagctacttaaagtaaatatgtatacaagttatttatacgtgtggaaaggagcacttacttagcttacttaacaaagcaaataaatggtaaatgcatcttattagcgaataccgctaggagaacaggattttaatggaattttatatgtacaaaaggcggaaaatagagaataacgggtgcgaaccaaacgcacgcatttggtccacaacctagtcgatgtgatggttaatggaatgtgcaagtgttatgtatcgtgatgttgtcatctgttctcctagtccctgcgggtatcctgcccactcaggatatatccatattgatcttgccgtgtacatggatttgtgcgagtgtgatctattgtaatgtcatctgttctcctaatccttgcggctggccatgtggttggacaagcggtggcgggtcctattggccacacaggatatatccatgttggcgagtgaggaaggcctgttggccaaagtgcggcgacgtaagacacgtggagcaggagtgctcggctccggcgagatggagcccaacagacgcctgccattcgacggcgcagcggcagtgggcgtaagttggcgcctcttcgactcatattcatcactatcatattcatcactatcgtcatcgctatccgacacgtgtctaggcggcgagacgtatctagggcgccagggacgacgtccattcgatgtggacggctcagtgttttcttggttatcaagtgtcgatgcggatgtggatgtggatgtggatgtggatgatgtcgcagttgcagtagcagagcgaaacgaggttactacacttgagagaaatgttgtttgcgttccctgtgattcaaatgtgcgagttccacgatcggctaaagcgcgtgcccccgcagaagtagatggttgatcatcggagagggtcaccacgcgactctgcactttggtatcgaacgcacgctgaaagacggcatcatcgtcggaggagccgaaatcatcccaatgggagggtgatagcttctcttgaatctgatcaccatttaggtgacctggacgtggggcttcggccgagtcgtccattgagccggcgtcatccgagtccgattcggcaacgggcactgcctccgggctgacggctgagcaaaccttgcagacgtagttttggagagtcttcaacgtgcaaaggtaatgtgacggattggcgccacatgaggtgcagtacagcagcatggcggaagtgtcggcgcgaccagagaccgcaacgcacaacgcggccgtacaattgacatcgcggcggtactgcccagcaaaggcgtccggctcggtctcccaggaagcgtctctgcggaatacaagtactggttagttgggcttgtttgctccaaatgtagtaggttttaacttactggtccagcaccgcgatgcccatataagccaccctgcggaacacatctgtgttgttgcacagcgggcacttgaagaagtagccggacgagttggcgtagcgctgcaggcacctgcggtggaaccatccattgcggcagcacggcgcgtataggcaggtcaccacgctgaagcgctcgcccttggcaaccacgtcctccgcgcataggagacattcctcgtcattcttgaacaccggacggtttcgaggcaccagcacatgctgatggcagaacgagttgtacgtgtcgcagaactggttctgggccagattatcgacgccgcacttggtatggaaggtgcgacggcaccccgacttgcagcaccaaatattggcgcccaagcggcggcaatagcaacacttaagcaaacggcagcggttgacctccgcttcgatgtcctccttgaggaagttcatgatgctcaatttcttttcgccacgctggatgagattcgagctgaggtactgcaagaggaagggagaacgaggggagtgagaaggtcggcttgcgaaggagtctcctggacgcggaagcccacccgaatactcttacttaccaagcagttgcggtgcaccatcatgttgccctccacgtgcacagtgccgaagatcagctcgtcccgctcgccgctgaggcacagcacgcagatctgcaccatggatgcgtttccggtgaccaatccctcaactaaaacagcaacagcagccgaaaaaaacaaatctcgccgattgagaagcgattgactgttttcgcgcgcaatgaacgtcggtttatcggagatagccctgcagccagagatgccagatcgcctcgagttgatttgattttatttgcgttggcacgaattgcctaaaactgctgttctgaaaaaattttaattaaaatcttaatatttaacatgtctagtttctatatatatttctatattttcttaagcaaccctgatgttaaaaagggatattttcaaatttttgccttgggaagtccaaagagaattgacgtagctaaataggaacgaaataaaaaaatcaagcaacaacctaaatagaaaaatataaatataaaatcttaatacttgacttttctagtttctatatatagttttatattttcctaagcaacccttaaattaaaaaatagatctttttaatttgttgccttgggaagtccaaagagaattgccgtagctaaattgaaacgaaattcaaaagaaaaaataaaaacagctcttatttacccgttactcaggtggtgcgagagaaatggcaatattcaaatagaagagcgagtgctgtagagcgcgcagcgattgaatgttaatgggcttctaaaagtctaatctgaacacaatttgccagttagcttctgttgacaagtgaagcacatgtcccttaataccaagaagttgagcattttggcggcaacagtttgagattcacacaagcaaatcgggaattttatttagccaatgatgaagaatatatatgcacatatagtctgtagggtttatagggttggagacgattctgtttctataaattcccaacgattgatttattttaactcttaatgggcttctaaaagtctaatctgaacacaatttgccagttagcttctgttgacaagtgaagcacatgtcccttaataccaagaagttgagcattttggcggcaacagtttgagattcacacaaaagcaagtcggaaattttatttagccaatgatgaagaatatccaaatatgcacatatag

SEQ ID NO: 11807 - DNA, 1513 bp, DROSOPHILA
cgaaaacagtcaatcgcttctcaatcggcgagatttgtttttttcggctgctgttgctgttttagttgagggattggtcaccggaaacgcatccatggtgcagatctgcgtgctgtgcctcagcggcgagcgggacgagctgatcttcggcactgtgcacgtggagggcaacatgatggtgcaccgcaactgcttgtacctcagctcgaatctcatccagcgtggcgaaaagaaattgagcatcatgaacttcctcaaggaggacatcgaagcggaggtcaaccgctgccgtttgcttaagtgttgctattgccgccgcttgggcgccaatatttggtgctgcaagtcggggtgccgtcgcaccttccataccaagtgcggcgtcgataatctggcccagaaccagttctgcgacacgtacaactcgttctgccatcagcatgtgctggtgcctcgaaaccgtccggtgttcaagaatgacgaggaatgtctcctatgcgcggaggacgtggttgccaagggcgagcgcttcagcgtggtgacctgcctatacgcgccgtgctgccgcaatggatggttccaccgcaggtgcctgcagcgctacgccaactcgtccggctacttcttcaagtgcccgctgtgcaacaacacagatgtgttccgcagggtggcttatatgggcatcgcggtgctggaccaagacgcttcctgggagaccgagccggacgcctttgctgggcagtaccgccgcgatgtcaattccgtcagcccggaggcagtgcccgttgccgaatcggactcggatgacgccggctcaatggacgactcggccgaagccccacgtccaggtcacctaaatggtgatcagattcaagagaagctatcaccctcccattgggatgatttcggctcctccgacgatgatgccgtctttcagcgtgcgttcgataccaaagtgcagagtcgcgtggtgaccctctccgatgatcaaccatctacttctgcgggggcacgcgctttagccgatcgtggaactcgcacatttgaatcacagggaacgcaaacaacatttctctcaagtgtagtaacctcgtttcgctctgctactgcaactgcgacatcatccacatccacatccacatccacatccgcatcgacacttgataaccaagaaaacactgagccgtccacatcgaatggacgtcgtccctggcgccctagatacgtctcgccgcctagacacgtgtcggatagcgatgacgatagtgatgaatatgatagtgatgaatatgagtcgaagaggcgccaacttacgcccactgccgctgcgccgtcgaatggcaggcgtctgttgggctccatctcgccggagccgagcactcctgctccacgtgtcttacgtcgccgcactttggccaacaggccttcctcactcgccaacatggatatatcctgtgtggccaataggacccgccaccgcttgtccaaccacatggccagccgcaaggattag

SEQ ID NO: 11808 - protein, 472 aa, DROSOPHILA
MVQICVLCLSGERDELIFGTVHVEGNMMVHRNCLYLSSNLIQRGEKKLSIMNFLKEDIEAEVNRCRLLKCCYCRRLGANIWCCKSGCRRTFHTKCGVDNLAQNQFCDTYNSFCHQHVLVPRNRPVFKNDEECLLCAEDVVAKGERFSVVTCLYAPCCRNGWFHRRCLQRYANSSGYFFKCPLCNNTDVFRRVAYMGIAVLDQDASWETEPDAFAGQYRRDVNSVSPEAVPVAESDSDDAGSMDDSAEAPRPGHLNGDQIQEKLSPSHWDDFGSSDDDAVFQRAFDTKVQSRVVTLSDDQPSTSAGARALADRGTRTFESQGTQTTFLSSVVTSFRSATATATSSTSTSTSTSASTLDNQENTEPSTSNGRRPWRPRYVSPPRHVSDSDDDSDEYDSDEYESKRRQLTPTAAAPSNGRRLLGSISPEPSTPAPRVLRRRTLANRPSSLANMDISCVANRTRHRLSNHMASRKD

SEQ ID NO: 11809 - DNA, 3562 bp, DROSOPHILA
cttaaatgaaaagtggctacattttggacatattcaacatagctatggattaaaaacatggttttgaattacagtccgagcgcaagtaatcgtgtttttccaaagatcaatctttattctttctgagggtacatatgtaatgtatgtatataatatcagagaattggagtattggttccccggttttcgaatagatacaaacattacctacaactatttctcttcagaaaatttgcattggaaatcatattggctgacagtttcaggtttttcattttaagcaagcacatccaaaagaattggaaacagtccctgaagttctttagtttatccagttaaatcaatcacggaatggcggcaataatatcaaatgaaatcttaacaagtaaggcagtttccgagagcaacgaaatgtttaaaagcatcactccaagcaaataaaatttcagattcattcaaaacgtgtctttcgcgattgatagtcggcagatcagagctttcgtttttaaattttaaactatgggagtattaaaagtggagagtcgcgatcggaagccaataatttgatctccccacatatgtatatctatgtatatatatttatatatttctataaatgtgtttcgtagcttagctagcgagcgaggcgtttgcgtcctcgtgccttttcctgcggtcgctcttgttattgtaaatacaattttccgtttgaaatataaatatattcttgtatataaatatgcaatttgtttcaattttgtttatgtatgtatatattaatatgtatataaattgctaaatacatttaattgcgctttacacttttacactttaatttacggctatctggcattattccgaataaaactgaggaggaaaaaaaaaaacaaaacaaaaaaaattgttgtctctagtgggtgtgagtgttgttcagttgtctcgtgttgtttgctttgtgtggtttcttgttgttggttgtttggtggtgttagctatgtctatgtgagtgagtgtctgtgtcgaatcgtaagccaagaaccctacaaactacgcgcccccacaacgattccgtccgcccccgaagttgatccaggtcctggtcctaatttcagttccaattcccgtcccgccgccgccgccgccgccgccgtcgccgtcggtccagttgcaatgccagctcccgtgccggagccgctttcacctgcagcacttcccacccttgctgcccttgggattgggcttcagatggagcgtgtccttctgctgctcgttgggggaggtgcgcagcttgtgatcgagcacctgtcgcgtaatcgacaagaacatgttctccacgtttatgttgtctttggcagatgtctcgaatagctcgatgtccatttgtttcgcaaaccgctgcgcgtcttcggtaatgaccaccttcctgtccggatcgtcgttcttgttgcccactgttgaggaatcgaaacatgagtctatatcgataatgtaagttgtctactaattaagctccgcttggcatagccaacaactacttctcagtacgggtcaaccaattctgtgcgtaatacgatataggctcacctaatacttttttaaccacatcgcagttattctggatctcctccagccagcggcggacgttcgcaaaggattcgccgttcgtgacgtcgtagacgacaatgacgccgtgggtgccgcggtagtaggtgctggtgattgtccggaagcgctcctgcccggccgtgtcccagatctgcagctttacgcgcatgccctcgatgtccacggtgcggatcttaaagtccacgccgatggtggtgatgtaactgcctgagaatgtgtcgtccgagaaccggatgagcagcgacgacttgcccacgcctgcaggggatcagatggaaagatggaatgggattcgtattacaaaaatgtgatatcgttactacacacaagtaagcccattcggcatatgacattgctgtggagcggggagtgttctcctgctccggttaccgccgcagctggtctgctcgcatatcaagctgtatatcctgccagtgcgtcaccattagtcatgagcctggttttgcccgagccagaccacctttctcgaaatacgcccaaatgaatatgtagatagctacgttaggaggaggacaggactgatataaagtgcttttgcatttatgattaaatatataaaattagtacaacctaacacatgttgagtatgccaaaaacattgagtatagaaacaagaagctgacgaatgttgaaagtattatggaaactgaaaacaacattactcatacgccatgttggcgttagcattttaaatgtaacatacattaatggtaatcagatgcagtaatgcgaaagggaggtggagacaactgcgtttttggccaggaaacggggacaaattgcaatttacacctgctattttcaactcgatgctatttttaagcacctggtctgtgggaaacgggaatgcctgggaaactcaccgctatcgccgattattagcaacttgaatagatgatcgaagccgcgtgccatttttcgacgttttttcgctgtttttctgtgtttttccttgtttttgcaagtgcttttatatttacagttaggcgcgtcgaacaatgcaaaatatacttttgttttctttttttctgctgcctgctcccacactcacacacacaggagcacactccctgcgcttactctctctctctctctctttcgcactctctcggaagcgccctctctttcgccccaagctacgaccctctcgctcgcactggtgcagccggctgaatatctgagataagctgttgttctttctggctgctggtctgttgttgttgttgtttttgctgctgttgctgatgtttttgttgctgtgtgataagctatagttattagtgttgttgcgttgcgagttaatttatgtaagtgttgttgccgccgccttgttatttaatttcctttgattaggtaggtgtgtttctctttttttggctccactggtacaattgttgcttttgctttaacagcggatttgcgaagagaaatcgagcggcaggctcatttccatcagatccaatggcttgctggcggataagacggcgatttggtgccgaaaatatttcaatataggctggcaaattttcgcaaagctcgactccctcgcaatcgtgcgtctcgctctctccaacactgtagcacagacacaacacacgaacacatacgcacgcacgcacacacacacaggagtgaagctctggctgactgttgaatttatattgggcttctcggcggtctcgaactttccagcttccgggttgctcttgcagcgctgaaaggacgacgatttgtgggaatttgtgggcgtcggcgttgcggattaattctggttaattcatattctggataaactattgctaacgcacccacactagagacggaaccaaatgcgatgtttatgctatcgatagtttaggatagatagtaccccacaaacatcgattcatttagccggagcataaagtcgaatttt

SEQ ID NO: 11810 - DNA, 803 bp, DROSOPHILA
atggcacgcggcttcgatcatctattcaagttgctaataatcggcgatagcggcgtgggcaagtcgtcgctgctcatccggttctcggacgacacattctcaggcagttacatcaccaccatcggcgtggactttaagatccgcaccgtggacatcgagggcatgcgcgtaaagctgcagatctgggacacggccgggcaggagcgcttccggacaatcaccagcacctactaccgcggcacccacggcgtcattgtcgtctacgacgtcacgaacggcgaatcctttgcgaacgtccgccgctggctggaggagatccagaataactgcgatgtggttaaaaaagtattagtgggcaacaagaacgacgatccggacaggaaggtggtcattaccgaagacgcgcagcggtttgcgaaacaaatggacatcgagctattcgagacatctgccaaagacaacataaacgtggagaacatgttcttgtcgattacgcgacaggtgctcgatcacaagctgcgcacctcccccaacgagcagcagaaggacacgctccatctgaagcccaatcccaagggcagcaagggtgggaagtgctgcaggtgaaagcggctccggcacgggagctggcattgcaactggaccgacggcgacggcggcggcggcggcggcggcgggacgggaattggaactgaaattaggaccaggacctggatcaacttcgggggcggacggaatcgttgtgggggcgcgtagtttgtagggttcttggcttacgattcgacacagacactcactcacat

SEQ ID NO: 11811 - protein, 201 aa, DROSOPHILA
MARGFDHLFKLLIIGDSGVGKSSLLIRFSDDTFSGSYITTIGVDFKIRTVDIEGMRVKLQIWDTAGQERFRTITSTYYRGTHGVIVVYDVTNGESFANVRRWLEEIQNNCDVVKKVLVGNKNDDPDRKVVITEDAQRFAKQMDIELFETSAKDNINVENMFLSITRQVLDHKLRTSPNEQQKDTLHLKPNPKGSKGGKCCR

SEQ ID NO: 11812 - DNA, 12282 bp, DROSOPHILA
gttgcgataattgagcataaacaggtgtgcgaaataacacttttttttatatatgaagatatgaagtgtaactgaggaagtagtctgaacattacgctcattatgtgataacaattagtacaaagattcccaaatttttggtatcttatatcgcatgtttttactgtttcactgttgtttgtctggcttcataaaatgaatgaaaaatttaagagggcagctcactaagcacggaaaatcgttaaaagggtgaaccaatttgttagcaaaaaatttaaaataactgaaaaaaaggtaataataaatattttatgtgtcttggcaacgatttaaaaagatttaaaatgaactcatttacttagctttagattctttttgttatttgttttaatggaagatataagaacaattaatataagcagtaatatttattttcttgtttacgcaagcttagactgcaatttgtttacaggcaaacgcagtcgacagagcagaaagcacattatttatgttttcaaatgaactgccacagaaatgtataaataagtagcacattttttgataacaaattagtaaaaggagctgtctgttccgactgggatctacccagtgattccagagttcaaggtagttcttgatcagctcagtcaatgtggctaatttttattatgaaacagcatcagcaagaattgaagtaacctggttttttaaaaaacgtttttctccttcgatattacaatacctcaacaatagaattaaataaaaagtagttcagtgtcgcacttaattattataaatcttcaagcttagattttgcaatattttaagacacttgtatataaaagactcatttgatcctcaaattacaactgtggcgacatttctcattaacaggggaatagaatatttacacgatcccttctatttgtttgcaacagtgctgtttaaataacaaaaggttcaaattttattaacttgaatatcgagtacaataaatcgtttaatttaaatgaaaccccttttccttggttgctgttaacaagcgctccttcatgatctcttcggttgggtagtcgggaagctttaagtagtgaacgcacgtgttcacggatggatagcttccaacgccagcatctacctttcggacaactgtcagtcggggatgaaggttggccagtccgcctggcggcaggctgctgcaaccggttgtgaattggaggaacgccttcctctcgtcacccgacatgctcaacaaaacgttaacaaagcgttggaatccgggactgaaattaaaataaatgtattagttgtaataattcgaaaaacatctatcttattgcaagcttacctgtctttgttgtaaccaagttttggttcagtgtatgaaataatgtcttctcgactccaatgggggaactgctcgccacaaatcatcattcgtgcctctgagggagtaaaagcggccaactttttcaaagggaacacttcattgaacccatcactgaaggccttcatttgctgagcgattccgtcctgcaggatgaagttcatcagcagttcgcagtacgcttccaggttgtcgatggtgacgttcactgacgatccattgggcagcaattcggcctgggtgtaaccatagatcgaggaactcggcagatacgtgaacgtaagggccaggtcttccaaagatacctccaagccattttgggtttgcagcttaagctcgttgataagctcatgtttcttctccgcgcttatagtatcgtcaaactcgattgattgctttcgcaacaataggttttgcatttcctgtaggaattgataacgagttggatcgatttctttcaagttttccaatgacagaatacccccgaatgcattcgacttgttggaatcagttcgcagcaatttagtgcaggtttctactatatcagagtcttctgatacgactgaaaggtcgccatttcgtctatccgaaatgaccttctggagattacgtgataacactttgttgtgacaaagcagctgtagaaatgatgtcgataggggtatgtccaccaggcgcatgtcctgcaaaacctttgccacaaaaactccaaagaaccagaaatatttgagcacattctcacatatctcagaattctgtggtaatggggctgggaatattccgtgctccctgcgatttacgtaatacccaactggttttgagtttccttccgcactctgcgtcgagttttccgtgtcctcgcccaagtcatcgtcacacagccacatacagaggtcggaacgctggatttctgcggccaccaaggcgtagaactccaaggttggtcccaaaccagttccttcctcatccaaaaactccacctccagcacggactttcgattgcagtgagtcttcatcacctgcatggcccacatgagcaggtcctcgtttcgcggcactttaacgcgttcgtgctttaaacgcccgatgcggaattcgtgatcatcccgccgcggactcatgatgggtatcctctgccgttccacggtgacatctcgctgcgactgtaggcatactatgctgcgcgatgctccgaacgatgtgcagttgaagtacaactgcctggtctcaaacggaaacagaaagggacaggattggtttaggttctcgcaccaattcggcagcgcgttgcttgctagcaccaatggatcctgaatttgctgctgcagtttgttggttattttcttgctgatgaagagatcttcggacaacaccgatacaccgtgctccttgacatccgaatcgatttcggactgattgagaccattgatttgagtgagcagctcgagtacatcgtcaacggagcacaggttattatcggccacgttgaaaccgatgtgcatgggcgagttgggggacaaagtggatgcaccactcttggaggacacatcgggcgtttgcgggaactcctccgattccaagcaagtgctctcctgggcctcgggtgatacctcccggtacacgatggtgtatgtgggctcccatatctttcggaatttgtccagcttgttcaactgactgcactgaagtaattcctgtaccgctctgaatatggtccagtcggtgttgctcaggtcgatttccacttcgggtataccaccaattccaggaccacgcaatttaaggcccagcaagggctgttcgatagtctcaggtccaccactctgctggggtttcggtagctcggcgccaaggggggatatttccaaatcagacgtttgattgacgtttgtgcggcccgggcgtggatcgaatgctggtatcaacgcggagaactgcctctttagtacaaactcatcgtcccaggacttgcgcttggtcacacccaccaatcggttctccatcgcctcgtcatccataaaggtaagcaagttgcgtgagaccatcacttgcaacagtgtgtttccaacttcttcgtactcgtcctcattctcctcttcatcgttgtcctcatccatgtcgtcctcatcgtccaagtcacccaacaacgccggcgctctgcagctctccaaaaagtcttccagcgatacttgctcactgtcactcgatgtggatgttagactcatggttagggtatgattaatcgttgatgccgattgctgtcccgcagaggtatttgaagggttcgacggagctatgttttcgctattattcgacgacaggcttgggtaactttgggcggtgctgagcagtccggagtggaaattgcttgacaatgccaacttaactaaactggttaccgagtggccaaggaatgagcctgaagcgttctgatcgccgtgctcgttcacattggcttccgcattcatgatctgattatcctgtatattggtaccttgggaggtacggcgacgagcaatcgcggcaaatgtctccagcaaaccggtgtgggtagccacttcggaagtcgagggaacttccgaggccgacgttgttgtcagattaggaacactgatgctcatctggctgggaaccgaaacgttttcgttcgaaatcggctgttccttgatgtccacaatggataagacagcatttggttgctgagctggctttaaggttacactgggcttctttgaactcttagtgggaaactcttcggatgtaactataatttgcttctgattggcattatctggatttattagagcctgggccttcggggtcttcttaccgccaactggcacatttgtgcagggcactgggaaagtgtccgtggaaagaatgctattggacatgttacgaatcatgtcgacgccatcacgcattttgtcgatcatttcgagggcttcggttgaaagttgtgtgaccggtggacagccagcaatgttcgaggttcggagatttgcgagcaggtccttggatatcttattcaccgagttgttggcgttcatcttgttgttttcctcaatgttggatatgtttttgatatcgttctctcgcggcgacgaactctgcacatccggatgacttgagctctgactcgcagtaacgctctcagcgggtttgtaggaaggcgttaggaccctgcatatattctctttggacaattcagttagtgataggttctccgaaatggtggctaggtcggaaacattgctcgagttaattgccggcatcgagttgttgatggccgacaagtccgatatgtgctccaactctcggctcaatggcgagggtccacttatgttatccttatgcatttgattggtgccagactccttgtgcttggcccgagcttccctggaggaagatgtgttcatagcaagttggtttgatataatctgtgtcttggccgaagcaaatacgttctctgcaatcgtctccacagtctgcttccaggccaagttgtccgccgaaacagtttgattggacgcaccctcggggttttgattcttctctgtggcttcgggcagggatggagtggagctcgatttgcgtgaggtgagtgtgtttccccccttctcacttggtttagcagctgtgcttgcactgcccatcgactgatttccgtcgaaggcggatagatactcgcaatcagccaacttcaaatcgtattttccttcggctcccatgcgataggagttgcgcacaccatggtcccacttcacatcgatccagccgttgtgtatttcgccggttattgtgccctcggcacatccgtcctgttcctcccagcgccaatcgacgccacggatcactcgtgcaccggtggtcatgtgcttcagctgtgcccttatctgccgcctctcgcgcctcgtttttgcctcagcttccttgacactctttccgatatcatcggcaacgcctacgacgcgcccatagatttcgaagccactcaaactcaaataatgggtctggccagacgcattgcggccattttgctggattctaatgtggcgataccatacggaatcatcagttgcacagttaatgggccatgtggctgtgctgccaggctccacaagactcttgtcatccacatgtgtgctgagggtggtccaagttgagccatccttggagccttgaagtagccagtttctcaaagccgatcttccataaccgcgggcatggcgcagcgtgtaagcagtgggaattatatagacacccaagtctatggcaaaccaagccttcttgttgtccttggtgtgacaattgagtgagatgctatcgcgtgatagaatatcctccagtttgccatagggtaaggtcttgccctccgagctagtcacttgcaccaggccatattgcgctgggttaacccaatcgcaggtcttagcattggagccaatgtagaataacaagccttcctcgtcgaaatcaaaggagtgcgtaaacacggtagcggtcctatgctcccgaattttcttcaaatagaagtatgttgagcggtcgaggtcgtaccattgtttggccaccattttcagtagatatttggaaagttgtccaatcgttgccaatggttccattttaagagttcgtcccgatcgatcgaataaagtgctttcgcactctgcacgctccaaacggaaacgaagtcttttctgcagaatttgcaaactgtatccagtgcatggagaatcgtacaaatagactggcagcttctcggtgctttccaaaaccgagacaagtttttgaattaaaatacttgcagtacttttagttcttggtttgttcgttgcagactcaacgttgtcctccagtatacatttcttgaatacagagactcgttgcttttgcattttgtttcgcttgcagcgaggtgaattagtttcccaatgattgaccgacagcacggctaccaaagcttgtaccaatcccgacgaatgcatttcataggcgcttacaacgccgtcttcgtgtatcagttgagatagcttcattagggcgtccgtaagtgtggtctcccagtttccatttggtgccatgtgctgctcctcaaaggatagctcaatttgctttacgatatccgtaagtatggctacggcgccccgaggaattatttgcgcagacttgaagtacttgttataaatttcccgcgataggtttcgaacctggaacttttgaccctctgtctttgacttgttgcgcttctttttggctgttgaccaaccggatgcaaaatcgggacccaggacagtttctgccgagaaggtatgcttcgttcctcgattgctttcaaaaataaaaccgggcaaatcgtcctgcaacacggtaacttgatgaccttcggtgttgtgaatttgtagctggtttgttttctgcgactgtagaacccagttgccaacaactaggcgcagagcactcgcagtgggcaaaatgggctgtgatacaactcctgcaatcacgcaggaccgagcacgcatcagtttctcaagaaactcgccccgattttctaaaaacaaacagaaaatttaataaattttttatctagcagattttaacacttaccagaactatcatttccgttctccggactgccactggagtacatcgttgccagtttgccatctatgatgaagcggaaccatccgtttgagccattggacagctcaagggccacagaatctgaccagacgtacaaacaatcccggcctctgcaaatgctccactcgcgccagtgatagggtttcccttgcaatatctccttcgcgtcctccataggatcatctacatgggatggtccgatcgataagaattggtttcaaatcaaatatattgaatatacctgatgttggcctaggagcaacgactacactggtcgacgatctttgcgctgcggctggttcctctacggtccctggtaattgtacatacaattcctccgcatcggtgtccatcagggcttggacctttgcaaacactcctagccttgcaaaatgatcgaggaattcctcctgtgtcttacacataatttcctcaataatatttaaaactattaaatgaccgtcaccgtcatcctgcaacaatatcgttaaagatagtaattagatttgagtgatgatgactgcttattgtttatacctcgttatctaggacactggcgatcacctcaattagtaggttcccaccattttgacccgatgtcgacgctgcatcttcgctaaaactggtttcactgagactttggagcaccgttgggtacgcgtactgaactatctttttgatcagggccaaactggcccgccggacgctgcccagcatcgaacccaggaacgttctacagaatatgggcagaaggacctttaggtaaatgggcgccatttccggatcacctcggggctccattagtgtgtactttttgccatctttgttgagaagcgaatgatctggcgacatccactccccaggcgactgcaaaattgccgctacctctcgatgtccatcgtctaatctttctcgcgccttatccaatggcgttttcccatcttcatctcgcaaatccggataggctccgaatttcaaaaggattttcgcaatagccgggcgaccaaaacaagctgcatagtgtagggacgaacttcgttgacccttgttgacatcggctcccttctcacacaaatattctaccatttccaaggtaccgaaggccgaagcccaattgagaagtgtttggcccacatcgtccatacaattgacgtcaatgccacccgattcgatggcctcacgaagggcttccgaatcctttgatcgtatgcaatcaatgagctggcgatgcgtgcgatcggtgttggtattattacgccttggtcgaggcgccaactgtccctgattggggttgttacttcctcggtttaatgcttggcgaccctcgaacaatagtaacagcaatagatccgcaaatcgcatgcaatccaacacgcatcgctcatcgccctgcagagctctttcgagggcatcagccaattgggatcgcaaaatgtcatgggtaatcgagggtgatccgcgacaaagtgtggacaacaaggaaatcgttgttgatatcgattgcggcgaggcggcggcatcagatgacttaaccttggtgctgttggatatggttgcagttccagcaacgttttcattaatggcatccgagtttgtggttgcagcgggttggctagagctggttggctgggttccagccgctgtcagcgaagagtgcgtgtttcctccgacactttggaggcgcttcaacaactcggttgtcaggccgtactctgccaacggtgctgggtccacccactttcgtgtaaatcgatctgctacagaggcaaagcactttagagctccatcggataccatggggtcctcgtgttgcagcagagtgctcagactctcgacgcagttttgtatgcatggagtattaggttccaccttggtgcagagcctggataccaccgacatggccgagtgtaaggtgtccttgtgaacctgcgagccacagtcccgtatgaaggacagtacgcagttgaggccgccgccctcgaagacggcgccagcttctcgggtgcaaatcagctcgagcactttgatacattgctcggcaagatcgcgagatgtgcgcgatgatagatcggcgaccactagatgattgcatatggctttgatggcgccatcaatggaaacgatacgcctggtgcactcagccgaaacatccaggtaataggtgatggctcgcgcagtgacctcgagtacattttcaggtgcaagttcgtccaggaatatcttacacaacgccggtaaaaatgttcgaggagggcagctgatgttggggacggacagattagatagtgatcaaatggtaaatcttctatcgctgacaataatacctttcgaagcaacgatctacattatcggacattaggagcagcatacacagctgctccagtgcgattagttgcatatcccgctcatctccttgtcccatggacaaccattccagcagcgtctcggggtcgacatcgcccatctgtaaggaaaacaacaacaaaattttgaatattgactttaaagctgactttattatacatgtaatgtattgacagctgagtcacaaatcatcaaaagaagacgtggagccttttaatgggtgccttacgtgtagttcaactaaagaggaatagatacttaatatatggacttgtaaaacagacagggcagaagaatatatataagaaataatatacaatattccggacagttctttcaaattttggatgatctgaactaaatctttacgtgcgatttaaatcttaaattcacaacctgaagatctaatttttgttaacttttgttaatcgaagtcataaaaaatcaaacatctagtttgtaaaaaagaacgtagatctttgggacttatatttatttatatataaactttagttgcttgcgttttattttgtttttactcagctaattactgagcacagcacgtaattatttaacgtagacagcagaattgataacatttacttttccaatgaattagaaaacgtcatagttcttgaacataacttattgttttttaatttgtttaatgctttacttaacaaaaagtatttaatatgtatgtatatttaacttaccgcaaatcgaaatttgatttatgcttctacaccaaaactgaaaaagaaaggaattatatagacattaacaataatattctaatgactcacggctttcatataaattatttattaacatacgagaaaagtataaaaagggttctggactgaaataattttatctagttgataggacaactttgggttgctaggcgttttttgattggtaaacaaagataatattacaattttaaataaaaaaaacaaaaattgagtcagcaagtcgttccttatgggaatcgtttcttataagtgtgtacgtatttcatcattcttatagagacttattggcaatattggattagccaattggataagaaatctttcctttttggggaacccgaattgccaaatgcacacatggcggacaaagagatagttggagggaaattgcgtagtgccatcttaactcaataaaatttcaccgcgatgactcgaagttcgtcaagtgatgttataatatatgtatgcacatatgtacgcttgtacgtacatatgcgaattgttttcatacaagataacggtaagtgctaaaaactgttttgaaaatcaacaacataagcatatgtacatcgatatgtaccgatatacacatacacatatgcatgtatgtaatcactttttcaattacacttgatactttttcttgcacatgataataacgatgggtatcccgttttacgttttagcattacacaaaaggtaatttcatttttatgtgaaaagagaatttaaagaatcgtgtaaagaatgatgacactttacgattttctctccttcaacgaattaccagttgtgtatgtataatttaaagacctttcttttctgatagcccaacaatggagttacataaaaacgtagttgtaatatccattgtctttgaccaggtatgtacactagtcacaatacatatgtggaccacacgaaaacatgtgcacacgtaatgtaattgtccattatttattaacattaagtgtcgtgtctctgctcacacacatacatccatatgcaaaagaaaaatacacaaatcttgagaaaattgttgttgaatagagatgatctaccttttttgcattatattgaatattttgctaatgcttgcactcttttttaaagctgcttattaaagctttttaacaattactcaatacacaacactatttttattcacacaaatatctagcagcacagctcgaaaattgattatagagattacatgtggacgatacatttaacaatccatcgataaccgataacattggtggccaagaaataggggcattcgtggccctcaatcgtttaagcttttgtttcccataatataatatctgggtattgacttccaaatcccacattcaaatgattattatttttatgaatcttagagcaagttaaaaaaaattttttagataaattttctaccaagtctttttttacgtaaaatatacttatactttttatttgctgacaacaatttcaggttagccaaattaagtattctgcttaattaaacaataaaaggaacgtctttatactgcttgtttatttgtttattatttttcttgttgttttaaatataggttatcaatatatatacatatatagaatgaaatattatttttgcaaaatatgggtttaattatgttctggaataagttccgatgcccaaacatcttgtggccaacccgtgcggcccttggtcgacaatggaacattctgaaatataaattgtcattattaattggaacaaatagatcatttattatgcacatgcatgattttacgaaaatcttttaattgaatctgttacattgcttgcaaaaccgttaaccgaattgtcgaagacgaaaatgttcttcattttttgttattaggatatacgtatttcttttatgtttttagctatatcccaactacggttaagaattgcatacttttcagacccatttatgttaaatatctaatgaatttaatccaaatgtctgcacacttttcaaaactatgtcgaatttgagtacatgactattgaaaactcgaattgtggatttcaaagcattgcatttgagtaactcaatttgtttatacaggtcatagttttctttttttgtatacaacttgtacccacaaatagac

SEQ ID NO: 11813 - DNA, 8290 bp, DROSOPHILA
aaagctttaataagcagctttaaaaaagagtgcaagcattagcaaaatattcaatataatgcaaaaaagttttggtgtagaagcataaatcaaatttcgatttgcgatgggcgatgtcgaccccgagacgctgctggaatggttgtccatgggacaaggagatgagcgggatatgcaactaatcgcactggagcagctgtgtatgctgctcctaatgtccgataatgtagatcgttgcttcgaaagctgccctcctcgaacatttttaccggcgttgtgtaagatattcctggacgaacttgcacctgaaaatgtactcgaggtcactgcgcgagccatcacctattacctggatgtttcggctgagtgcaccaggcgtatcgtttccattgatggcgccatcaaagccatatgcaatcatctagtggtcgccgatctatcatcgcgcacatctcgcgatcttgccgagcaatgtatcaaagtgctcgagctgatttgcacccgagaagctggcgccgtcttcgagggcggcggcctcaactgcgtactgtccttcatacgggactgtggctcgcaggttcacaaggacaccttacactcggccatgtcggtggtatccaggctctgcaccaaggtggaacctaatactccatgcatacaaaactgcgtcgagagtctgagcactctgctgcaacacgaggaccccatggtatccgatggagctctaaagtgctttgcctctgtagcagatcgatttacacgaaagtgggtggacccagcaccgttggcagagtacggcctgacaaccgagttgttgaagcgcctccaaagtgtcggaggaaacacgcactcttcgctgacagcggctggaacccagccaaccagctctagccaacccgctgcaaccacaaactcggatgccattaatgaaaacgttgctggaactgcaaccatatccaacagcaccaaggttaagtcatctgatgccgccgcctcgccgcaatcgatatcaacaacgatttccttgttgtccacactttgtcgcggatcaccctcgattacccatgacattttgcgatcccaattggctgatgccctcgaaagagctctgcagggcgatgagcgatgcgtgttggattgcatgcgatttgcggatctattgctgttactattgttcgagggtcgccaagcattaaaccgaggaagtaacaaccccaatcagggacagttggcgcctcgaccaaggcgtaataataccaacaccgatcgcacgcatcgccagctcattgattgcatacgatcaaaggattcggaagcccttcgtgaggccatcgaatcgggtggcattgacgtcaattgtatggacgatgtgggccaaacacttctcaattgggcttcggccttcggtaccttggaaatggtagaatatttgtgtgagaagggagccgatgtcaacaagggtcaacgaagttcgtccctacactatgcagcttgttttggtcgcccggctattgcgaaaatccttttgaaattcggagcctatccggatttgcgagatgaagatgggaaaacgccattggataaggcgcgagaaagattagacgatggacatcgagaggtagcggcaattttgcagtcgcctggggagtggatgtcgccagatcattcgcttctcaacaaagatggcaaaaagtacacactaatggagccccgaggtgatccggaaatggcgcccatttacctaaaggtccttctgcccatattctgtagaacgttcctgggttcgatgctgggcagcgtccggcgggccagtttggccctgatcaaaaagatagttcagtacgcgtacccaacggtgctccaaagtctcagtgaaaccagttttagcgaagatgcagcgtcgacatcgggtcaaaatggtgggaacctactaattgaggtgatcgccagtgtcctagataacgaggatgacggtgacggtcatttaatagttttaaatattattgaggaaattatgtgtaagacacaggaggaattcctcgatcattttgcaaggctaggagtgtttgcaaaggtccaagccctgatggacaccgatgcggaggaattgtatgtacaattaccagggaccgtagaggaaccagccgcagcgcaaagatcgtcgaccagtgtagtcgttgctcctaggccaacatcagatgatcctatggaggacgcgaaggagatattgcaagggaaaccctatcactggcgcgagtggagcatttgcagaggccgggattgtttgtacgtctggtcagattctgtggcccttgagctgtccaatggctcaaacggatggttccgcttcatcatagatggcaaactggcaacgatgtactccagtggcagtccggagaacggaaatgatagttctgaaaatcggggcgagtttcttgagaaactgatgcgtgctcggtcctgcgtgattgcaggagttgtatcacagcccattttgcccactgcgagtgctctgcgcctagttgttggcaactgggttctacagtcgcagaaaacaaaccagctacaaattcacaacaccgaaggtcatcaagttaccgtgttgcaggacgatttgcccggttttatttttgaaagcaatcgaggaacgaagcataccttctcggcagaaactgtcctgggtcccgattttgcatccggttggtcaacagccaaaaagaagcgcaacaagtcaaagacagagggtcaaaagttccaggttcgaaacctatcgcgggaaatttataacaagtacttcaagtctgcgcaaataattcctcggggcgccgtagccatacttacggatatcgtaaagcaaattgagctatcctttgaggagcagcacatggcaccaaatggaaactgggagaccacacttacggacgccctaatgaagctatctcaactgatacacgaagacggcgttgtaagcgcctatgaaatgcattcgtcgggattggtacaagctttggtagccgtgctgtcggtcaatcattgggaaactaattcacctcgctgcaagcgaaacaaaatgcaaaagcaacgagtctctgtattcaagaaatgtatactggaggacaacgttgagtctgcaacgaacaaaccaagaactaaaagtactgcaagtattttaattcaaaaacttgtctcggttttggaaagcaccgagaagctgccagtctatttgtacgattctccatgcactggatacagtttgcaaattctgcagaaaagacttcgtttccgtttggagcgtgcagagtgcgaaagcactttattcgatcgatcgggacgaactcttaaaatggaaccattggcaacgattggacaactttccaaatatctactgaaaatggtggccaaacaatggtacgacctcgaccgctcaacatacttctatttgaagaaaattcgggagcataggaccgctaccgtgtttacgcactcctttgatttcgacgaggaaggcttgttattctacattggctccaatgctaagacctgcgattgggttaacccagcgcaatatggcctggtgcaagtgactagctcggagggcaagaccttaccctatggcaaactggaggatattctatcacgcgatagcatctcactcaattgtcacaccaaggacaacaagaaggcttggtttgccatagacttgggtgtctatataattcccactgcttacacgctgcgccatgcccgcggttatggaagatcggctttgagaaactggctacttcaaggctccaaggatggctcaacttggaccaccctcagcacacatgtggatgacaagagtcttgtggagcctggcagcacagccacatggcccattaactgtgcaactgatgattccgtatggtatcgccacattagaatccagcaaaatggccgcaatgcgtctggccagacccattatttgagtttgagtggcttcgaaatctatgggcgcgtcgtaggcgttgccgatgatatcggaaagagtgtcaaggaagctgaggcaaaaacgaggcgcgagaggcggcagataagggcacagctgaagcacatgaccaccggtgcacgagtgatccgtggcgtcgattggcgctgggaggaacaggacggatgtgccgagggcacaataaccggcgaaatacacaacggctggatcgatgtgaagtgggaccatggtgtgcgcaactcctatcgcatgggagccgaaggaaaatacgatttgaagttggctgattgcgagtatctatccgccttcgacggaaatcagtcgatgggcagtgcaagcacagctgctaaaccaagtgagaaggggggaaacacactcacctcacgcaaatcgagctccactccatccctgcccgaagccacagagaagaatcaaaaccccgagggtgcgtccaatcaaactgtttcggcggacaacttggcctggaagcagactgtggagacgattgcagagaacgtatttgcttcggccaagacacagattatatcaaaccaacttgctatgaacacatcttcctccagggaagctcgggccaagcacaaggagtctggcaccaatcaaatgcataaggataacataagtggaccctcgccattgagccgagagttggagcacatatcggacttgtcggccatcaacaactcgatgccggcaattaactcgagcaatgtttccgacctagccaccatttcggagaacctatcactaactgaattgtccaaagagaatatatgcagggtcctaacgccttcctacaaacccgctgagagcgttactgcgagtcagagctcaagtcatccggatgtgcagagttcgtcgccgcgagagaacgatatcaaaaacatatccaacattgaggaaaacaacaagatgaacgccaacaactcggtgaataagatatccaaggacctgctcgcaaatctccgaacctcgaacattgctggctgtccaccggtcacacaactttcaaccgaagccctcgaaatgatcgacaaaatgcgtgatggcgtcgacatgattcgtaacatgtccaatagcattctttccacggacactttcccagtgccctgcacaaatgtgccagttggcggtaagaagaccccgaaggcccaggctctaataaatccagataatgccaatcagaagcaaattatagttacatccgaagagtttcccactaagagttcaaagaagcccagtgtaaccttaaagccagctcagcaaccaaatgctgtcttatccattgtggacatcaaggaacagccgatttcgaacgaaaacgtttcggttcccagccagatgagcatcagtgttcctaatctgacaacaacgtcggcctcggaagttccctcgacttccgaagtggctacccacaccggtttgctggagacatttgccgcgattgctcgtcgccgtacctcccaaggtaccaatatacaggataatcagatcatgaatgcggaagccaatgtgaacgagcacggcgatcagaacgcttcaggctcattccttggccactcggtaaccagtttagttaagttggcattgtcaagcaatttccactccggactgctcagcaccgcccaaagttacccaagcctgtcgtcgaataatagcgaaaacatagctccgtcgaacccttcaaatacctctgcgggacagcaatcggcatcaacgattaatcataccctaaccatgagtctaacatccacatcgagtgacagtgagcaagtatcgctggaagactttttggagagctgcagagcgccggcgttgttgggtgacttggacgatgaggacgacatggatgaggacaacgatgaagaggagaatgaggacgagtacgaagaagttggaaacacactgttgcaagtgatggtctcacgcaacttgcttacctttatggatgacgaggcgatggagaaccgattggtgggtgtgaccaagcgcaagtcctgggacgatgagtttgtactaaagaggcagttctccgcgttgataccagcattcgatccacgcccgggccgcacaaacgtcaatcaaacgtctgatttggaaatatccccccttggcgccgagctaccgaaaccccagcagagtggtggacctgagactatcgaacagcccttgctgggccttaaattgcgtggtcctggaattggtggtatacccgaagtggaaatcgacctgagcaacaccgactggaccatattcagagcggtacaggaattacttcagtgcagtcagttgaacaagctggacaaattccgaaagatatgggagcccacatacaccatcgtgtaccgggaggtatcacccgaggcccaggagagcacttgcttggaatcggaggagttcccgcaaacgcccgatgtgtcctccaagagtggtgcatccactttgtcccccaactcgcccatgcacatcggtttcaacgtggccgataataacctgtgctccgttgacgatgtactcgagctgctcactcaaatcaatggtctcaatcagtccgaaatcgattcggatgtcaaggagcacggtgtatcggtgttgtccgaagatctcttcatcagcaagaaaataaccaacaaactgcagcagcaaattcaggatccattggtgctagcaagcaacgcgctgccgaattggtgcgagaacctaaaccaatcctgtccctttctgtttccgtttgagaccaggcagttgtacttcaactgcacatcgttcggagcatcgcgcagcatagtatgcctacagtcgcagcgagatgtcaccgtggaacggcagaggatacccatcatgagtccgcggcgggatgatcacgaattccgcatcgggcgtttaaagcacgaacgcgttaaagtgccgcgaaacgaggacctgctcatgtgggccatgcaggtgatgaagactcactgcaatcgaaagtccgtgctggaggtggagtttttggatgaggaaggaactggtttgggaccaaccttggagttctacgccttggtggccgcagaaatccagcgttccgacctctgtatgtggctgtgtgacgatgacttgggcgaggacacggaaaactcgacgcagagtgcggaaggaaactcaaaaccagttgggtattacgtaaatcgcagggagcacggaatattcccagccccattaccacagaattctgagatatgtgagaatgtgctcaaatatttctggttctttggagtttttgtggcaaaggttttgcaggacatgcgcctggtggacatacccctatcgacatcatttctacagctgctttgtcacaacaaagtgttatcacgtaatctccagaaggtcatttcggatagacgaaatggcgacctttcagtcgtatcagaagactctgatatagtagaaacctgcactaaattgctgcgaactgattccaacaagtcgaatgcattcgggggtattctgtcattggaaaacttgaaagaaatcgatccaactcgttatcaattcctacaggaaatgcaaaacctattgttgcgaaagcaatcaatcgagtttgacgatactataagcgcggagaagaaacatgagcttatcaacgagcttaagctgcaaacccaaaatggcttggaggtatctttggaagacctggcccttacgttcacgtatctgccgagttcctcgatctatggttacacccaggccgaattgctgcccaatggatcgtcagtgaacgtcaccatcgacaacctggaagcgtactgcgaactgctgatgaacttcatcctgcaggacggaatcgctcagcaaatgaaggccttcagtgatgggttcaatgaagtgttccctttgaaaaagttggccgcttttactccctcagaggcacgaatgatgatttgtggcgagcagttcccccattggagtcgagaagacattatttcatacactgaaccaaaacttggttacaacaaagacagtcccggattccaacgctttgttaacgttttgttgagcatgtcgggtgacgagaggaaggcgttcctccaattcacaaccggttgcagcagcctgccgccaggcggactggccaaccttcatccccgactgacagttgtccgaaaggtagatgctggcgttggaagctatccatccgtgaacacgtgcgttcactacttaaagcttcccgactacccaaccgaagagatcatgaaggagcgcttgttaacagcaaccaaggaaaaggggtttcatttaaattaa

SEQ ID NO: 11814 - protein, 2727 aa, DROSOPHILA
MGDVDPETLLEWLSMGQGDERDMQLIALEQLCMLLLMSDNVDRCFESCPPRTFLPALCKIFLDELAPENVLEVTARAITYYLDVSAECTRRIVSIDGAIKAICNHLVVADLSSRTSRDLAEQCIKVLELICTREAGAVFEGGGLNCVLSFIRDCGSQVHKDTLHSAMSVVSRLCTKVEPNTPCIQNCVESLSTLLQHEDPMVSDGALKCFASVADRFTRKWVDPAPLAEYGLTTELLKRLQSVGGNTHSSLTAAGTQPTSSSQPAATTNSDAINENVAGTATISNSTKVKSSDAAASPQSISTTISLLSTLCRGSPSITHDILRSQLADALERALQGDERCVLDCMRFADLLLLLLFEGRQALNRGSNNPNQGQLAPRPRRNNTNTDRTHRQLIDCIRSKDSEALREAIESGGIDVNCMDDVGQTLLNWASAFGTLEMVEYLCEKGADVNKGQRSSSLHYAACFGRPAIAKILLKFGAYPDLRDEDGKTPLDKARERLDDGHREVAAILQSPGEWMSPDHSLLNKDGKKYTLMEPRGDPEMAPIYLKVLLPIFCRTFLGSMLGSVRRASLALIKKIVQYAYPTVLQSLSETSFSEDAASTSGQNGGNLLIEVIASVLDNEDDGDGHLIVLNIIEEIMCKTQEEFLDHFARLGVFAKVQALMDTDAEELYVQLPGTVEEPAAAQRSSTSVVVAPRPTSDDPMEDAKEILQGKPYHWREWSICRGRDCLYVWSDSVALELSNGSNGWFRFIIDGKLATMYSSGSPENGNDSSENRGEFLEKLMRARSCVIAGVVSQPILPTASALRLVVGNWVLQSQKTNQLQIHNTEGHQVTVLQDDLPGFIFESNRGTKHTFSAETVLGPDFASGWSTAKKKRNKSKTEGQKFQVRNLSREIYNKYFKSAQIIPRGAVAILTDIVKQIELSFEEQHMAPNGNWETTLTDALMKLSQLIHEDGVVSAYEMHSSGLVQALVAVLSVNHWETNSPRCKRNKMQKQRVSVFKKCILEDNVESATNKPRTKSTASILIQKLVSVLESTEKLPVYLYDSPCTGYSLQILQKRLRFRLERAECESTLFDRSGRTLKMEPLATIGQLSKYLLKMVAKQWYDLDRSTYFYLKKIREHRTATVFTHSFDFDEEGLLFYIGSNAKTCDWVNPAQYGLVQVTSSEGKTLPYGKLEDILSRDSISLNCHTKDNKKAWFAIDLGVYIIPTAYTLRHARGYGRSALRNWLLQGSKDGSTWTTLSTHVDDKSLVEPGSTATWPINCATDDSVWYRHIRIQQNGRNASGQTHYLSLSGFEIYGRVVGVADDIGKSVKEAEAKTRRERRQIRAQLKHMTTGARVIRGVDWRWEEQDGCAEGTITGEIHNGWIDVKWDHGVRNSYRMGAEGKYDLKLADCEYLSAFDGNQSMGSASTAAKPSEKGGNTLTSRKSSSTPSLPEATEKNQNPEGASNQTVSADNLAWKQTVETIAENVFASAKTQIISNQLAMNTSSSREARAKHKESGTNQMHKDNISGPSPLSRELEHISDLSAINNSMPAINSSNVSDLATISENLSLTELSKENICRVLTPSYKPAESVTASQSSSHPDVQSSSPRENDIKNISNIEENNKMNANNSVNKISKDLLANLRTSNIAGCPPVTQLSTEALEMIDKMRDGVDMIRNMSNSILSTDTFPVPCTNVPVGGKKTPKAQALINPDNANQKQIIVTSEEFPTKSSKKPSVTLKPAQQPNAVLSIVDIKEQPISNENVSVPSQMSISVPNLTTTSASEVPSTSEVATHTGLLETFAAIARRRTSQGTNIQDNQIMNAEANVNEHGDQNASGSFLGHSVTSLVKLALSSNFHSGLLSTAQSYPSLSSNNSENIAPSNPSNTSAGQQSASTINHTLTMSLTSTSSDSEQVSLEDFLESCRAPALLGDLDDEDDMDEDNDEEENEDEYEEVGNTLLQVMVSRNLLTFMDDEAMENRLVGVTKRKSWDDEFVLKRQFSALIPAFDPRPGRTNVNQTSDLEISPLGAELPKPQQSGGPETIEQPLLGLKLRGPGIGGIPEVEIDLSNTDWTIFRAVQELLQCSQLNKLDKFRKIWEPTYTIVYREVSPEAQESTCLESEEFPQTPDVSSKSGASTLSPNSPMHIGFNVADNNLCSVDDVLELLTQINGLNQSEIDSDVKEHGVSVLSEDLFISKKITNKLQQQIQDPLVLASNALPNWCENLNQSCPFLFPFETRQLYFNCTSFGASRSIVCLQSQRDVTVERQRIPIMSPRRDDHEFRIGRLKHERVKVPRNEDLLMWAMQVMKTHCNRKSVLEVEFLDEEGTGLGPTLEFYALVAAEIQRSDLCMWLCDDDLGEDTENSTQSAEGNSKPVGYYVNRREHGIFPAPLPQNSEICENVLKYFWFFGVFVAKVLQDMRLVDIPLSTSFLQLLCHNKVLSRNLQKVISDRRNGDLSVVSEDSDIVETCTKLLRTDSNKSNAFGGILSLENLKEIDPTRYQFLQEMQNLLLRKQSIEFDDTISAEKKHELINELKLQTQNGLEVSLEDLALTFTYLPSSSIYGYTQAELLPNGSSVNVTIDNLEAYCELLMNFILQDGIAQQMKAFSDGFNEVFPLKKLAAFTPSEARMMICGEQFPHWSREDIISYTEPKLGYNKDSPGFQRFVNVLLSMSGDERKAFLQFTTGCSSLPPGGLANLHPRLTVVRKVDAGVGSYPSVNTCVHYLKLPDYPTEEIMKERLLTATKEKGFHLN

SEQ ID NO: 11815 - DNA, 2581 bp, DROSOPHILA
cgctggcctatatattccgctcgctgggctgccaaagtatcagtttgtcttaaaccagtgctctactagggttattaacaaaatgaatgcctccatttctctactgtaagtattgattactttaaaaaatacttaaaacttaataacatttcttgggcaactaactagatgccttgccctgctcctgattagtcctttttgcttgggctattctgacgaggaaagggaatctgacagccttagggttgcagaaattattcgaacctccaacgacgccgaatcgaagatcaatcgaacccaagagctgctcgatatctttaggcgcctgactcccacgttgtcccctgaacaaagggaaaagattgaaagatccattcaggagcatactgatgaaattctaatcgatggagttccgagtcagggggggcgaaagaccaagtacgtcggaaaaatcctatctccagtggcacaaggccttgcagttggattctttgaagaactcggtggcagcctttccaggctctttactggataatcaccattcaggactaagggattttgagaaacattagataaacatgttgtaagctcaagtccaaataaaatattccagtttgagaagatgattcttaaaattgagtagtatttttgttattttcttttcgccattttgaattttacattcaaagttcataaaatattggtgtaagcggtcaagggatatattttcgataacacatttcaactcaacacacaataaaattgttgtttgcagtagataaactcttttgtagtatatgcatatgtacagctgcgtaatggtcatgattacaagaatacaagaaaatccatataaaacaatttaaaacaatttactaagaataaatttcattgttaaaagtgattggattgttcagaagatgcttctatattcgttatcagggagccatcggtgtctataaattgtgtgtcttggcttcaggattgtcagttcggcttgcacttgcattccattaagtccttacaaaatgaattttaaaacgtctttgatgtaagtggcgtttcgtattttattacaattgaacttattatttctaactaaattttcagctgtttcgcactgctactgattggaactctatgctcggcctattccaatcaagaacgtcaacgtgacagtcgtagggttgctgaaattatgcgaacctcctgggacgacaataccaaaatcaaaagaatccaggaactacttaccatatacaatcgcatggctcctagcttaagaccagatgaaagggcgagaatggacagattcataagtggatatacgggagaaatcatggtcgatggagtacccagtcaaggtggtgctagaaggatctttaagaagattctgtctccggcggcaaagagcgtggcaactggattctttaccgaactcggtgcaagtcttgcaagcatattaactagctggtttccagctaacacagaacgaaaccattgaaatcgtagacatcttttttgtaataaaatcaattccccactgaaagtgaaagtgaaagcattgaaagagactatcataaatgccgtattttattcccagaaggtgaattagttaatacgcatccattgtaatggaaattgtgaacatccacctgtacatgattacttaatcagatagaaaatttccataaattgcatattcatatcttctgcccagcattttatccataaccttgtaaaaaatatgcactcatattagattgtaagaggttgatttaaaaattcagacaaagtgcagggcgaactttgttcattcaatctgaccaaagtttgttttgaattcaatcaacacccaaacaaaactgaattgtggaagcatgttgttcgagaaagcgattgcaattattatttgtgggtaaaacactttttgtgtagaataccacaaactcgttttcggccgacgaaagtttttgattgtctagtcgaaacagggcatgtggaaagtaattaacatgcaagtgtcgaaagcgtctgacagggaccttctgcgtagtgtgggcgtctccggctgccacaggacatccttgtgggtgagggaggactagtgtgtgccctcttcatcaacgccatcagctgtggcatttgacttctgaatgtgtcgtaaagttgatcctacccccatccccttcccatggcttccctggtttcccatcctgtttactgaactcgtcaacgctgctttgctgctgctgctgctggcaatttgtttaattaaatgctagcccgagagccaacatacacagaccaacacaaacacattatcaggatccggggctcggagcacaaaattaaattgaataacaactgctaaacacatcaaggctaacacctgcttatcgaagtgtcaactgcagtgaacacatgcttcaattacagtggggctggtggtatacagaatcgtgtgattttatagatgaaacttttgaaattataatggtacaaaattatattttaaagatcatgttttttagttgcgttaaatatgtaaaattaccaatttacgttgctgaaagctgca

SEQ ID NO: 11816 - DNA, 522 bp, DROSOPHILA
cacttgcattccattaagtccttacaaaatgaattttaaaacgtctttgatctgtttcgcactgctactgattggaactctatgctcggcctattccaatcaagaacgtcaacgtgacagtcgtagggttgctgaaattatgcgaacctcctgggacgacaataccaaaatcaaaagaatccaggaactacttaccatatacaatcgcatggctcctagcttaagaccagatgaaagggcgagaatggacagattcataagtggatatacgggagaaatcatggtcgatggagtacccagtcaaggtggtgctagaaggatctttaagaagattctgtctccggcggcaaagagcgtggcaactggattctttaccgaactcggtgcaagtcttgcaagcatattaactagctggtttccagctaacacagaacgaaaccattgaaatcgtagacatcttttttgtaataaaatcaattccccactgaaagtgaaagtgaaagcattgaaagagactatcat

SEQ ID NO: 11817 - protein, 138 aa, DROSOPHILA
MNFKTSLICFALLLIGTLCSAYSNQERQRDSRRVAEIMRTSWDDNTKIKRIQELLTIYNRMAPSLRPDERARMDRFISGYTGEIMVDGVPSQGGARRIFKKILSPAAKSVATGFFTELGASLASILTSWFPANTERNH

SEQ ID NO: 11818 - DNA, 8160 bp, DROSOPHILA
ttttattgtaaatgattttggcttgcaattaaagtgatcataccaacattttctggcaatacactcgatcgaacggatatagcgtggaaagtaatttaagcctaagtcaatccagttgatcttcgacgagcactcccacggccgctgcttgaacccatcgattctcggatgtcccacacgatccatgaaggcgcttctcgtgcgcagactcttgctcctcggtgcctccttcttcttctctaccagcgcaaagtggttggtctcccaggcgggaaagtggctaaccgaaatcgcatcactgtccgcatagaagggcagctcgtacgacgatcgcttgtatcccagatgatagctcttctcctcgggctcgcccggcggatcgatgctcatgtagcgcggattaaatgcctgtcccagaattttggccagcgactgcgtggatagctcggcgcagtaatcggcatcatcttgagccgtccccagcactgccaaccaagtgagcacaatggccagttcactttgggatttcatagttggacacagtatacgcagaaacatggctggctaaaaacagggctacaccaatatcaaccaattgatttatcgtgtttacagcagttatcgttgctctctacactgtaacttatttaggtactaaagtaataacagccaattcaataaaaagaaggattttaatttcagtgtcattgcgaaagattataaattaaatttattcatatatataattaaaacgcattctaaactttggataaatttaaagtttttttttttaaattaaactataaaagatgggtctaaatatttgaagtcataataaaattgtcatcataaggtaagtttcgctactcaagtgggctccagttttttcgactatcaaacataatagccgaaaaaactgctctgatggctttattcgaaaaatcccatctctatatattcgtaccgttatgttttatcaaaacaatagagagtatattgtacgttgtaaaatatacatatattaaatctgcattacttaaaatgattcctcgtattacaactactgagtgtatgctagtccttgggttctgtgtaaagtaaacgaatcgtacacgcgctgcagctcagacagacgatactcctccaggcaaacgattccctggagcgacggagatagcttcagcgcgcacgataggcagtggaccacatgtcgtttctcctgctccttgatgaacagcacattgaaaacctcaacctgcaaagagtgcacaaatgattaaataaactgcattcatatcacctttggaaactgtataaatatgttaataatactacgctaaatacctcgcattgtccgcagtaatgggatgcttcgttctttccgcgtccattgaaacgtatttccacacctttcgatttgacatactcttgtatgtgcaatacgtttttcaacgtttgcagcaaacacattctgaaaattacaaattacatatgtatgccctatagtatctgcataatggtgattcctatcatttgctaactcactttatcagctcgaaaagtttggtatcagacactttaatattccttgcaagattccagcttaaatgcaccatcggcacaatgctcttgaaggcctgcactttattccactcatatcgctcgatggcaagagaatactgacgggcagtcaagggtccaacattccacgcaatgttgttgcaccaaccgatcgactgaacccaatggacgcatctgaaagtaggtttgattgttaatacatcatccttcctttcatattcagtgcttacccggcattcacccaaaccaagtcaccgggcttttgtataaatctataaactggtatattctccttgtataaatcctccaggacgggccaccacgagccgtgcagatagctaatgttgttcttctcgcaaagattgtgaactccgccccagtaggcgtcagggacggcaaaccattcacagtcgccaggaccgatgttgatgttgattgagcagaagttgttgttctcttggtggccaggcgtcctacttccgggcaccttcatgtacagctgaacggtgttcatgcccaaaatgacgtggcccacgtgtgatagcatattggcagcggatataactcgcgcaaaagctggcagtttttgtagctctgttaattgtggtttccatttcttttcatcggagaggtccacgttggtcccgaacctaaaaaaaaaagcgaaataagcatttaatttatgttcataaagttcgtaatgcagacataaatggtttggagtttctattacctcaacattttgctgtttattttgtgttttttacgtttgagaacaatgttcgaattggataccgagtcctttgagtctgaatccgacattgcttgcgagccggggaaacctttatcgctttcatcctgcggtaaaataagctacacgataaagtaaacttgtattcatgttaaagaggaaccaacccaacgaacattaccttcaagctgtcttgaaaactggatgcctgatattgggcatatttggctatggttgtgtgagaccgatgggaaatgcaggcccagacgcgcttaccctgcgaagtgtcccaattttcatcgggagactggtgcacttgtgtccgaacctcaacactatggtccgggttggcttccaccaacgttttggtcgaaaagagaccgagatctagcttcaagacgcccgctaagccgcgtacaacggcaatcggatgtttcaggcaaaactcctgcaactgtgggctgaacgcgtgcttcttattttctaaatgaacagagggtgtgggaggcaggagttgatctcgcgtcagtttctgcggtgggcaatcgggcggagatggcggcggcgcattcacttgcaaaatggtacagtgcacgggcggttcatcaatcggcagcagcttcacagctaccatcaactgcttcgagtccatttgtattttgaacgtggtcgagatgtcggcgttgtcaccgccaataaaatcatgcctcgagtcctcattgttactcagtgcatcctggctcaaacgttcgagcttgatgctctcattctgtttataaatatcattcgagatgtcgtcgaaggtgtcaagaacactttgctccgaacttttgttgctctccggcatggcgttgaagttgcgctggtttaaagattccgaaatgtctgtttggagtgttaaaaagtgatttaatactttaagatatatactatttaaattggtcacttacttattagattttgcgctgatgtctgactgttgttttgtgttacttcttgttggcttgtgccatcttccttaatacgtttcgaaggtatgggactttggctgagttggctatgcggataaggtggtggcggtccctgtttaaaaacatgatttagttgattgcccactgattggtttaggattaaggaattcacctgtactggactttgctttgtgacctgtcttggtagcatctgcgctgtttgttgttggcgagagttcatttctaatgatattggcaggttccaagcttcttcgattgaacacagctggcggcgcttggatgtaatacttggcaatggtgcttgactgagctggccctccaggaaagtgattctctgagacaggcctttcgacagtccaattgtgtcctttttcatacgtattgcttgtttttttcgaattaacgaagacttcttcaagcaaaacaagtgtgttaggtattggaaatggctacaattgcatatataaatttacctggaatgatatttgtttggttgcatttaagtagcaagcataggcatctcgtaattgaccacagctctcataaagtatacccaggttggtccacgcggctttatggtctttatccagttgcacagcacatatgtaggcttgaagggcatccgtgggttgattttgttgctgatataagacgctagaagtgcatgtgtagaatacaaataagataggggccaagctaaacacattcattgttattttacccgattgagcaccaagtatcagcattcccctcacttttttccaccgagttgcgatatgctaggaaagcatcatgaaccttattgatgccggcgtaacaccttcctagtaaatataatgattgtccactctttgggtcagcttcgattgatttttgtagaaaatttaatgcgtttgcttcacgttcctttttttcgcctaggcattctacgcaatggtacatccatcctataaggattcaataaaaagttatgtctctaccagcttaaaatataactttttaacttacctaattgtcgataaacatctgctttgagctccaaggagatgtttttctcatttagaagaaattcgtagccatcctttgccgccttgtgcttgttttgaacttcgtacaaatgcgcgatttgaaatttgactgcaaagtattaataatgaataaagtttaagacacggggtgaacgtactgcaaaatatttaaattctgaatgaatcatagaagtttgccttcatcgtattacttgataattcaatgtatgaggactttttgcatataagttgtttatatatcaataataagataacattttaagatgataagtaaataactgaagaacagaaaaaccttttcagatcacagttttaattacacatgaaacttatatgcaaaagtttataattattcaatagatcttaccctgaagttccgaaaaggtcgaaggatatgtataaagcagcgccaattgtaaatgttttagggcaatatggaactccccgcagtgttttagcataagacctagacgcaaatgaacttcatttgcacatgtaaaattgggacttaggtataaaagctcctgaaacgatttgatggccctggaaaaaagtaagtaaattaatttttttattcgttgttctgaattatttgttataacttgaatgtattattttaatttattaaattttgttttatatttaatttatagtaattgtttacagtgagcggtgtttacataagtgcatacatacttatgtgcatgcagtcacgtacacacatgcacgcgtatgtacatacatacatacaaataaccatttgaacaaacaaattcaagtaacatacttaattaaactagaactccgatgataagtgcacaacagtaaacttaaatgttaatctcctaaaatatgcctgcaaaatgcaggttttgtttataaataacaatagaacttgcagccgtcgtgtcggcagacatgtctgcgtgcactcaaaaaaacgagacagaccgtttcatggctttttatcagatagaattgcactgagaatcattgattatttgcgtcggacgcggtctgcctaaatgttagctttcgaaattaataaaattaaacaaagaacacattttaccccgcaattcaactaacgaccttaaaggggggcactcattgcattttgtacacagacacacgcacacacacgcaccgtgtacatacatgcatgcatgtaacgagaatttatgtatttttataacagcgaatttgcaaaaacaaacaaaggaatacaatgaaaacacatatattcattttaatttttggcaatattacatcggtttaattattattattgtaagtgttaatgtttacagcatccatttgttttttttttctttagaacccagacaactatgaaaagattcaaaactaaccagtaaacgcactttttttattcgaaaaaatctcggcagtcttaattttaattcgttgtgaattgtttacaaatatatatataatattagtggcagtgttgtttcgtgtagaatctatttagtaaacaatttaatatcaatacaatagggatgtgacaggcgcgatatcgtgattaaatgggaacgatatgaaagcgaaacgtatacatcgataagagccatcgatgattacaattgataaataaatgtgcttccactgcacatgcatctacgtttaaacgattcatatcaaaatcgcatgtaatgggttttaattattaaatataacttaattgtttttgaacgtagcataaagatatttcttaaatacaacaaatatatttaagcagttaaaatattaaaaagataagtaaacttaccatttaaagcaccgaagtttaaaataagcaacgcctattccatagataaatgcatgatttgtccagtaattgttttctcggaatcttaaatacttttggtacgctgataaagctacaaaaagaataagatattaaaaaacaactcaattctttcaggatctctcgtgatggattgaagtgttatgttatttatgcgtcgtactctgcagtttagcagtatttaatgttaaagtgtgtcattaatgcggcattctacaactatgttcccgagtttggaaacaattgttccacctgacacattatgtaaggtaaaagaaccagatattcacaatatatgaatttgtgaggactacaagcatcctatatatcctatagatgtcatttgcagagtgcactgattgtatctggacatgtgcatctggatttatgtatttaccttcggagtattcgccaagaagaagatgcaggtggccaagtttgcaaagagcgttaacgtagtgttcatcctggtgtttttcttcaatgatggacaccttttccttggcatcttgctcgaaaggtttggtgtcgtcattgtttcgggaagatgtgttttccatatgttcacctgcttgagttgatggctcaaacttttgtatagcatttttattatcactgctgttctttgattcgtgaacctgaccatttgcaatgtagttttgtaagtttgtgatggtctgctgaacgagattccttaattccgcatttttcgaattggacaaatccaaaaagccgtagtatcgactgaaacgtaaatattattaaacaagattcgagcgggtggcattaatcgtacctatccagttcgcggatcaggcaatcatcttcgaaagttagttgccccatttttaaaccaactgttaaatctactgggttttagaagcgtgggcaaaatacagcgtagtttttaaaatatttttttatttatatttttagtttagagatgacactaaaatattcttagagatgatacatttttctatcgtcgacgtgtcacgccttttttgaagttagtttctcactgcgcaatcgataacggaactggaacgattggaaaattgtgggaaactgtgaccaaataatttttattttcgcgttagctgataacaatttattatacaccaaatcaatacagatgctgtttacaatttatgttttaaaaatttgaatcttaatgcagttcttttgatacttttcagataaaatatacatttaagttatggaaactgatcttattgaagatcaaaaaataaattgaaaatttagttaaaaaaaatggaaatttattgtgcgagttatcgctagaagaaaattaaatgtgaatatccatgcacaaactcctttggccttagatgtgtttgctcggttttttaggaattccttctcactttcaatgttttcattaactgaaagataaacaaaattttaggtagtttttaattaaaactatattattcaaacaatcaatgtaatatttaaatatcaatagaacaatgaattaacttacaagggtcctccgtgtttaaaaaatcttctgagacgctttccacgtttacagcatctaaaaacaattactcggtaaataagtatagcaaaggaaaaacaaaaaaatttaaaaattttgtaaaagtaattacgaagtagaacagccgtattcattttcttaccagtttctgagtccgtcaaatcttctacctcagtttcaatctcatctttaactgaaattaaatattcaaattaaagttattttagaaaataaaactgaataaattagacttactggggtttgctgggtctggaaaatacaccgcatcaggctcaacgaattcctccactgaaaaatatttaaaaatgtactaattaattatatgtaattagataacaatgaaaaataaaattcctgatggatttataaaaattttagtaaagtacctttgatatttatttgatttttgataa

SEQ ID NO: 11819 - DNA, 3575 bp, DROSOPHILA
aatattttagtgtcatctctaaactaaaaatataaataaaaaaatattttaaaaactacgctgtattttgcccacgcttctaaaacccagtagatttaacagttggtttaaaaatggggcaactaactttcgaagatgattgcctgatccgcgaactggatagtcgatactacggctttttggatttgtccaattcgaaaaatgcggaattaaggaatctcgttcagcagaccatcacaaacttacaaaactacattgcaaatggtcaggttcacgaatcaaagaacagcagtgataataaaaatgctatacaaaagtttgagccatcaactcaagcaggtgaacatatggaaaacacatcttcccgaaacaatgacgacaccaaacctttcgagcaagatgccaaggaaaaggtgtccatcattgaagaaaaacaccaggatgaacactacgttaacgctctttgcaaacttggccacctgcatcttcttcttggcgaatactccgaagctttatcagcgtaccaaaagtatttaagattccgagaaaacaattactggacaaatcatgcatttatctatggaataggcgttgcttattttaaacttcggtgctttaaatgggccatcaaatcgtttcaggagcttttatacctaagtcccaattttacatgtgcaaatgaagttcatttgcgtctaggtcttatgctaaaacactgcggggagttccatattgccctaaaacatttacaattggcgctgctttatacatatccttcgaccttttcggaacttcaggtcaaatttcaaatcgcgcatttgtacgaagttcaaaacaagcacaaggcggcaaaggatggctacgaatttcttctaaatgagaaaaacatctccttggagctcaaagcagatgtttatcgacaattaggatggatgtaccattgcgtagaatgcctaggcgaaaaaaaggaacgtgaagcaaacgcattaaattttctacaaaaatcaatcgaagctgacccaaagagtggacaatcattatatttactaggaaggtgttacgccggcatcaataaggttcatgatgctttcctagcatatcgcaactcggtggaaaaaagtgaggggaatgctgatacttggtgctcaatcggcgtcttatatcagcaacaaaatcaacccacggatgcccttcaagcctacatatgtgctgtgcaactggataaagaccataaagccgcgtggaccaacctgggtatactttatgagagctgtggtcaattacgagatgcctatgcttgctacttaaatgcaaccaaacaaatatcattccaggtaaatttatatatgcaattgtagccatttccaatacctaacacacttgttttgcttgaagaagtcttcgttaattcgaaaaaaacaagcaatacgtatgaaaaaggacacaattggactgtcgaaaggcctgtctcagagaatcactttcctggagggccagctcagtcaagcaccattgccaagtattacatccaagcgccgccagctgtgttcaatcgaagaagcttggaacctgccaatatcattagaaatgaactctcgccaacaacaaacagcgcagatgctaccaagacaggtcacaaagcaaagtccagtacagggaccgccaccaccttatccgcatagccaactcagccaaagtcccataccttcgaaacgtattaaggaagatggcacaagccaacaagaagtaacacaaaacaacagtcagacatcagcgcaaaatctaataaacatttcggaatctttaaaccagcgcaacttcaacgccatgccggagagcaacaaaagttcggagcaaagtgttcttgacaccttcgacgacatctcgaatgatatttataaacagaatgagagcatcaagctcgaacgtttgagccaggatgcactgagtaacaatgaggactcgaggcatgattttattggcggtgacaacgccgacatctcgaccacgttcaaaatacaaatggactcgaagcagttgatggtagctgtgaagctgctgccgattgatgaaccgcccgtgcactgtaccattttgcaagtgaatgcgccgccgccatctccgcccgattgcccaccgcagaaactgacgcgagatcaactcctgcctcccacaccctctgttcatttagaaaataagaagcacgcgttcagcccacagttgcaggactagatctcggtctcttttcgaccaaaacgttggtggaagccaacccggaccatagtgttgaggttcggacacaagtgcaccagtctcccgatgaaaattgggacacttcgcagggtaagcgcgtctgggcctgcatttcccatcggtctcacacaaccatagccaaatatgcccaatatcaggcatccagttttcaagacagcttgaaggatgaaagcgataaaggtttccccggctcgcaagcaatgtcggattcagactcaaaggactcggtatccaattcgaacattgttctcaaacgtaaaaaacacaaaataaacagcaaaatgttgaggttcgggaccaacgtggacctctccgatgaaaagaaatggaaaccacaattaacagagctacaaaaactgccagcttttgcgcgagttatatccgctgccaatatgctatcacacgtgggccacgtcattttgggcatgaacaccgttcagctgtacatgaaggtgcccggaagtaggacgcctggccaccaagagaacaacaacttctgctcaatcaacatcaacatcggtcctggcgactgtgaatggtttgccgtccctgacgcctactggggcggagttcacaatctttgcgagaagaacaacattagctatctgcacggctcgtggtggcccgtcctggaggatttatacaaggagaatataccagtttatagatttatacaaaagcccggtgacttggtttgggtgaatgccggatgcgtccattgggttcagtcgatcggttggtgcaacaacattgcgtggaatgttggacccttgactgcccgtcagtattctcttgccatcgagcgatatgagtggaataaagtgcaggccttcaagagcattgtgccgatggtgcatttaagctggaatcttgcaaggaatattaaagtgtctgataccaaacttttcgagctgataaaaatgtgtttgctgcaaacgttgaaaaacgtattgcacatacaagagtatgtcaaatcgaaaggtgtggaaatacgtttcaatggacgcggaaagaacgaagcatcccattactgcggacaatgcgaggttgaggttttcaatgtgctgttcatcaaggagcaggagaaacgacatgtggtccactgcctatcgtgcgcgctgaagctatctccgtcgctccagggaatcgtttgcctggaggagtatcgtctgtctgagctgcagcgcgtgtacgattcgtttactttacacagaacccaaggactagcatacactcagtagttgtaatacgaggaatcattttaagtaatgcagatttaatatatgtatattttacaacgt

SEQ ID NO: 11820 - protein, 336 aa, DROSOPHILA
MENTSSRNNDDTKPFEQDAKEKVSIIEEKHQDEHYVNALCKLGHLHLLLGEYSEALSAYQKYLRFRENNYWTNHAFIYGIGVAYFKLRCFKWAIKSFQELLYLSPNFTCANEVHLRLGLMLKHCGEFHIALKHLQLALLYTYPSTFSELQVKFQIAHLYEVQNKHKAAKDGYEFLLNEKNISLELKADVYRQLGWMYHCVECLGEKKEREANALNFLQKSIEADPKSGQSLYLLGRCYAGINKVHDAFLAYRNSVEKSEGNADTWCSIGVLYQQQNQPTDALQAYICAVQLDKDHKAAWTNLGILYESCGQLRDAYACYLNATKQISFQVNLYMQL

SEQ ID NO: 11821 - DNA, 20565 bp, DROSOPHILA
tatgtatgtttaatgtaaaatgtctgtgtgcttgtattacatgactttgaaaagcttaagagtctcacaccaaaataaaggaccttcattaaaagaaagaggttcaggcatcctataacttaaaggcactcagtgaatgatggctttcatcatagaatgccatcgttcacttggtgctcatccgattaagaaaaacttgacttattccgagtgcgcgatgcctgtcaatgatattcatttgtgatggatgcgctgatgttggctgtggattttaatatagcatcgcgttctttccttccattttcttcattttccttcgtccttgggacaaattccacgtggcgaattacgaagggattcgcatgccaagcgggctaaattggcattctttggaccacccatagtatattttgccaccttaagggcccagaacccagtaatagctcactcccactgacgtcaatggggatttgcaatttgtgattgggcactttaaagtatttctgctttgacattcaatttactcgacctggctttgtttgccctcgccagctcgactccattggcatcccgccttctttatcccgactagtgtgccagcggcaaggtcatgaggcaacaaagaaaaggccactgggttgactgactgactttaacccgaaatttgtggaaattccaaaggagctgtcatgccttgattaatttgatttgactagaaggatgcgaaaactagaaagtcatgtaagactttaatcaaatcaaactaaaatataatatctgtttgagaaaacaacacgacagctacttagttgggtgtctctgagggggatttcactttttaataagctttgcctgactgctaacgatatcagccttgaaactcgtttacatgcaagagtccttggataaataatccttttctcgtcatctttactgtgatggcaactcatgttttcgcattttcccttctgcctttcaatgacagcaaacacaatccaggatgtcggaccagcagaaagcctccctctgtccccgtctggtggactacatggccatagtgggtgcccacacgacgcctccgatgccaaagggactgcagggcctcaaggccccgccagtgcaggtaagtcgtccattgattatgtaggttactcgatttatcacttactgcggattacagcgtacaagtgccgtcctttacaggaaagcataagatctgactctagacttattttacatttaaatgcccatttattatttaatgttaattatgtatgtacgttttaattataatctgtcgcaggtgcccgacttgctgcgtcgctatcccccctcggatcatgcggacttcccgctgcccctggacatggtgtacttttgccaaccggagggttgcaccagcgttggacctcgacgcactggctccgccattcgggacatgacctcctttgtattcgcgctgaccgacaaggattcgggcaagacacgctatggcatatgcgtgaacttctatcgtcccattgagcgacctagttcggcggcgggatcggcaggagctggcaacgatcgtccgggtaatggtggacctggtggccatgggggcggcgctggaggaggagcaggaggcggagggcgtggtggaagacggtcgtcggccttcaggcgggagtcgtggcgcaagagcatggaacgcagctcggattcggcatttagcaggcaagtgttgtgtgccagacggatgtgggcgatgtgctgataaaaaacacttttcttatgctaaagcctatctaacgcatctcaaaccatttccataatagttacggcctcttaacttcttctagcgactacagaagtaacgtagcgcctagcgattcggatcgtgaactgacctcgcgtcgcgattcggaccagcagcgcctacactcacaccactcgcaccaccagccgcaccatccgtcggcgagcccggctgtgcccaaactgggcctgatggctccctcggcggactccgagtccggcggcagtcattccccatcgccgcgggcctcgcgaaagaggacgaaactgcgcaaccagtcgctcacctcgctgtgcatcatctcgcaccatccgttcttcaccaccttccgcgaatgcctgttcattctgaagaagctcatcgatgcttgcaacgaatcctcttcaccgaagcgggttggtgcctcccaaaagatcaaccgggacaatgtgtggacggtgctgacgggccatgtcagcgatgccacgccgtcgattgtactgcacgatgtgcgcgaaatcgaaacctggatcctgcgactactctccacgccggttcctgtgccaggatcgaccagagttgaggtaagtggttaggatcatttgtaatacccaatacatatcacatttccttttaggttgaggtgctgtcgccgacggtgcatgaacccctgctgtttgcattgcctgaccacactcgcttctctctggtggacttcccgctccatctgccattggagctgctcggcgtggagacgtgcctgaaggtatggaccctgatcatgcaggagaacaaggtgctgttccagtcgcgcgactataacgccctctccatgtcggtaatggccttcgtcactatgctgtatccgctggagtatatgttcccggtcatcccgctgctgcccacctgcctaagttgtgcggagcagctactgttggcaccaacgccctttgtcatcggggtgcccgcctctttcctggtctacaaaaaaaacttccggtatgatgaacatcttgttattgaagaaaattttattgtaacaacagattctttttagtctaccggatgacatttgggtggtcgacttggactccaccaaattgacgccaccgactggtggctacgaagaaataccaccgctacctgagcccgagggcaccattctgaagaaccacctcaagcaggtaagcccaaaggcattatccctaaactcctgtatataaccaaaaattctgaaatcttatggatgcaatgaaaataatattttactaaattttggaaattcacccaaaactaaaatgtaaagaacgttgtgtatttagaaagaaattaaatagaaattaagaaagaattaaattagaaattatcgttcattgggagatatatattacttggataatgaaggcttatatattttttctttttcttgtttgcactatttaatttgacaaatgagaatgttgaaatttaacttggcagctcaattaatgttttccagagaagattgacagttattgagtagctcgacgcagttgtcgtagagggcggtgtccagttggcgcagctcctgctgcttgtcgatgtcgaggaagcgcttcagcttgtccacctcgttgcgcattttgaaaacgatgccaggcagcatgccctgtgcctttttgagcacttgctcctggatctgcaaacggcgctcgttggctccctcgctgcgaaagcgctcgagacgctggagttccagctcccgttcgtgatcatagtgatccttctgttgcagcaggtgctgcaacaaagcccgatagacaatcagttgctcgaggcgtggatccgagtagacgttatccgtgggacgactctggaaacgcagcgtggcattatggcgcgtatcgttggcctgcacggccgataagtgggcgatgtggcgattgtacatggcactaactgatcactacaacggataacggatgagatggtttatgaatatgtaggcaccgacattgggctagtgattcgaatggaagtcttgttatgattgaaataaaactcaagggcttctgatgttttggagtttaaactaatgataaagtgacttaatgtttggaactttttcaatacttttaaatattcataactagataaaaatataaaaagatgcttttcgaagttggtgaatttccagaatttaatgaatatgtgtgtctacttaaggcactgtcacgcggttttacatatattctataatcgttataaatactcgcggcacacaactggatatcgcttttccatgtctatttacccgatgttacctgaaaatgtatctgcttctggggagtatttaatcaaaaaggcaattactcagagcagatgcatgtgaaacggcggttactcattgtagctaacgttatcgctgtcatataatcgttatcattgctccattcaagtttggtgtgattgttttaattcaaatgatatatcttaccacattctgtggcctgtcacagagcaaatatatgaagagagcaccccagcgatattataatttgaatttgtttctatatctcattaacaaactcctctgacacttgtacaattctctatctctctctttcttttattgtgttttttttttttgtgtactcactgcctccctttctgcctatcgatgtgtgtccatctctgtctctactctaatgctatactttttacactcatgcattatctgttatatgaaatttataatactcgatcacaactttaactacaacaacaacaacaacaacaactactacaacaacaacaacaacaaatcgtatatctacaacaacaacatgggcaggctatgctattgatggatgaagctggacttggtgtaaatatcgttcgcaaaagtgttaactacgtttggtttatcgttatatttgagttgaaaccgtttgtacatactaaacataatccataattattatactagctatatgtgaatattcgtaacgataaagtacttgacatagaacatagaattaaccgcatgcacagtcattctacatagacgtaacgatcctcttttaatgttgaacttttcaaaatcgaagctcgaagtcgggctctcaattagctaggtttaactttcaaggggttaaactcctctatcctatcatattctcaacctatcagtcgctgtccttagtgttacgtgtttcgtgtgcatgttctgtcagtctttacttcttcccctccgtgtttatcaacctgtataacaaactgagtaactaactgatctactaacagaagtggccttacgcccccaaaaagctttccaaaaaaccaccccccccaaaatcttatagttagacaagttggagtcctcatttagatggctagtcatcaaattaacaccgtgctaattgctctaaatggattgttccacaggcacttacctcgatgacggccaccaatacggcggtctcctcacaacagctattaccatcggtgcgggatagtcttcaggaaccaccgttgctagggtaaggtttttaagtcttaaaaatgtccttgactctcaaccttaacctgatggcttttttttctgattatcgaacagggtttctcaagtgagacttcccctccagacgcctcctcactcggcgcaggccagtcaacggaactcgatgtccgcccaaggaacgattagttcccgccaaccgagcccgatgaattcaccagccctcaatccattcgtttacggaacggatgtggattccgtggacgtggccacgcgggtggcgatggtgcgatttttcaatgctcaaaatacattggctaactttgctgagcacacgcgcactttgcggctatatccacgtccagtggtggcattccaaatcaatagtttcctacgatcccgaccaagagcctcgcagttcctgaatcaatttgccaggactcaggccgtagagttcctggccgaatggtcactaacgcccacgaatgtggcgttccttcgagtgcagactggcgttatggatcccatgcaggtgggcgataagcccaagtggttcgcccacgctctgacccccatccgattttcggtgtgggacgatggcagctcactgaatggagccctgcgatcgctgaaacaactcgagtgccagccgacggacgagagtggttcggattcagagggagcggatagtagtagctcatcgtacagctcactcagtgattttgtatcggaaatggcctcctccgatctttcgcccagcctgcatgatgtctttgggtcttacaatcggccacatgttgttcctcagactctctcctcgaatttggatccggccttggtctatcatccgcccagcaagctgcagtatcccgaaggcattgccgatgcggtggccagcaaagaggaggaggatgaggagcgtgccgatagccctgtgtcctcatcctccagtcgctcggatctgagttcgcccagcttcaatcgcgattcggagtttgatttccagccgaagggcggacaaactctgggatcgactacagttggcagtggagcggctgcacccagtttcgagttggccactccgttggccatgcgactggaggccaccattaagatggcaagcattgaacaggaatctgacacggtatccacggcgacgggcaagaccatagccgccggttcgaaattacaaagacatcccagcgactccgagtcgcggcctgaaaagaagattccggtaagtaaatgtttattgaatctttaggggagctgatttatttctcaataatgttacctaataaatagccaccactaacgccaccggtgaagcagcctggagtaagcaatatcctagcccgaactggaagttccggctccagctccagcagtcctggacgtcagagttcccagagctctctattcgagaactttgcctcccatgccaaggaactggtgcgcgaaacaacgcgccagagcagccaggagggtctactggcccatgtggataaggtgagtaaaattaaggtcctatccatgggatggttctttaactagatgtgctgttgtactatgatcgttgatctgattttcttgcctttctttccgtccgtcaacgtgattattatttggactttttcttctttatttgttttattaattttaatttaatggattatttgcgttggttaattgaacctgacataaatgtaccgtactgtagcatgcgctggacgaagatcttgacgacaaaatgcgtcataccttcgaaaaggttggtactcccgccgcactatcccatcccatccagaatcgatcccaccacgctttcatgaacattgccttaatcttataccattcttctctattcatcacattgcacaccacacatacacataccattaattgaacaatgtgagtctggtcatggcttaatatcaattaggttacagtacattatactcattcctctagacactaattcattttatgctattcatcgaaataaacatagaatattttgtttaatttaacactcaaatgcacccacaacacttcatatccaactagaactgagacaagatccctccttgaagcatcctaacacccacatcctcaccacacctttccgcagatttttgattcctccatgggattcttagtgccattgtagattgcttcaaacttaagctttgattgttagcatcacttaggcgattgtgtagtcttggaatatcacccaatttaggtcttgattactaatacgaattcgttttcggatccatagtttacgctgcacgcaaagaaggcagctggagaggcttccaagcaggccctggaagtgtccaaacaggcggctggagtgagcaagaataccctcgaagatctcacatatgtaggcaaatcgacgctgggcgatcttaccaaaacggccaaggaggctgccaccaagaaaggtattattaagatcgaggagcattcggcgggcggagctggaccaccgccaaagtcacccggatcccagctggcgacacacaagcaggtgcagcaatcgggcggccagggtggtggcaacaacttcttctccgcgattgggacggatttcaatgggctagcctcatccacatccaccatgttctcgggcatgtttggtaaaagtaagtgacatttaatgatgcgctaaaaagaatttctgatcaaaaattcgaatcttacagagagccaacaaaagcaggttcctgtacagcaaaagcaacctaacgtatccgctgggaaggccaagtctggcattaatttcgatccatttcctggacgcaagggactcgtggagcggacgccgttgatcaagcattcgggtcctaggcaaacacaagaggagctgacccgccagcaaaaccaggagcgttcgcatagtaatgccgaaaatcagaccttcctcaaggatgtgaccaatcaggtgctcgctggagagggagtcggttggctgaagctcaatcggtttaagaagctaatggaggacgagtcatatcgcacactggtgcttagcaagctcaataagacgctggacaagaagattgccccagatgatcatattgacgatgtggtaagtttaaaatatttaggatattcaagttccaggttaaccccatcgtgtatacttgcagtgcgtgacgaagcccgtgtggaagggtatgctgaagtgcatccaggccatagccggcgggttggacgtgacctttgcgaatttcggcctaggcggtatggcttctgttttccagctgatggaggtagcccacacgcattattggagcaaggagatcaacgagggcagcgacatgtcctcgagcctgctctccagtcacgccgccagtcccatgggcagtagagagaacctgcgatcacctagctcaccaaatggctcccactcggcattgggcagtgagtgggcatcgccgcaggaatcacgaaagagttccactcaattggcacacggtggaccaggtggttcgcattcgggagcaccgattaaccgacgattgtcgtcggcggatagccaggatggtcagtccaccacggagatgttcaaggatatgctgtcgcagaaaagaagtgccttgaagaacatgctcacctccttcgattcagatgtaagttgtgttgctcgatgtagttccttgagatatgaatagcccactcagtcatttatagccgtccattccatcaatgccaattgtattctgcttgccaaaccaatcctgtatttcgctcagtttatatgtatatatatgcatatatatatatcgtatcgtagattcgcctatcagcatttcagtaaatagccaaatcagtaccaattagcatatatcagtatccaccagtatgtaacatatacatgtacgtatgtcacatagcgagtgtcaatcgatgtagtctgccgatcctcccaccgtaacctctcaaccgtatctatatattcgtaaccgccacccgttccgcctacatcccgtatcgttaccgtccaaccgatatacccgattgtagagtactctaacactcagtgtgtgtaatccgtaggctgctggctccacgggtgcgctttccgttgtcagtttgggcgtccgcttgccctccagctgccgatccacggtttctgacaccgagtacgaaaatgtaagtacaccagagggtcgaaaatacggcaagttcccattgaattttttggagaaaaatcaatattctgaagttggcacaaaaaacagaaacctctttaaaccgcaagagaaatctgagtgccattaaaatcttcattcgggaaatcattctaaaacctcctcaacaaccagcccaagtaaattagttgtctaccatttcctgtaacaagctttgggtagacatttcaaacttaagagtccttatcctcgattgtcccaaatctggtccgaaaatcaaaatgtccgaccaaacctaagccaaaattcattttgcagacaaccacgtcgaaggattcgaaaaagagctctggcaatctgtggtcgggcaagtcaacgcttagtgccggatttcgttatactggaggacacctgatcaacacgtcatcttctccgtcgccggacagtccgcgggtttacctcttcgaagggttgctgggcaaggatcgcctcaatctttggaaccaaatgcaattctgggaggatgccttcctcgacgctgtcagtcaggagcgtgatatgatcggcatggatcaggtgagtgtggtttggcaacggtagccttcataccattaatacttcgataatttcacagggtcctattgaaatgatggagcgctacaaatcactaagtgaatcggagcgcaagcgtcttgaacacgacgaggatcgtttgctatccacaatgctctacaacctgacggccatcctggtgatgctgaatgtcgccaaggacgagatccggcgcaagattcgacgcctccttggaaagagtcatattggcttggtgtactcccaggaggtgcacaatgtggtcgatcagataaacaatctggtaggttatagggttaagaagacctggtttataagtattttaaaaacacactttgttgttgcagaatggaaatgacattgatctaaagcccttgggttcacgattgctgcaccgccagagcttcaccgtccaccagggcacagatgtgaacggaccactacgatttatggaggtgcgggacgatggtctggtactccgatcagtggatggcaccattgtggagcgctggtggtacgagcggctggtcaacatgacctattcacccaagaccaagctgctctgcctgtggcgccgcaatggcggtcagacgcaattgcacaaatactacacacgaaaggtgggtgtttttaattgaagtgaagttaagatatagcccattatagcaacgaatacgcttttcccgtacagtgcaaggagctgtacaattgcatcaaggaggccatggaacggggcggcacgcccaccaatgtacccgagctgggcggcgagtttcccgttcaggacatgaacacaggcgagggcggcctgctgcaggtgtgcctcgagggtgtcggtttgttgttctccaacagcaaggtgagtgccagatatatatagacttgctaaaaatcaaattccccaccaacacttggcatacacaaaacattgtaacacacccaaaacttaaacacaaccaaccagcttcatctccgaatgcctcaaactactagtattcgttttttttttgtacaccactcctcatcatgcaacgcatatatttcccaatacgaatccctcaaaccagatccatatctaattgagtacagatacactgtaagcttatgataaacttccataatccgaagcataaatgaaagaccttgatatttttatttcgttgtttgggtcaccaaacagcgaatagaaaagcaaagggtgtcacctgaatggtgttgatctgggtcaaccaatatcataccaatggaacaccagaccccaaaaaatgacgggatttacatacagattgaagaaaaaagatatatacgtctcaattggattaccctatataacgccacaaatggggtcacctaaataatccagagctaaactaggactatactcgtacaaattcgcgtctatctgtccagatatcgatacatactcccactgccttcgtttccgtgtttcgttttcagtcgttacgtttcatttcgtttcggtttggttcagttttcatttccgtctggctttctttggttacttttccttacgacttataagttcgatcaattaccaataattttcttcttgtgtgtgtgtatcgactgcatcaagatcaagggccctctcaatatacatctatatgtataaatatatatatcaaatatgtttcgttttcagttcatgtctttctgatatgtctaacctatatttgtaatattaatttgaatgatcaaccgatacagattataggagacttgtgtaggtccgcccagtctgctttgaaaataataataaaaaatcatgctatggtgtctataaccgaaactgaatgtgagaatatatgttaacctctatatggatagaggtctggatatcggaccttatcgacgtctgagccgattcttttcgggtcttttcatttgttagcaataaccggaaccctgtctacacctatccaactacccaagctaaacccaactacgttttatattttaccgatctctctctgtctctctttatctatctatctcgctctaactttttctcttttgttcattggctttggttttggcattttattttgactcgccttcttataaatctacttatattattcctaagtcattatataatccacaaaaaaattgaaaaatcaatcgaatcttttatcttatccaatttctaatcgatcaagtgaaagtatatatgaacaaataaatatatatatatgcagaaaaatccatctatatcatacccatatattgtgctagtgaatgtactgaatgctgtattcattatactctctattttatttattacctaaccgattcaatgataacgccatcaaaaccaatagcaaaagaaaaataaaaaatcccaattctccttttcattcttttcgattacgattgtcattctaacgatccttacgtttacgttacttatactcaccgtttaatatgttaatattgtcatctttatctcattttgattgtctttattatcgattactcagattacaaatttaccgatttacgattaccgactagtatcgttcctaagagtactgtacttcatagaaaacaaaaacgatatttgtatgtatgtaccctcgaagcacccacgactaaagtgttcctcatatccacataaaaatcgatttaccttaagaaaaacttaaactacaagcaattattaagtaacacttaaacctttgcctcgaatatttcgaataggtcactcgaacgttattggagtctattcaatttcgtatgtcccttgttcattacattggcaaagtcatttgttttcctgtatatatatagaataccctcagttctttgatacgggaaaaaacaattttagcacatgggtctaattggttctgggttaaaactaaggtatattgttaattatttattttttattttcgttattaatttctgttaaccttttggagctcgctattgaaaacaaaaataatgaatctatatatattcatatatatgtatgacatagagaaagcaatgcatcgaaaaaaaaaaaaaatggaaaattgttaaacaagaaacaaaaatattctaagctggtaacttttgagatggtccttatgcaaaatcctctaaagtgctttgtttttttcgttcttagttcgttttggttggtataattaattcgtttttctggtttcctgtctctaattttgctatttctattgacatatgtgcgtatatacatatataaataacttcctttttatatataaatatatataaatatatataaatatatatatatatctgtatctgtctatctttcttctaaatctgaatctttcacttttccgtgttatatatgcgatatataagaagtccttacgtgagctcagaattttctgtcttacgcaattttcggttccattgttccatttcgttccatttcaattcgattgcgttcttacattcagttttaatttatggtagtgatttcatgccaaattgtttcttaagtatgataaccaaaaacaacaagtacaaacagcaaaagtaatttaagctatagtagacatttcctaccccatgatatctccacagttaccgttgtaaagccgatagacaatatcgataccgataccaaaaccgaaaccgaaattgaaaattccccagaaaataatgtcccaccgtctttaagcaaccgactctaacatacaacaacagcaacaacaaccacatttcatatcgttagtctacctacaaaaaaaatcaaaatatatacaaaaataatacaaaattcgccagcaatttagaaatttgaacagaaaataaaatgaaacaaaaatatttgaatgaacagtttaaaaaacagttttctcaactttcctttttataattttctttgttgtttgtttgatattctctgtcgaacgcggaacgctgcaccgttgctcgctctccctcctttgtggaccaaccaaaaatcacgttccgtattcggaacgtaccgatccgatccgaaaccaaaccgaaccgaattgaattgtatttaatccaatgattggtctacttttcaaacgataacaaaaacaaaacccaaaaaccaaatcaaaaatcgaaatataatcaaaaatctatgataaaacgatctgaaaatgtctgaaaaaaccgataaaggatttcgaggtattgcaatgaaccaatttcttgttatatttgaacttaaatttataagcaactattgttctttaaatgccctgctgtccaccacccacccaatccctgaacccatcctctttttcccacctcaaccaccccactgaaccaacctgcccttttatatgaaaacaaagaaaaatagtaaatatatattttagtttgcgttgccctttagttttaacttggacttttttgcgttcatgacacttgattttatccttcactttcactcacccaataaaggtaaaaaccaaaaaagtatacaaaataatctgatatggcattaaacagttaaaaaaaacaaaaaccaaaaatttgtagttgatattgaatttaaaccttaagccgcaaataatatatataccataatgtaaattacttacccatattttttgtgttttattctctatatctctcgctatctctctaatccaactgagattttcgtttttgaactgttggttgattgattggttggttggttagttggtttgtttgttgaattgaacttgattgaattgaaactgagccgtacactttgtataccttaatgccgattaccgattgccgattatcaattgttgattactgtaattgattaacgttagatttacccaattatcatttgcgcccccagttgtcgacacattatcgattttcatttaccaagccactagcgatttatgttcatttttaatgttagacagcacacacacaaaaaacacaagacttcaaataatgaatggtcacactctccgcccaactcatagatggtcacactgggcgcaaaggaaaatctccagactttgaacttaagcatgcttagcacactgcacaatttgagtgcaatcactttaaagtcctggcaaggactgcacccgaattcaccacagtctaacaaaattcaccacacttgcatatgtctgtccgatatcctttctataagtagataaccatttaactagacatgatcactattttagttatataacacacacaaaaataacatatatacttaaatatacacgtggctgtactgatacattccatttcgtttcgttacttttcgttctattccgcttagttccgtaccattaagtttcgttggttgcggcctaagttagatgacctttcacttggagggaaagcagcccctaagcacttagaaaaccgtttcaaaatgatgcagggtttgtttagtggtcacgaagatactatctattacatctttttagtaaagaaaggattcaaataatatagtattcagatcaccacaaattatttacaaaccctgtgtctcacatcaatttgctactaactttccttctagttcccttattagagtgtgccagacaaccaaaaccgagttaccaacaatagaccaataaggattacttagtgttgattttgagtttgcttgtgtagagttacttgtttagcaaagaattaaacgcaaattgtagttgtagtttattaattaagaaaccaaaggaaagtattaaataaaatgagacaaacagataactataccgtacacttagaggtaaaattcccacttagaaaccccattaatatagtcgtaagctaaataccacaactgctggaattttcttttcaatatctataagctattgctaaaagtctggctttcccgcccttcttttccccatctctcgctctttatctatttctaatttaatcattttcagcctgtctctacctctctttaccttcttcaagcctttcatatcgagcaaaaaaaaaaaaaaaaaaaacaaaaattagtatagagtagagtaaactgtttgagtaggatgctcaatattgatcctattccaattatattcactggttcttagtggtagcgccacatgctgcatgctgttacatgtaattatcccttactcctatatctcccatttcccaactgacaaacaatcatcctataaagctacaaaatctctataaactcatcgacaaacgcattgtaagagcgactgtaccaaaaatatctacctaaatatatttattgcttttcgaggaataaaagggttgcccttagagaatcctctgctataacccctttaaaaacgaaatcaatatttgttttaaatactttttttttatatattcaagacacttctatagagaagtacacacactcggacacccaacactgaacctaactttattcatttagcgtgtgtattagtgcaatttggggttgctcaggagaacaactcccgtcaatataaaccataattatgcatagaaccaatgcttctccgtatccaaaattcaaactacatagtatacgaccatctcacaagtgctaattggaaacgtcctttatcaaaaaaaaaaaaaacttgaaaataaaatttaatatagaagaaaaaatattttttacaataaaaaatagcaagtaaaacaaactaattaccaaactttgatttgattttgctgcattctctttctgactctaactaacaatcggtctgagtccctccgttgaattcctttaagttttaatttttgccattccatttgatttaatattgcgtttggtttaatttcgttttaaaccctgagcactgattatcgccaaaagcacttgatgcgtgccgtgtacataaatgaatgtcgttaactgtacttggtgtccttgtcttgttgcctgcatcgattagattggcccatgcgcttgcgtagcatttagcttttgtttgcctgcctgcctgcttgcttgtgttccaataccgtaccgtaccgtttcgtttggttgggttggtaattgtactattgacgacacaataagaaaacaaaatatgaaaactattcaaggaatccgccaaaaacctcccagttgctataatttattacattttactgcccacgcgtaaatgctatctctgttccaacgctctccaactgtctctctctaattcccactctgcctatcaaccagtctcttcctctgttgaacagcgtttgtgtgaaagctttttagtttgaaccgccttataatttgcattccgttaccgttactttaagttgcgttccgttttgcttgatttcgtttcgtttcgtttccccctttccgttttgttccattcttgcgttccgttttgcaacggagccttgaagccgaagaatgaatgattgttgtctggcattgaagcttaactgattccattctccgcccgtatttcagtttttcgtccgattggaccacatccgcaagtgcttcacccagaagggtggcatttttgtactggaggagtacagtaagtactgtataagtagtgcgctttgcgattgtttccaaacctaagtaatacccttgtattttctactttttcagatcccaagacgcgcaatctcattcaacgaaagtaccagtcaagcatggtaagtcacttaactaaactaccactatcaaccaatattcgccaacacagccatcatgcacttcgcaccacttgttccgagttgcatcccgttccgttccggaactatcgttaatcgattaaatgtacataaacttgcttaagcctgccgagttatgcaaatttctgtacaaatcaaatgttagccccaagcacatctcaatatacatatatcaatatatcagcatatatggagatttcagaatttgtttaccactgtatgatatggcacattcaattgcaccgacagtttgtatataccgatattgagataatctctttgattttcgatttttcttttctttccgttttcgtttaccctttggttatttgcattcgttttctgtgaatatatttctatgtcaacgacaactcaacaacaaacaatgcctgcaacaacaacacacaaaacaccaataacactcatatatcatcaaaccataatataaaacgaccacacaccgaaaaataaccttcaccaattaaatttgaaactgaaatcgaaacaaccgaatgtgtaattgaaaccaaaggcgtcggaaattgtcttgagcttccatcgcgttacctccgtgcagtttgcctacatctgtcatctcaatggcgagcgaggtacagtcaccaacaaaagcataactggaacgatggaatcggatacagctaagcctatggacccactggaaatgaaggaaccaccgctggcgagcgtataaataatgtgcctaatctgtgaaatctatgtaaataaaatcaaaaatcctttttatgtaaatcctttgtatgtatgtacttcctgtaacatctgaacgagaaacaccacaacaaaaatcaaagcataaacaacaaaaatagtacttcagtttggcttatcgtgattttattttttaaaagaatgtttttcaaattttttacttcgtttcttttttttacatacttttgtttgttgtctctacttccaattttgcgagacgcatgcttttgattatgcttttctgccttgttgtgttgtgcaagcaccacccaccaaagaaaaaccaaacatcaacctcactcaataaacgaaagacactgttcattttgaaaaacaagaaagttgccattaaagcagcacttaaaaattacgtatacgctccgtagtccgatcagatttgctactcggtgctgtgcgtattctcctacgtggccgccggtcaggaccagaagaagaatccggtggtcatcactccgcaaatccaggacattcatgcccagcagaagcaaaagcaccagcagcaacagcaacatcagcagccgcagcagcagcagcagccacatcaaacgaccacgcagcaaaatcagcccacagcagtagcatctgcagtgcccacaacaactgctccagccggacaagtcaatcccaaccggatgacggccaaatcgcaagccggcagcatctccatacggcacacggtgcccatgcagaagcccaccatcaccatgtccacggtgcagccgcaggccaggatgccagcccaggttgcaaccgcatctgttccggtcactgtgccagttccccccactcccgctccacccacatccaatcccgccaagctgccgcaattgccgccgcgcgtaccgtcgcaaccttcgacggaaagcctggcctcgatctcatcaccgccgccaaagctacggacacccatgtccgctccacccggaccaccgccggccataccgccgcgcacgggggccatttcacgtagcggatcggtaccggcggcccgatcctttgtccgccaggcatcggcaaattctacaccgccacagtatacgccacagccgccgccgcccttcgtgatacccaagcggcacagtggactggccagggcatccaccttgtcatcatccacatcgccatcgatgtcatcatcatccgcctccaatcatcccgggcattcgcagtcgcagcagcgcgccagtcacggcagcgtcgccgctgtgctgcaatcaatgccggaggctgagcccggttacggatccggctccggttcaatatccggctccagttccggctccggttcggcatcgggctccattgccagcgcttcaccgcaggcccatcgcaagcactgacgaaggagttcgttctttaagtttggaggcggcggaggcggaggtggtggcggcggaccagggggcggggccaatccaggggcaggaggcggtggcggcggacagatgggcgaggagccacacccacatgcccatcgacgtgacgtctgccgcaccatctgtatcccctggctgtgatcccggcagtcgaccgactaagacggttcatcattccaagcggggctttcctaatccatgttacactccacaaaatcagccagaaatacagctagctccttcgaacacaacatatttcataaaatatcaattgttttcaaaattgttaaaacatttgtaagtcctttaacatgaaatccgttaaataattatgtatatctttatggagggaaaaagtataagcggtcaaagtagggaacatttataaaaaaaaggaaaattaagtaatgaagcttaagagacgtttaaaaataaataataacattaaagaagattttgtcaaaaacaatgcttctaatcattcctgttcataatttcaaaaaactttcacatgtgcaatattttagtaagtcaagctttaattgaaataaaagttcttcttagagaagtagacatatgcttaaagacaaaacaatcaactctatgaatatatatatttaaacatagtggtgaacaaattatgttacaaaattgcaaagttttgctgtctgtaaatacacgaagtatcaatatggatcttaaacttaagcgtgcgcataaacgtggtattgtccttgg

SEQ ID NO: 11822 - DNA, 6228 bp, DROSOPHILA
atgtcggaccagcagaaagcctccctctgtccccgtctggtggactacatggccatagtgggtgcccacacgacgcctccgatgccaaagggactgcagggcctcaaggccccgccagtgcaggtgcccgacttgctgcgtcgctatcccccctcggatcatgcggacttcccgctgcccctggacatggtgtacttttgccaaccggagggttgcaccagcgttggacctcgacgcactggctccgccattcgggacatgacctcctttgtattcgcgctgaccgacaaggattcgggcaagacacgctatggcatatgcgtgaacttctatcgtcccattgagcgacctagttcggcggcgggatcggcaggagctggcaacgatcgtccgggtaatggtggacctggtggccatgggggcggcgctggaggaggagcaggaggcggagggcgtgcgcctagcgattcggatcgtgaactgacctcgcgtcgcgattcggaccagcagcgcctacactcacaccactcgcaccaccagccgcaccatccgtcggcgagcccggctgtgcccaaactgggcctgatggctccctcggcggactccgagtccggcggcagtcattccccatcgccgcgggcctcgcgaaagaggacgaaactgcgcaaccagtcgctcacctcgctgtgcatcatctcgcaccatccgttcttcaccaccttccgcgaatgcctgttcattctgaagaagctcatcgatgcttgcaacgaatcctcttcaccgaagcgggttggtgcctcccaaaagatcaaccgggacaatgtgtggacggtgctgacgggccatgtcagcgatgccacgccgtcgattgtactgcacgatgtgcgcgaaatcgaaacctggatcctgcgactactctccacgccggttcctgtgccaggatcgaccagagttgaggttgaggtgctgtcgccgacggtgcatgaacccctgctgtttgcattgcctgaccacactcgcttctctctggtggacttcccgctccatctgccattggagctgctcggcgtggagacgtgcctgaaggtatggaccctgatcatgcaggagaacaaggtgctgttccagtcgcgcgactataacgccctctccatgtcggtaatggccttcgtcactatgctgtatccgctggagtatatgttcccggtcatcccgctgctgcccacctgcctaagttgtgcggagcagctactgttggcaccaacgccctttgtcatcggggtgcccgcctctttcctggtctacaaaaaaaacttccgtctaccggatgacatttgggtggtcgacttggactccaccaaattgacgccaccgactggtggctacgaagaaataccaccgctacctgagcccgagggcaccattctgaagaaccacctcaagcaggtaagcccaaaggcattatccctaaactccttgagacttcccctccagacgcctcctcactcggcgcaggccagtcaacggaactcgatgtccgcccaaggaacgattagttcccgccaaccgagcccgatgaattcaccagccctcaatccattcgtttacggaacggatgtggattccgtggacgtggccacgcgggtggcgatggtgcgatttttcaatgctcaaaatacattggctaactttgctgagcacacgcgcactttgcggctatatccacgtccagtggtggcattccaaatcaatagtttcctacgatcccgaccaagagcctcgcagttcctgaatcaatttgccaggactcaggccgtagagttcctggccgaatggtcactaacgcccacgaatgtggcgttccttcgagtgcagactggcgttatggatcccatgcaggtgggcgataagcccaagtggttcgcccacgctctgacccccatccgattttcggtgtgggacgatggcagctcactgaatggagccctgcgatcgctgaaacaactcgagtgccagccgacggacgagagtggttcggattcagagggagcggatagtagtagctcatcgtacagctcactcagtgattttgtatcggaaatggcctcctccgatctttcgcccagcctgcatgatgtctttgggtcttacaatcggccacatgttgttcctcagactctctcctcgaatttggatccggccttggtctatcatccgcccagcaagctgcagtatcccgaaggcattgccgatgcggtggccagcaaagaggaggaggatgaggagcgtgccgatagccctgtgtcctcatcctccagtcgctcggatctgagttcgcccagcttcaatcgcgattcggagtttgatttccagccgaagggcggacaaactctgggatcgactacagttggcagtggagcggctgcacccagtttcgagttggccactccgttggccatgcgactggaggccaccattaagatggcaagcattgaacaggaatctgacacggtatccacggcgacgggcaagaccatagccgccggttcgaaattacaaagacatcccagcgactccgagtcgcggcctgaaaagaagattccgccaccactaacgccaccggtgaagcagcctggagtaagcaatatcctagcccgaactggaagttccggctccagctccagcagtcctggacgtcagagttcccagagctctctattcgagaactttgcctcccatgccaaggaactggtgcgcgaaacaacgcgccagagcagccaggagggtctactggcccatgtggataagcatgcgctggacgaagatcttgacgacaaaatgcgtcataccttcgaaaagtttacgctgcacgcaaagaaggcagctggagaggcttccaagcaggccctggaagtgtccaaacaggcggctggagtgagcaagaataccctcgaagatctcacatatgtaggcaaatcgacgctgggcgatcttaccaaaacggccaaggaggctgccaccaagaaaggtattattaagatcgaggagcattcggcgggcggagctggaccaccgccaaagtcacccggatcccagctggcgacacacaagcaggtgcagcaatcgggcggccagggtggtggcaacaacttcttctccgcgattgggacggatttcaatgggctagcctcatccacatccaccatgttctcgggcatgtttggtaaaaagagccaacaaaagcaggttcctgtacagcaaaagcaacctaacgtatccgctgggaaggccaagtctggcattaatttcgatccatttcctggacgcaagggactcgtggagcggacgccgttgatcaagcattcgggtcctaggcaaacacaagaggagctgacccgccagcaaaaccaggagcgttcgcatagtaatgccgaaaatcagaccttcctcaaggatgtgaccaatcaggtgctcgctggagagggagtcggttggctgaagctcaatcggtttaagaagctaatggaggacgagtcatatcgcacactggtgcttagcaagctcaataagacgctggacaagaagattgccccagatgatcatattgacgatgtgtgcgtgacgaagcccgtgtggaagggtatgctgaagtgcatccaggccatagccggcgggttggacgtgacctttgcgaatttcggcctaggcggtatggcttctgttttccagctgatggaggtagcccacacgcattattggagcaaggagatcaacgagggcagcgacatgtcctcgagcctgctctccagtcacgccgccagtcccatgggcagtagagagaacctgcgatcacctagctcaccaaatggctcccactcggcattgggcagtgagtgggcatcgccgcaggaatcacgaaagagttccactcaattggcacacggtggaccaggtggttcgcattcgggagcaccgattaaccgacgattgtcgtcggcggatagccaggatggtcagtccaccacggagatgttcaaggatatgctgtcgcagaaaagaagtgccttgaagaacatgctcacctccttcgattcagatgctgctggctccacgggtgcgctttccgttgtcagtttgggcgtccgcttgccctccagctgccgatccacggtttctgacaccgagtacgaaaatacaaccacgtcgaaggattcgaaaaagagctctggcaatctgtggtcgggcaagtcaacgcttagtgccggatttcgttatactggaggacacctgatcaacacgtcatcttctccgtcgccggacagtccgcgggtttacctcttcgaagggttgctgggcaaggatcgcctcaatctttggaaccaaatgcaattctgggaggatgccttcctcgacgctgtcagtcaggagcgtgatatgatcggcatggatcagggtcctattgaaatgatggagcgctacaaatcactaagtgaatcggagcgcaagcgtcttgaacacgacgaggatcgtttgctatccacaatgctctacaacctgacggccatcctggtgatgctgaatgtcgccaaggacgagatccggcgcaagattcgacgcctccttggaaagagtcatattggcttggtgtactcccaggaggtgcacaatgtggtcgatcagataaacaatctgaatggaaatgacattgatctaaagcccttgggttcacgattgctgcaccgccagagcttcaccgtccaccagggcacagatgtgaacggaccactacgatttatggaggtgcgggacgatggtctggtactccgatcagtggatggcaccattgtggagcgctggtggtacgagcggctggtcaacatgacctattcacccaagaccaagctgctctgcctgtggcgccgcaatggcggtcagacgcaattgcacaaatactacacacgaaagtgcaaggagctgtacaattgcatcaaggaggccatggaacggggcggcacgcccaccaatgtacccgagctgggcggcgagtttcccgttcaggacatgaacacaggcgagggcggcctgctgcaggtgtgcctcgagggtgtcggtttgttgttctccaacagcaagtttttcgtccgattggaccacatccgcaagtgcttcacccagaagggtggcatttttgtactggaggagtacaatcccaagacgcgcaatctcattcaacgaaagtaccagtcaagcatgtccgatcagatttgctactcggtgctgtgcgtattctcctacgtggccgccggtcaggaccagaagaagaatccggtggtcatcactccgcaaatccaggacattcatgcccagcagaagcaaaagcaccagcagcaacagcaacatcagcagccgcagcagcagcagcagccacatcaaacgaccacgcagcaaaatcagcccacagcagtagcatctgcagtgcccacaacaactgctccagccggacaagtcaatcccaaccggatgacggccaaatcgcaagccggcagcatctccatacggcacacggtgcccatgcagaagcccaccatcaccatgtccacggtgcagccgcaggccaggatgccagcccaggttgcaaccgcatctgttccggtcactgtgccagttccccccactcccgctccacccacatccaatcccgccaagctgccgcaattgccgccgcgcgtaccgtcgcaaccttcgacggaaagcctggcctcgatctcatcaccgccgccaaagctacggacacccatgtccgctccacccggaccaccgccggccataccgccgcgcacgggggccatttcacgtagcggatcggtaccggcggcccgatcctttgtccgccaggcatcggcaaattctacaccgccacagtatacgccacagccgccgccgcccttcgtgatacccaagcggcacagtggactggccagggcatccaccttgtcatcatccacatcgccatcgatgtcatcatcatccgcctccaatcatcccgggcattcgcagtcgcagcagcgcgccagtcacggcagcgtcgccgctgtgctgcaatcaatgccggaggctgagcccggttacggatccggctccggttcaatatccggctccagttccggctccggttcggcatcgggctccattgccagcgcttcaccgcaggcccatcgcaagcactga

SEQ ID NO: 11823 - protein, 2075 aa, DROSOPHILA
MSDQQKASLCPRLVDYMAIVGAHTTPPMPKGLQGLKAPPVQVPDLLRRYPPSDHADFPLPLDMVYFCQPEGCTSVGPRRTGSAIRDMTSFVFALTDKDSGKTRYGICVNFYRPIERPSSAAGSAGAGNDRPGNGGPGGHGGGAGGGAGGGGRAPSDSDRELTSRRDSDQQRLHSHHSHHQPHHPSASPAVPKLGLMAPSADSESGGSHSPSPRASRKRTKLRNQSLTSLCIISHHPFFTTFRECLFILKKLIDACNESSSPKRVGASQKINRDNVWTVLTGHVSDATPSIVLHDVREIETWILRLLSTPVPVPGSTRVEVEVLSPTVHEPLLFALPDHTRFSLVDFPLHLPLELLGVETCLKVWTLIMQENKVLFQSRDYNALSMSVMAFVTMLYPLEYMFPVIPLLPTCLSCAEQLLLAPTPFVIGVPASFLVYKKNFRLPDDIWVVDLDSTKLTPPTGGYEEIPPLPEPEGTILKNHLKQVSPKALSLNSLRLPLQTPPHSAQASQRNSMSAQGTISSRQPSPMNSPALNPFVYGTDVDSVDVATRVAMVRFFNAQNTLANFAEHTRTLRLYPRPVVAFQINSFLRSRPRASQFLNQFARTQAVEFLAEWSLTPTNVAFLRVQTGVMDPMQVGDKPKWFAHALTPIRFSVWDDGSSLNGALRSLKQLECQPTDESGSDSEGADSSSSSYSSLSDFVSEMASSDLSPSLHDVFGSYNRPHVVPQTLSSNLDPALVYHPPSKLQYPEGIADAVASKEEEDEERADSPVSSSSSRSDLSSPSFNRDSEFDFQPKGGQTLGSTTVGSGAAAPSFELATPLAMRLEATIKMASIEQESDTVSTATGKTIAAGSKLQRHPSDSESRPEKKIPPPLTPPVKQPGVSNILARTGSSGSSSSSPGRQSSQSSLFENFASHAKELVRETTRQSSQEGLLAHVDKHALDEDLDDKMRHTFEKFTLHAKKAAGEASKQALEVSKQAAGVSKNTLEDLTYVGKSTLGDLTKTAKEAATKKGIIKIEEHSAGGAGPPPKSPGSQLATHKQVQQSGGQGGGNNFFSAIGTDFNGLASSTSTMFSGMFGKKSQQKQVPVQQKQPNVSAGKAKSGINFDPFPGRKGLVERTPLIKHSGPRQTQEELTRQQNQERSHSNAENQTFLKDVTNQVLAGEGVGWLKLNRFKKLMEDESYRTLVLSKLNKTLDKKIAPDDHIDDVCVTKPVWKGMLKCIQAIAGGLDVTFANFGLGGMASVFQLMEVAHTHYWSKEINEGSDMSSSLLSSHAASPMGSRENLRSPSSPNGSHSALGSEWASPQESRKSSTQLAHGGPGGSHSGAPINRRLSSADSQDGQSTTEMFKDMLSQKRSALKNMLTSFDSDAAGSTGALSVVSLGVRLPSSCRSTVSDTEYENTTTSKDSKKSSGNLWSGKSTLSAGFRYTGGHLINTSSSPSPDSPRVYLFEGLLGKDRLNLWNQMQFWEDAFLDAVSQERDMIGMDQGPIEMMERYKSLSESERKRLEHDEDRLLSTMLYNLTAILVMLNVAKDEIRRKIRRLLGKSHIGLVYSQEVHNVVDQINNLNGNDIDLKPLGSRLLHRQSFTVHQGTDVNGPLRFMEVRDDGLVLRSVDGTIVERWWYERLVNMTYSPKTKLLCLWRRNGGQTQLHKYYTRKCKELYNCIKEAMERGGTPTNVPELGGEFPVQDMNTGEGGLLQVCLEGVGLLFSNSKFFVRLDHIRKCFTQKGGIFVLEEYNPKTRNLIQRKYQSSMSDQICYSVLCVFSYVAAGQDQKKNPVVITPQIQDIHAQQKQKHQQQQQHQQPQQQQQPHQTTTQQNQPTAVASAVPTTTAPAGQVNPNRMTAKSQAGSISIRHTVPMQKPTITMSTVQPQARMPAQVATASVPVTVPVPPTPAPPTSNPAKLPQLPPRVPSQPSTESLASISSPPPKLRTPMSAPPGPPPAIPPRTGAISRSGSVPAARSFVRQASANSTPPQYTPQPPPPFVIPKRHSGLARASTLSSSTSPSMSSSSASNHPGHSQSQQRASHGSVAAVLQSMPEAEPGYGSGSGSISGSSSGSGSASGSIASASPQAHRKH

SEQ ID NO: 11824 - DNA, 3042 bp, DROSOPHILA
gaaacacaaaatgggaaaatgaaccgcccgaaaatagacacaattaagttctcataaccgattcaattaaagttcaacacacagaggcggcacatattgcgccacatgcaacggggctgggcgtggccgcgggggcgggtgcggtagcaatgaaaatcttttgttgtggcacaacaccgaatgggaatacaatattattttaccgttttcaccaccacctatccttttcctttgtctgtcggcaggcggcgactgttttgtacttggcttatatcactgtgcgttttccggctaccgatatgcgttcgaggcgatggtccatgcggcgcatttaaataattgattcgcactatttcgcagcggcttttacttataaatatctgtttgagggacaaaacgcagcgtccccgaataattttcgtgtttttcctttttgtttccactccacacaaacacacacccacctttttgacagcgcagcgacgctctctctctcgccgttgacagtggtgccaacttagggccagaaaatagctgacggtaaatataaaaaaatcacttaaatgtatggtaccaataactaaacttaataagcatatcatccagtataaagtcgtttttctttttccaaaactaaaataaacttttttttacaattggcacttaaaaatcagctagacttggcgtgaaaaaagagagcgggtagtccagctccgctctctcgaaactgacaagcagtgctgcaaaaggtgcagggctcaggcggatttggcattatacaatactaataggcatggttgtgggagaggggttgcaaccaattttcacattgtaaacaaaattatttatttaattctatttcgagcagaatattgtaataattacctgttaattaaaaaattatcattttaaaattatcttatgtaagttcaataccctttaattgctatcgactacgcccatgctgcctatgtccactgttgttgtttcgagcgtcgtaatgagcagatttgtttataaacttttacagagtgcaaaccaaactagttcgggctgcagacgcatttctttggctactgtaagaaatgcggaaagcgaatctcaagagggtgcccctgcccgcacagttctggtggagaaggactcgcacataacacttattggcctaaatcgcgagcagcagcgtaattccattgatgccaacaccgcggagcagctgaccgaagccattagccaattcgaagcggatgatacttctccagtgggtgtgctctacggcataggtggctccttttgtgcaggctatgatctggaggagctagaggcggaggcgcaacgcggcagcctcaactttctgttgcgtcacgagggctccgtcggaccaactaggcggcatctccgcaagccacttgtttgcggcatcagcggtttctgtgtggccggtggattggaactggctctaatgtgcgatctccgggtgatggaggacactgcagttctggggttcttcaaccgtcgccttggagttcccctgagcgatggtggaactgtgcggctggccgctgcagtgggttactccaatgccttggagatcatcgcaactggaagacgcatctactctggggaggcgcggcgaatcggtttagtgaatcgcgttgtggccacaggcacagctttaggtcaagctgttaatctggccttttccattgccaagttccccatggcttccctaatgcacgacaggaatgctgtgcttgaaaatgccaatgcctacaacaaaccaggattccatgtggccagttacaatgagatcatgaatgttacctcagatatgataacagatatgcaggagggcgtgaagcgtttcaagaactgtgagtagtgttcgtgttcattcctagaaacactttgttaccttccttttttatattttagctgaaataaagggccccaaaaccgattcgtggagcataaaggagaaaaccattccagattgggaaaaggccgaaatcgagatcgaaaaacaaaagcaaaagacatgacatatgtagttagctgatatatacaaaacttctgttcttctggttagttgcaatactttgttgttatatataaaacgaaagcctttattcacgtaaaatacatttatttaatgatttatgtagttgaccgcctaaatcgcttacgactcgcgcttatttcaatattcacaacaattacaataacgaattttccttgaaattaagcctaactacaaaaaagagttgagaggaaaagcacaaagttcggtattccttgctgtcgatcgattcaacattcacaattagtttacacttataaaaaatatgctagcgtcgagtaatcggacttgtcctcttacttacaatgaatttttgttatcaagtgcgctgggccaagcggtttgccggtctcgccaatatgtcttagttctaggagttaacaaaaggagttattgcacttaaatcgagtaaagcgagaaacgaagctctatgcaaaaaaggctgctcttgtacaaactagtgttaaaaaccgactgatcgttaatcgtgttaaagtagtttgatttaaaatacatcgtacatcgtacatcgtcgtactacgcctaacatttacactcggctacacttaatccaaaaaatttgtcatacaaatattgcacaaaaatggatcggactgtgagtttgcacacccatgtgcgcactcgtgtttcaatgtgcagcacatggcaaaaccttcaatcaagtggtggtacgtgttcacatacataatcactaaagtacggtgttcggaaacctaaagaccacaatatacatatacaatatatacaaatgaagatgcaattttcgctaaccatccgtccatcccaccgtgtctggtataaaaatatatagtatagcgtaggccaaaaaagcaattgctgcattcagctggcgacattttaaagatgcggtgcgatgcgatacgatgcgatatctgatccctcaatacccgattacttaagtcgctgtgtcacattggcca

SEQ ID NO: 11825 - DNA, 981 bp, DROSOPHILA
atgagcagatttgtttataaacttttacagagtgcaaaccaaactagttcgggctgcagacgcatttctttggctactgtaagaaatgcggaaagcgaatctcaagagggtgcccctgcccgcacagttctggtggagaaggactcgcacataacacttattggcctaaatcgcgagcagcagcgtaattccattgatgccaacaccgcggagcagctgaccgaagccattagccaattcgaagcggatgatacttctccagtgggtgtgctctacggcataggtggctccttttgtgcaggctatgatctggaggagctagaggcggaggcgcaacgcggcagcctcaactttctgttgcgtcacgagggctccgtcggaccaactaggcggcatctccgcaagccacttgtttgcggcatcagcggtttctgtgtggccggtggattggaactggctctaatgtgcgatctccgggtgatggaggacactgcagttctggggttcttcaaccgtcgccttggagttcccctgagcgatggtggaactgtgcggctggccgctgcagtgggttactccaatgccttggagatcatcgcaactggaagacgcatctactctggggaggcgcggcgaatcggtttagtgaatcgcgttgtggccacaggcacagctttaggtcaagctgttaatctggccttttccattgccaagttccccatggcttccctaatgcacgacaggaatgctgtgcttgaaaatgccaatgcctacaacaaaccaggattccatgtggccagttacaatgagatcatgaatgttacctcagatatgataacagatatgcaggagggcgtgaagcgtttcaagaactctgaaataaagggccccaaaaccgattcgtggagcataaaggagaaaaccattccagattgggaaaaggccgaaatcgagatcgaaaaacaaaagcaaaagacatga

SEQ ID NO: 11826 - protein, 326 aa, DROSOPHILA
MSRFVYKLLQSANQTSSGCRRISLATVRNAESESQEGAPARTVLVEKDSHITLIGLNREQQRNSIDANTAEQLTEAISQFEADDTSPVGVLYGIGGSFCAGYDLEELEAEAQRGSLNFLLRHEGSVGPTRRHLRKPLVCGISGFCVAGGLELALMCDLRVMEDTAVLGFFNRRLGVPLSDGGTVRLAAAVGYSNALEIIATGRRIYSGEARRIGLVNRVVATGTALGQAVNLAFSIAKFPMASLMHDRNAVLENANAYNKPGFHVASYNEIMNVTSDMITDMQEGVKRFKNSEIKGPKTDSWSIKEKTIPDWEKAEIEIEKQKQKT

SEQ ID NO: 11827 - DNA, 2783 bp, DROSOPHILA
aagttgaatgtttgcgcaactatggccccctatcaaagtccccatccccatccccatccccatccctatccacatccgcagccgtagccgcatccaagtacacccactgcccgattcacttacttaacaggtgtgacagcggcaacaacgagtcggctgctgtcactcgaacaagtaaagccaagtgaataactgtgacgatgacaaggacgaaagcaggacacgttttagcagataaatgccaggcacttaagtcatttacagccggcatttggatgtggtatccaacgtggcgatgcagcttcaaccgacagttttcaacagttgaaaacttcccggaatagcggctagttgggatcctcgagaccagctgggaagtcctttatttaaattgtgttgaaatattcaagtgttttcagggatgcaattaaaaaccaaaaaaaaaaagcagttgtagcatgtacctgctgtaacaatacatgggctttgcggttggttagggtttcacgtagtgacgaaacgcacatgaatatcacaaaacaaaaactagcatatggactttgctggaattaaatcaatattcgtacaaatcggttttaagtccaatataaatgcaaaattattgtcttcagaaaatgccctattttatttaagaaaaaagaacaaagttcttcggatattaagttttatttttcaatggcagttaatattaattcaatttttaaataagcaaaatatataaatcactaaaccaaaatacaataaaaatttcgcactattcttcgaatgtcgaatcatctttatttgaaaacaacctaaagttttgtatgagaatgcacgtaacgtttactacgatatattttaaagcctgggcatagtttctatggatattaccctacatgatttaaagctaaaaacattgccgcgttctacgccaagaaggaattttcacagttcgtagtctttgagtgagttttcacgcctctaagactgctgaaattcactcttggtgaagatggtagcgggtatgatgatatggctcctggatatgaaggggctttgattgctgaatgaaatgagaatgaggatgctgatgctgatgctgatgctggtgatggtgaggatgtggcatcatctggtatctgtgcatcatggcctggtagtgctgcaccatggcggcatggtgttgatggtccattatggggaagtaggcgctgtgtgccttgatatatgggccgttaccgtgcccgtgcccataatatggcattcgctgatagggatgacctgtgaccttgggtctcgcccccgtattctgctgccaattgctgcggcgcaggcgtcccgtcgtctcgccaatggacagatcctcggcatacggatcgagtgcccagtagtggccacgtccaggatcatcgagagctcgcggcacccgaacgaagaacggattgagactcaggttgtgccggatcgagttctgccagacgctcttgcgggtgcgatagtacgggaagttgtccgcgatccacttgcagatcccgcttagggtcaaacgcttctcggagctgctccagatggccatcactatgagggcgctgtaggtgaaagccggctttgcattgctctttgcagccatcgaatccgagctggagttggaactggagctcgagcatgagctgaagctgcttcctgagttgtgcttcgaaatgggggactcctcctttttgtccacggagagcagcgatcggatggagaagctggactggaagattggtgtcgtatccatcgtaataatattgcaatatgtgtcactgtttgagttcgtaaaacgactgtgaccagtccaccggccgccgatctatttatacgagaggaagaggctgaactcgaggattacccgtgtatcctgggacgcggattagcgatccattccccttttaatcgccgcgcaaacagattcatgaaagccttcggattcattcattgatccacatctacgggaacgggagtcgcaaacgttttcggattagcgctggactagcggtttctaaattggattatttctacctgaccctggagccatcgtcctcgtcctccgtcccttagcgcctcctgcatggatgtcgtttttgggtttcataccttttcacactggaaaaatacggaatttgttgtaagccctttcaagacgaatgggatttagcttcggatgtcaacgtcaccataatcatattaggaatatttctactcaattgcaatattggtacttttctgactgtaaacgcgatgataattacaaatatgcctaatttgctgtctttataatcaaatggagttctttatatttccaaaatattgaaattccgattccctagaaaataatacgtttttctgttattaataaaaaaccaataggaaagttctcaaaaattactctgttgtatttgatcatttcttttccggtataatcttttattttaagcattcccatgtgaataaatttcagactaatgtattaataagatgtcgtgtttttccacttacaaatttctcatacagctggatatatactacgagtactatacacatgctctgggtatcgttattttagagagactactaaccatttatatcttgattaaaatgtatttcaattctcttcaaaactgtatactactgtataaaaaaatgggagtaaaagtggaataacatcttacatgccaaaattcaaaaaccaagatatgtaatgaagccatattcgaaataaatgatattatatattatag

SEQ ID NO: 11828 - DNA, 783 bp, DROSOPHILA
atggatacgacaccaatcttccagtccagcttctccatccgatcgctgctctccgtggacaaaaaggaggagtcccccatttcgaagcacaactcaggaagcagcttcagctcatgctcgagctccagttccaactccagctcggattcgatggctgcaaagagcaatgcaaagccggctttcacctacagcgccctcatagtgatggccatctggagcagctccgagaagcgtttgaccctaagcgggatctgcaagtggatcgcggacaacttcccgtactatcgcacccgcaagagcgtctggcagaactcgatccggcacaacctgagtctcaatccgttcttcgttcgggtgccgcgagctctcgatgatcctggacgtggccactactgggcactcgatccgtatgccgaggatctgtccattggcgagacgacgggacgcctgcgccgcagcaattggcagcagaatacgggggcgagacccaaggtcacaggtcatccctatcagcgaatgccatattatgggcacgggcacggtaacggcccatatatcaaggcacacagcgcctacttccccataatggaccatcaacaccatgccgccatggtgcagcactaccaggccatgatgcacagataccagatgatgccacatcctcaccatcaccagcatcagcatcagcatcagcatcctcattctcatttcattcagcaatcaaagccccttcatatccaggagccatatcatcatacccgctaccatcttcaccaagagtga

SEQ ID NO: 11829 - protein, 260 aa, DROSOPHILA
MDTTPIFQSSFSIRSLLSVDKKEESPISKHNSGSSFSSCSSSSSNSSSDSMAAKSNAKPAFTYSALIVMAIWSSSEKRLTLSGICKWIADNFPYYRTRKSVWQNSIRHNLSLNPFFVRVPRALDDPGRGHYWALDPYAEDLSIGETTGRLRRSNWQQNTGARPKVTGHPYQRMPYYGHGHGNGPYIKAHSAYFPIMDHQHHAAMVQHYQAMMHRYQMMPHPHHHQHQHQHQHPHSHFIQQSKPLHIQEPYHHTRYHLHQE

SEQ ID NO: 11830 - DNA, 4498 bp, DROSOPHILA
acagggcactaatggccaaaactgcggataaacggacaactaatgctaataagcatttaatacattaaatatttggttcaacgcttcacaagtggcccatagaaaatcagaatgctgtcatttattagcctgaaaacaaaaaaacttttataaataataaagcgattttgtgaatttgcgagcataacaaaaggctcattgactaaacagcaaagctaataaacatttaataaactatttagcgaagcgtcaaactgaaatgaacaaaactcctttgaccataaatatggcatccatttaaaatatatttaatgcatacccaattatgcttttaccaaaagcttttgatctctaccctaatccaataacttatttattagattattaaacggataaatttgtgagctcaatgctttttccaagaacacttaaatttattgataaagccaggcaaatttgttcgaaatctcttttttgccaataaggcgaaggccaataaataaatatttaaatacactttaattttaagccaaagtgatgccccgcatgataaagtcaaggaactcttatgcaaaacagaaaacagaacatacatatatatatatatatagaagccaatctatatgtgtatctttgggctatttttgcaccttttgcagccaattttaaacgccatcatcccaaaggctgtttgctgctgctagtggtcttttattttcggggtcgttgacaaggagttcaaatgatggcctggaaagcaatcgaatccattcgggtcaagtgcagaggcaactaaaaacagcttggagacggggaaaaaaaaaagagaactacaactgccggatggccaaagagtttcgagagtattttcaaaatttcagcgtcgtcgtctcgcaaaaacaattttcttctctcggcgaacgaaagtgaatttacggaaaatagccgcgatccatcagcacttgccctcagttgccaaagttcttttgcgccgtgcgatcgaagatctctctcgtgcggatacatcggaaaatgatccacattttctaactaccgaattcgaaaatggcatttaacatgtgtgcaaattcgctttgcttgggcctagttgcccttctggttttggccaaaagtagcgacgccttgcaggcaaaacgtttcttcggtgtgggcgaaagggtggaaggggaccagctcctggtcaaggatgtgctccattcccgtccagccggcgccggcgagctgcccggagtgacgttcacctacgagattttggagccaatcacttgcgtggaaattctatcggaggaagtgagtgcgggcttttaaattcaacaaactatttaaactttaaactaccacttttgagctctcaaaaaaaaaaaaatctaaaaatatggcacatacaatttgacagccgaaagaataaattgattttgttgtgtacacagcacaagcttgtcatgtaaaaaagatgcaaattagtttcgaaaaaaaaaaaaattgtaaagacacaaaatattcctgcataattagacagaatctgggtattttggtttatgaacaagtgagcgatatgtgcggatattctgaccccttgttactttaataatatttttttttattattattttgcacatgcccgcaacgaaaatagaaacagaaactgacatttttttttcgtcacagccaagcgacataaagtttggcccatagatgtatttttatatatccagtgcgttttgcggctgccgggctgtgtttactacatatatctattcaactttactatatctactatatgtatgttcatatttttgtttatttgttttgccctgaaatatgaagcacgtactatttggtaaagtgttcgatttatcgacaactgggtcgataattgaaaatgaaatgaataaatatgtacttatattgtacggggaaaatcgcatactttgaggccaataaaaataaaatagcgtgaggaaatgtggcaatttggcaaagccgacaagttaaatggacgagaagggtggcgggaagcaagcatatatattatttctagaataacaagaaagaaaactcgagctgtatgcattttcaatttgagcattatgacgcgggattttccctagaaaatacacattatttattcgtaaatcaactttggcgaagtacatatacgtcgatgtccgtgaatcggattgtcagaccgcgtaaacatctcggaaaaatgtagcaatcgctgatggatgttgccgtaatggtcacgcccgattggatctgtccaatttgaaggggatttctcatttggtttctcctttgccatttcagaacatttcggcggaggtgaaattcagcttggtgaatcgcctcatcgtgggcataatccaattggctgccagcaatcaaagcgttaacccatcagctcccattgttccaccaaccgtcgagttcgatgtgaccatcatggtgtttggcctaaatgagacctccaagcatttcgatccctcactggtcatcaatcgtgatcagcaatttgagggcgagatggagccctacgaggaaatcttcccggaaccggatcaatatgttgaggtatttgacaacaatagacgcgatgacctggagatcgacgaaggtgatgacaatctgtccgaggaggacatcgagagctatacggaaggtccattcgtaacagactatttcgataagccagacaaatacattgaagttggaaaaaggcaggcgggtaagtttatcaataatcatatcttcatatgatatctgataataagtgacctttaaggcgatgaacttctctatgattgctatcagacatcgccggatgattcggaaaagccaaccaatcactcggtggttttctactacatcgacaataatctaataacatacgtgcggtttgctatactcgatgtgagtaaactatggttaaaagttccatgttaatacatttaatacttattaaatttgtacactttttagcactatgccaatagaaatatctcggaggccgaataccaagcgccggtggcagagtacagtcactatacgagtggcaccctaaaggcggtcatcaccgactacgattcgaaaagcctttttgtccagatgtacgtctacggatatcgggggcgcacagcgccgcccacctatgagcccttcctgccgccgccgctgtggcaaaaggcaattctggagtcgcggaccaaaagcaatgccactccgcacctgacgccgctgcagacgctgcagctgctcctgctgaccggccagcggaccaccccgccgccaggagtgtacaatgatagcgtggagcacgaggagcagcggagcattcggccggaggagatgatgttcgagcggatcgaggatgagagtgagggtgagagtgagaagaattcggcactgcgccagatgaaccagggcatgggaatggcggcgctgctgggcctgctcttcctgatcctgcataactaggtagcccgccaggggggggaatcattagttaatccatggaaagctttatgagtagtctttagtccaacattctgtctattgtattttacgaaataaacttttggcctaagccaaggcacacacactcttccgcaaattgaaaaagttgcggcgaaagtaggtcatggcgctggcttggcttggcttggcccctggacacccaaccccagaccttgtccaaaccgcacccacaaacactctcacatgcgccaacccctagcccataaaccaactcccttggcaaattatctgcgtcggcggtggttgatttggccaggccaacaaaggggaaggcggaaaagcggaagaacgaaacgaaaaacgaaaagagtggaaatccaactgacgacagcggccgttttccacaaacccatccatccattcacccagtcacccactcccctacgaatgtgtttatttgcttggacattaagtcggacccaaatgtgtcctttgccttggcaatttatgtgccttgtattttgtttcaacgcagcggagagcaagtagcaaaattggtaaaaaggcaaatttgtgtgacttcgagatgcgagagaaatcaagaattgcacatggcaagcaagttatcctttaggcgcttaaagtgtttcgtatggtcttgccaactttcgaactcgacaaaccagcggttgtcaaagaaatctaataacttttatttcaatttccggctagcaatgtgcaatggctacatatccatgtggcagtcgtcctgcggctgcaatgctatttcgtattttgtcctttgttccatgtcgtttgcagatggcaaagtacaaaatataaagtacaaaatacgtaatgctacctgggcgtctgcagcaggagcagtaaaaatgtcacagccacaccgagggaccaagatgaaaccgtagagggataatggctttcacatgggaaacggacgcacgaggacgaggacgactgtccggcacaaaggaca

SEQ ID NO: 11831 - DNA, 1352 bp, DROSOPHILA
cgaagatctctctcgtgcggatacatcggaaaatgatccacattttctaactaccgaattcgaaaatggcatttaacatgtgtgcaaattcgctttgcttgggcctagttgcccttctggttttggccaaaagtagcgacgccttgcaggcaaaacgtttcttcggtgtgggcgaaagggtggaaggggaccagctcctggtcaaggatgtgctccattcccgtccagccggcgccggcgagctgcccggagtgacgttcacctacgagattttggagccaatcacttgcgtggaaattctatcggaggaaaacatttcggcggaggtgaaattcagcttggtgaatcgcctcatcgtgggcataatccaattggctgccagcaatcaaagcgttaacccatcagctcccattgttccaccaaccgtcgagttcgatgtgaccatcatggtgtttggcctaaatgagacctccaagcatttcgatccctcactggtcatcaatcgtgatcagcaatttgagggcgagatggagccctacgaggaaatcttcccggaaccggatcaatatgttgaggtatttgacaacaatagacgcgatgacctggagatcgacgaaggtgatgacaatctgtccgaggaggacatcgagagctatacggaaggtccattcgtaacagactatttcgataagccagacaaatacattgaagttggaaaaaggcaggcgggcgatgaacttctctatgattgctatcagacatcgccggatgattcggaaaagccaaccaatcactcggtggttttctactacatcgacaataatctaataacatacgtgcggtttgctatactcgatcactatgccaatagaaatatctcggaggccgaataccaagcgccggtggcagagtacagtcactatacgagtggcaccctaaaggcggtcatcaccgactacgattcgaaaagcctttttgtccagatgtacgtctacggatatcgggggcgcacagcgccgcccacctatgagcccttcctgccgccgccgctgtggcaaaaggcaattctggagtcgcggaccaaaagcaatgccactccgcacctgacgccgctgcagacgctgcagctgctcctgctgaccggccagcggaccaccccgccgccaggagtgtacaatgatagcgtggagcacgaggagcagcggagcattcggccggaggagatgatgttcgagcggatcgaggatgagagtgagggtgagagtgagaagaattcggcactgcgccagatgaaccagggcatgggaatggcggcgctgctgggcctgctcttcctgatcctgcataactag

SEQ ID NO: 11832 - protein, 424 aa, DROSOPHILA
MCANSLCLGLVALLVLAKSSDALQAKRFFGVGERVEGDQLLVKDVLHSRPAGAGELPGVTFTYEILEPITCVEILSEENISAEVKFSLVNRLIVGIIQLAASNQSVNPSAPIVPPTVEFDVTIMVFGLNETSKHFDPSLVINRDQQFEGEMEPYEEIFPEPDQYVEVFDNNRRDDLEIDEGDDNLSEEDIESYTEGPFVTDYFDKPDKYIEVGKRQAGDELLYDCYQTSPDDSEKPTNHSVVFYYIDNNLITYVRFAILDHYANRNISEAEYQAPVAEYSHYTSGTLKAVITDYDSKSLFVQMYVYGYRGRTAPPTYEPFLPPPLWQKAILESRTKSNATPHLTPLQTLQLLLLTGQRTTPPPGVYNDSVEHEEQRSIRPEEMMFERIEDESEGESEKNSALRQMNQGMGMAALLGLLFLILHN

SEQ ID NO: 11833 - DNA, 8143 bp, DROSOPHILA
gtttgctgctggcgaacatgcccgaccacgtccctttaacggcgatcgtccggccttcgtccttttgacggcattgtgtgtgtgaaggacatgcccgaaagtggggagcacaaaaaccttccggcatggctgccagtgtatgcaagagcagctttatgtagtaatattttacatttcagccccagcatcattattaaaaataagagatgcttgggaccacgggcccagttaccctgctttgcatgctctaaatggattattcaaagcctggtccataaatcgtgctgggccttcaaaaatccacaagtgggtcgcacgtccctggccagatggaatggcttggcaccctcgtacctatcacccagctatccaagtgaaatgcaatgaattcgttcacagccattgggacagacccttcctatccatttttatttcttttctgcacttatcgatgcttgttgcacgtccgtggagccacaacaatttcggtggaaagctgttttcaatctcttggccaacccctgcatttggctattttcgttttcgccttgtttatttctgtttttctttccaaattcacttggatatctggcgcattcagggtccgattcttcggttccattagccgttgaattgtatgctgtgcacgttttgttactgcggcggatttattttcaagtttcagttcagtccgtttcatggttgaattggtcccaaataggtgaagtttatctaattaatccgtcacccagtgcttcgcagtgctacgtctccgttggagctcaagtgtgatttaattagagaaagttggggaaaaacattttccggcagctaaacactttcattcataaaagcccaagagtggttaaaaatactcgaggcgaatttatcagctgctgcaacatcaacagcagattgctgctgttggccgtatttttgtgctcttagccatttatatttgcattcccggtggcggcggacggcctgcagaaatgtgcaaatttagttcgacaaacaatcgcgcaattaattggaaataattgcggaattcattgcgcgtcaaccgcagaaaatatttatgcgaatttttgattacgattcgcggtaaaagccctttgagcgatgtggttcgtgaaaatgatttcaacagaagcgagttttccacttggcttcatcctaacgagcttgctattggcatttcccggttgccgaggagagagaacgaatgtgggtaagtaaagcgcatttttcgcttgagttacataagcaggaatttgcagcgcagcatgcaaatgtgtcatgtatttttatgctgccaacggtgccgatggcggcggcgaattcacgaaataaaaatataaacagaacccgctaagcaaaacaaagagcgaaaactagtgtcactctctcagaaataccttttgattgcaggtctcgtctatgagaacaccgatccggatctcgagaagatcttccacctggccatcagcaaggcgaatgaggagaatgaggatctgcaactgcacggcgtgtccgtctccattgagccgggaaactccttcgaaacctccaagaagctctgcaaaatgctaagggtatagtccaaagctcatagttcaaaactagaaacacttgcctatgtagtacctagggatatgcttgtattaaattcattatttgccactcacgcacagcaaaatctggtggcagttttcggacccacctcgaatctggccgcccgtcacgcgatgagcatctgcgacgccaaggagctgccatttttggacacgcgctgggattttggggcccagctgccgaccatcaatctgcacccacatccagccacgctgggcgtggccctgcgggatatggtggtggccctgggctgggagagcttcaccattatctacgagtcgggcgagtacttgcccaccgtgcgagagctgctgcagatgtacggcaccgctggtcccacggtcacggtccgtcgctatgagctggatctgaacggcaactaccggaatgtactgcggcgtatacgcaatgcggatgatttctcgtttgtggttgtcggatccatggccactctgccagagttcttcaagcaagcccagcaggtgggtctggtgaccagcgactaccgctatattatcggcaacctggactggcacaccatggacctggagccgtaccaacacgccggaaccaacatcacgggtctgcgcctcgtctctccggatagcgaacaggtgcaggaggtggctaaggcactctacgagagcgaggaacccttccaaaacggtaaatcaaaatggaatgacagccccacctgaaagtgtcgtgccactgggatctagacaatttatgcaaatccaaaatccattcgcttggctgaatttaaataattgaattgcacattcatggccccccaacgctgctgaaaatgataaatgacgttagtccttatgacctctcctccacagtgtcctgccccctgaccaacagcatggccctggtctacgatggcgtccagcttctggccgagacctacaagcatgtgaacttccggcccgtggccctcagttgtaacgatgacagtgcctgggacaagggctacacgctcgtcaactacatgaagtcggtgagtttggggcacggtgggatacttaaagtggcataacaatccaacagagctaagcaccacgtttgaaaaatataaatgaacttttttatttgactcacttcattcgaataacatttttatgttggctgtttacatataatacaatttaatagattttataaatttttctattaagttttatagagttgaaataccactagtgccttatacatttcaacttagctttcatacaaataaaatcctttttctgcttctacctttttgagcacatttttttcctctgtacgaaaaactttctgattctgaataactcatgcaacgagtctcggtccgcagctaacgctgaatggcctcacgggacccattcggtttgactacgagggactccgcacggatttcaagctggaagtcattgagctggccgtttcgggtatgcagaaaatcgggcaatggagcggcgaggatggcttccaggagaatcgtcctgccccggcacactccctggagccggatatgcgttcgctggtgaacaaaagcttcgtcgtcatcacggccattgtgagtagtgggtctgagtaagggtctaggacctagctgaccttgactatccttcttcttgtttgcaaaattcgatattgcagagtgaaccctatggcatgctaaaggagacctccgagaagctggagggcaacgatcagtttgagggcttcggcatcgaactaattgacgagctgtccaagaagctgggattctcctacacatggcgcctccaggaggacaacaagtatggtggaatcgatcccaaaacaggcgaatggaatggcatgttgcgtgagataattgacagtgtgagttctggcgaaggtcgtggagttctggaggcacataaatctagtccacatccgttgctctgcggccatttaaatcagttagcttatcccatgttcgtcctgcgtggttattgatttgcattgaatggccataaatgctgccatcatcgttaacgtaagcgttaatgccatcataaatggcagactatttcagagtgcctgcggcctcaattgcctcaaattaatagggtttatagttaagcgattaatttaatattcccacattgtatccatcgcatttgggcagcatgataggtatattattattccgcttattagcaacctttgtgagcctttattaaatgatgaaattatgtgtaatttagcaagatgttaagcaaccaaatgagctttccgcagtctaaacgtttagaatgctataatcacatcagtggtattgattagtttatttatagattaatttttatagtttttcaaacaaataacatctgattatttccattagtattccaagcttcaaattggtatagatccagaatgtatgaatagcatgaaagtacaaaaggcaagtttagttatagtcctcgattatgtatgcatggttggatttcctttcctcccttttcttattaaacagagacgaaatataccgggttccgactctgcctaggaagtgtccaaatatgtttccaaatgatcctccttgaggtggtgcaccatcaaccaaaactgcccggtattctctgtaatcatgaataaacctttcaaattgttgcctgtctgcgtcggatagaggaacatctgtaggatatcgttgataaaaagcgattagctgcggaatatttttctccttaatggagtcattcacaaatggattgtgaaagatgttaagcaaataattcctgtgttcctcataacttgaactgtttgtgttagcagttgcaaaaggaactatgcctaagaacacgcatattagcaagctgccaatagaaagccccatagcttgcttgatgggatgatggaaactaacagttgatttcacgaggagtgtcatttatatgaaatcaatttaatcacttcaagaatctaacctatgtctatatatacacggcatgtaattcctgataattgaagctcatttaattacagtttcttagaacatttatcagcgcaatattacttaactgctaaattagctaaaactaatgaaccctaatgcgcgttggcgttcaattatatttaaaatgtcatcgtaattagacttttcttcaataatgtgcgcgcttggcaaattaaaatccatattttaagcattgttcaattacaatgcccaaccgggcgtatgcgcaatatttacatatgcatttacatttctattaataaattcatgagttcgttgatacagagaggccaaacaataatctttcatatttaattagcgcgctgacatgggcattacggatctgaccatgacatcggaacgagagagcggagtcgacttcaccataccctttatgagtctgggtaagagcacatatatttcattctgcaatcaaaatgcttaatacaatatatattaattaaaaaaaatatttaaaatatttatttaattgaaagcattatcaattgtaatcactatttgatttaaatcacgaaacaattctaggaatcggcatcctctttcgcaaaccgatgaaggagccaccgaagctgttctccttcatgtccccgttttcaggagaggtttggctctggctgggtctggcctacatgggcgtatccatcagcatgttcgtgctgggaaggctatctccggcggagtgggacaatccgtatccctgcattgaggagccaacggaattggagaatcagtttagtttcgccaactgtctatggttctccataggtgctctacttcagcaaggatctgaactggctcccaagtaagaaatatttatatatggactatactatagtttctacgctaaagattatattttgtttaagggcttactccactcgggccgtggccgcttcctggtggttcttcacattgattttggtctcctcttacactgctaatctggcggctttcctcactgtagagtctttggtaacgcccatcaatgatgcggatgacctatcgaagaacaagggcggtgtaaactacggggccaaaattgggggagctacctttaacttctttaaggtgggccatgttatctatgaaagtctttatctcatatcgcaactgttttttcaggaatcaaactatcccacctaccagcggatgtacgagttcatgagggataatccccagtacatgaccaacaccaaccaggagggagttgatcgcgtggagaactccaactacgcctttctcatggagtccaccaccattgagtatatcacagagcgccgatgcacgctcactcaggtgggagcattgctggacgagaagggatacgggatagccatgcgaaagagtagatagctgagagtgtaggtgatgtgtcggaccacatcctgaccaggatctgtctttccagactggccgtacagggacacgttgagccaggctgttctagagatgcaggagcagggtctgctgaccaagatgaagaccaagtggtggcaggagaagcgcggcgggggagcttgttcggtaagtgatcagcctaatctcaatctctggcagctcgtgcatgtgtgggtgtgtgcaggacgcggacgaggactctggcgccgtggccctggagattagtaacctgggcggtgttttcctggtgatgggagtcggctccttctttggcatctttgtctccctgctcgagatggtgctgggcgttaaggagcgcagcgatgagaaccaggtatccgccaggatatattccagcttcgagaataccccgcctcacgatccgattagctggcctgcctttttttgcacacacacttgaaaacatttacatctccgacatcctccgaaaaacccacaggaagccccagactcggatgcctcctcgctgggattcgccaatttgggcggcgtctaccttgtcatgtttgtgggcagctgttttggcagtatttacggcttggtcaactgcgtggtgagcgtctacttgagagcgcgggagaacaaggtaacgcggatggagacctataaatatattccaatgtttcgtgactaaaagtggcggagaaaaggtcgccctaacggattcgtttcatcagcttcccagaacgacagctcggagccataaatacattcaccaccttttcatttgtgtcgtctttaatatttcaattttcctaatctcgttatgttgtctactacaatgccttgttcatgaatgctttatgatagatttcatccgcatgctactttcgcccttccatcagtaaagagtttacttaacatcaacactttcatatcggcaggtgagcttcaagacggaacttctcgacgagatccgcttcattttacaatgctccggcaataccaaagcggtgaagtatccgaaaaactcttcgcgatcgaatgccagctcgaaatcgaaaggctcttccatgtcagtggattcattgcccgaggatacctcagaagctgacgcatctggcaagcataaccatggcaaaaagtaaatttaccaagcgattatatcgcttgttcacacagtgaaatctcatgtacggaaatttaaaataaaaaaacaacagagaatgctatagtcgagttcgccgactatcagatagtggaaatgcaaacgcgaaatttgattatttttctgggatatcgttagatattgagaaataaaatgacaaaaatgtaaaaattgtttaaaagtgtgtgcagtttttcagcgtttcgatggtgtaaagaagggagtggccaaagtgtttttggtataccaattttaattggcaagacaagcgaaaaaaaaaacaaaaaaaaataaaagcatttttcaaaaatgtggacgtggcaactttgtgtccctccgacttgtcctgcctactatcccgcctaatataccgctatcccgccgagtgtcccgccgactgtcccgtcgtgtcactatatcataatgactagaagtaaaaaaagctgtaccacacaaacgatctaatggcatattaagcggatttcttggaattgttatcagttttgaatcgatgtgaaatgaaaatcattaattttaatgctcttctgtatcaagtgtactctacatgtatatggttataaacatgtcgaaaatagctttctccgtcctgcgatattgtaaaaagcttacaaatgattagtataaagttcaaatgtaagcaatgttcagcgcagctttaaagctcttacgatgatgatttccaacggcttacaacgtaaaatatgggttctataagtcagaagcagaggtcgctaaatagtatgtaaaaaacgtgtaaaaaacttaacgctactcaaacagttctacgcgtactaaacactctattacagatagagttatttgatcattagtctcattactcgttttgaaactaacaaacttatatataagtttgatttgtgagattattaaaatttgtgagttatttgagatattaccaatctaagtaaatatatgaaatatgcctctgtatataccta

SEQ ID NO: 11834 - DNA, 2993 bp, DROSOPHILA
atttagttcgacaaacaatcgcgcaattaattggaaataattgcggaattcattgcgcgtcaaccgcagaaaatatttatgcgaatttttgattacgattcgcggtaaaagccctttgagcgatgtggttcgtgaaaatgatttcaacagaagcgagttttccacttggcttcatcctaacgagcttgctattggcatttcccggttgccgaggagagagaacgaatgtgggtctcgtctatgagaacaccgatccggatctcgagaagatcttccacctggccatcagcaaggcgaatgaggagaatgaggatctgcaactgcacggcgtgtccgtctccattgagccgggaaactccttcgaaacctccaagaagctctgcaaaatgctaaggcaaaatctggtggcagttttcggacccacctcgaatctggccgcccgtcacgcgatgagcatctgcgacgccaaggagctgccatttttggacacgcgctgggattttggggcccagctgccgaccatcaatctgcacccacatccagccacgctgggcgtggccctgcgggatatggtggtggccctgggctgggagagcttcaccattatctacgagtcgggcgagtacttgcccaccgtgcgagagctgctgcagatgtacggcaccgctggtcccacggtcacggtccgtcgctatgagctggatctgaacggcaactaccggaatgtactgcggcgtatacgcaatgcggatgatttctcgtttgtggttgtcggatccatggccactctgccagagttcttcaagcaagcccagcaggtgggtctggtgaccagcgactaccgctatattatcggcaacctggactggcacaccatggacctggagccgtaccaacacgccggaaccaacatcacgggtctgcgcctcgtctctccggatagcgaacaggtgcaggaggtggctaaggcactctacgagagcgaggaacccttccaaaacgtgtcctgccccctgaccaacagcatggccctggtctacgatggcgtccagcttctggccgagacctacaagcatgtgaacttccggcccgtggccctcagttgtaacgatgacagtgcctgggacaagggctacacgctcgtcaactacatgaagtcgctaacgctgaatggcctcacgggacccattcggtttgactacgagggactccgcacggatttcaagctggaagtcattgagctggccgtttcgggtatgcagaaaatcgggcaatggagcggcgaggatggcttccaggagaatcgtcctgccccggcacactccctggagccggatatgcgttcgctggtgaacaaaagcttcgtcgtcatcacggccattagtgaaccctatggcatgctaaaggagacctccgagaagctggagggcaacgatcagtttgagggcttcggcatcgaactaattgacgagctgtccaagaagctgggattctcctacacatggcgcctccaggaggacaacaagtatggtggaatcgatcccaaaacaggcgaatggaatggcatgttgcgtgagataattgacagtcgcgctgacatgggcattacggatctgaccatgacatcggaacgagagagcggagtcgacttcaccataccctttatgagtctgggaatcggcatcctctttcgcaaaccgatgaaggagccaccgaagctgttctccttcatgtccccgttttcaggagaggtttggctctggctgggtctggcctacatgggcgtatccatcagcatgttcgtgctgggaaggctatctccggcggagtgggacaatccgtatccctgcattgaggagccaacggaattggagaatcagtttagtttcgccaactgtctatggttctccataggtgctctacttcagcaaggatctgaactggctcccaaggcttactccactcgggccgtggccgcttcctggtggttcttcacattgattttggtctcctcttacactgctaatctggcggctttcctcactgtagagtctttggtaacgcccatcaatgatgcggatgacctatcgaagaacaagggcggtgtaaactacggggccaaaattgggggagctacctttaacttctttaaggaatcaaactatcccacctaccagcggatgtacgagttcatgagggataatccccagtacatgaccaacaccaaccaggagggagttgatcgcgtggagaactccaactacgcctttctcatggagtccaccaccattgagtatatcacagagcgccgatgcacgctcactcaggtgggagcattgctggacgagaagggatacgggatagccatgcgaaagaactggccgtacagggacacgttgagccaggctgttctagagatgcaggagcagggtctgctgaccaagatgaagaccaagtggtggcaggagaagcgcggcgggggagcttgttcggacgcggacgaggactctggcgccgtggccctggagattagtaacctgggcggtgttttcctggtgatgggagtcggctccttctttggcatctttgtctccctgctcgagatggtgctgggcgttaaggagcgcagcgatgagaaccaggaagccccagactcggatgcctcctcgctgggattcgccaatttgggcggcgtctaccttgtcatgtttgtgggcagctgttttggcagtatttacggcttggtcaactgcgtggtgagcgtctacttgagagcgcgggagaacaaggtgagcttcaagacggaacttctcgacgagatccgcttcattttacaatgctccggcaataccaaagcggtgaagtatccgaaaaactcttcgcgatcgaatgccagctcgaaatcgaaaggctcttccatgtcagtggattcattgcccgaggatacctcagaagctgacgcatctggcaagcataaccatggcaaaaagtaa

SEQ ID NO: 11835 - protein, 951 aa, DROSOPHILA
MISTEASFPLGFILTSLLLAFPGCRGERTNVGLVYENTDPDLEKIFHLAISKANEENEDLQLHGVSVSIEPGNSFETSKKLCKMLRQNLVAVFGPTSNLAARHAMSICDAKELPFLDTRWDFGAQLPTINLHPHPATLGVALRDMVVALGWESFTIIYESGEYLPTVRELLQMYGTAGPTVTVRRYELDLNGNYRNVLRRIRNADDFSFVVVGSMATLPEFFKQAQQVGLVTSDYRYIIGNLDWHTMDLEPYQHAGTNITGLRLVSPDSEQVQEVAKALYESEEPFQNVSCPLTNSMALVYDGVQLLAETYKHVNFRPVALSCNDDSAWDKGYTLVNYMKSLTLNGLTGPIRFDYEGLRTDFKLEVIELAVSGMQKIGQWSGEDGFQENRPAPAHSLEPDMRSLVNKSFVVITAISEPYGMLKETSEKLEGNDQFEGFGIELIDELSKKLGFSYTWRLQEDNKYGGIDPKTGEWNGMLREIIDSRADMGITDLTMTSERESGVDFTIPFMSLGIGILFRKPMKEPPKLFSFMSPFSGEVWLWLGLAYMGVSISMFVLGRLSPAEWDNPYPCIEEPTELENQFSFANCLWFSIGALLQQGSELAPKAYSTRAVAASWWFFTLILVSSYTANLAAFLTVESLVTPINDADDLSKNKGGVNYGAKIGGATFNFFKESNYPTYQRMYEFMRDNPQYMTNTNQEGVDRVENSNYAFLMESTTIEYITERRCTLTQVGALLDEKGYGIAMRKNWPYRDTLSQAVLEMQEQGLLTKMKTKWWQEKRGGGACSDADEDSGAVALEISNLGGVFLVMGVGSFFGIFVSLLEMVLGVKERSDENQEAPDSDASSLGFANLGGVYLVMFVGSCFGSIYGLVNCVVSVYLRARENKVSFKTELLDEIRFILQCSGNTKAVKYPKNSSRSNASSKSKGSSMSVDSLPEDTSEADASGKHNHGKK

SEQ ID NO: 11836 - DNA, 4469 bp, DROSOPHILA
acgttgtcagtgtgtgtgacggttgttaatttcatttgacttgcgagggttttaatattgcaatggaaattcggtacaatttgccgtccattaaataagcacgcaattaattgtggcagccatgacaggcgtggcttgccaccaattaagtggaatactatatggctatatcgctatatcgctatatgtctatatggcatatagatgcccacagccccttggggtcgatcgcctacgccgtctataatccccagctaaacttcgagacatcgcatccggcaccgcaatccgaaatcggaatgctgatgaggcaacagagtggacgcggccggaaacaaggcactcctcccatcaatctgtcagacgggccagtgagtcctggatgtcctggtgaacgcagctcagctcccagcgggtgaggccagttgcccagacagttagtccgccaggcagtcagtcggtctgtcagtgagtcagttagtcagtgagcgagtgagtcagtcagtcaatcgaacaatcaatcatacggaatgacagctacgtcggcttaagtcaaaggcagtcggccaagaagggatcttgtctaacttacagtcgcaaaattcaatagcctgtggcaatcgcacttgcaactttaataattccaagaacgaagcagtcataatgtttactgaaataatgttatgccacaattggcacatacaagctcataatagtgttttattctgtttttaattgcactttaaaattgatgattgtattagccatcataggcatggcttgagctgttcatttagccatttgattttgtctacgttggttttttatcaagtttcttgccgtgtaaccttttttttttttttgggctctcccaacaatttgagctcctttttcgttttcgcattcccttaaacatttgctggggaaacacattgatttatatgccggcatcgccaaaaattgaatgttattgcttgaatggccccaatttacttaaaagctacgctcctccgccccactgcccctctgccgctccactgacccctgaccccattatacatgttgtgggctccactggctcctgattggtatttatgagcgtgtttatttattatatgacccaacacttgataaaattaaacggaaatggttggcaattttgcatttgattctgacacccaaacacacaggcaggcaaattcgcaaatgaactcatctgcccaatattccgaccataaagcatcccgaccaacggcactcacatataagttagttaagtatgtatattagtggcttggcaacttaccagaaagtagacagcaaatggcatcacgaccacggcgaccaggagatcggcgatggccaacgagactataaaataattcgtgaccgtctgcagggagcgctcgcggcacacggacaggatgaccaggatgttgccgaagagggtcaggatggggaacagaatcaggatgagcgcccagtagttgtggtccactgaaacgaagcgagttgtagttacattatatccgggatgcatccatccgcaggctctcctgctgctgccacccaaattccctggccaaagttcaccttgcaggaagatttcagggaaagctcaacgggcacgtaagtcaattacacaggcagtccgtttaatcaaggactctggctgacaactaattttaatggcaacacaagtaaggactagcacacaaagacgtgaatcttaaaggctgttttaatataatctatctaatatagagtgatgcatgttaccaacagctgcgttgttaaaaattaaagttatttcacatattaaaaatggcaaaatatggctatgtaatatgaaagttattaaacttgaaatacctttatcttcattatgaaacaaattaaacaaacaaatatgtaggaacttttcttgagattgcacgaataaatgagttatgtaacgcgtttaaattaaattcttgctatcaaaactgatttctaaatgaacatctttataaataaattaattatcggcggtttcattcaaatactcccatcttagaaatctaaggaattctgttctcaaaacctagtcacctcactatccgatgaaaatatattatactaaagaagttgctgttgcaaggtttaaatgatgctccaacttgatgataatgtttaaaggtatttaatgagattcaaggctatctaatctaatttaataattttaaagcctttgaatgatattcaataatatctaatgagctttaatgatttttaaagatttataatgcggttttaagatgttaagttgtagtagtttgatgatttcgaatggtaatcctgcctcgtactcacccactctcagctcgccgcaggagtcggttaggttgagcgtctcgttggtgcagttcagccggtagccgtcgaggtacagtcccgtcaggttctgctcgaggagcagtccgctgcccctgctccccgtgatggccactcccggcgcaatggtgcttgttcccgaaaccgtgctcccattgtagttgggaaaataatcgttaaagttttcgagcagcagcatgaaggtgctgccccctgatcctccagcgccgcctacacctccgcccgccgtaccggccagtccgccagccacgcccacatccccagagccgcctccatcgtaactggtcgtcgagggcgccgttcgattgcccagcgtctcgcgcgccaccgttgctgtccgctggagcagttccgcatcaccgaagccgcccagcatgccatagtccgtttccgcatcagccacattgtccagggctgcctcctccccgctgtcgatcagcgcgatgccagcatcgccgccgtcgcccgctcctgctgcccctccgcccgccagctgttgttccacaaagctgcgcagcgagtaacgcccccgctcaccatcctccgcactggagttgctctgggctggctgcgtgctgttcagtgcctccagccaggccagggttccgttggcgcccgtcaccgccaagtttgtgctgttctcgggcccgcccactgccgcctcactgcccaccgaacccaagagccattcgctgatgtcgtcgatcagcgcgtagccggcgtcctccgccgccgtttccacatcctcgtagagcggcaagtagccggctggcattgtggggccctcaacgcccgcctgcgcatcgctgccgttcgccggttgagagctgtccgcttccaccgccaggtggtgatttatccacgtggctcccgcggatggggctgccgtggtcgaggtggaagcagcggctgtgctcaaggtcgccgatgtggttgctgccgttgctgcagttgccgcagttgctcccgttgccgccgcagttgttgccgccgtgctgctcagtggctgggctgccatggtgccgccggttccgctgctgctgatgccccgccgccaatcgaatgggctcaacatctagtggggcgggggcgtggcagcggaggcgagctgcaactcctgcaacgccagcggcatgtttccgtttcctgcagcgaaagagacgaagttcggaggtgagaaaacataaatcacaaaaatttccattataatcaaagttcttgaagatagttcttaacgatacgcacaactaagattacaattttaagcctaattggtcgcgttaatgttgcttaatttgataaattcttgtaatccgcaaatgagagtcatggttcttttcgacttaatatttttaggatatctaaaaaacaaagtcgttctcaatttttcctacttacacattacacattgcatgccccttcgtttgcattttcaacacaaggcgtacttcatgcttgaccacgcccccccaaccaacacaacaacataccatccagcaccacgcccccatgccattttggacgtacggaccctttgcccaactgccatggccgcatgtttaattaactctttaatcaatttattgtcaattattctacaaaaagcgacagcgaaaattgtgtaatttaattaaattagcaaaaggtttttgtgtctctctcgccccaccaaccattccgcccactcccacttccattctcgcaaccaaaatgccacgcccccatgctcgacgctgtcttgcttttacacattttgcaattttcgcttttgtatttgccaattggcgctgattaaagccgcccgagtcgatgggccataattaaaagatggcctaatgagaggcgaggcgagtacgtctcgagttggctgggggtcaaaggtaatcggatcggagtggtcttaagtcccctgccttctgcctctgtcttccggagatcgggttattcgaactctgagcttgtggattctggactctgaattctggattccggatcggaggcagagatccgagagctgcacacccagacggctggcactaatccaatttgggcacacttccaggcgacgagaggca

SEQ ID NO: 11837 - DNA, 1389 bp, DROSOPHILA
atgttgagcccattcgattggcggcggggcatcagcagcagcggaaccggcggcaccatggcagcccagccactgagcagcacggcggcaacaactgcggcggcaacgggagcaactgcggcaactgcagcaacggcagcaaccacatcggcgaccttgagcacagccgctgcttccacctcgaccacggcagccccatccgcgggagccacgtggataaatcaccacctggcggtggaagcggacagctctcaaccggcgaacggcagcgatgcgcaggcgggcgttgagggccccacaatgccagccggctacttgccgctctacgaggatgtggaaacggcggcggaggacgccggctacgcgctgatcgacgacatcagcgaatggctcttgggttcggtgggcagtgaggcggcagtgggcgggcccgagaacagcacaaacttggcggtgacgggcgccaacggaaccctggcctggctggaggcactgaacagcacgcagccagcccagagcaactccagtgcggaggatggtgagcgggggcgttactcgctgcgcagctttgtggaacaacagctggcgggcggaggggcagcaggagcgggcgacggcggcgatgctggcatcgcgctgatcgacagcggggaggaggcagccctggacaatgtggctgatgcggaaacggactatggcatgctgggcggcttcggtgatgcggaactgctccagcggacagcaacggtggcgcgcgagacgctgggcaatcgaacggcgccctcgacgaccagttacgatggaggcggctctggggatgtgggcgtggctggcggactggccggtacggcgggcggaggtgtaggcggcgctggaggatcagggggcagcaccttcatgctgctgctcgaaaactttaacgattattttcccaactacaatgggagcacggtttcgggaacaagcaccattgcgccgggagtggccatcacggggagcaggggcagcggactgctcctcgagcagaacctgacgggactgtacctcgacggctaccggctgaactgcaccaacgagacgctcaacctaaccgactcctgcggcgagctgagagtggtggaccacaactactgggcgctcatcctgattctgttccccatcctgaccctcttcggcaacatcctggtcatcctgtccgtgtgccgcgagcgctccctgcagacggtcacgaattattttatagtctcgttggccatcgccgatctcctggtcgccgtggtcgtgatgccatttgctgtctactttctggagccagtggagcccacaacatgtataatggggtcaggggtcagtggagcggcagaggggcagtggggcggaggagcgtag

SEQ ID NO: 11838 - protein, 462 aa, DROSOPHILA
MLSPFDWRRGISSSGTGGTMAAQPLSSTAATTAAATGATAATAATAATTSATLSTAAASTSTTAAPSAGATWINHHLAVEADSSQPANGSDAQAGVEGPTMPAGYLPLYEDVETAAEDAGYALIDDISEWLLGSVGSEAAVGGPENSTNLAVTGANGTLAWLEALNSTQPAQSNSSAEDGERGRYSLRSFVEQQLAGGGAAGAGDGGDAGIALIDSGEEAALDNVADAETDYGMLGGFGDAELLQRTATVARETLGNRTAPSTTSYDGGGSGDVGVAGGLAGTAGGGVGGAGGSGGSTFMLLLENFNDYFPNYNGSTVSGTSTIAPGVAITGSRGSGLLLEQNLTGLYLDGYRLNCTNETLNLTDSCGELRVVDHNYWALILILFPILTLFGNILVILSVCRERSLQTVTNYFIVSLAIADLLVAVVVMPFAVYFLEPVEPTTCIMGSGVSGAAEGQWGGGA

SEQ ID NO: 11839 - DNA, 2726 bp, DROSOPHILA
ccttcggacgaatcacattggtcatgccaaaacctacgtggaggagttggcaacgctacccgatgccattgttgttgccggcggcgacggcacctcatcggaggtggtcactgggctgatgcgtaggcgcggcaatctctgcccgatcaccatccttccgctgggacgttcggtgcagtccgcatccaagcgcatcaacatctttggcgtcaaggacgtcgactatgtgaaaagtctttcgaaagcccttgaacctatgctcaaggatgagagccagtaccagagtgtgatccgctttgatgtgatcaatgaagaagatggcagcaatagccaattgaagcccatattcggtcttaatggtctgtcctggggtctgctggaggacatcgatgcggcaaaggataagtactggtactttggaccactgcgacactacgcttccgctgcgtccaagtcctttgccgataactggagccttaagaccgactatgtgtacacaccgccgtgtcctggctgcgttgactgtgctgctactgtgcagcgccaggagaccgcccagccttctggcctcttcaccagaggcctcattaagtacaagaataatccgggtgaaaccaagaggccgctcgtcaagaacgacaattgcagcaagaagttcgagggaagcgctgaagccagccagattaacatcaattgtgttcagaacaaggataactttgcggagctggaaagtcagtttataagctccctgcagccgggctgggagtttatcaaacaaattccggaagtcacgtgcagcaaaattttacccagcttggtggttaagagcaggactattcaactgcatccggatggtgaaatgggcgagaagttttactccatcgatggcgaggagtacgatgcaagacccattaaggtatctgttgttcccaatgctattaaagttttttgttgacattttaaacgtgtatattaattaaatcttgattaaatggcgctactagtatagcataacacattcacagcaaaagttaaccgctatttcttcccaaatccagagctgcgtataatcattctcaaacttctctgcggtgatcaaaatcaatttatcgtttattcgaatgcatgagccagttttacggcgcagtacttttattgtaaatgattttggcttgcaattaaagtgatcataccaacattttctggcaatacactcgatcgaacggatatagcgtggaaagtaatttaagcctaagtcaatccagttgatcttcgacgagcactcccacggccgctgcttgaacccatcgattctcggatgtcccacacgatccatgaaggcgcttctcgtgcgcagactcttgctcctcggtgcctccttcttcttctctaccagcgcaaagtggttggtctcccaggcgggaaagtggctaaccgaaatcgcatcactgtccgcatagaagggcagctcgtacgacgatcgcttgtatcccagatgatagctcttctcctcgggctcgcccggcggatcgatgctcatgtagcgcggattaaatgcctgtcccagaattttggccagcgactgcgtggatagctcggcgcagtaatcggcatcatcttgagccgtccccagcactgccaaccaagtgagcacaatggccagttcactttgggatttcatagttggacacagtatacgcagaaacatggctggctaaaaacagggctacaccaatatcaaccaattgatttatcgtgtttacagcagttatcgttgctctctacactgtaacttatttaggtactaaagtaataacagccaattcaataaaaagaaggattttaatttcagtgtcattgcgaaagattataaattaaatttattcatatatataattaaaacgcattctaaactttggataaatttaaagtttttttttttaaattaaactataaaagatgggtctaaatatttgaagtcataataaaattgtcatcataaggtaagtttcgctactcaagtgggctccagttttttcgactatcaaacataatagccgaaaaaactgctctgatggctttattcgaaaaatcccatctctatatattcgtaccgttatgttttatcaaaacaatagagagtatattgtacgttgtaaaatatacatatattaaatctgcattacttaaaatgattcctcgtattacaactactgagtgtatgctagtccttgggttctgtgtaaagtaaacgaatcgtacacgcgctgcagctcagacagacgatactcctccaggcaaacgattccctggagcgacggagatagcttcagcgcgcacgataggcagtggaccacatgtcgtttctcctgctccttgatgaacagcacattgaaaacctcaacctgcaaagagtgcacaaatgattaaataaactgcattcatatcacctttggaaactgtataaatatgttaataatactacgctaaatacctcgcattgtccgcagtaatgggatgcttcgttctttccgcgtccattgaaacgtatttccacacctttcgatttgacatactcttgtatgtgcaatacgtttttcaacgtttgcagcaaacacattctgaaaattacaaattacatatgtatgccctatagtatctgcataatggtgattcctatcatttgctaactcactttatcagctcgaaaagtttggtatcagaca

SEQ ID NO: 11840 - DNA, 726 bp, DROSOPHILA
ccctgtttttagccagccatgtttctgcgtatactgtgtccaactatgaaatcccaaagtgaactggccattgtgctcacttggttggcagtgctggggacggctcaagatgatgccgattactgcgccgagctatccacgcagtcgctggccaaaattctgggacaggcatttaatccgcgctacatgagcatcgatccgccgggcgagcccgaggagaagagctatcatctgggatacaagcgatcgtcgtacgagctgcccttctatgcggacagtgatgcgatttcggttagccactttcccgcctgggagaccaaccactttgcgctggtagagaagaagaaggaggcaccgaggagcaagagtctgcgcacgagaagcgccttcatggatcgtgtgggacatccgagaatcgatgggttcaagcagcggccgtgggagtgctcgtcgaagatcaactggattgacttaggcttaaattactttccacgctatatccgttcgatcgagtgtattgccagaaaatgttggtatgatcactttaattgcaagccaaaatcatttacaataaaagtactgcgccgtaaaactggctcatgcattcgaataaacgataaattgattttgatcaccgcagagaagtttgagaatgattatacgcagctctggatttgggaagaaatagcggttaacttttgctgtgaatgtgttatgctatactag

SEQ ID NO: 11841 - protein, 235 aa, DROSOPHILA
MFLRILCPTMKSQSELAIVLTWLAVLGTAQDDADYCAELSTQSLAKILGQAFNPRYMSIDPPGEPEEKSYHLGYKRSSYELPFYADSDAISVSHFPAWETNHFALVEKKKEAPRSKSLRTRSAFMDRVGHPRIDGFKQRPWECSSKINWIDLGLNYFPRYIRSIECIARKCWYDHFNCKPKSFTIKVLRRKTGSCIRINDKLILITAEKFENDYTQLWIWEEIAVNFCCECVMLY

SEQ ID NO: 11842 - DNA, 10538 bp, DROSOPHILA
acggacgggccacccaaaaggatccagaattcaggatcaacaaagccgagcaaataattgctatatagtctgtgtgtgtgtgtgcgcgcactgaacgtggtctccccaccctcgattcagtactcacccccatttccggtgggtggaaataggggagtggcagcagcactggcaaacgaagacggctgcagggaaatgacagtcgtactgctttaattaaagccgggacgtgggcgtgtgggcgtgaggcccgaaagtgtgcgctgcaataaaaggaggaaactgaaacgcaatgtggctgatgccgcggaccgtggacaacgcaacaaagtggacgaaattgcttttggaacattacaggataccactcgagttggacagcagtagcggcagcagcgagccaggcattaattttgattaaattcacctgagaaaattcgccttcaaatagcaactaacaaacgaacgacaaaaactacaaactacaaaataaagctaaatcaaactttaagtggtgaatatttcaagcagcggcgcggtgtgcatgaaattcacaggagatagcagcaaacaggttcgggagcagcaggagacatcttgtggaagtcggttttgcgtgccgctggcattgcaacagctacacatgaacacttccctgtgacacgaggtggtgcggagcgaagggaggcgtcgtcggtcgccaggacgccaggaaaacagcataatttcgtcaacggcagccatttgaactgtcgtcgccagagcataacccaccattccccaggatcccacaaccccaaaacccgaatccccataccggcccacatcatcatcagcagcaggagcagaagattcaggaaaggcgtcactgtcacagtcagcaattgttgtcagcaaaggaaaagtaacagaatcagtggaaccaccagcaggaccaagacctggcataacaacaccatcctatccaaaacttaataccccattcgccacgaccgccccgatgaatctgctgtgctgctgttgttgcagtaacatggcaccaaaccaacgcgtcacacgcaaatgggaactgtttgccggacgcaataaattctactgcgatggattgctaatgtccgcaccgcacacaggcgtcttctacttgacgtgcatcctgattaccggcaccagtgcgctcttctttgccttcgagtgagtatacgccccgtgctcatttcagccatttgttagtttgttcgtacactggaaaaaaaacgtagatttggtatatgttacggatagtaatgtttgatcttttctttcaagtataatctaatatacactagtttaagttataaaaatagcaacacaagatacccaaacttagttattgaaggcgcttagtcatagatttgaaagtatttaattgaaagtactagattttctttccgtgtgccaataggagtgtcagcgagcagttggcctcccttcagatgcattgtgtgcaaaatgtatacgttgctaattaagcattgcccagtaacccattccggggaccaacggatagacgatacccctggccaccgactccattccagcgggtcatgcttgatttccaattacgcccacattaatggtctctgactttggactcttgctctggtttcaacggtatcaacgggtttctcatccgttctctcattcccgactgttttctgccctctgctgtccgtctccgtatccaatggcatgtaattattgctgtgcaacgtggcgtatgcgttatgcttgggctggcaaaggacatggctatccaagctgctgctgctgctgctgctaccactttttctagctagatatctctgtccgggatgaatccgttgaattacgggtatccgtgtggattgcataatgggggtgggtgaatagtttcagcttttgatttgtcaatccgatggttatccggcattcaaatatgttcatgccactagcccgacccactggcaaaccacaggaaagttatccccttaccctgggttcagtttttaaactgaattttcatttcagactcgttcatccggaacacatttctatttcctgttgctaaatttttccgctattaaactctaatggcggtgtttaatggttgaaaattaaagtttttgaattattactatttcatttagattcggccaatccgaccactgcgtaccctcttatttaagctgcttttgtcatttgtcattcgaagcagtatatatgtatgggcaataaggacttgcttttttgtgatgatttgaaaaatttctgaagggctttcttatgtgagacaacacagtgaaataaacgagaaatttccaagaatattgtattctcttgctactatcacgttgctccaataataattcaaacgtccaatcaatttggtcggtatagcaactaaataaatatctaaacggcatgaacatctggaaaacccacaggccacaaacgtttaactagattcaatttggttgcacatgggcgcacattcaccctcatttttccgtagactggccaaaataacgcatacgacacgtagtgcaaatacaaatagaacgcaacgttaaagttgcaaaccattcgccattcgacggtgcgattagacaaaattatgctcaacattttctgcacgaaatcatttcagcagcgcagaaaggaattacatgtgcggaggtgctgtgtttcccacaaaagaaattgaaattcccatgcctaggaaccatatacatatatgcatctcctacatctccagctcctccatttatgcgctccaaatttattcgctgctgaaaagcggctgcagcgcgattttactttcattgcttgctttacattagcgcacagtcgagtggaaggcgtcccagtatggatgggcattacaatatctgcaatgcctttgagtgctcccatagatattcctgcagatactcgcacatatcctatagatgcacgcgaaaaaatcggaaaatttgaacagaaacaggaaggccggcccaaaccgttcagttcagttcagaggtgccttaagtttctcatgataagaaaacaacttcatgaatttaggttcaaatcaagttatgtttattttacaacttattttcgtagattttatttagtttaccatttatagtttatttatactgaaacggattttaaatagaattaaaccgaaacaaaacatttacaaaacacgcatagcgcctcaggccttaatttgcacgtagaaatgtatgtgtccctgaattaaatgaacacaaaatttgattgcactcatagatagttgtatctcaaatatatatatttattatttttttgcatgtaggcagcctggggatgtgtgggccaaactcaaattgtgtttcgttcgacgctccccggcactggaaatcgctaaaaggtagcacacaatgcatgagggggccctccttcgcatttcccattttctattttattttctatggcattgtcagcgatttgccagttgaatgcgagaaaagcattttttgaatgcattcctatttaagccttacttctatggctgtgaaggtatgggggtcgggggcctggagcgcaatcggcgttgtcatgacaaatgtatttaactattttcggttggttctgctgactgttcccaaaatgaggcaaactacatccacgtccatctgggacttgtcacacataattgtcactgagcactctgtgtcctctgtgaattgatggcaagtgaaagttgctcctgcgagtggtgaatgcggcgacttttgcgattcacaaatcgttggcacgcatcgggcattaagtaacaatgccaagctgaacattgtcctatcccccagccgctagtccttcgcatccttcatatccttcgcatcgcagctatccccgctgggatagatagtccgccccaatttggggccatatttgttcgggcctttccacacatttggggcattgccaaatcaccggggacatttgcatgcatttttgagcagggcatgccacactcgtcgcccaccaaatgctgcagtaaatccaatggcaagcgttgcctgcattttgccgtttggatgcactgcatgatgcaccggatgccagggaagtcggagattcacggaatcaaatttcaatgggtgcttgcagctgagacggaatccaaggatcagtagttttgaaaagctttctagtcatgctttgttcaatcagagagatttaagccattttaaagagctgagttgctactttttgacttcgtgttgttttcttaacaagaggcgtctctaaagtctcattaaattataccaaataaacgataatagtcattagagcttcttaggagtaaggatgctgtaatataacttttatttgcaaactcataatattttagtcataattggaatattcctagtttattaccaaatctacctattttatcttattgacatggctctagtttattactccattatgcgaaacaatctgctcaaatcaagatgttgccataaaccataatgacagaaacatcgttagattaatgatatatatttctttgctcttcgtccttctttcagctgtccctttctggcggacagcataaatccggccattccgattgtgggagcggtactatacttcttcacgatgagctccttgctgcgcacaaccttcacggatccgggcgtcataccgcgagcctccaacgatgaggccgcctatattgaaaagcaaataggtacgttactcatccgccccgtagtctcgcgatagcaatagcaatagcagtggcaatcgcagtcgaagtcctcgcgtccatccaaaaggaaatgtggccaaggtcgttgcctgctgctgcctgttgcctgaatatccttcttctccatctgccacgcccctactcacccgtacttgccaaacactcgcccactcaaacaaatacacacacacacacacagacagcacttgcgtatatatttgttttcacttcattaagtttgtgtgtgtgtgtgagagagcaaatgggaggaacgtaaaaagtaatgagcgtggcatgacatagaatgaaaaaagcgctaaaaaaatgggaaaatatatatgttccgtataaaaatcatcaaaggcgaacgctgcgttgcctttgcgctaatgagttgctgttgttgcctttgtataaaatatttaaaatgagaaaactttggccctttcctccaatttttttttttcatttttcttccacttgcatgtcaacatcgtcgatgttgctgatgctgcatttcctctgcgtcgctctggatgaatacgggaatatgtgcgtatgtacgtgtgtggataacccaaatcgacgtgagtagaggtgccaaactcgctgaacagtcccacatatcgaccgccgccgaggaccaaggaggtcctggtcaaaggacaaacggtcaagctgaaatactgtttcacctgcaagatcttccggccgccgagggcctcgcactgcagcctgtgcgacaactgcgtggaccgcttcgatcaccactgtccctgggtgagtagtgatggtggcactggtggcactggtggctctggtgggtgatgggcctgtcgagtgggtccttgacaaggacacccggcacctcgttagcggtggcgcatttttaatcacttcccatcaaaccgcctacttgctggctggctgtccccaaagcaaccgttctccaacctcatcctcatcgtcctggcccccattttggccaactgacattgagccgagagccgcattaggggctctggcgaaaagtgggccacaaaaccaacagcctctcgtcgtctctctgactttaacccaattccaacggcaaccgctgaggttgctaattttttagcaaaaataatttcagccgagcgaacgtcacgtttaaacaaaaagaaaaagcgcactcggacggactcccagcttttcctttgcttttatacccgccagcgacgcgctgatgcaacaagatgtggctccctatctctctctgtgtgtgtgtgtgtgtgtgtgtgtttggacaggaccaagcaaacaaaccacacttgcacaaacacacactcatgcacacactaacttaagtagccacactcatatttctgtggttctgttcttttttttttggcggggggaaatatgtagcatactttttgggatgggggcgccacatccccaagagactcaaatcatcgcacatacccttacggatgaatgtacttaacattcaattgagacttccaatactcctcggctttttaaatattcatactcactaattgagtgctttgtttgcacaccacttgtatttttaagccaaaaggtaaccaacccatttagtgctttattccctaattgattgctttgtctacgtatttaatttcccacgatgatattgatttgaaaattttcctttcaccttgattttagctttcgcaattcacaatcaatttagtttgacccgtaaaccatttggcttgaggaaggtcagttatgtcattaaatatttacactaagctgagcattcattttgacttaggctgtcacttttccacttttacgaggacttttgacattctctgaaatgaaatgctcatttatgtttcatttctatgcaaagaaactaaatttcctagttcaaaaaatgaaataaaataaatcataattctctccacttactgaaagggtgtaaattactcggtctgctagaactcaaagtctctgccagttagtgttgctgtcatggctttgccatcgccccacttcatttactggggctccggcgtaatttaaacccccggaggagagaaagtacggacacaatcgcatctgacggcttgaaggtcgactcgagccttttggggatttggttcactgttcgcggctccaaagaaggggtttgttggccacgaggatgggtgctggaaattaaggcatttctcggtcgtaattttggtaatgccacacatctcgtgaaaatgcaattaacctcattatgtttgccagctcgaaacggaatatcttaccaactttatttcgcctgtagtgtgtgtttataaaccattttaaatgctctctttgcaggtgggaaactgcgtgggcaagcggaattatcggttcttttatttgtttctagtctcattggcatttttagctgtatttatattctcgtgctctgtgacgcatttagttttatgtgagtacaacggaatagcaatccatatgcgatatgaatgatatgatttgtttataccaccggcagtgatgaagaaggagcacgaggtctttaatgtaatcaaggcggcgcccttcactgtgattgttgtgttcatttgcttcttctcgatatggtcggtgatcggcctggccggcttccatacctatctgacgactagcgatcagacaaccaacgaggatgtaagtatacagaaacaaatatattatatattggtaattaaatcagccacaagcttcctctttgaaaagaaatgattatgaattatgaaagtatacacattctaaagcattattattcgaattctttcctaggaaatttttaaaattatccagtgtttacacacatgaattgtgtattactttcgtactttcggtatacttgaaaatgacctttacacaatataaaactgctcttttcaacagctcaagggatccttctcctccaaaggcggtccacgcacccaaaatccctattcgcggggtaacatttgcctgaactgctgtcacatcctgtgcggacccatgacgccctcgctgatcgataggtaagtgaccagttggcagagttccagaccattatgctaattggattaaccggcagacgcggcatcgccaccgacgagttcatccagcagatgcagcaccagtcgagtccgcggcacgcactgagcgatgtgctgagtgcctcgcacatggtcaccacctcgcagcccatgatgggtggtttaggtggtggtggcatcggtggtgccggcggcgggatcagcattggtggagcggagctaaagccccgattctacgacgaggtaagcggccaatccagcggccacattgagtcaatccaagagcaccctttcaccaccgaaatctaaaaatatctaaatgtctgagcacactgcttgcttgatatcctttatatatttatatatatatatcaaatccaatcaaatcaaaactctcgtacgatgaactcttttgtgcacatcattttgacgatctgtaattcaaatttttttctttttgtgttctatgcaatgttctttttggtaatctactactacctactactactactcgtatcatacaccacaatcgacacaatcacaccacgaatacgaccacgataaccagtccaatccctcctcctcgacactggagggcaacggaggtgccatcaatggccatgggaatggccatggcaacggcttcgatcatccgccgcccagttacgatcttgtccaaaacggtaagtcccgcaagcatcaccagcagcgctgctccctgcaaaccctgctgccggccagtgcccagcagcagttcaaggccagcaaacacaaacacaagcaactgaagcagcacctggtggccgccgagttgcagcaacatgagggcggtccaggaccgggtcccaattcgccctcgcttctgcgctcgccggctacgtcctcctcctaccggttgaacctcaagcgttcgctgcacctgccgctgacaccgtcgtacgacgatgtccgccactcgccgctcccgctgctgcatcaccacgttcatgcccagcagaccacagccattggcacggtggcagcagcagcagcggcggtggcatccggcgccagcggcaccaataccggtaccggcactggtacgggtggttcctcctcctccgccaccaccaccgcacccacttcggtgtccgtgtcgttggccacggcaccaccgccgctggcgccacgacgcccgtcgacgctgcagctgcaggccagcggagcaatctccgccagcaacagcactctgaccaccatacacactacggcgccgcaagcgccggcgcccacggacttcaaatactattcgccgcaacgcagcaccgactccaatctgatgaggaactatccgttcccgaaggcggcacgcggaatgcgacgtcagtcgaccatgtcggtggactcgcaaaaggttaatatagccggctatcagccgctgccgatgcgtaaaccgtacaagcaccaggaggtgatgttcgaactaaagtcgccgaccaaccggctgacgattcgcgagtgcgactttggcggtggcggtgaaccctgcgatgacgatcagtcgatcaaggacagccagatctttcgtgttagtaaacgaaatctttatatgaatcaccggtcgccgtggaaggagcgcgaccgctactccaatctctatgagtattcgttcaacatcgatctcaactcgatcatcgaggatgcggcgggcagtgactcgtcatagtacgcagcagcagtccgctgctccgccgccctgggccacggtcacgtccatcgcatcggtgggctggtccgtctcctggtcatcctcctcgatcggttgttgggcgctgtacataaggccgggccctggccagcccgattcctaatgcttccacgcttttgctaaggcgccacatcgggtccagttttccggaatgtgccccacttattttggggcaactctgtttagctttagactcgagagcagcttttcgattatggctataactaggaattcgtttaggatttaatataagggcttgactaggcattgattaagttttttttgaatagtttgcaatgtacatatattttaatcaaggctgcaagccatttgttgaccgaactattttgaaacggttcgggtttatttcaaattcggactgtgatggattttatttaagaaactaattctataatgaaactggcttatttatttacacaataagattctaatcaaaaccggataaccctataattttgcccaaaagtcgcatttttttcaccatctatttaccatttatcaatgtgatttctttgatttcgatttgcaagcaaatattttgctcaactgagtgttgaaaacttggagccaaagcaacggagcgaataaatttaaaagtttgcagccttgattttaactttgagggaatctatcacagtctgattgtggcacatttgtgagactcacttggcttccaggatgcgcatagttgttagtgcaaatgtaaccgctacccttttgcagcctgaaaatccgcatctgtatccgtatccgtatactcgtattcgaatctgcatttgtgtgtttgcactccctctttttgtagaagtcgaacttgtatttgatttgtgtttaatgtttgaaaccaccaacccttgctgtagactttccccccgttccaccaccagttccagttccacttccagaccccccgaaaaacttggttcatagaaacttt

SEQ ID NO: 11843 - DNA, 2208 bp, DROSOPHILA
atgaatctgctgtgctgctgttgttgcagtaacatggcaccaaaccaacgcgtcacacgcaaatgggaactgtttgccggacgcaataaattctactgcgatggattgctaatgtccgcaccgcacacaggcgtcttctacttgacgtgcatcctgattaccggcaccagtgcgctcttctttgccttcgactgtccctttctggcggacagcataaatccggccattccgattgtgggagcggtactatacttcttcacgatgagctccttgctgcgcacaaccttcacggatccgggcgtcataccgcgagcctccaacgatgaggccgcctatattgaaaagcaaataggaggtcctggtcaaaggacaaacggtcaagctgaaatactgtttcacctgcaagatcttccggccgccgagggcctcgcactgcagcctgtgcgacaactgcgtggaccgcttcgatcaccactgtccctgggtgggaaactgcgtgggcaagcggaattatcggttcttttatttgtttctagtctcattggcatttttagctgtatttatattctcgtgctctgtgacgcatttatgatgaagaaggagcacgaggtctttaatgtaatcaaggcggcgcccttcactgtgattgttgtgttcatttgcttcttctcgatatggtcggtgatcggcctggccggcttccatacctatctgacgactagcgatcagacaaccaacgaggatctcaagggatccttctcctccaaaggcggtccacgcacccaaaatccctattcgcggggtaacatttgcctgaactgctgtcacatcctgtgcggacccatgacgccctcgctgatcgatagacgcggcatcgccaccgacgagttcatccagcagatgcagcaccagtcgagtccgcggcacgcactgagcgatgtgctgagtgcctcgcacatggtcaccacctcgcagcccatgatgggtggtttaggtggtggtggcatcggtggtgccggcggcgggatcagcattggtggagcggagctaaagccccgattctacgacgagtccaatccctcctcctcgacactggagggcaacggaggtgccatcaatggccatgggaatggccatggcaacggcttcgatcatccgccgcccagttacgatcttgtccaaaacggtaagtcccgcaagcatcaccagcagcgctgctccctgcaaaccctgctgccggccagtgcccagcagcagttcaaggccagcaaacacaaacacaagcaactgaagcagcacctggtggccgccgagttgcagcaacatgagggcggtccaggaccgggtcccaattcgccctcgcttctgcgctcgccggctacgtcctcctcctaccggttgaacctcaagcgttcgctgcacctgccgctgacaccgtcgtacgacgatgtccgccactcgccgctcccgctgctgcatcaccacgttcatgcccagcagaccacagccattggcacggtggcagcagcagcagcggcggtggcatccggcgccagcggcaccaataccggtaccggcactggtacgggtggttcctcctcctccgccaccaccaccgcacccacttcggtgtccgtgtcgttggccacggcaccaccgccgctggcgccacgacgcccgtcgacgctgcagctgcaggccagcggagcaatctccgccagcaacagcactctgaccaccatacacactacggcgccgcaagcgccggcgcccacggacttcaaatactattcgccgcaacgcagcaccgactccaatctgatgaggaactatccgttcccgaaggcggcacgcggaatgcgacgtcagtcgaccatgtcggtggactcgcaaaaggttaatatagccggctatcagccgctgccgatgcgtaaaccgtacaagcaccaggaggtgatgttcgaactaaagtcgccgaccaaccggctgacgattcgcgagtgcgactttggcggtggcggtgaaccctgcgatgacgatcagtcgatcaaggacagccagatctttcgtgttagtaaacgaaatctttatatgaatcaccggtcgccgtggaaggagcgcgaccgctactccaatctctatgagtattcgttcaacatcgatctcaactcgatcatcgaggatgcggcgggcagtgactcgtcatag

SEQ ID NO: 11844 - protein, 735 aa, DROSOPHILA
MNLLCCCCCSNMAPNQRVTRKWELFAGRNKFYCDGLLMSAPHTGVFYLTCILITGTSALFFAFDCPFLADSINPAIPIVGAVLYFFTMSSLLRTTFTDPGVIPRASNDEAAYIEKQIGGPGQRTNGQAEILFHLQDLPAAEGLALQPVRQLRGPLRSPLSLGGKLRGQAELSVLLFVSSLIGIFSCIYILVLCDAFMMKKEHEVFNVIKAAPFTVIVVFICFFSIWSVIGLAGFHTYLTTSDQTTNEDLKGSFSSKGGPRTQNPYSRGNICLNCCHILCGPMTPSLIDRRGIATDEFIQQMQHQSSPRHALSDVLSASHMVTTSQPMMGGLGGGGIGGAGGGISIGGAELKPRFYDESNPSSSTLEGNGGAINGHGNGHGNGFDHPPPSYDLVQNGKSRKHHQQRCSLQTLLPASAQQQFKASKHKHKQLKQHLVAAELQQHEGGPGPGPNSPSLLRSPATSSSYRLNLKRSLHLPLTPSYDDVRHSPLPLLHHHVHAQQTTAIGTVAAAAAAVASGASGTNTGTGTGTGGSSSSATTTAPTSVSVSLATAPPPLAPRRPSTLQLQASGAISASNSTLTTIHTTAPQAPAPTDFKYYSPQRSTDSNLMRNYPFPKAARGMRRQSTMSVDSQKVNIAGYQPLPMRKPYKHQEVMFELKSPTNRLTIRECDFGGGGEPCDDDQSIKDSQIFRVSKRNLYMNHRSPWKERDRYSNLYEYSFNIDLNSIIEDAAGSDSS

SEQ ID NO: 11845 - DNA, 8116 bp, DROSOPHILA
ctttccctggaataccagcagacccgtgaccaagccctctaaacagagcagatcataccgattggcgggtatgtcgattctgtatatgatctcctcgctggcattggccgccgctgccacatcgccctgttccttggtcagcatctgcttctccgtggtctgtgggcattatttcacgggattttaacatgtttgtactctttattagtcagcagcacctaccacttcgtccagctccaacccgaaggcaaagcagagatcctggaactcatcatcggctacgggaaagaggtaaatattagggagctccaagcgatgaaaacgtgattacacgtggacttttcaaactcactgtacgtcttgccgagcgcctcgaagagcagatcacgtttaactccaatggtgggcatattgaatgaatcacctgttagtcccgagctggcttttaacacagataaatgggcttaaacacaaattggcttatttcagaccggtgccagtgttgccaatttatggtgaccttattttgcagtactatcgcatgggcgatgttttgatggtcaccctgacttatgcaggagggtcacactattttccataaaatagattgtgcacactaagagattgatgaaaactaaataaatcgactcgttcacactaagctcaggggtaattttgagttacgtttaagttctcatatatttcatatttcattttgattcaaatattcacttcaaatatttatttttaaaatactgtaaaatatatatatatatatattcaattatgtaaatacatcgcagtgaactaaatacacaatttaaatggtaattagttaaatactaaatacaacttgccgtttccttttacatcataagattcacttaattagagatatatatttgtatagctaagtgtataaggcccccaaaaacagtccgggcgcgcacaaaatgattgggcaaatgggatcggaatccaaattaaaggatacacatttctaatcaaatatagttatatttactaaaaatgttttatggacgtggtcgctttccgtaaaatttgactgacaaaaacttattttcgagtttcgttagttaccaattttgacctattgaccatcgaaacggcaacgtatttgatcaatgcagtgcctgtttgtcgtattgggggtctactgttgtttctgcattgctgcagccggcccattcggttttgccgcacccaaattcttataagccttgcccccgttgcgctcccattcgcgattgaactcgtgctccaggatctcggcgccgcgcttgcgcgtcagacccgtctcctccaggctcagttcgcacatctgcatgtcgtccgttccggctaccagtagaattggcggcttgtccgcatgcagttccatctggcgtgcgatccactggccatcaaagtgggcataccacaggccgcgcttggctgcaggggatttatcattaaactttgaatatttcattattttatagtcgcggcgaacactcactgttgtccggcgcattggctcgcatgaagggaatccggaagtagcgatgctgggcggtcacaatctcctggattggctgaaccaaaggcggctgcttgaaggctgcaatcgatatggttgataggattataaaataaaatatagatttcagtgctatttacttaccagcttccataacgctgcgtggcgcacgctcgttttcatccatggtggtgcgcttgcggttctttgccttccaggcgtggtacaccttcaagcggcgatggaactcctgacggcaggcctgcaaaatcatgggattaatccaagtgttaagtgagcaattccttttgaagacttacctccagcagctcaatatcacaggacgtgttgatagcatcacgcagctccgagtacttccacttggacaagtcgtacttctgcttgcccagggcctgttgttgggctcgaacattttcggatctggcacaggaatcgcaagaacaattagcatcattttcaattaaattctttttacaaagatatgtacatatgtatatattcagcgcaagcaaacaaagtgagtcattgatggcatcaaatataagtaggagaatcgaaaggcaacaactaaaagccaatgggagtttgctagtagtagtataggctacagatgatttgaattagtgggcacgagcttattactttaggtgttagtaatttagttagtatgaaatgttttcaaaaccagcaccaactcacttattcaagtaccgcgaagcaatgtttgacacaacttgtgaaaaacttgttcaaaaatatacagaaagtaaagaagttaaaaagtagtaataaagaattgtttgttgatttgttttttttttttttatggtattcattcattatccaattagtgtttttgggaaagcaagaaaagattgacaaaatttacaagagtggtagacataggtaattcataaagcgtgctatacctgatcaatttgtttgggcccatgggagacgcgtcattgacaccactgtgttgtgttcgttgggttggagtgggtgttgggtggtggtgtttggttgtggaaagtgtggagtggattccgtgtgggggaaaaggaaaaagttggtgagtttaaaaaaataattaatatatattatatatacaatttaaatggacaacctaacaggccaaatctgataatatcctaatatttaaatagaaaatgtattatttttgtaacatcccaattactgtttcaatgtacggaaatcataataaaaacattacccaattatttctggccttgtaacttgtactaggttttgaccacataatcacatacttgcgtataactggtggactatcctccacctggccattggactcgttggccaaacgcagggccaactcgtgatcgcgacgttcctgttcgagctgctgccggtatttggcatcatccttggcttccttttccaactgctcctgcagcgccaaggcggcacgtctatcctcctcctcttgacgcaggcgctgagcttccgctgcctttcgtcgtgtttccatctccgcttttctgttgattttcgatgggaagttagttaaaaacttatatctaataaaaactaatacgcacagtcgcttgttttcgatttcctcgcgctggcgctgctcctccgcctccttggcggcccgctcggcctccagggcctcttggatcttgcgcagacgctcctgctcctcggcctgttgctgctccttaagcttggtgttcagatcaactgttagcttgttcatgttggccatgaccacggtgtacatcgagtccatttcccgttgagtaatgcgtggattcatctgttttagattaggtattcagtaagggactagaactggcatttatcataacttaccttgattttcttgatggcatcatcgatctgcctatagatatcgtttaccccgctaataatctcttcacgacccatcttcagtccacttgctatttcgattgtcttgagggtgttagtccggatcttgttgatcttgccaataccctggtagcgtgggcgatgctgcttccgggccaggaaaccacgtgcaatacgctgggctattagaacacacttgttgcggtagatgattcgattacgcactagggaagagaagtaatgaaaattacacaaaaggtcatataaagtagttttggtgactacttacgcttgatcacgcagagggctcccagagcggacttgacccaacgcgatcgaatcagccacttcttgaccttggccactatggccagcatattctccggatcagagcgcatgatgcgatcgaactccacgaatttaccaggccggaagaagaccttggtgataccgaacttgaagtccttggcgctcagattgagggactggaacatggcttcgcagaaggtgcgcgccggcagtgaaacaagttccggcggcagcaccgatttgtacatgctgtagagatcggcaaagagaacacgcgatggataaccgtgctccatgagttccagcaccgaaattgtgcccgaacacttcagttgggccagcgccaggctgccctcaaactgtcggtcgatcatcttgctgttgggcttgatgcagcgtatgaagttggtgccctgaaaggtaacattaattaaatttcgattttggttaaaagtccattgcgttgcctacgttctgctccagtttctccattagctcgcccagctgagtcttgaacttagatcccacggatataaagttaagctttccacgaaccgaagtactacttcccgaagggaaaagggtctgcagcaggggattatcgcactcctggaccaaaccctccagcgaagcatgcagggcgtcgttgttcttctcaatgaactgctccgtgttgtagcacacagctccggcaaagtgacgcaccaggaagccctcctcatcgcgcagagtgcggtgggcctttagtcgcgatgatctcggcagacccaggcgatagtgattcgcccaggacttgtgcacctcggcggtgaaatgcgagtacgagggcttcggaagcttggactcctcgtcgagcagcgtaaagatgccattcgacttggcctcgatcagctcgatgatgtcctggttatccgtgaaagtgatctcgggcacattgaggccttcgcgtttgtacagctcctgctcgtttttcaatatattatcgttgaaaaacttctgcagcttctcattgcagtagttgatgcagaactgctcgaaggagttcaccgtgaagtactcaaatccagcaatatcgagcacgccgatgtaaaagtttgaagcctggaagggaatgctctggttgatcaggcccacaatgcgatcgaatagtcgactgtagatggccttggccaaggcatcccgagcattgcttgcctcgtagatctttagaggaaccctgcaagaatgatggttttgtgagtcattaaatgattaccagatagatctcttcaaattcgatgatccttacatgataaccgtgcccttaaagccgcctcccttgctctgcatcactcgggataccagggcagtgcgcagctcagtttgatctacacccaacaggccactggtgatagtcagcgactgctccgaagcctccgaaacctggcagccaccgcgcacatcatcgggtatctcctcgaaagcaatgttgcccaggtggagcacagctgccaccagcgaatagatgcccagcttctccgtatccgagagtcccagacgacccaaggccttgtcaaggttgtggaagtgctgataatcatcgataatcggatccttaagtggacccttctgctggtgattcttcgacttttgtgagcccggtattagctgctccgtcttggcgttcgcaaagtactgtgtgcagccagagagatactgccaaggaaagttgaaaccatgaaaagagaacgattcagaacgattgttgggatagacctaccctgtaatcatctggcttgcccaagctcagcttatcgcgcagctgctgcggagctccggcgaggagcatgtagaaaacatgatagtttcgctcctcggcgctctgcgtacagatgcgactcttctccagcaagtagtgcgatatgtaaccaccgaccacctggcacttggcatcgtagtgcacctcaatgaactttccaaatcgcgaggagttgttgtttctggttgtcttggcattgccaaaggcctccagcacgggattggctacggaagtgcaatcattaggagctgttcctcaagcattcgccaatattaaacacttaccatccaatatcttggtctctatgggaccggcactgtcgtgcgaatagcacaggtatttgagcaggtatttggtggactccgtcttgccggcgccggactctccggacacgatgatcgactgggacaatttgtatacccgcatatcgcgtatggctttatccgctataggttggtaggggaatcggttactattttctataatataataatatcaattctagttaccaatagcaaagacatgaggaggcagttcacccagggaacgaccattgtacttcttgatggtatcgggtgcgtagagctcctttatctcacgatacggattcacggcgattagtatgttggccacatatgtctgcaattcaagttcttaacatggttccattttcgttcgttctcatttcgaatactcacgtagatcttgtctttgtagtaacgcgttttcaaattgtccagaaatgtggcctcgttgagcagcatgagttcgcctgaaacataaaatcatttgggttagagtaaaacgcttaaaaattgtactggttttatggccccgaccactttcactcgcctgtctgcagggttcggaggtcaggtaagcaagcgtagctaacgattaccccattcgagggttacgaaaaatacacagcattttgccagatctgtcccatacaattaccctcagtttctttcattcaatttgaagctaattcactgaaaattttcgctctaaataaatggtatctttaatgtgaaagccatcttatcgggttggtagataagatcgttacccgttgcagttaggaatgtgcctcgcagccctgatattcatttaagatcactgacgttcgaaatcttaatctttaccctacttaacttttaatatggtttcgctttctagactcacgtaaatgattcttcgcggtaaatgttttttttttatttttatagggaataaagaaaagtagttaattccaattccaagtggaattggaaagttcaagtgcagtagattttattcgttcttaaacttttctgcccaacttatataataatacgtgctagacttggcaacttggatacttacagttgtcatcgtgatcctggggtccatcgcacgaagagtggatatcatcgaagtgacacgtgcgcttcggatacttgcgatcggtgggcgtaacctcgaactccttggcgccgatctcggtgatccgaccctgtatatagccctcggcggcatctcgcacccacaccagttgggtgtcctccaacattttgcgcactgcaaaggggaaacagaaaaaaaaaacactatactatataccgaatcaagccaatgggcaatttcaaaagtttagcttttacatttattatgtcaggtacaagcgtatggcgcgggacaatatcaatgcgaaaaatcttatctacctcgcagtgccaacacagagagaaccgaggaactgggattccggccaggtacaaccaacgctccacactggtcgagtgtggaaagacaagtgagtggtgtggtgtggtgtggtgtagagtggagtggagcgatcggctggctggagagatttgtgtgtgactctcggcaagtcattagggctactaccggtgccggtgttttatggccattttaactatctaccttcctctctgcggctctctcaatatctctctcttttgagaactgaacaactgaggcagtgaggaactgaggaactggtactggcttaggcagtaccttcgactccctggcatatggataccattgttctttaactgctgctgtcgctgtggcagtttctgtttttcgtctgcctccgttcatttcgcctttcgtttatgtctattcgttgcttacctttcttggtcatgcactgccttctgccttctgactcatgggcgttgtgtgagtagacccgttgataagccccccggccacagacgcggttaaaataatagtaactgcctggcagtttagagataaacgaaaattagacgatgctcacttggctctaccttctcttgagttctcacttctataaagtttgaacagcttatgtactactatttaccatagaatagctgcatatatccaactgatcccaggtgtatgaccttgttatgcgatttgccaaacaactagcatcacttatatgtatatacacatatacgaacgtttaagaaaaccgcaagttcccatttacagccgtgtagctctggagctatagctctatatatgcatatatctgcatatatgtatgtaccttccccgaccgatatctg

SEQ ID NO: 11846 - DNA, 3954 bp, DROSOPHILA
ccctttgcagtgcgcaaaatgttggaggacacccaactggtgtgggtgcgagatgccgccgagggctatatacagggtcggatcaccgagatcggcgccaaggagttcgaggttacgcccaccgatcgcaagtatccgaagcgcacgtgtcacttcgatgatatccactcttcgtgcgatggaccccaggatcacgatgacaactgcgaactcatgctgctcaacgaggccacatttctggacaatttgaaaacgcgttactacaaagacaagatctacacatatgtggccaacatactaatcgccgtgaatccgtatcgtgagataaaggagctctacgcacccgataccatcaagaagtacaatggtcgttccctgggtgaactgcctcctcatgtctttgctattgcggataaagccatacgcgatatgcgggtatacaaattgtcccagtcgatcatcgtgtccggagagtccggcgccggcaagacggagtccaccaaatacctgctcaaatacctgtgctattcgcacgacagtgccggtcccatagagaccaagatattggatgccaatcccgtgctggaggcctttggcaatgccaagacaaccagaaacaacaactcctcgcgatttggaaagttcattgaggtgcactacgatgccaagtgccaggtggtcggtggttacatatcgcactacttgctggagaagagtcgcatctgtacgcagagcgccgaggagcgaaactatcatgttttctacatgctcctcgccggagctccgcagcagctgcgcgataagctgagcttgggcaagccagatgattacaggtatctctctggctgcacacagtactttgcgaacgccaagacggagcagctaataccgggctcacaaaagtcgaagaatcaccagcagaagggtccacttaaggatccgattatcgatgattatcagcacttccacaaccttgacaaggccttgggtcgtctgggactctcggatacggagaagctgggcatctattcgctggtggcagctgtgctccacctgggcaacattgctttcgaggagatacccgatgatgtgcgcggtggctgccaggtttcggaggcttcggagcagtcgctgactatcaccagtggcctgttgggtgtagatcaaactgagctgcgcactgccctggtatcccgagtgatgcagagcaagggaggcggctttaagggcacggttatcatggttcctctaaagatctacgaggcaagcaatgctcgggatgccttggccaaggccatctacagtcgactattcgatcgcattgtgggcctgatcaaccagagcattcccttccaggcttcaaacttttacatcggcgtgctcgatattgctggatttgagtacttcacggtgaactccttcgagcagttctgcatcaactactgcaatgagaagctgcagaagtttttcaacgataatatattgaaaaacgagcaggagctgtacaaacgcgaaggcctcaatgtgcccgagatcactttcacggataaccaggacatcatcgagctgatcgaggccaagtcgaatggcatctttacgctgctcgacgaggagtccaagcttccgaagccctcgtactcgcatttcaccgccgaggtgcacaagtcctgggcgaatcactatcgcctgggtctgccgagatcatcgcgactaaaggcccaccgcactctgcgcgatgaggagggcttcctggtgcgtcactttgccggagctgtgtgctacaacacggagcagttcattgagaagaacaacgacgccctgcatgcttcgctggagggtttggtccaggagtgcgataatcccctgctgcagacccttttcccttcgggaagtagtacttcggttcgtggaaagcttaactttatatccgtgggatctaagttcaagactcagctgggcgagctaatggagaaactggagcagaacggcaccaacttcatacgctgcatcaagcccaacagcaagatgatcgaccgacagtttgagggcagcctggcgctggcccaactgaagtgttcgggcacaatttcggtgctggaactcatggagcacggttatccatcgcgtgttctctttgccgatctctacagcatgtacaaatcggtgctgccgccggaacttgtttcactgccggcgcgcaccttctgcgaagccatgttccagtccctcaatctgagcgccaaggacttcaagttcggtatcaccaaggtcttcttccggcctggtaaattcgtggagttcgatcgcatcatgcgctctgatccggagaatatgctggccatagtggccaaggtcaagaagtggctgattcgatcgcgttgggtcaagtccgctctgggagccctctgcgtgatcaagctgcgtaatcgaatcatctaccgcaacaagtgtgttctaatagcccagcgtattgcacgtggtttcctggcccggaagcagcatcgcccacgctaccagggtattggcaagatcaacaagatccggactaacaccctcaagacaatcgaaatagcaagtggactgaagatgggtcgtgaagagattattagcggggtaaacgatatctataggcagatcgatgatgccatcaagaaaatcaagatgaatccacgcattactcaacgggaaatggactcgatgtacaccgtggtcatggccaacatgaacaagctaacagttgatctgaacaccaagcttaaggagcagcaacaggccgaggagcaggagcgtctgcgcaagatccaagaggccctggaggccgagcgggccgccaaggaggcggaggagcagcgccagcgcgaggaaatcgaaaacaagcgactaaaagcggagatggaaacacgacgaaaggcagcggaagctcagcgcctgcgtcaagaggaggaggatagacgtgccgccttggcgctgcaggagcagttggaaaaggaagccaaggatgatgccaaataccggcagcagctcgaacaggaacgtcgcgatcacgagttggccctgcgtttggccaacgagtccaatggccaggtggaggatagtccaccagttatacgcaatggtgtcaatgacgcgtctcccatgggcccaaacaaattgatcagatccgaaaatgttcgagcccaacaacaggccctgggcaagcagaagtacgacttgtccaagtggaagtactcggagctgcgtgatgctatcaacacgtcctgtgatattgagctgctggaggcctgccgtcaggagttccatcgccgcttgaaggtgtaccacgcctggaaggcaaagaaccgcaagcgcaccaccatggatgaaaacgagcgtgcgccacgcagcgttatggaagctgccttcaagcagccgcctttggttcagccaatccaggagattgtgaccgcccagcatcgctacttccggattcccttcatgcgagccaatgcgccggacaacaccaagcgcggcctgtggtatgcccactttgatggccagtggatcgcacgccagatggaactgcatgcggacaagccgccaattctactggtagccggaacggacgacatgcagatgtgcgaactgagcctggaggagacgggtctgacgcgcaagcgcggcgccgagatcctggagcacgagttcaatcgcgaatgggagcgcaacgggggcaaggcttataagaatttgggtgcggcaaaaccgaatgggccggctgcagcaatgcagaaacaacagtagacccccaatacgacaaacaggcactgcattgatcaaatacgttgccgtttcgatggtcaataggtcaaaattggtaactaacgaaactcgaaaataagtttttgtcagtcaaattttacggaaagcgaccacgtccataaaacatttttagtaaatataactatatttgattag

SEQ ID NO: 11847 - protein, 1253 aa, DROSOPHILA
MLEDTQLVWVRDAAEGYIQGRITEIGAKEFEVTPTDRKYPKRTCHFDDIHSSCDGPQDHDDNCELMLLNEATFLDNLKTRYYKDKIYTYVANILIAVNPYREIKELYAPDTIKKYNGRSLGELPPHVFAIADKAIRDMRVYKLSQSIIVSGESGAGKTESTKYLLKYLCYSHDSAGPIETKILDANPVLEAFGNAKTTRNNNSSRFGKFIEVHYDAKCQVVGGYISHYLLEKSRICTQSAEERNYHVFYMLLAGAPQQLRDKLSLGKPDDYRYLSGCTQYFANAKTEQLIPGSQKSKNHQQKGPLKDPIIDDYQHFHNLDKALGRLGLSDTEKLGIYSLVAAVLHLGNIAFEEIPDDVRGGCQVSEASEQSLTITSGLLGVDQTELRTALVSRVMQSKGGGFKGTVIMVPLKIYEASNARDALAKAIYSRLFDRIVGLINQSIPFQASNFYIGVLDIAGFEYFTVNSFEQFCINYCNEKLQKFFNDNILKNEQELYKREGLNVPEITFTDNQDIIELIEAKSNGIFTLLDEESKLPKPSYSHFTAEVHKSWANHYRLGLPRSSRLKAHRTLRDEEGFLVRHFAGAVCYNTEQFIEKNNDALHASLEGLVQECDNPLLQTLFPSGSSTSVRGKLNFISVGSKFKTQLGELMEKLEQNGTNFIRCIKPNSKMIDRQFEGSLALAQLKCSGTISVLELMEHGYPSRVLFADLYSMYKSVLPPELVSLPARTFCEAMFQSLNLSAKDFKFGITKVFFRPGKFVEFDRIMRSDPENMLAIVAKVKKWLIRSRWVKSALGALCVIKLRNRIIYRNKCVLIAQRIARGFLARKQHRPRYQGIGKINKIRTNTLKTIEIASGLKMGREEIISGVNDIYRQIDDAIKKIKMNPRITQREMDSMYTVVMANMNKLTVDLNTKLKEQQQAEEQERLRKIQEALEAERAAKEAEEQRQREEIENKRLKAEMETRRKAAEAQRLRQEEEDRRAALALQEQLEKEAKDDAKYRQQLEQERRDHELALRLANESNGQVEDSPPVIRNGVNDASPMGPNKLIRSENVRAQQQALGKQKYDLSKWKYSELRDAINTSCDIELLEACRQEFHRRLKVYHAWKAKNRKRTTMDENERAPRSVMEAAFKQPPLVQPIQEIVTAQHRYFRIPFMRANAPDNTKRGLWYAHFDGQWIARQMELHADKPPILLVAGTDDMQMCELSLEETGLTRKRGAEILEHEFNREWERNGGKAYKNLGAAKPNGPAAAMQKQQ

SEQ ID NO: 11848 - DNA, 3277 bp, DROSOPHILA
tactatgtgtggtggggggagggggtgcggtgattcgatggagaggggggatataatgaaacgacctatcagcaggcagataaaaaatattaccttaaagcgttacgcatttgaaacagaaagagaaatatatctatgcatatatgtagatgataataactaaagcatttacggatatatgtatgcatatgtataatacaaatgtggtgaacaatgttaacaatttgagggcattaacaaaggacaaattaaaggagcaaccaatactatggagaaactgtttatacaatacacgacgcatacatataaatgagttataggtaacatatacataatgataaacaatatacaatgtacggttagttatagtgtataatttttgtatttaagtttttacaaacagcagaaacagaaaggggttcgtttcgcagttcagagtttaaaaaacatttgcggtgtagccagaaaccgaagaaacaaagaaaagaaagccaactagaaatatcctgcaatatacgtgaagttgaaattgtcgagtcgatgagaaaatgttaacagcataagagttaaaagcaacaatgtggtgtattaaatgttcataaatctaccaataagtgtattttcaaggtgtaaaatgttatatgacatcaattaaaacgagttcgagatttcgacaagctccattgcatgagagggcaagaaatgttaagcgtatgttatgcgaaactaacaaaactacaattatacaaagaataaagatttataaatagagaataatggtgtattgctttttgggaaaggccatctaggtgttgaattgaataagaatgatgcaaactgaaacttagaaattagggtttcagaaattttttcttaagttaaagttactccaaatttcaaaaacgatataagcccgccaaaagtaatcgattcatcggtaacaattggtaagcttgttaatgatggtatatttgaacggattggccttggtcacactgacatggacaccaaaacacaagattcagaatatgtggaaattcatccaaaaaatagctatttaaggtaattcctgactgagatatgaataccttagcttaaaatcaattaatttcagtgcccaggagctcattgcgcatcgtcacactgaattcgaacctccgagtggaggtctaaagcgtactaaaaatgagggaactgcagcggaagttgaggagcttaaacgagcgcagggttcgaatttgttataaatatttaacaccaatatatatattattatgtttataacattttagagtatttgcgtgctcaattgtcagtgcctcgaatagaaagactcggaggaagggcacttgccatttggaacgaagagcaacaagtggcagaagtcaaacgcaaagatggtaaatttgaaaatttcggatacagtgagcagggaaagctctatttggagtactatgaagctatgttcctactagaagttgtgagttataaaatcgccctttaaattcaatcgagatatatggaacatgtacttttcagggacgtttacaactggagtactgtggtttagtagtttcaattgagcaagcatatgtgctcctcctcggcgagttggaaagcgaaaggtacaccaactacctagtttactcggctttatcccgatctggctatatagtagtgaaacatgtgcctcctaaggaaattccacaagaagttacgagtgcagattgtatttgggcactgctgaaggaaaaagtgggaaatctgccagtaccagatcatatcaaaacctcacccatttatcctatcgcggaaaagcgtatggaagatttaaaggaacttataacatctcaaaaggcagaagatcctaatattgttgtagatcccatagatttgaaattcggacaacgaaaacgtatggctgtggaaaaaccaatcgaagaacctgctagtaaaaaagaaaaattctccacaacgggccgaagtctcgtggatcaactaaaaggcgaatttgcatatgccaaattcgaagagatctttgaaaagttcgatttggtgcaacttgaaagccaagattataccaaagacgaattagatacgccctctgctttgaagataatctttgatttacatctgcacaataggggtttcaaaaaaagtgcacccaacgcaccaaactttaatgtaattatacttccatcgcaggtggcgtttcccacccacgacaaaatctccaagattaaacatcttctcaccgcaccactgctcgtcatatccgtaagcgaatccaaacagatacaggcctttctgtactatattagttgatgattgcccatacagcggatgtgccacctcaataaattgtacgtgttagtattttaaaagctcgaatagtttattttatttaccagacattgtttataaagaatgccggcacgagaatgcccaaaagaacaagcaaaactaatcaaaatatccaaatatccgaaaaaatgtatttattttgatattcaggcattgtttctgaacaatttgtgttcagctacggtattctgttagttataccctacattaaaaatctaatacaaatatgttacaggaggatgttcctatggtgaactcatgaccagaaaattcaaatgaagtatatccccatcgcattggtcaaaatggaggtaatcaggaggagacgggagacagacacaatgttaaaggaaatccaattaaatatggataagatcataaatcgtcacaatagcactttaaagagttggattcattactgttccaacacaagctgaaacaaaattagcacaaatatacatagattcaatgagttaagaagataagccaggatcataagaatcaaatttgaatttgatcatgacaatacgaatttcctacgacaatacactcaaaatttgaattgaccaattcgggttatactcgaaaacggccaaaataaaagcactgttaatcggaaagctttgtgcgaaaagctcgcgtgtctgtgcgcagtgaaaccgttagccgaatcggatcgaatcgaaacggaatcgaaagccttttcattcactcagtcactctcaactcacgcagcacagagggtgggtggaaaacagtcgggcggagcattcgagaatctgggcgagaatcgaccgaccaagtggcgctaagggaaggctagtaaggcatccggctaacaaactaccgaatatttcgcgatttcttcagcgaaaggcccgcagcagcgacgtgtatatctagtatacatcat

SEQ ID NO: 11849 - DNA, 1104 bp, DROSOPHILA
atggacaccaaaacacaagattcagaatatgtggaaattcatccaaaaaatagctatttaagtgcccaggagctcattgcgcatcgtcacactgaattcgaacctccgagtggaggtctaaagcgtactaaaaatgagggaactgcagcggaagttgaggagcttaaacgagcgcaggagtatttgcgtgctcaattgtcagtgcctcgaatagaaagactcggaggaagggcacttgccatttggaacgaagagcaacaagtggcagaagtcaaacgcaaagatggtaaatttgaaaatttcggatacagtgagcagggaaagctctatttggagtactatgaagctatgttcctactagaagttggacgtttacaactggagtactgtggtttagtagtttcaattgagcaagcatatgtgctcctcctcggcgagttggaaagcgaaaggtacaccaactacctagtttactcggctttatcccgatctggctatatagtagtgaaacatgtgcctcctaaggaaattccacaagaagttacgagtgcagattgtatttgggcactgctgaaggaaaaagtgggaaatctgccagtaccagatcatatcaaaacctcacccatttatcctatcgcggaaaagcgtatggaagatttaaaggaacttataacatctcaaaaggcagaagatcctaatattgttgtagatcccatagatttgaaattcggacaacgaaaacgtatggctgtggaaaaaccaatcgaagaacctgctagtaaaaaagaaaaattctccacaacgggccgaagtctcgtggatcaactaaaaggcgaatttgcatatgccaaattcgaagagatctttgaaaagttcgatttggtgcaacttgaaagccaagattataccaaagacgaattagatacgccctctgctttgaagataatctttgatttacatctgcacaataggggtttcaaaaaaagtgcacccaacgcaccaaactttaatgtaattatacttccatcgcaggtggcgtttcccacccacgacaaaatctccaagattaaacatcttctcaccgcaccactgctcgtcatatcc

SEQ ID NO: 11850 - protein, 368 aa, DROSOPHILA
MDTKTQDSEYVEIHPKNSYLSAQELIAHRHTEFEPPSGGLKRTKNEGTAAEVEELKRAQEYLRAQLSVPRIERLGGRALAIWNEEQQVAEVKRKDGKFENFGYSEQGKLYLEYYEAMFLLEVGRLQLEYCGLVVSIEQAYVLLLGELESERYTNYLVYSALSRSGYIVVKHVPPKEIPQEVTSADCIWALLKEKVGNLPVPDHIKTSPIYPIAEKRMEDLKELITSQKAEDPNIVVDPIDLKFGQRKRMAVEKPIEEPASKKEKFSTTGRSLVDQLKGEFAYAKFEEIFEKFDLVQLESQDYTKDELDTPSALKIIFDLHLHNRGFKKSAPNAPNFNVIILPSQVAFPTHDKISKIKHLLTAPLLVIS

SEQ ID NO: 11851 - DNA, 3912 bp, DROSOPHILA
gccacaggtcactgggctcgaaatcaatccttaaactccatcccgacactggggcctagacatttcaagcattcctgatactcatttccaaattaccaatagacattgaccatcgaagccagctctcaaagaaaagaaaatggaaaacgtgcgtgccacgagcattgaacaaaacgaagcaagtgtcctatgccggtgctaaaccaacctacaaattttctgtataaagaaaaaatgtaaaatgcgtatacaaaaaacaaaaatattatgaattcataaaagaagagattaattctttgaaaaaaaaaaatcgtaaaaatgcaatatgcatattgacaagtgacgtaagtccatccagtaaaagatacctattttgttgttaatattttttgataatcctaattatatttgccttatacttatccaacttgtttattacaactattttctattatttaatgcttggccaattattattgagaaaatacatacatttatttattaggcctatgaacgatttactatgtataaaattaagtttgatttaaatgttaaatttgtgtactttgctgcttctatctggttatgaaataattagccgttatcgagttaatataatttatgtagcattttaagatttcctttcttgtgaacaactgtacctttatatgcattatgattattaaaaaaaaaaaaaacaaataaaaaataaaacacattgttttttttatacctttgaatttatgtctgcagctctattgacataactatatacgttttggttttacaggtttcatgcttatcgatattttattacctatcttgtttaattgacttttgatcgagcgctacgagattaatgcaatcagactaaaaaaaaacaaacaaattttaaaagaggaaatttattaaaatacgattagattgcttccagcgcgtgtctatttttttggcataaatataggcccctgcgttaatctgtagcccataagcttccaacatgtgcccagtaactacatttcttgtcctcgtgctgaccctgttggttctggtctacgtgtttctgacatggaacttcaactattggagaaaacgtggcatcaagacggctcccacatggccatttgttggaagttttcccagcattttcacaagaaagcgaaatattgcctacgatattgatgatatctatgagtatgtatacaatatgagtgagaagggcaagctatagttatgttgtataatagtggagtcaaagcgcagtttatacttaatgggtgtaaaaatcagaacagtcttctctagagctaatataagttactttttgatgtgaactttttgtttttgcagaaagtataaagacacggacaatatggtgggcgtttttaccacccgagtgccccaattgctggtcatgtgtccggaatatatacacaagatctatgcaaccgatttccgtagctttcataacaatgaatggcgtaattttgtaagtactcgtaagtttagtaaataatggataatccattactgaattacaatgttcataggtgaacaaaaagacggacatgatattgggcaacaatccgttcgtgttaactggcgacgagtggaaggaaagaaggtcggagatcatgccagcactgtcccccaatcgagtaaggaaccacattaaccatctatccaatcaaaattctatctttgaattccgtaaggtcaaggccgtttatccagtatcgcagagcgtatgcaaaaagttcgtggaatatatcaggcgacagcagcagatggccacctccgagggattggacgccatggatctgtctctttgctacaccaccgaagtagtttccgactgcggactgggagtatcggcccagagtttcacggacactcccacgccgctgttgaaaatgataaagcgtgtgttcaatacctcctttgagttcatcttctacagcgttgttaccaacctgtggcaaaaggtgcgcaagttctacagcgtaccgttcttcaacaaggaaacggaagtgttcttcctggacatcatccggcgatgcattactttgagactggaaaaaccagagcaacagcgcgacgatttcctcaactatatgctgcagttgcaggagaagaagggcctgcacacggataacatcctgataaatacgatgaccttcattctagacggattcgagactacggctctagttctagcgcatattatgctgatgctgggacgtaatccggaggagcaagataaggtccgcaaggaaattggcagtgcggatctgacctttgatcaaatgtccgagcttccgcatctggacgcctgcatatatggtgggaaattctatcttgatctcttgatattcagtttctttaactacattataaaattttataattttagaaactttgcgtttgttttcaccgcaagttgcagcacgtaagctggtcaccgaaccctttgagtttgcgaacaagaacggacgcactgtgcacttgaaacccggagatgtggttactataccggtaaaagctctgcaccacgatccgcagtattatgaggatcctttgacattcaagccggaacgtttccttgagagcaatggaggtggtatgaaaagttacagagacaggggtgtttacctagcttttggcgatggacctcgtcactgtccaggttggtgttataaaaatttatctgaaaatcacatactacaataagtcgatctctacatttaggaatgcgatttgcgctgactcaacttaaagcagctctggtggaaatcttgaggaactttgaaatcaaggttaatcctaaaacccgctcggacaatcagatagatgatactttcttcatggccaccttgaagggtggtatttacctggactttaaggacctttaaataatagcaataatcatagtaagctttaagcttaaaaaactggataaagagaagttgtttgctcgaaataacaaaaattaaaattaaccttgattaatgcatgataataaaaaaaaaataaaatgcagtagagatttattactcaagaaaggcaaatgttgcggatgatccacaacaaggctcgatcgaacatggttcgacagtgatgttgcatgcgcaacaagttcgattgctagtgcgcaacatgtcggttgtaggttggccatccgattttaaatacttgcaagatataagatttaattgagattttataataaaaagtaataagaattatagaattatagatcaaggggtgtataaagaatataaagaaatcgattcaccatcataggcatctcaaggctcaagctcaagggcagttttggtggagatcgtaagaaatttcgaaatcaatgtaaacgtcaagacgcgatcggataatcgactgaatgacatctgcttgacgtattttgaagagcgatagtaaaatggctgaagtgttgttgtaagtgttgataagataatgcgccaattaaaaatgaaatcagaaatttgattaactacttaggtgctacacacattgtttgtccagagtatctatacccattactcgttaaatgaaaatgggtatgttgtattcctagaaaagtatgcaactgatagatggaccttctgaatacgacacattgttttttgttttcatcaagcatcgcactttgcaatcctacttatttatttaaaagtcgatacattgctatttttcctttaattgtttatggtttatgtatatgtcgtttaatttcacaaccgtttattccatttctctatgctactaaaaccgttcccttaaaacacatctttatctgcgtgctttagatacatatgccatgtacaataattgtaagtttgagcacttagtgaaatgacaagctgaaaagttctgtttcatcgtcatatcata

SEQ ID NO: 11852 - DNA, 1506 bp, DROSOPHILA
atgtgcccagtaactacatttcttgtcctcgtgctgaccctgttggttctggtctacgtgtttctgacatggaacttcaactattggagaaaacgtggcatcaagacggctcccacatggccatttgttggaagttttcccagcattttcacaagaaagcgaaatattgcctacgatattgatgatatctatgaaaagtataaagacacggacaatatggtgggcgtttttaccacccgagtgccccaattgctggtcatgtgtccggaatatatacacaagatctatgcaaccgatttccgtagctttcataacaatgaatggcgtaattttgtgaacaaaaagacggacatgatattgggcaacaatccgttcgtgttaactggcgacgagtggaaggaaagaaggtcggagatcatgccagcactgtcccccaatcgagtcaaggccgtttatccagtatcgcagagcgtatgcaaaaagttcgtggaatatatcaggcgacagcagcagatggccacctccgagggattggacgccatggatctgtctctttgctacaccaccgaagtagtttccgactgcggactgggagtatcggcccagagtttcacggacactcccacgccgctgttgaaaatgataaagcgtgtgttcaatacctcctttgagttcatcttctacagcgttgttaccaacctgtggcaaaaggtgcgcaagttctacagcgtaccgttcttcaacaaggaaacggaagtgttcttcctggacatcatccggcgatgcattactttgagactggaaaaaccagagcaacagcgcgacgatttcctcaactatatgctgcagttgcaggagaagaagggcctgcacacggataacatcctgataaatacgatgaccttcattctagacggattcgagactacggctctagttctagcgcatattatgctgatgctgggacgtaatccggaggagcaagataaggtccgcaaggaaattggcagtgcggatctgacctttgatcaaatgtccgagcttccgcatctggacgcctgcatatatgaaactttgcgtttgttttcaccgcaagttgcagcacgtaagctggtcaccgaaccctttgagtttgcgaacaagaacggacgcactgtgcacttgaaacccggagatgtggttactataccggtaaaagctctgcaccacgatccgcagtattatgaggatcctttgacattcaagccggaacgtttccttgagagcaatggaggtggtatgaaaagttacagagacaggggtgtttacctagcttttggcgatggacctcgtcactgtccaggaatgcgatttgcgctgactcaacttaaagcagctctggtggaaatcttgaggaactttgaaatcaaggttaatcctaaaacccgctcggacaatcagatagatgatactttcttcatggccaccttgaagggtggtatttacctggactttaaggacctttaa

SEQ ID NO: 11853 - protein, 501 aa, DROSOPHILA
MCPVTTFLVLVLTLLVLVYVFLTWNFNYWRKRGIKTAPTWPFVGSFPSIFTRKRNIAYDIDDIYEKYKDTDNMVGVFTTRVPQLLVMCPEYIHKIYATDFRSFHNNEWRNFVNKKTDMILGNNPFVLTGDEWKERRSEIMPALSPNRVKAVYPVSQSVCKKFVEYIRRQQQMATSEGLDAMDLSLCYTTEVVSDCGLGVSAQSFTDTPTPLLKMIKRVFNTSFEFIFYSVVTNLWQKVRKFYSVPFFNKETEVFFLDIIRRCITLRLEKPEQQRDDFLNYMLQLQEKKGLHTDNILINTMTFILDGFETTALVLAHIMLMLGRNPEEQDKVRKEIGSADLTFDQMSELPHLDACIYETLRLFSPQVAARKLVTEPFEFANKNGRTVHLKPGDVVTIPVKALHHDPQYYEDPLTFKPERFLESNGGGMKSYRDRGVYLAFGDGPRHCPGMRFALTQLKAALVEILRNFEIKVNPKTRSDNQIDDTFFMATLKGGIYLDFKDL

SEQ ID NO: 11854 - DNA, 5314 bp, DROSOPHILA
ttttcctctaacatccactagatgaattcctacggtttcaggttttctccctagctggtaagccaatgctttttcttctctaattggttgtcttgttagcggaaaagacagttcgaaattttctacttaataacaaaaatgaacccatgagccaaccaccaaaagggaaataggaatcaaccaaatgtgtactatgattagaatgattcatagaccaacgataacaaaacgaaaacatttaatactaacaattaaaatgtgtaccaatgattcaaatgctcctcaaagtgttctgaaaatagcaaagctgtcagggaaattatagtgaaattacgtgcttcttcctaagaattctcaataaatgtattgtcatttaatctatgacgtagaacctcggtgatatcttgtttgccaaatcgaaggtattttcttatcgcggctgagaaaatgagacatccaaatttcaaaacatctgttcagtattttctcacctatatcaaagcacatttaggcatttgctgcagtctgattccaacattcaaagtgtaagaacatattcgatttagcagtaggttagttcgaacaacagaaatagcacaaaaatagtgtgctttggaatattaaaaggctaaaggcggctagagtgcttggccattgtgtgcggtgtcgaacaagtttttccgcttggaaacgctcggggaacaggaactcattgggttacgactggcagcttccaaagtggccgagaaaaaatgaaatagttataaaaagaaataaaataaaataaggaatgaggatggtgagtgggggtggcaagtaaaaagcaaaacagaaacccaacgaaagtaattcaaaagtttgccacagagcagaacgggcggcaaaagccaagaaaaattgaactcaacttgatgtctaatttaaaacaaaccccaaaaccaagccggggcaaaccgagccaagccagatcctgatcccgataccagaagccagaagccagaagccaaaaacgaaaccgcaacaaaatttacaacttcaaaactttgccaacggcggctgtcctgcctgatgtgtgtttgagttttgagtttcgggggaatgttatttgtgtttttttttttttttgtttggttgaggggggggggaagggttgcagggtcaagtacataattgagattgaactgcaggaacaaagttgaactaatgcacaatctttgctggctgccaattgcagacccgccagccaaccgaaggagatgaatcgaacttcgctgtccagtggcagcaccagccgcagacttccggctctcttgtttgtcctgctgctctgcctggtggccaggaccaacggtcgtccttcgcaagaggacgagagcgacttggccatcattccgccggatgccgacaatgtggaggtttgtgtccgggtcgagcgtgaaatccaatccggcgttcataacaatctcccttttggcagatccataaggttaaaatagtgaacggtgtcatgcaagaagatcatccggttatcatgtacaaggaggacttcgtcagcgaggattatggtgagaaccagaaaatacagaacgtcattgaaatctgaccttttcctatttatgctatgcatatgtttaatatgtactatcctttcgcatagatccaacaaaaagcgaaacaaatcctagtcaccacaagaagcataagcggacgcggctccatcatgcaaagcaagtaactggaacagaaaagaaggaggaccagatccttttcgatattctgcccgacaagccgatcgtcctggaagaggacctcaaggctctcccacacagcaaagttggggctgcccaactggcggaacccatcaaggaagagtggctggctaagcatcccaagaagtaccacagtcgccagcgacgacaggctcctgtaagctttgagaaagtcctgcaatactactatggcactccggaaataaaatttgtgtctcccttaacttatacgcagtaagaataatgcacattcagtggaatggataagcacttacatggttatttcctcaaccatttcagttttcgcatttcagtgaagggtaagaaaccccatctggtggggcctccgaatcgtaggaatcagggccaagagaatatcccaacgccagactcggtcgattctagaggagaattcgatttaatacacaattcaaatcaagcggatgcggatttctcgatctacaaccgttcgtctacgactactgccaggccaatctttcaaatcaatgatagtgactttggtaagttgagtaacatacccttaattcccttaagcttatatcagttgaaaaaatgacttttcgggtatgttaaagttttaaaaatgactgaactcgttcaaaacgtgattaacataggccattggcagctaaccgcttctcaatttgctctctacgactatcgctttgtctttccaatcgacctgacctcttaccaacttttctgaatagtgacctcggcaccatcgtggcgtccgtcgaacagcatacgccggccgccccccacccgctcccccgttgtgggactgcccaccatgcggcccaacgcaaggcctgtcccacaaacagggggggtcgatagtgagcccaaggtcagcaggtgtgtgtgggcgatcgtcaactgctgcacgggcgagagcaagaaggtgcggtacaactgcttcgaggagttcggatgccatggagccttctgggacatcaatccgtgtgccgatgagggcgtgaagcaaggtgcgctcaccaaggtcctggacgccttccaaaaccaatgagcattgaattgatccactgacttgctcagattgtctcaaacgcaagcttaatttattttaaacatagattaagttatagcatttgtaaatatacaccactagcatttgcataacaatatttcgaattttaaagcgtaacagtatcactaaaaggctgtcgtgaataattgaactttaatattgaagagtacaccaatgctgaataacaatgctaatcaaatgcgttactcgtttgaatactttaaatgttgatacaatgtggagatttctaagggtgcgtagatatggtaatgggtatctcacagtcgggacactcgactgtaccatccttttatgtgtttttcttctttttattcaagcttccataacccggtgaaggacacaactaacagagggtttggtttccaactgccacacacatatattttttcagctgtgctgtcaattatcgcatccacttcgttacatccaaaaaccaaattaaaatttatccatttactcttacgacttgaatatgtttgtttaattggttgccaatcgagtgtccagccggattacatcgctctcaattcaattgcaattacacaatcccttcagccatatcaattaaccagctgccaggagtccactggccattgatggcatattttttaattggccgtctatatcgtgccgcagaacacaatttacacctacaaatccaattgcagctggattgttttggaaacacactaaaggatataattatgtatcttgttccttcataattggcacatgcatgcacacgtacacagaaccaaatgatatggtgatatactaagcgtaaattaacttttcatagagatatgtatgtacttccctgtactttggtaacatcaaatatcttgaataatcagattaataaaagtaatacgccaacgtaagagatccttactaattcgcaataaaaccgcaattgttataataaattcccaatcatttttcgcggtgtatgagctccagttgctgttgctcattaaagcccaaactcaagagcgttgtttcattaatggagctcacgaacagaggctaccaattggcgagagtgcacacaaacatagtcatacaccatcgagcacccaccaacttgcaccttagcccatggtttacatgccgatgcctcttaattgcagctgaactcgtgcctctagtcggattctcaccgcccgtgtttgccccatccatgccaggccgtcgtccgtcatccaggaaaggtaaggctggcaaaacaaaccgcaaaacccacgtccgccattcactgaccgacattcgaatcccgcttcccttgcaggcgccttccagtttccccaggacatcggctaccaggaaaacagcaagtgccagcgggcctcgaagctctgctgctcccagagaaatattggatcccagtacgaatgtttccatcaccacggctgcagcgagaacatcgcgaccattatctcaacctgctcctaggaaacgagtatgtcaatggtcccccatgtgtccacatatacattgcaaatttgcctgcttcacgagccttgcgttttgatagccccatttgcaacttttaggattcccggattagtcttggaacttccttattaaataataaataacttctagtcggctttgccagtggggctggcccaaattattaaaggatattctgtattgaactaaccaaattagcgattttttatttatggttcgtcggtatatgtgtaaaaaaaagacattttcaattaaagcagttaaggcaaccaattaaagttaattatttctcttatgcctttttgtcttttgaaaggggagggatgcccgttttttgcttatttgttttccaattgacttaaatgttttattactttacacttcattgaagatggattgcataaatttaggattaattgtttactacctagtaagcaattgcatttctagaaactaatttccgtgcaattggtggtcgcaatcgaaggttttcacctcccttccattcatttatttcttttctatcgccagctgtagtccttttccccaacacctctcgagaaaaggtcctagataacggtacaaagcaggacagcgacagcttgacaacaaatctccgctgagttaatttgccagcctaatgtcatttcccgtggtattcaggaacccaatcgcaggacgtaaggcgattacgcagagccacgcccaacgcccccttttcgaattttgttcagctgaatggatccgtttcttaagtattttttgagggcatccgtgatgggcttacgtttggcaggaattaagtccacggcacttggtcgctactagtcttaacctttttgcaggaaaattcgcaacttatttatatgattggggtgaggaaacttaatgaaactcaaacttttcggaagtatctctctttgttctttttaaaatattatagtttgcctttttacgattcaaattattaaactgcatc

SEQ ID NO: 11855 - DNA, 1393 bp, DROSOPHILA
aagccaaaaacgaaaccgcaacaaaatttacaaacccgccagccaaccgaaggagatgaatcgaacttcgctgtccagtggcagcaccagccgcagacttccggctctcttgtttgtcctgctgctctgcctggtggccaggaccaacggtcgtccttcgcaagaggacgagagcgacttggccatcattccgccggatgccgacaatgtggagatccataaggttaaaatagtgaacggtgtcatgcaagaagatcatccggttatcatgtacaaggaggacttcgtcagcgaggattatgatccaacaaaaagcgaaacaaatcctagtcaccacaagaagcataagcggacgcggctccatcatgcaaagcaagtaactggaacagaaaagaaggaggaccagatccttttcgatattctgcccgacaagccgatcgtcctggaagaggacctcaaggctctcccacacagcaaagttggggctgcccaactggcggaacccatcaaggaagagtggctggctaagcatcccaagaagtaccacagtcgccagcgacgacaggctcctgtaagctttgagaaagtcctgcaatactactatggcactccggaaataaaatttgtgtctcccttaacttatacgcattttcgcatttcagtgaagggtaagaaaccccatctggtggggcctccgaatcgtaggaatcagggccaagagaatatcccaacgccagactcggtcgattctagaggagaattcgatttaatacacaattcaaatcaagcggatgcggatttctcgatctacaaccgttcgtctacgactactgccaggccaatctttcaaatcaatgatagtgactttgtgacctcggcaccatcgtggcgtccgtcgaacagcatacgccggccgccccccacccgctcccccgttgtgggactgcccaccatgcggcccaacgcaaggcctgtcccacaaacagggggggtcgatagtgagcccaaggtcagcaggtgtgtgtgggcgatcgtcaactgctgcacgggcgagagcaagaaggtgcggtacaactgcttcgaggagttcggatgccatggagccttctgggacatcaatccgtgtgccgatgagggcgtgaagcaagctgaactcgtgcctctagtcggattctcaccgcccgtgtttgccccatccatgccaggccgtcgtccgtcatccaggaaaggcgccttccagtttccccaggacatcggctaccaggaaaacagcaagtgccagcgggcctcgaagctctgctgctcccagagaaatattggatcccagtacgaatgtttccatcaccacggctgcagcgagaacatcgcgaccattatctcaacctgctcctag

SEQ ID NO: 11856 - protein, 445 aa, DROSOPHILA
MNRTSLSSGSTSRRLPALLFVLLLCLVARTNGRPSQEDESDLAIIPPDADNVEIHKVKIVNGVMQEDHPVIMYKEDFVSEDYDPTKSETNPSHHKKHKRTRLHHAKQVTGTEKKEDQILFDILPDKPIVLEEDLKALPHSKVGAAQLAEPIKEEWLAKHPKKYHSRQRRQAPVSFEKVLQYYYGTPEIKFVSPLTYTHFRISVKGKKPHLVGPPNRRNQGQENIPTPDSVDSRGEFDLIHNSNQADADFSIYNRSSTTTARPIFQINDSDFVTSAPSWRPSNSIRRPPPTRSPVVGLPTMRPNARPVPQTGGVDSEPKVSRCVWAIVNCCTGESKKVRYNCFEEFGCHGAFWDINPCADEGVKQAELVPLVGFSPPVFAPSMPGRRPSSRKGAFQFPQDIGYQENSKCQRASKLCCSQRNIGSQYECFHHHGCSENIATIISTCS

SEQ ID NO: 11857 - DNA, 6406 bp, DROSOPHILA
ctaagtgcgcaatgtttttgttggccttgactgttagttaaagcctttccctaacaacttccccactaacccgatttttgtaaaccaacccattgtactcgtatctgttagttaattattaaaccttatttatattgttgactattttatcgcccttcccaacccaagtctaattttagaaaacactatttattaagtttccaactttgtgtccaacaattaaatgcaatcattccttccagtttagcctatagagcaactttacactgtaattaatgtattaaaagcgaagcaagcaaacaacaattaaaagaaaacatcacacaaccacacaccggtgttgctagaatttttgggaaaataatccgtgtctaattcctaacttaattcattaagttttcgatggaaaaacaaaacttgctgttaaaattttaattgcttgataaatcttgaacgaacgaattattatcactgaaattctggcaagactgcaagaaattgtttcaatatacacaaatatataaaacgaattataagctaacgaagaacaagaaaaactgtttactgccacacaatccttgtcaattttgctcatcgaacttttatacaccacttgtacttgtactatccgttcgaatgttgcaaatattaaacgaaaaacaaaacccagatggagtacattaatcattaaatgctaaactgatattattcgaaaaagtgttatcaattggcgcgggaaattcatcgtacaaggagtgttggaaaagtagacggtaccgcgtaattagggcaaggtacaggagaaagggtaaagtcaagtaaagctggggtggagaaggaaacatatttaaatatgtttaaaatggcttttagcacctacttaggtacgaattgaatagtaccctctaacgctgctcaacactgtccggctgttcgctgtcgatagcaatcgataggccatcgatgttctagcagagactatctatattgctgccaatcgctctgcgccaatcgagttgctgaaggagtagtgcaataaatatgaattaaatggtaaatataaaaccgcgacaggtgttgttttcgtgcctatttgctggccgtgttgttgttgccgccgtttcagttgttgttgctcgagtgcgctgcgtgtgtgcgtcgttatgcgacgagtgtgtgcatgagtgtgttgtgttgtgcggtgcccccaccaaaaaataacgaaacgaaaagcaaaggagctgcaaaaaaaatacgacaaatctattgatttttaacaatacgcacatggatagatacacataacggtaacggggagtttgtttttttcccacgcctccaaagtgctgagtgattgcaacaatcggcgacaacaaagggctagcaccagcaccaccatcgccccctggcaccacccacttgcaccacccaccacacatccttcaaccttcgcgtgggtggttgttgtgtctggctgcagcttcctgcgtttgttttgcctgcgcgaggacttttggaggccaagtttacgtgtgcgcaatcaaccacggacacggtagctccggaactcggaaactcgcaagctcggtcagtggcaaccgcggcggggggccctaaaaaaggtgtccacatatagacacatggacaggcaatagtgggttaattgcccgcattgattgcgctggccagccagggggtcaccacaaccagaggttaccaaaccagtgcagcaacaaaccgaagctcgaaacaatggaatacttattattagctaaactcaattacatttaacgaggtgagctaggacctgtaataagatacaaatacacatgagaatgattagggaatgattggggcaaacccaatttaaagcaataggcttaggtccaaaaataacaaatcagcaattttatagattggcattttactgtgctggttcctgttgtccgtatcgcgtatgtctaaacacacccggtaatccaggtatttctatgtcgatttaaatatatagtacgcagcggcaaggtatccagcaaaagtacgtcatcgacacgaccacctgtccctgatttttttctgggctgagctgcagcgcagtgaatcattgccgccttagatcatcgactaatcatccattctcccccaggcagtggcccacagtgaggcagcaatcgcagcagcagcagcggatgcagcagcagcagcactagagcagtagttgtagtagtatcgaagccgcagtccctcatacctggagaatcaaagttgttggtgcagccatgaactcaaactcctgcagtgacagcagtaacgagtccatggtcaatccaccgcacatacagatgaactttggccagcaggcgcagcagcagcaatcgcatcagcaccagcagcagcagcagcagcaggaacgttatgtgtgggagatgcgaacccgtagcccaaatgtgacgccagccagcacggtgctcaattcgccggatctcaatggcgagctgtcctacgttccgctgcagggtctttcgccatcgggcggaggtgttcagggatccggcagctatggttcgaatgcgggacgcgattctggcagctattactaccagcgaccgcagttgcatcaaatccgactgggtaggagtccgggcagccagtttgagacacgggatgtcctgccacaggtaatttaacttggagaattacttagaggcgtagtttcagtcactacaatgagatttttctgctttttctttaagggattggccagccccggctcaccaacggatgtgggcaaggcggacggtcagtgcctgcgtgatggtgagatcgtggtgttcgacgacattgacacaaactggatgaacaaggcatcgagtggccagcgtccaggcagcaatgaggatgtcctcaaggtgaccaaaatgattggacagctgccaatagccgagtacgagggttcaccgcgacgatttggaagtcaaccgaatacaaataccattaccatgggtggtcctagaaaacgtccgccgggtttcccgcaaagagtttcgcccaccaccagtgtcgctaataatgcaactgctgcagctaaagcatccgtgggcaaccttatcgatttggtcgaccacgaggaagagcgttccgggacgcttcgcgagaaaacacctactttcgactacctgtacgaattctcagagaccagaaaggtgctggaggagttcttcaaggcgaatccggaggacgaaaagcggtacacggattacaccacggaaagtggagacgatgtcgctagctcggtgagtactactacttccaagaagcctagaaacccatttaatattgcattttgattgactagcagccacaagagtacccagccacgcccatggagcaggcatatataggacagcggttggcgagaatacctaaagatgagctctacatggttcaccggtcgcctactaaaaagccagtgagtcataacgaaatgaaattcattaaaatagctaacgattgttcgatttctagcccagtgaccagaatccatcgacggcctaccaggagcataatgatattgagctgtacattgattcgaatagccgaagcagcggcgatttggcggacaccgaactggaggcaaatctgcgccgacactcccgaaactttaccctgtctcccgagacgacggattacgattcgaattgcggtgatttggacagtctgtctaacgacattaactgccccacggattttggtaaactgtatacgagcatgcctgtcctagaagatggcctgagcagtggccacgcctccgacacggagaacaacgtatccgtggtgtgtgacaagcagcaatcgtcccaatctcagcccgtccacgagcacaacggtaatggcgagcggctggagaacgactacaatgtgatgagcgccagcttggccacattgaccacagatgcctcgcaatcggcgctgataagcgacttcgcctcactgcccatgcccccggctccgcctccatcatcgccgccccaaatcgagatcgccgatgcaagtgaatccatgaccatggtcccagatgctgataatccactggacagtcactacggtgcggtttatgcagcagctttgggaggtactcacacagagaagtcagcgggatcaggactgggggtgacaccagtaactgcgggaggatctttgccatcgcaggctgcttcggaaatccaggaggccatgaaggagatacgttccgccttgcagcgtgctaaaacgcagcctgaaaaactaaaattctgtgacgaagtgctgcccacggatccagattcaccggtttgggttccacgcaaagggacgacgatctcgacggcccaaggtgcggcggcggatgaggaaccagacaccgaccttgaaacagatcgtctattgggtcagcagaggcacgatgagcaggatttcttcgccgatcaggtgaggaatgcaaacttacagagatatcagctcaaaataattacgaaataataattttacagagcctggctgataacaatgccaatgagggcacggatattgccagcaatgggcatctaaatggcacgtcggacaacaacaatccgaatcctatgaataatagcaagccgcaaacctactcgacggccaccattcgacaaggcatcggcacctcgttgacacccaattcgccggacatctgtcagattgtgggcacgaccgacatctccataagctcgccggaaaaactgcagttcaccaaaagtcccacgggctctattaaatccctgaaggactctgccaactcggacaagaaggccaaatcgcggaacaaagagggtaagttagcacagttgtcaacgccccttgttgttcgtttactgatatggaaaccgattcaacatttcacgctgcaattcaaatctatttaatgctgacatcacgtaagtctctgttacccagcagatgtttaggtttattaaactacccttatgtgtattaacaatcagaaatgaagaccattaacgcacttcgtaactaatttaaataatgttcgttcttaggtctcttggaacccaaagttctcattgagggcgtgttgtttcgggccagataccttggatccactcaacttgtctgcgagggtcagccgaccaagtcgaccagaatgatgcaggccgaggaggccgtttccaggatcaaggtaagtgaagtgaaaacctggtgatgcacacgaaagcacatccattcaaggaaaccccgctaggttatgctctatgtgtgtgtctaaaaactttctcgttcgcttttctcgttccctgctgcgcattcctctcgataggctttggtaagcgttcgttagcccctttcagtcgtcaaatgatagcattaagaattaaatgcattatataatatatgatttgctatttttttaccaggctcccgagggcgaaagtcagccgagcactgaagtggacctgttcatatcaaccgaaaagataatggtgcttaacacggatctcaaggagatcatgatggaccatgcgctgcgtactatatcctatatagctgacattggcgatctggttgtgctgatggctcgtcgtcgattcgtaccgaatagtgttgtggatccatcgatcaccagtccattaggtgatgttcccactccgggcataggcgaggaggagtcgccccccaaagagccactcagcaagcacaatcgcacgcccaaaatgatctgccacgtgttcgaaagcgatgaggcgcagttcatagctcagtccattggacaggccttccaggtacgcgaatattaataatattattggcacgtataattaacaatcaaaacctaaccaggtggcctacatggagttcctgaaggcgaacggcatcgaaaacgagagtctggccaaagagatggactaccaggaggtgctcaacagtcaggagattttcggtgatgagctggagatctttgccaaaaaggagctgcaaaaggaggtagttgtgccgaaggcgaaaggcgagatcctaggcgtggtgatcgtagagagtggctggggatccatgctgcccaccgtggtgattgccaacctgatgagttcaggagcagctgcccgctgcggccagctgaacatcggtgaccagctgatcgccattaacggcatgagcctggtgggactgccgctgtccacctgccagagctacatacgcaatgccaagaaccaaactgccgtcaagttcaccgttgtgccctgtccgcctgtcgtcgaggttaagatcctgcgtcccaaggcgctgttccagttgggttttagtgttcaaaatggcgtggtaattataaaatgctgaatttattcttcttattctaatccttctaatcatatgtatttat

SEQ ID NO: 11858 - DNA, 2831 bp, DROSOPHILA
ctctgcgccaatcgagttgctgaaggagtagtgcaataaatatgaattaaatggcagtggcccacagtgaggcagcaatcgcagcagcagcagcggatgcagcagcagcagcactagagcagtagttgtagtagtatcgaagccgcagtccctcatacctggagaatcaaagttgttggtgcagccatgaactcaaactcctgcagtgacagcagtaacgagtccatggtcaatccaccgcacatacagatgaactttggccagcaggcgcagcagcagcaatcgcatcagcaccagcagcagcagcagcagcaggaacgttatgtgtgggagatgcgaacccgtagcccaaatgtgacgccagccagcacggtgctcaattcgccggatctcaatggcgagctgtcctacgttccgctgcagggtctttcgccatcgggcggaggtgttcagggatccggcagctatggttcgaatgcgggacgcgattctggcagctattactaccagcgaccgcagttgcatcaaatccgactgggtaggagtccgggcagccagtttgagacacgggatgtcctgccacagggattggccagccccggctcaccaacggatgtgggcaaggcggacggtcagtgcctgcgtgatggtgagatcgtggtgttcgacgacattgacacaaactggatgaacaaggcatcgagtggccagcgtccaggcagcaatgaggatgtcctcaaggtgaccaaaatgattggacagctgccaatagccgagtacgagggttcaccgcgacgatttggaagtcaaccgaatacaaataccattaccatgggtggtcctagaaaacgtccgccgggtttcccgcaaagagtttcgcccaccaccagtgtcgctaataatgcaactgctgcagctaaagcatccgtgggcaaccttatcgatttggtcgaccacgaggaagagcgttccgggacgcttcgcgagaaaacacctactttcgactacctgtacgaattctcagagaccagaaaggtgctggaggagttcttcaaggcgaatccggaggacgaaaagcggtacacggattacaccacggaaagtggagacgatgtcgctagctcgccacaagagtacccagccacgcccatggagcaggcatatataggacagcggttggcgagaatacctaaagatgagctctacatggttcaccggtcgcctactaaaaagccacccagtgaccagaatccatcgacggcctaccaggagcataatgatattgagctgtacattgattcgaatagccgaagcagcggcgatttggcggacaccgaactggaggcaaatctgcgccgacactcccgaaactttaccctgtctcccgagacgacggattacgattcgaattgcggtgatttggacagtctgtctaacgacattaactgccccacggattttggtaaactgtatacgagcatgcctgtcctagaagatggcctgagcagtggccacgcctccgacacggagaacaacgtatccgtggtgtgtgacaagcagcaatcgtcccaatctcagcccgtccacgagcacaacggtaatggcgagcggctggagaacgactacaatgtgatgagcgccagcttggccacattgaccacagatgcctcgcaatcggcgctgataagcgacttcgcctcactgcccatgcccccggctccgcctccatcatcgccgccccaaatcgagatcgccgatgcaagtgaatccatgaccatggtcccagatgctgataatccactggacagtcactacggtgcggtttatgcagcagctttgggaggtactcacacagagaagtcagcgggatcaggactgggggtgacaccagtaactgcgggaggatctttgccatcgcaggctgcttcggaaatccaggaggccatgaaggagatacgttccgccttgcagcgtgctaaaacgcagcctgaaaaactaaaattctgtgacgaagtgctgcccacggatccagattcaccggtttgggttccacgcaaagggacgacgatctcgacggcccaaggtgcggcggcggatgaggaaccagacaccgaccttgaaacagatcgtctattgggtcagcagaggcacgatgagcaggatttcttcgccgatcagagcctggctgataacaatgccaatgagggcacggatattgccagcaatgggcatctaaatggcacgtcggacaacaacaatccgaatcctatgaataatagcaagccgcaaacctactcgacggccaccattcgacaaggcatcggcacctcgttgacacccaattcgccggacatctgtcagattgtgggcacgaccgacatctccataagctcgccggaaaaactgcagttcaccaaaagtcccacgggctctattaaatccctgaaggactctgccaactcggacaagaaggccaaatcgcggaacaaagagggtctcttggaacccaaagttctcattgagggcgtgttgtttcgggccagataccttggatccactcaacttgtctgcgagggtcagccgaccaagtcgaccagaatgatgcaggccgaggaggccgtttccaggatcaaggtaagtgaagtgaaaacctggtgatgcacacgaaagcacatccattcaaggaaaccccgctaggttatgctctatgtgtgtgtctaaaaactttctcgttcgcttttctcgttccctgctgcgcattcctctcgataggctttggtaagcgttcgttagcccctttcagtcgtcaaatgatagcattaagaattaaa

SEQ ID NO: 11859 - protein, 823 aa, DROSOPHILA
MNSNSCSDSSNESMVNPPHIQMNFGQQAQQQQSHQHQQQQQQQERYVWEMRTRSPNVTPASTVLNSPDLNGELSYVPLQGLSPSGGGVQGSGSYGSNAGRDSGSYYYQRPQLHQIRLGRSPGSQFETRDVLPQGLASPGSPTDVGKADGQCLRDGEIVVFDDIDTNWMNKASSGQRPGSNEDVLKVTKMIGQLPIAEYEGSPRRFGSQPNTNTITMGGPRKRPPGFPQRVSPTTSVANNATAAAKASVGNLIDLVDHEEERSGTLREKTPTFDYLYEFSETRKVLEEFFKANPEDEKRYTDYTTESGDDVASSPQEYPATPMEQAYIGQRLARIPKDELYMVHRSPTKKPPSDQNPSTAYQEHNDIELYIDSNSRSSGDLADTELEANLRRHSRNFTLSPETTDYDSNCGDLDSLSNDINCPTDFGKLYTSMPVLEDGLSSGHASDTENNVSVVCDKQQSSQSQPVHEHNGNGERLENDYNVMSASLATLTTDASQSALISDFASLPMPPAPPPSSPPQIEIADASESMTMVPDADNPLDSHYGAVYAAALGGTHTEKSAGSGLGVTPVTAGGSLPSQAASEIQEAMKEIRSALQRAKTQPEKLKFCDEVLPTDPDSPVWVPRKGTTISTAQGAAADEEPDTDLETDRLLGQQRHDEQDFFADQSLADNNANEGTDIASNGHLNGTSDNNNPNPMNNSKPQTYSTATIRQGIGTSLTPNSPDICQIVGTTDISISSPEKLQFTKSPTGSIKSLKDSANSDKKAKSRNKEGLLEPKVLIEGVLFRARYLGSTQLVCEGQPTKSTRMMQAEEAVSRIKVSEVKTW

SEQ ID NO: 11860 - DNA, 10315 bp, DROSOPHILA
actgcgtgagttctttctgttgttttttgtttgtttgctgctgccaagaggaaaccttacgattagtttgtgatttaattggaattttgttggtaaatgttggatctctcatctagattgcatgtacaatataatcgtttgatttgttttgggcgcgttctcatatcaagagctatttgtatttgtatatgtataactactatctaaatagcgttagtaatttacgtatattatttacacttgcattgtttttctatttttttgtcggtctatgtcttgatccacttatgtcttgcgttgtaaatatttgcacggatattaaaaacagaaatatttctattattgaacacagtattgcatttctccgtcacctcgctccttctccttctccttctccttgtacatgtctgcctgtcctctggtttggttcatcacttttttttttgctaagatcaattgaatgtcttttgtttttaactctgtttctgtcgcggcatatggtgcaactgctgccggggcagctcacaaaatttgcataaataaattctaacaacacgcttaggctatgtggttaagtaaaaaaaatacattaataatttgaatacagctgttgttgccaccgggcttagcgcacgcggtacccggtataaataataaattaaacatttataactattgcaacgctactcgacctatcaactatatcaaattgtatataaccgtatataaatatgtccttttgctaaaaattattattatttgtttgtttctttctttccttctttcttgcattctcgtttcgttactagtctaatgcattaaagtaataataactgcggattatcaacttgctagcttgacttttgtgtgtggttagtagaagaaagtcgaggcaaatattctatatactcgtacctattcgctagttacatattatcataattattatcattatcgttatcattatttctttatgtaggtaagcatagtgttacggttattatgtacaactgtctgggtgctggctctgcttgcgctttgactttggctccttcggatgctgatcgatcgacggacgacgcggattgcccaacgtgactaaggcgctggccacagccagaccagcggactggccagaaggcgcttgcgaaaggccacctgcgagtagagtgattcataagtaagacacatacattctataagatgattacttcatccttacccgtgggcagccggactagaagcgagagcacagcggctcggttgccactgcaaggctccaaagcgatgggactagggcattcctgtgtacaaataagatacaaaatatttcatagtttaatctcaaacttgtaatgtccaaattaggcctagctttatataatctgttctgtatggattccgtccgctaaaaagtcggctcataattttaagcactgaacgattgattcgcctacctttttgcgttttttggacaggtggccaatgccctccagcgtcagactcagatcaatactttcgcggttctcgatatcgaccagcacctgtgcaaaaatgtttgcagattagagtcaacgcaatcaagtttccttttttagatctcacctgggaaaacggtcgactcgccatctgttccatttcgacgaacaatcgctgacgccgccggaacatgtcgtacttctgcttaatcttccacaggacggcggccataagcagcagcagtaggaagcaggaggagaatgtgatgaagaattgctgcaggttgagcttgggatactgtgagaaggcaatttgtatccagattgggggctggaagtcgtgcacgaacacgtagaacgtggtcagggagctgttgtcatcgggcgagtgcccgaattggtagtccgtcttggggaaccgatgacggaacgttgagcagttaacgcccaccaagatcagcatgtccggcgagccagccctcttgaccgaaatgtccattttggccggcacgctgcacgtaatggtgaaatccgcatcgatctccggctttcccggtgagttcctgaagttaatttgtgtaaagtggcgatcctccttctttgaaagattaaacgtgaactggtagtcgatggtcagctcgtagtagcaggagccctttagcggatcaccgtggtaatggttctgggagtcgcacttctcgcagtgatcaccgactatacccttggtggtgcagaaacacttcccagtgtccggatgacagtaaacgccttggccgttgcaatcgcatcgctggcattttcccccgtttatgggattaccccagtatccagtgcgacacttctcgcagtgcgctcctgtcgtcagattattgcatggctgttcacaatgctgttggtcattacaatacgaatgcccgttgcaattgcaccgggggcaggacgtaaagaaccagtgctttagggcgcactccgtgtcatcgtagggtgccagtgctccgccaaccacgcacctgcccagaccggtgttagagccattgtcacaccaaccgcaagccggatcgtccaggcacatctggcagctgttgtagtagccacattgagcacttgacagtgccgtagtgctgcccacggccagtgccgttgattggatgggagccgaccggcacttggctgtgaaggtggtccactctcggcactgaccgtaaggaaagctggccgtgtaggcattgcggtccacgcagcgctgttcgttttggcaccagatgcactcgtcctcggtgcaattctggcagttggtcaatgaagcgcaggacggcgagcaggccacctcatcctgcgtccggttgagcgccaaaccaccgtaggaagtgtagcttttgcagcggttgtgctccgagtcccagcgacacgccaggttggcagagcaggcgcgacaattgtgcagctgatcgcacacagatgacaccaggtactcctcggagatggggcacgaatccagatgcttggcatttagcggcggactagccgtggacactgccatttgtgtggacgactcgaagaagaccgaagccattgaggtggtttcacgacaccgctccttgctgcacactccgtttccgcagtatgtgcaaccaaaggcggtggacacgcacgattgacagctggccagttcctggcaacggtgcacatcgtggagtaactctgaagtgagggtaagacggctcttcgacgggcaagccacatagtcgtattgctcgcgtccgtagatcgccgatctttgaacctgggtaatggcgatgcaacgcatcttttgcacgtcccaaatacacttcactccaggtcgcgctgccgtgcacttctcctgtttggtgtagtagctgcagtagcccggctggtagcgcagcatatcgtttagcagctggccattgaagccgccataaatgtacagcgactcctcgaacacaaccgaactgtgaccgaagcgggccagatccgcctgcaggtggcccggcatcggatggtagtgccacgagtcgcagtacacgtcgtacacgagcaggtcctggctatagcatttcgcgccgtagctctgcgatgtgtcgttgtgcgtattgccaccgaagaccatcattagtccctggttcacaaagtttgccgtgtgaagtagacgcgcacttggcgccgcagacagcagactccaaactcgcgttgccggttcataggcatacaacctagagctcagcacctgactggactcactctcggagactattccaccgtagacgtacaccttctccgtaagaaagtcgtacgcggcactgtgtccgtatccgcctttcaccacatagccggtggtggggacgatgcgccactctcgtgatgcaaagttgaactcctgcactgtgttgaggtagccgtagtttggagagtgaccgaagataacaaccatgtactggtagttgtttttgtccccgtaaccgggaaccaaggtagctgtgtgacccaccacatgcaggggtccgcacatagcggtggttcctccagtggcgttgcacgagggatccgctcttaccgagatgttcgcccacgttcgcgccgagacgtcgaaggcccacagttcgttggagatgccgtggcccttgaccactccaccgtacatgaagatcttgtcgccgtacatcactgtcgaggcaccgtatcgcttgtcaggaacctcgctaccatcctccgggtgcacagtctcccatacgttgccattgaagtcataggtgctcattagtttgcctcgtccgtacgattcgccgcccacaatgtgcaacgtgtctcgccagatggtggcgccatgggaggcgcttccggctggcgccggcgagtgcttcgggtggaccgtggaccaggcgccgtgggcgctgatctgactgcaatcgtcgccggcgaagccctcgtaacaggagcagctgtaagaaagtacgagacttaatgagaaattgcaaattcgaaacgagccatttgcgccctttttgcacatagattagtttctgcttgcatttcctcgcttttctagtttagtttctggtttacacttagttaagctactcaggcacgtaattgcattctaaatttagacaagtgacaaacaactagttatctacagataaccggtaaagagtttgttatataacacaaacaataacaaatgtcttaaagggctttttgaatactataataaaactcaatacgatgcaagcaaaataattaagggcttcatatatagagccaacttaccgttcctggtcaagacgacaatggccctggttcttggactcgaagcagttgttgggacaggcggctatgttgcaggcttcacccctgtacatgggatcacagatgcagtcgccatcgcgacacttgccatggccggaacactccacctctgaaatggtataagtagtaactatttagaatcttctctgtttaaggtaagctaaatgacaatcgtaccatcgctatccgagggacaactgttcatcttgtaggtgaggttgaaaccggacatgttgtaggcatcgtcactgaagaagtgcaccagcgccgtgccggatgtcgctatcacctgtggcactcgacgaatggagaagttgccgcgatacatgaggccactgaacgataatacggaaaggaaggaaagccaatggttagtcatgaaataaacatgttgtccaagcaaactaagctcacctgaacaccgccagcaggggcgagtccacgctgtcgccatcgtatatgtacagatgatcccagccgcactccgtggcgaactctcgcaggtggatccgtatgttggcggttcgcgacggattggtattgtgtcggcggttccagtgcggatgtctggcgtcgattagccagctgcacttgacactcaccgaatagttgccccatccgtcgtgtattgtgcccatggggtggtacatgctgcagattggaaagatggcaagagagagtggatatggcatccattagcttcgaggtggctaaataaatcaattcctctatcgatttagcgatatggagtgcacacgcaaatggcaatagcccgatgctgtgaggagataattgaatttgccggtcagccggccagcgcaattgcaatctacaattgatatgggtacagtgtatgtgagatggtataggttgctataggctgcatcgtccgtattgcatagactatctgtgtccgaactgaagccgttcaactgttgaccggccaagtccgttgtgcattctccactctttgggcatttgtttcccgtggcttttgttctttgaatgcggattacgagtgaaaatatgtctggaagacagtcttcaacgaaatgtgacaagttaagagcttgaaactcgagtagggtatccgccagtcgcatgccagtgccttcctttgtctgtcttattattttcttagtgttttgtttgcacatccgcttataaataactgctttcccctgatttagtcgcactgatttcaatttacagctgtgcgagcacaaaacgcagtgctcaacatactcatatgtacatatgtgataattaaatgctaccctgtagttgcagcagccgtcttaatagttgatctttcgtttcttaaattaaaaggtcaaacgaacatttgctcgttctctaacaacaaaaagtttatcggaaaataaaaatattcattaattaaatcatgaagcagattttaactattatacgttaatggcatagtagtgagtaaacactctttataagccctttgaaccgtgtgcagataaagaatggcttttcaccaagcaaaactccatatcttactaagctggcaaagataaaacgcgacataatgattctatatcattataaatggatggtacagctcgtaaaatttacatatattaattataatttgcaatatgtatgcacagcttcaagtacattgtttgccatttaaagaaactttgcacactcttctcggttatttgtttgttctagttttaacaattaactcacatagtcagtgtactcggagaaagtggaatcagcagccttccgcattctaaatgcgactcacgttacaccaagcaagtgccgataagtactgcgtatagtacactaacaattgcggccacaacaatagtgccgatgggcatttttgattattagaaaacactttccgtgtgcctacactaataattgcttatttatcacaatgacttatctagagggtacaatttggtttgcttgtttaatcgttttatttttgtcatcgctggccatcatatttttattattttcgcttgtcaaaaatatgaaatagaccagatcattaaacgagattttttttaagtttatggtatctagctttgtggcatcataaagtcagaaagtcataaaatattatttatgtggattgcaaggccatatctttcagtagttctaaaacctctttgatattgattatatctatgctaaattcatatagattcttagattctccccaagaaacctcatatttttacgcccgtagctgtaggagactgcgtcgtgtgggcgttgtgtctcggtcagttctaaactttgagtaaacactccgtccagccgggatgcagtcgtgcctgggggggcatatcaaacgatagccacgaaaaatcaatgtcggccaaagatatatttacacactcattggcagccagccggtgagtcactctgtgcactcgagcacagcttagcttacgcacagctttggagatggtagatggaaccacatatatgtatagcaatagctggggcatcggcaccgtgagctggagtaggtgaataggcgccctcgtcatgtggccattcggctggaatgcatttggagtgagggaaaccagttcgattgcgcccagtttttgcatagaaagccggcaaagcagttgcctttcgaaggcaacttgagctggtgaatcgttggcagcggttagatccgaactagcagcgaaaagactgaaaactcacaggcgataagcggacacacaccgctgataaggccatgcccttatcactgctcaatttgagcggacaagtgtgtggccccggaatttatggcccgctaaatgctgcgatccaacgatctcaaacgcaggccgggatcaggggtctgtgtggagcctgaaactggtttctggatggttggggcaggtgaggcgacgacctcaatgctcgagtgcgcaaattgcaggtcccatcatcagcagcacggcaggcaggtgaatgggtttaattattgtcaagatagaacgctcgcttatcgggcttcgcgagcaaatagccgctgttaagaaacataaacaaactatttcatgagctttatgacgccagccgtaagcgtgagcaaccaaactggcccaacgacttctcacatacatatctattaaatataatgtatagcattcgtgcaacactttaaatacatcagcctatgccgggcaaaaagctgttatctaatgtttggcaaaataaacattattttactgggataatattttgggattgatgtgaaagagttcttttaggtgtatatacacctcattatttattagtatgtcatttgacatttcttgaattagatatttttatagcactgttcctacttggttcgtcttaaagaagctttacagtagataagcaaagcgttttgtatctgactcaggtaatatgacgaatataacgttttccagaaatatatgtacatatattttccctgctcaatcagcacattagatggcaaagaagctaatgtggccaaaaagcagtggcctctgccccaaacaagttcaaagtcaaagcgaaataattgaataatccgcattggaagcgtcaggaggcgtagaaagcggccagcaggtgaaagaatgtctagagggaaatgggagaaagagaacgggaattgggagaaagtggatggtggagcggtgaagagacgagataaacacggccaagaacccgtccgaccagatgaaactgaaccgttggctgacacaaataggccggaccgaaaaggcagaggagatcagaccgaaaagaatggaaaattgataggatattgatggcttaaccaccacatcttactggactggagctgatctttggggtagctgatctatggtcaattatgtgacctaatatggagatcttactctatctatgtggcatgctgtgcataaccagccacttaccgcacttttccgccacagaactggcactccggtccctgccagccgtcggcgcagaggcactggccgtcctcctggcactggccgtcgttctggcagcggccgccgtgggcggtgcagttgaaggcggccgcccgatggagtccgctgaagcagccgtggaagaggagcagcgtgaggaggagcaggcattttcgcctgtacttggcgttgaatgtgggtgaggtgctgctccggttcggttgcttctgcggtggctccgccgccaggcacatgatttgcgtagttgattccaattcaccgcccgcccgcagcttcacatcgtcgtcgtcctgcagcgagtccttcgattttcgcgactattgcacaattttcctttgggcctttctctctggccgtttttcttttcttttctatttgcaatctttgcaattcggggcaacccaaggccccgcacttgaacgcacacacacacacacgcacacactggcacactcactcacactcgcgaacgcggctgcacaacaaacaatattggcaaaaagaaacaacaacctgcatccagcgactggcaaagttattgacaatttatttgtgaaacgaaacgagaaatctgctgggggtccagtgctgcacagcgttgcactgcttcggcgttgcaagcactgcttaacagggttgtcaagtcactgtcggtatcgataagatatctagcagggattactttaaaattattaaacaagcttagtgtggtacatttacttatcacatacataaaggagtgccaaatttatatgaataataatattaaaaataatataagagaatatttttaaaaagcttaattttaaagcgttaacagtgcaagtaatttaactgtggcacacttttgttgctatagtttttcgaaacgttttcaaagtggtaaaattggcaaaattgtaataccaatttcattactttagaatattcataatgcgacatcgacattttttatatattttcagatatttttgttatttaaaaacagctcgtacaatcgatatcttatcgctgcaaacatttcagccctcgcagtcgttacaaccgtaacagcacagttacagttgcagctttctgttagtaggactgctgtttatttgtttattcaaaaattagaaataaatgttgaaaccaaagtaatatttataaaaaaagcacttaaaatagagcaagaattgtagtcttagaaagaatacatagaacttagcttatgaacaaagaattaaacacaaataaatagaaatacagtaaccagaaaatcaatacccgttaacaacaaccggagcgcgtaaattccgtcagtttgacagttgcgttgataagaacgatgcggacggacttttgagtgcgcaggcgcgctccgagcgcacccgtcccccctttcgtcatcgtggctgtttgcctgccaactactttccggaatccgatttctcagacagtccacgttcgggcgtcgttgcaagcagtgtgtgctaacggtactccaaccgcgctgcatgtgcgttccccgtttgcatctgtgtgcgtgtgtgagcggagaag

SEQ ID NO: 11861 - DNA, 4164 bp, DROSOPHILA
tcaataactttgccagtcgctggatgcaggttgttgtttctttttgccaatattgtttgttgtgcagccgcgttcgcgagtgtgagtgagtgtgccagtgtgtgcgtgtgtgtgtgtgtgcgttcaagtgcggggccttgggttgccccgaattgcaaagattgcaaatagaaaagaaaagaaaaacggccagagagaaaggcccaaaggaaaattgtgcaatagtcgcgaaaatcgaaggactcgctgcaggacgacgacgatgtgaagctgcgggcgggcggtgaattggaatcaactacgcaaatcatgtgcctggcggcggagccaccgcagaagcaaccgaaccggagcagcacctcacccacattcaacgccaagtacaggcgaaaatgcctgctcctcctcacgctgctcctcttccacggctgcttcagcggactccatcgggcggccgccttcaactgcaccgcccacggcggccgctgccagaacgacggccagtgccaggaggacggccagtgcctctgcgccgacggctggcagggaccggagtgccagttctgtggcggaaaagtgcgcatgtaccaccccatgggcacaatacacgacggatggggcaactattcggtgagtgtcaagtgcagctggctaatcgacgccagacatccgcactggaaccgccgacacaataccaatccgtcgcgaaccgccaacatacggatccacctgcgagagttcgccacggagtgcggctgggatcatctgtacatatacgatggcgacagcgtggactcgcccctgctggcggtgttcagtggcctcatgtatcgcggcaacttctccattcgtcgagtgccacaggtgatagcgacatccggcacggcgctggtgcacttcttcagtgacgatgcctacaacatgtccggtttcaacctcacctacaagatgaacagttgtccctcggatagcgatgaggtggagtgttccggccatggcaagtgtcgcgatggcgactgcatctgtgatcccatgtacaggggtgaagcctgcaacatagccgcctgtcccaacaactgcttcgagtccaagaaccagggccattgtcgtcttgaccaggaacgtcagatcagcgcccacggcgcctggtccacggtccacccgaagcactcgccggcgccagccggaagcgcctcccatggcgccaccatctggcgagacacgttgcacattgtgggcggcgaatcgtacggacgaggcaaactaatgagcacctatgacttcaatggcaacgtatgggagactgtgcacccggaggatggtagcgaggttcctgacaagcgatacggtgcctcgacagtgatgtacggcgacaagatcttcatgtacggtggagtggtcaagggccacggcatctccaacgaactgtgggccttcgacgtctcggcgcgaacgtgggcgaacatctcggtaagagcggatccctcgtgcaacgccactggaggaaccaccgctatgtgcggacccctgcatgtggtgggtcacacagctaccttggttcccgtgcaggagttcaactttgcatcacgagagtggcgcatcgtccccaccaccggctatgtggtgaaaggcggatacggacacagtgccgcgtacgactttcttacggagaaggtgtacgtctacggtggaatagtctccgagagtgagtccagtcaggtgctgagctctaggttgtatgcctatgaaccggcaacgcgagtttggagtctgctgtctgcggcgccaagtgcgcgtctacttcacacggcaaactttgtgaaccagggactaatgatggtcttcggtggcaatacgcacaacgacacatcgcagagctacggcgcgaaatgctatagccaggacctgctcgtgtacgacgtgtactgcgactcgtggcactaccatccgatgccgggccacctgcaggcggatctggcccgcttcggtcacagttcggttgtgttcgaggagtcgctgtacatttatggcggcttcaatggccagctgctaaacgatatgctgcgctaccagccgggctactgcagctactacaccaaacaggagaagtgcacggcagcgcgacctggagtgaagtgtatttgggacgtgcaaaagatgcgttgcatcgccattacccaggttcaaagatcggcgatctacggacgcgagcaatacgactatgtggcttgcccgtcgaagagccgtcttaccctcacttcagagttactccacgatgtgcaccgttgccaggaactggccagctgtcaatcgtgcgtgtccaccgcctttggttgcacatactgcggaaacggagtgtgcagcaaggagcggtgtcgtgaaaccacctcaatggcttcggtcttcttcgagtcgtccacacaaatggcagtgtccacggctagtccgccgctaaatgccaagcatctggattcgtgccccatctccgaggagtacctggtgtcatctgtgtgcgatcagctgcacaattgtcgcgcctgctctgccaacctggcgtgtcgctgggactcggagcacaaccgctgcaaaagctacacttcctacggtggtttggcgctcaaccggacgcaggatgaggtggcctgctcgccgtcctgcgcttcattgaccaactgccagaattgcaccgaggacgagtgcatctggtgccaaaacgaacagcgctgcgtggaccgcaatgcctacacggccagctttccttacggtcagtgccgagagtggaccaccttcacagccaagtgccggtcggctcccatccaatcaacggcactggccgtgggcagcactacggcactgtcaagtgctcaatgtggctactacaacagctgccagatgtgcctggacgatccggcttgcggttggtgtgacaatggctctaacaccggtctgggcaggtgcgtggttggcggagcactggcaccctacgatgacacggagtgcgccctaaagcactggttctttacgtcctgcccccggtgcaattgcaacgggcattcgtattgtaatgaccaacagcattgtgaacagccatgcaataatctgacgacaggagcgcactgcgagaagtgtcgcactggatactggggtaatcccataaacgggggaaaatgccagcgatgcgattgcaacggccaaggcgtttactgtcatccggacactgggaagtgtttctgcaccaccaagggtatagtcggtgatcactgcgagaagtgcgactcccagaaccattaccacggtgatccgctaaagggctcctgctactacgagctgaccatcgactaccagttcacgtttaatctttcaaagaaggaggatcgccactttacacaaattaacttcaggaactcaccgggaaagccggagatcgatgcggatttcaccattacgtgcagcgtgccggccaaaatggacatttcggtcaagagggctggctcgccggacatgctgatcttggtgggcgttaactgctcaacgttccgtcatcggttccccaagacggactaccaattcgggcactcgcccgatgacaacagctccctgaccacgttctacgtgttcgtgcacgacttccagcccccaatctggatacaaattgccttctcacagtatcccaagctcaacctgcagcaattcttcatcacattctcctcctgcttcctactgctgctgcttatggccgccgtcctgtggaagattaagcagaagtacgacatgttccggcggcgtcagcgattgttcgtcgaaatggaacagatggcgagtcgaccgttttcccaggtgctggtcgatatcgagaaccgcgaaagtattgatctgagtctgacgctggagggcattggccacctgtccaaaaaacgcaaaaaggaatgccctagtcccatcgctttggagccttgcagtggcaaccgagccgctgtgctctcgcttctagtccggctgcccacgggtggcctttcgcaagcgccttctggccagtccgctggtctggctgtggccagcgccttagtcacgttgggcaatccgcgtcgtccgtcgatcgatcagcatccgaaggagccaaagtcaaagcgcaagcagagccagcacccagacagttgtacataa

SEQ ID NO: 11862 - protein, 1284 aa, DROSOPHILA
MCLAAEPPQKQPNRSSTSPTFNAKYRRKCLLLLTLLLFHGCFSGLHRAAAFNCTAHGGRCQNDGQCQEDGQCLCADGWQGPECQFCGGKVRMYHPMGTIHDGWGNYSVSVKCSWLIDARHPHWNRRHNTNPSRTANIRIHLREFATECGWDHLYIYDGDSVDSPLLAVFSGLMYRGNFSIRRVPQVIATSGTALVHFFSDDAYNMSGFNLTYKMNSCPSDSDEVECSGHGKCRDGDCICDPMYRGEACNIAACPNNCFESKNQGHCRLDQERQISAHGAWSTVHPKHSPAPAGSASHGATIWRDTLHIVGGESYGRGKLMSTYDFNGNVWETVHPEDGSEVPDKRYGASTVMYGDKIFMYGGVVKGHGISNELWAFDVSARTWANISVRADPSCNATGGTTAMCGPLHVVGHTATLVPVQEFNFASREWRIVPTTGYVVKGGYGHSAAYDFLTEKVYVYGGIVSESESSQVLSSRLYAYEPATRVWSLLSAAPSARLLHTANFVNQGLMMVFGGNTHNDTSQSYGAKCYSQDLLVYDVYCDSWHYHPMPGHLQADLARFGHSSVVFEESLYIYGGFNGQLLNDMLRYQPGYCSYYTKQEKCTAARPGVKCIWDVQKMRCIAITQVQRSAIYGREQYDYVACPSKSRLTLTSELLHDVHRCQELASCQSCVSTAFGCTYCGNGVCSKERCRETTSMASVFFESSTQMAVSTASPPLNAKHLDSCPISEEYLVSSVCDQLHNCRACSANLACRWDSEHNRCKSYTSYGGLALNRTQDEVACSPSCASLTNCQNCTEDECIWCQNEQRCVDRNAYTASFPYGQCREWTTFTAKCRSAPIQSTALAVGSTTALSSAQCGYYNSCQMCLDDPACGWCDNGSNTGLGRCVVGGALAPYDDTECALKHWFFTSCPRCNCNGHSYCNDQQHCEQPCNNLTTGAHCEKCRTGYWGNPINGGKCQRCDCNGQGVYCHPDTGKCFCTTKGIVGDHCEKCDSQNHYHGDPLKGSCYYELTIDYQFTFNLSKKEDRHFTQINFRNSPGKPEIDADFTITCSVPAKMDISVKRAGSPDMLILVGVNCSTFRHRFPKTDYQFGHSPDDNSSLTTFYVFVHDFQPPIWIQIAFSQYPKLNLQQFFITFSSCFLLLLLMAAVLWKIKQKYDMFRRRQRLFVEMEQMASRPFSQVLVDIENRESIDLSLTLEGIGHLSKKRKKECPSPIALEPCSGNRAAVLSLLVRLPTGGLSQAPSGQSAGLAVASALVTLGNPRRPSIDQHPKEPKSKRKQSQHPDSCT

SEQ ID NO: 11863 - DNA, 5187 bp, DROSOPHILA
tatccggaggagtttgtggcccagcgaagagaaatagttgcagccgagactaagaagcagaacatcagccgattggatagatggcaaaagaaaaagagtcaaaacctatcagcaccagaatcctctccagacgctcatgcatcttctaatgacgcggtgcagagccacgaggaccaagcaaacacaaatcttagttcactgtctcaaatgaactttcaagtggaagcgatggctccgccaggcgtgtcgtcatctgatcttagcggcatcggagacgatgaggacgaacagcagcagtcaggatttcaggatgagaacatcaaccgtccagagacagagattaatgagaattcggtgagatgtgatccaattaatttaggaaggatgcggactggatgtataaattcgcaagcaaataacagtttccggaatacggagtctgatccggactactatatgtttggcacccaattgagcacattagtacgacccacgtcgactcaagagcctgacgatcaggtaaactgtccagagacagagatgaatgagagctgggtaaggtgtgatcaaattaattcggaaagcttgtcgattggaccgtcaattgattcggaaggaactatcacttttcaaaatacagaatctgagccgatcgacgtcacctcaatagcctgatgtccatatattaaactatataaagttcttcatttattggtgttaattaattaaaaacatgtaatccctaaaaatgttataaaatgtataataaaaatcttaattaaaatacgatggtcgattaagctatgtacactaatctaggatgatccgcaaccggagctgtacaagaagggtaaacatttaaaatgctcgcttttacataattacgctatgtacaatttatatattgctaaaccatggtcccatggggcgcggcagggggcggtgggtgctacgggaagtggtcaaacaagaactgttccatgaacagcgactccgaatgctagttggacgaattgtcgccaggctcactgaccgcaattgtcatcttcacttcatcgccactgtctagttctggatcctcgtcatcctcctcatcctcgcaatcatccatatcgtcctcgtcgagctcctcgtcttcgtcgtcctcttcggtcaattcatcatcctcctcgtcgtcctcatcatcgccgaaactatcacccccgccgctggcctccacagtcggcagctgaacgatcgtggccccgcccggcgtcacagttgagcctgcaaccgtggccgccacactggaggctccactgcccgccgccgctgaaccgccgcccggaatctcaatcgtcacaatgccgttcaccgtgctaatgcttttcggtgcattgccacccttggtctcctgcttgatgctcagctcaattagctccacgccagagcggctcttaaagtgcgtcttgatgtgcttcgacaggtgatcgctgcgcatgaactttttgttgcactcctggcactggaaacgcttctctcccgtgtgcgttcgtcggtggcgctgcagttcatcggagcgggtgaagcgcttgccgcaaaacgcccaggagcagacaaatggtcgctcgccagtatgccaacgcaggtgagcccttagatgggaagttttcccgtataccttatggcagccggttatatggcatatatgctggcgcttcttgtccgagtgtttttcgccatctgtacaattgggacaggtgcaggctactcgctttaagcgtggtttgggctctccagtcgctgttccaccgccgccgccagttgcagcacctccgacgctggccacacttatgttcatattgagatggctttgtgacggcgttgttatagtcgtcgtgctggtgttcgtgctccttatgctggcagttgctcccctagcctgcgtcgtgacggacaccacttggccaccagtcggcgcaattgtaatctgggtgcttgacgtggtcacagcgttgaccttacttcttgcaggtaacgatacgggaattggttgggttgtggctggggtattcggtgtattcgtcgcttgctgtggcagggctgtgatctgaatggaggctggtatgctcaggctggacagggaattgctttccgtatgcaggaacttgatctgctgctgttgcggtgaggctgtgtttggagtagaggcaggtgccggaggattaccagttgcggaaatgggtccaaaggtatccggcggctcttgcttgatgctggtgatcatttgcgttggactctgcggctcctgcttgggcatcacctgaacttggccctgagtttgcacttgaggatgcgacatgggtagttgggttagtacttgctggaagttggctggcagattaggaggcagctgattggcgtgaatgatttgcacttgacccaggcctgggatgttctggatgggtaaagcctgaagattgggcatctgcattggtgtgggcacaccagctggagcaggagtgggtgcggtaggcgcatttgggcgtagttgggcgggaatcacggtcagctgttggccctgggcattggtaatggtgatgggctgattgggcggcagttgtccccccgccgaggcatcgctgatcgcctgaaggagctgctggtgctgcgcctggacctgttgttgttgctgctgctgtgcctgttgctgttgcgcttgctgctgctgttgcgcctgctgctgctgttgttgttgttgtacttgttgttgctgctgctggtggggattctggatatgtataatgttggcattcggaggcagctgaggatacggcattgccagttgcacctgctgaatctgaccgttgggcgtaacaatctgggctatctgtgagaactgcgggatgatttgcatctgcgaggcggagggcatctgcagggattgcgcctgcatcaggttttgcagtccgccgctcgatgttgccgctgcctggacgggcacatgtacagtctggtagatggtctgtccgttagcagtctgaacgggaatctgcacagcaaccgtttgttgctgctgcggcatggctggcgccggaaactgcaccagttgcggccgcatctgcaattggccgttctccaactttatagattgcccgccgcctagtaaattggagatattggagatgtttcccagcaatccattcgccgccgctaccgaggttggtatctgcaggtttgtgcccggtatggtgatgctgcccggcagctgacccgctgtcccactattggtaactcccgatccattggctccagatgcatttgttccttgtgcctgctgttgcactgtaccctggtgcacttgttgtgcctgctgttgttgctgaatgagattggtgacgggtatttgaatgttggtgccgggtatggtgatcagctgggtttgctcctggcccaagccgttcagctgttgcagctgaatgcagttagaggctgccggattagctgccatctggggagcccgcagaatttgaccgttgggcgtgataaaggcctgttgcccgttgaagttgaccgcctgagcggtggccagttgtgcattgaggtttggtatgaagatggcctcctggccatcaatgttcaccgtttgcatgggcatgggctgtacgatctggaacatgttttggggcatgccagcgttctgtccgttcccggcaaccgctccgcctgcaaactgaggaggcatttggtgaatgttgatgatctgctgcatggttggtgtcccgggagcaccgtgaacctgcgtttgtgaagctgctgcactagctccatttggtggaatcgtcgccttgctggaaccgcctgccgccaaaggcgtggcgggtggcgcactagtcgccgcactggcggcactcttgtactgcagcatggcagggctttagatgagatttggtcaatcacaagtgcttggagcgaaacatgttcagtttttttattcgctcagacgcgctactctgccaggagattggtagcatttaaaccaaggtggcacacatggggttatgaacactgggatgcggggtgccgacgctaacattcaaacacataaataacacgaagtctaaagataattgcgctgcgagacggttttagcgagtttttagttttaattttgttttgacacaaacgcagaagaagaagtgagagtgattggccagggttgcattgcgttgcatctcgatggccgccaatcgaccaaccagccaaccgatagtgcgataccaataacaaaccgctaaaagcaagaagaagcatatcacagataaacaaatttttaaccgacaagttgcctatccgacaaaatccatatttaattagattgcatcttgaaaggggcatggagccggttccagaggaagcccgaggagtgggtgatgacgaaggggaactcgattgtctaacacatatgattggggcgttgcttttgcaaaaagaaccggaaaatcctgaaaatggtgactcaaaggaaacaatttggagtggagagctcgaatgggaggatgcacagatattggatcaaccgaagactctgcacacggtccaatgcaaaatctgctccatggttaaagaaggtcagccggagatcaacacggagaactggccaaacaagctgaaaacacaactgatacccaaaaaagtgctgggtaaaattggcgaacaattcctaaaggatgccaggatggttgtattccgatccagccaaggagaggtactcaatttattgatcacggcgatgagctctggtttcgctggttgcatccacttcccctccaatcccaactgcaacatcaaggctctaattctcatctactcgcgcgatcatcaagctttggttggcttcatacccaacaatgaggattcgtttagcgaacgactgcaggagattcttcagggtgcaaaacgaaagccgggcgtcaaaacacccaagcagccacagccagaagaaccgcctcctgtggaggaagatgccattataaatgaactcctatggactggatcgctgaattggtcgacacaagcaagtttagaggagccaagcattagtcacaagcttgagtgttccgtgtacatagctataaaaaacggtgatcccgggatcagtgcggaggattggccaactgatatgcctatggttttgatgccttcaat

SEQ ID NO: 11864 - DNA, 3187 bp, DROSOPHILA
cactctcacttcttcttctgcgtttgtgtcaaaacaaaattaaaactaaaaactcgctaaaaccgtctcgcagcgcaattatctttagacttcgtgttatttatgtgtttgaatgttagcgtcggcaccccgcatcccagtgttcataaccccatgtgtgccaccttggtttaaatgctaccaatctcctggcagagtagcgcgtctgagcgaataaaaaaactgaacatgtttcgctccaagcacttgtgattgaccaaatctcatctaaagccctgccatgctgcagtacaagagtgccgccagtgcggcgactagtgcgccacccgccacgcctttggcggcaggcggttccagcaaggcgacgattccaccaaatggagctagtgcagcagcttcacaaacgcaggttcacggtgctcccgggacaccaaccatgcagcagatcatcaacattcaccaaatgcctcctcagtttgcaggcggagcggttgccgggaacggacagaacgctggcatgccccaaaacatgttccagatcgtacagcccatgcccatgcaaacggtgaacattgatggccaggaggccatcttcataccaaacctcaatgcacaactggccaccgctcaggcggtcaacttcaacgggcaacaggcctttatcacgcccaacggtcaaattctgcgggctccccagatggcagctaatccggcagcctctaactgcattcagctgcaacagctgaacggcttgggccaggagcaaacccagctgatcaccatacccggcaccaacattcaaatacccgtcaccaatctcattcagcaacaacagcaggcacaacaagtgcaccagggtacagtgcaacagcaggcacaaggaacaaatgcatctggagccaatggatcgggagttaccaatagtgggacagcgggtcagctgccgggcagcatcaccataccgggcacaaacctgcagataccaacctcggtagcggcggcgaatggattgctgggaaacatctccaatatctccaatttactaggcggcgggcaatctataaagttggagaacggccaattgcagatgcggccgcaactggtgcagtttccggcgccagccatgccgcagcagcaacaaacggttgctgtgcagattcccgttcagactgctaacggacagaccatctaccagactgtacatgtgcccgtccaggcagcggcaacatcgagcggcggactgcaaaacctgatgcaggcgcaatccctgcagatgccctccgcctcgcagatgcaaatcatcccgcagttctcacagatagcccagattgttacgcccaacggtcagattcagcaggtgcaactggcaatgccgtatcctcagctgcctccgaatgccaacattatacatatccagaatccccaccagcagcagcaacaacaagtacaacaacaacaacagcagcagcaggcgcaacagcagcagcaagcgcaacagcaacaggcacagcagcagcaacaacaacaggtccaggcgcagcaccagcagctccttcaggcgatcagcgatgcctcggcggggggacaactgccgcccaatcagcccatcaccattaccaatgcccagggccaacagctgaccgtgattcccgcccaactacgcccaaatgcgcctaccgcacccactcctgctccagctggtgtgcccacaccaatgcagatgcccaatcttcaggctttacccatccagaacatcccaggcctgggtcaagtgcaaatcattcacgccaatcagctgcctcctaatctgccagccaacttccagcaagtactaacccaactacccatgtcgcatcctcaagtgcaaactcagggccaagttcaggtgatgcccaagcaggagccgcagagtccaacgcaaatgatcaccagcatcaagcaagagccgccggatacctttggacccatttccgcaactggtaatcctccggcacctgcctctactccaaacacagcctcaccgcaacagcagcagatcaagttcctgcatacggaaagcaattccctgtccagcctgagcataccagcctccattcagatcacagccctgccacagcaagcgacgaatacaccgaataccccagccacaacccaaccaattcccgtatcgttacctgcaagaagtaaggtcaacgctgtgaccacgtcaagcacccagattacaattgcgccgactggtggccaagtggtgtccgtcacgacgcaggctaggggagcaactgccagcataaggagcacgaacaccagcacgacgactataacaacgccgtcacaaagccatctcaatatgaacataagtgtggccagcgtcggaggtgctgcaactggcggcggcggtggaacagcgactggagagcccaaaccacgcttaaagcgagtagcctgcacctgtcccaattgtacagatggcgaaaaacactcggacaagaagcgccagcatatatgccatataaccggctgccataaggtatacgggaaaacttcccatctaagggctcacctgcgttggcatactggcgagcgaccatttgtctgctcctgggcgttttgcggcaagcgcttcacccgctccgatgaactgcagcgccaccgacgaacgcacacgggagagaagcgtttccagtgccaggagtgcaacaaaaagttcatgcgcagcgatcacctgtcgaagcacatcaagacgcactttaagagccgctctggcgtggagctaattgagctgagcatcaagcaggagaccaagggtggcaatgcaccgaaaagcattagcacggtgaacggcattgtgacgattgagattccgggcggcggttcagcggcggcgggcagtggagcctccagtgtggcggccacggttgcaggctcaactgtgacgccgggcggggccacgatcgttcagctgccgactgtggaggccagcggcgggggtgatagtttcggcgatgatgaggacgacgaggaggatgatgaattgaccgaagaggacgacgaagacgaggagctcgacgaggacgatatggatgattgcgaggatgaggaggatgacgaggatccagaactagacagtggcgatgaagtgaagatgacaattgcggtcagtgagcctggcgacaattcgtccaactag

SEQ ID NO: 11865 - protein, 968 aa, DROSOPHILA
MLQYKSAASAATSAPPATPLAAGGSSKATIPPNGASAAASQTQVHGAPGTPTMQQIINIHQMPPQFAGGAVAGNGQNAGMPQNMFQIVQPMPMQTVNIDGQEAIFIPNLNAQLATAQAVNFNGQQAFITPNGQILRAPQMAANPAASNCIQLQQLNGLGQEQTQLITIPGTNIQIPVTNLIQQQQQAQQVHQGTVQQQAQGTNASGANGSGVTNSGTAGQLPGSITIPGTNLQIPTSVAAANGLLGNISNISNLLGGGQSIKLENGQLQMRPQLVQFPAPAMPQQQQTVAVQIPVQTANGQTIYQTVHVPVQAAATSSGGLQNLMQAQSLQMPSASQMQIIPQFSQIAQIVTPNGQIQQVQLAMPYPQLPPNANIIHIQNPHQQQQQQVQQQQQQQQAQQQQQAQQQQAQQQQQQQVQAQHQQLLQAISDASAGGQLPPNQPITITNAQGQQLTVIPAQLRPNAPTAPTPAPAGVPTPMQMPNLQALPIQNIPGLGQVQIIHANQLPPNLPANFQQVLTQLPMSHPQVQTQGQVQVMPKQEPQSPTQMITSIKQEPPDTFGPISATGNPPAPASTPNTASPQQQQIKFLHTESNSLSSLSIPASIQITALPQQATNTPNTPATTQPIPVSLPARSKVNAVTTSSTQITIAPTGGQVVSVTTQARGATASIRSTNTSTTTITTPSQSHLNMNISVASVGGAATGGGGGTATGEPKPRLKRVACTCPNCTDGEKHSDKKRQHICHITGCHKVYGKTSHLRAHLRWHTGERPFVCSWAFCGKRFTRSDELQRHRRTHTGEKRFQCQECNKKFMRSDHLSKHIKTHFKSRSGVELIELSIKQETKGGNAPKSISTVNGIVTIEIPGGGSAAAGSGASSVAATVAGSTVTPGGATIVQLPTVEASGGGDSFGDDEDDEEDDELTEEDDEDEELDEDDMDDCEDEEDDEDPELDSGDEVKMTIAVSEPGDNSSN

SEQ ID NO: 11866 - DNA, 3617 bp, DROSOPHILA
tttaatttcaatagtcttcattttatgtgtaacatcgactagatcaattttaatgtagaaaatattgtattgtatttcttaatcatcaacatggaatttttgatgaagccatagcatcgtagaatttataaggtaaataaaagatcaggtaaattatgttatgtttgattggtaaacaacggaaacctgatgttgatagccatttaatttcaagctgcctattattgttttccaatcataagtgggcaatcagcatttgtttataggcaaacatgggtacgagcacgctcttcaactttaaagatctccccaaaaattgacgtcatattgaagacttttccatcatcatctgatgattcacgttaatccaatttattaagtcatgaattgaatggatggagtcaaatattaaacgtcatgatgggtttacaaatccatattttaaggcgattagtcaactcaactagtatttcacctgtctgaaaggtctcagactttcttaaatatcggctctcactgtgacaatgcaaaaaaaaatatttaattagctgaatgccatcgaacttcatgtctgattaaagctgaaattccgattttaggccgctgtccagtttacaattaatgagattaatcgtaaataaacatttacggagagcactcttacttctgacacacacgataatttgtggcagacacatggagaatgaaattttttatgaggaaatcgaattgcaatctccggcgaacgattttgctcatgcaattgcaattacaattggttttcaattgtatttcctcaaaatcaaaagaatgtcgaatgattgaaaacaggttatttcgtaaattcaaaatccacgttacgttggctaacggttaacgtaattgaacgtaacgtgaatgctacgtaatatactaacgcacttttaggtatatttttcaaaaataatatactgttcttggtatattgctcaggaacggtcactctagagagccggcgtaaacaaagcgatacaatttggttaaattaattaaattagctaaaaatatgaaacaaaaggatctgaaacgcgcttacaacaatgtcctagcacaggctatatccggctctaaacagtacctatttgcgggaaatctctttggcgacattttcgtacttaggtgagaatccttaatttggcgcaatttcccaactaattgtttttctattttgaagaataaaagaactggacaagggttccgaggagccacctggcaaactgaagatcttcccgcagggcagcgatgtggacatcaattacctggccttccatcgcgatttcttgatagttggtgcagtgggtcttatttacggattggaatggaacgaggaggaggaatctctggccaccaaacggtcctgggaggtaaagatacccatgcaagtggatgccgtcgaagtgccggatgtgaactccatgtggctggactcggaaaatagcatcctgtttgctggctgtggcgacggagtgatctaccaagtgagtttggaggacggacgaattcagcgcgagtaccgcggacacacagactacgtgcacagtgtggtgggcaatgccaacggacagatcttctctggcgccgaggatggcactgtgcgagtgtggagcaccaagcagcagcagcacacttcaatgctggagccttacaagaacccaaatctgttacgtccggattggggcaaatggataggagcagtggctgtcaacgaggattggctgctctgcggtggtggacccaaagcttcaattttccacctgcgttccatggaaagcacatgtgtctttagcttccccggacgcgtgcatctatgtgactttgtggacgattgtgtcttaatcggtggagagcacaatcatgtgcaatcctacactctaaatggagtactgcaagccaatattcccgtggagcacactgcctgctactctgctgtttggcaaacatcgcccattaaattcatttccattgctggtttcagcaacaagttgcatatcctcaaggattttcgcttcctcgacagcaagattgagatgtatgggaatgtggagggcgaggaaaacgacccagaagaagaagacgaacttattgaaaaacctctgacagttgaggcggcataaaggtgtaataaatttgttctttaattacattattatactgtttacattttttaaatgcatttattccttagggaaaccgagcatattcctcgtttttacaagcgtttcgtgaaatacgcagcacttgatattccttgctgttcacattattttggaaattacattctccaaatgttaatgttcccttatcgttgagtgcgaaatcctccagcatacctataaacttttttgaaataacttcttcatccggacgaatgccggtacggtatgcagctgtattgaaaatcaagaaaaagtcatctccgtggacagtacctttaataataagaaagctagagctttaagtatttgaaacgcaagtatgtacccaccaaaatgtacatctgttcgattggaaagcaattgacccactccggaatcggtaggattatcgtagacaaaagaataaaccggacttttgccatactttcggtgaagatctattgcacttggcacgctattcttgaaaagaacatcagtaaacattcgctgcacgttccaataactttccacactgaatcgccgatctgctagatactgctgcctgagatcaaatgaaagatcatccatatctttgatggttttcttggcgtcccgatagaagagcaagtatggtgcccaatcaaaccatcgatcattgagtaggtcaatccaactctcgccagttaatttgtttctttccaacagctgagcagcgttgtatcccccgtcctcagtggtgtacgtcacagcccaagggacttgggcaaacttcccgctcttaatcactgctcttgggtcctcggttagaaaggcgtctggtgcatctgacggctccacaacaggtccaaaagcactgaagggtacataggaaaacacaaggaagcttcggacagcagagactatatcgctagccggcttagacttcaagcagtccttgagttctgcggagacatttgtgtgtccacaaccgacaatacgacccagttcaaatgcacgtcgtcgtccaccctgctgtatgacccaaggatccaatgcattgccgctcaccgaaatcgctcctttggccaaatgtttgaaatcctcgtgcaacagctgcaaatgagccgaagcaccgcctgcagagtgaccaatgagcacaatattatctggcattccaccaaagtgagcaatgttcttcttgatccattgtagggccagacgttgatcctttagaccatagtttcccggcaagtgtctatcgccggtacttgcaaaacccaatggtccaagaccaaaacttatttttaccacaagcaaagttccctcacgcataatggagtcgtgtccatatatggatccactaccgaacatgaaagcacctccatgcaggagtactacgacaggaaagctgctccgattgggtttctttggcttatagatgcttaccgttaagcaatcctcatc

SEQ ID NO: 11867 - DNA, 1493 bp, DROSOPHILA
acaaagcgatacaatttggttaaattaattaaattagctaaaaatatgaaacaaaaggatctgaaacgcgcttacaacaatgtcctagcacaggctatatccggctctaaacagtacctatttgcgggaaatctctttggcgacattttcgtacttagaataaaagaactggacaagggttccgaggagccacctggcaaactgaagatcttcccgcagggcagcgatgtggacatcaattacctggccttccatcgcgatttcttgatagttggtgcagtgggtcttatttacggattggaatggaacgaggaggaggaatctctggccaccaaacggtcctgggaggtaaagatacccatgcaagtggatgccgtcgaagtgccggatgtgaactccatgtggctggactcggaaaatagcatcctgtttgctggctgtggcgacggagtgatctaccaagtgagtttggaggacggacgaattcagcgcgagtaccgcggacacacagactacgtgcacagtgtggtgggcaatgccaacggacagatcttctctggcgccgaggatggcactgtgcgagtgtggagcaccaagcagcagcagcacacttcaatgctggagccttacaagaacccaaatctgttacgtccggattggggcaaatggataggagcagtggctgtcaacgaggattggctgctctgcggtggtggacccaaagcttcaattttccacctgcgttccatggaaagcacatgtgtctttagcttccccggacgcgtgcatctatgtgactttgtggacgattgtgtcttaatcggtggagagcacaatcatgtgcaatcctacactctaaatggagtactgcaagccaatattcccgtggagcacactgcctgctactctgctgtttggcaaacatcgcccattaaattcatttccattgctggtttcagcaacaagttgcatatcctcaaggattttcgcttcctcgacagcaagattgagatgtatgggaatgtggagggcgaggaaaacgacccagaagaagaagacgaacttattgaaaaacctctgacagttgaggcggcataaagggaaaccgagcatattcctcgtttttacaagcgtttcgtgaaatacgcagcacttgatattccttgctgttcacattattttggaaattacattctccaaatgttaatgttcccttatcgttgagtgcgaaatcctccagcatacctataaacttttttgaaataacttcttcatccggacgaatgccggtacggtatgcagctgtattgaaaatcaagaaaaagtcatctccgtggacagtacctttaataataagaaagctagagctttaagtatttgaaacgcaagtatgtacccaccaaaatgtacatctgttcgattggaaagcaattgacccactccggaatcggtaggattatcgtagacaaaagaataaaccggacttttgccat

SEQ ID NO: 11868 - protein, 350 aa, DROSOPHILA
MKQKDLKRAYNNVLAQAISGSKQYLFAGNLFGDIFVLRIKELDKGSEEPPGKLKIFPQGSDVDINYLAFHRDFLIVGAVGLIYGLEWNEEEESLATKRSWEVKIPMQVDAVEVPDVNSMWLDSENSILFAGCGDGVIYQVSLEDGRIQREYRGHTDYVHSVVGNANGQIFSGAEDGTVRVWSTKQQQHTSMLEPYKNPNLLRPDWGKWIGAVAVNEDWLLCGGGPKASIFHLRSMESTCVFSFPGRVHLCDFVDDCVLIGGEHNHVQSYTLNGVLQANIPVEHTACYSAVWQTSPIKFISIAGFSNKLHILKDFRFLDSKIEMYGNVEGEENDPEEEDELIEKPLTVEAA

SEQ ID NO: 11869 - DNA, 8853 bp, DROSOPHILA
cgatattaacgttttaattgcatgtgcaagtagtttaagccggataatactaatgtactaatccaatttgctcaatagacggaaccaagtcttctctacgatcaacgatcttacattctcgtagccacattcagctaaatattaagttttaagtccatcgaacccactctacatgtaagcaatgcattttccaaatcaaaatctaactacagatatatccaattgtaactatgagtattgcatttttctatcaatctatcgatcgatctaaactctgaacatattttaagccacttacaatttttgttagtatattaacaagacacaaagaatagcagctcggaattccatttgaggaccggcgcttgtgcaagcacttagcatacgatatacacaaccaatcatacttacacatatacaagaaacatatgaacaatatatatatagttataccaatgtctaacgatttgcctcttcgggtattgttctacacaatatatacaatacaagttatatatacacaaaacaaaaacacaaaactgagttcgagttgtacgaaatgaagccaaaatttattaatgttatacttttttgtagcacgagatctacgggatctgcgaatgaaagataccatacaggcggacaattatgtcgtgtattattaaatattaaaatcaaaaaatgtttgctgacacgttcgtgatttttattccaagataagggttttagattcagatacttaaagatcatatcagtatgtgacaaaaaaaaaaaaaagactatttattcgactttaaagctttattcataaattaatcgtcttaggttgctagaacatatgcgataagtattcgaaagtgggttccctctagtcgcactccccttttggcttagttggggcagaatcaaggcctctgatctcttctcccccctaaaagtagatcttaaatttgctctgttttatttacaaattgatttagataactcaacaacggaatgcctacgcggcgaaccccttcttgctgtccatgtcggcggccagcacgaaaatgggtgcggagtagtccacaggcttgtcgcctccttcgcccttcaaatagggattcgccgccttgaggttccggtttcgcttcagcatgacatagaccacaaatatgctgaccaggaaggcggaactggtggccattatgaacagcaccagctggatggactcgtcctgggcggtggccgcctgagccactgggacatgagcactgcggtgcacaaagtgggagcgggtcaagtccggccggaagtgaccgcccgccaggcggaagtcgccggcggaaattgccgcctcgatggcaaaggccaagtccaccttggcctcgttgtgcagctcaaaacggacaatagcggatccatcgaagttctcttggacgcgcaagttttcgacggactcaccgccgagtagctgctgcagttcccgccggatggtgtcgtaggcattccttatactccggccactgctgttggtcagatggagttcgatggccaccgcctctatcggaacatgactgcagcgacgatcgccagctccaaagacgtgggtggactgtagctggttgccggccgcatcgacgcaccagcaacttctgccgttgcactgcagcgggcggaaggctcctgcctcatcgcaactgaccgggaatggtgccgttttcgacagagctcgacaacgtgtggtcttcagctccatgggtttcagggtggcctgctccacggatagctgagagtccagcagtgagttcgccagctctagtactctctccgtaacactggactccgctgcactggcggtggcaggcagcaccctagcctccagctcatcgaagtccagatcctcgctagcgacatcattcagttgggtgagctgagcaatcagttgctccatcagaggatcgccagaatcgaatgccttgcggttacgagcctgtcgactattgcatatgggttcgctctcccgggtgagggttccctttagaggagcacccttcttgtccgcacaccagcaaactccgggcgcttcctcgccagcggatgcagctggttccgatgcaaaggcgcgactaacgatctccgtgtgcctgtccatgggttggggctgcttgcccaagcattgcacgggactccagtggccagtgactgggtcacatcttggttggaaccaaactgaggagtgtcctgttcgctgggcagccaggttgttcttgagcttcaggcgctcgcattgagtgagcactggggacgagacgaataaatggattaacgaggagttccaaaaccaaaagcggaggctaccatcttacctggacacacggagttgcaggcgagttcgttgtggaagaggttcttagtttggcaggcgggtgcctcggagtcgatgaccacgggtaggcacttgtttgccttgggactgaacctatagcgcgtgctatttttctccgatttgccagtggccagacaaccattatccatggactcgaagcaaacatcacgggtcttggagcagcaaacaccacggttattgaccggattcagctgacaggagtgggtggtggggcacacttcgtgctcattgtggggtccacagctcatgtccaagtcgccttgctggagaggattaccctcgggacaaatggaggctcttcggggcacacatatgggcatcttcgggcacggactgtccacacattccacagagatcaattggcattcctcgtgaggggagcagcttacttcgttgcagtagtttctacactcgcaggtgggacaaccattggagtccatctggtagccactctcgcactctaggctgcagttcgtctttgggcacgcgaagctagagttctcctggcatttgggtgttgctggagatttgacccttgtgccaggcaggattttaccctgatcatccacacaccagcagtgaccatcgggtgagcactggacctgattccatttgccattatttgggtcacattgggccaccgccatttgccgggcggggatgcccagctcggaactctggtgcagctgaatggcctgcaagtgctggcaggcggttttcaattgaggatccacacactgggtgccacatccattggagcaacagcgtcgggctccatcacaatgggcatcggtacggcactcgtaggcacaggtgttggcatccaggttatcaggacccggtggaaccaggtaaggacactgtcccggcttcctaggcaaacaggcggggactggaggacagtattcaccctcgcagctcacgtccaccactcggcattcctttccagagccgcaggtcacaccctcacaaggatcacgacactggcaggccggacaacgggtgtccggatccagggagaagccatactcacaacccattcgacaggtgagatccaggcagtccaagtcctccctcagacttcggcaggtatcatcggtgacattaaagcctcgagatcggggaatttctgtgccaaagctatccacacaccagcactgctccacctccatttccaccagctcattctcattatccggcggcctcttggatgccgaggccaccttcttgaactccgtctcgaagagttgtcccaatccctgctgacgatctgcacccatgtcgatcaccttggcactccgacccatgacaggagcagccacttggatttttagagcgctgtcatccacgcggtacagtttcaggcgttccaaatcccgacgagaccgcttggaggcacttggtgcagcactggcgagcagcatcctcatgcgccgaatggtattctcctcgagaattttgcgttgtttggcgcgggtgacccgtaccttcttcaactgacactggcgaccctcgtagtcgccatcgttggtgcaacgtggcgaaggaaccgccagttgcatgccctcctcagtgccctccatgcgctcggaaaagtccctcagatattcgcacactataaacagatatcggttagattcgggtactatatgatgagttttgaggtaagcttactggtttgctgatgcgttcccgttgcctcctcagctggatttggtttctccggcactggacagcacacattctccgtttcccgatgcagtttggtgcacttgtactgctccggacacataatcctgttgctcatggagcgaccttgctttgacagtgattccggttcgggttcaaagaaggctgtgggctggaagctgcgtccttgacgatcctcgaagcaatacatcacctcaccggttgcggggtctgaaagtggagttcccacatcgcagggattggagtacactagatcaggcttgcagacgggccatgaggcacacagggaagaaccggattcacacaacggatccgtggccacttcgcagtgggagccaatggagcacttgaagccatcgcagggctcggagcactcgcaagtgggacagccgttgtggtcattctagggagatattgggactaggttagtggaaagaccagaatggggtaactaagtcctaatcaccttaaatccgtactcgcagacagcggcgcagatgtttgtgtcgcactgctccatctggaaactcctggcatacgacctgctaatcatgttctcccatccatcgcagttaacattgttggccgcacccatggtttccttgatcttgtgtccggtacggggatctacacaccagcagacgagtccgttcctggaacattgccgcggggagaactgaccaccaggaccgttgcactcgggcacatagccgcgtccttcgcgctcattaatcgataagatgtcggccagggccttggcctggtgacaacttgtaacatttcccggctgctggcaattgaactggcatcccttggtgaagcagcacttctccatgttccgacactccaagtcgtgggagcagggtgaaccgcacatgtagcccgttcgctcagtgtactgcgagtgatcgggagctggacagatgcctggtttctggaaggtcagcgcactggggcagcacactccgtagtcgtttccggactccactaggcactggtaaagtggtggacactgcggctttcccggctcctggccacagaggaatggtctcacggtgtcgtcgatggcgagcggcaagccggcgggacagagattggccagcgatctggccttcttgcacgtgggcagtggtggacatggctccgatttgcactgcacctcctgcagttggcaggactggccacgtggacactccagcccatcgcacggatcccggcagcggcaaacggaacaacccgtgtccggatccctggcgaaacccgagggacagaacatgcggcacgcggaggcggcacaatgcttcggttcggcgcataccacgcccgtacgcgtctcatttcgactgccgggcagctccacgccgtagtcatccacacaccagcaatcgcgtccgtgtttctcatcctggcactggatggcatcaaagtcgccgttcttttggcatcgaggtacgcgtacagatgatccttccagagctttcgctcttcgcgactccgagcgccttaaatgctggcaggccgtaagattggctataaaaataagtaaattaatttaaagtagttattcacagataaatatgtcaatattgttaataagttacagtagataaatcttattttattggctaattggactacattttatactttagcagctattcaatgtatttttcctacgtactcaagatgttcaagaaatagctcttttctcaatattccaaactccaactgatatagttatttgttccattttattttttagagagaggaaaaagagtctgacacactttcgtgttattcaaccgacgaattcacaatttcacttttaatttttttttaggacgtgacgcgtgcggtgaacaaaatcgcggcgtctatgaaaactgcgaaatttaaattaaatatacaaaatggagtgcccaaaggcggcattgctggaattgttgttacagtgccagccatttgcagctgttttttttttgttttgttatttttttggctgctccatggtcagatttgaatcgagcgttttgtatgcgcacagcttgtccacgaggcgtataagcaattcgcttcaaatggttttcggtttttggacgcgctcggatgctatgagcattctgctttgggaagagccaggccattgtctcgacggggttatgcaattaaagtgagtgatcatcccgcaacccccccccattaccacatgcctcccccgaagcagccaccatcccatttggctgtccagcacgcaacgctgacttcggggttgcgacagctgagctttagttgcgtcaattgcaattgcagtcgttgttgctggtcacttcctatgcactttcgatatatatttaatgcatcattatgcaactgtcagcggcaataagggtactgaacactttcgtgtagaagacactgtacggctacgaaaaatatcagctttagcttttgtcatatcagtttcgttttccttttgaaatatgatccgaaaaaccctcaattaaggtaattttttcggtatacaagcatgcatttcataaacaagtttcggttgtggaaacgctgagtaatcgctgaacttatcaccgtggatttcttttttttttcgccgcacatccgcctcggctcatccgaacttatttatttatttttatttacttttcactgactttctgtgaggtggtcggtggttgcttttatttttctggagttttcgctagaaattgaatgaaagttttttttggcagcgcctccagcgcgcgttgaccatcaatttgtatttgccgtttggtcaggagacagcagcaaaatcaaaaaagaaatgaaaatggctttcagtttctgtggtaagtgaaaaacaacaaaacaaaagccgtccggcagcaggcaattaaagctggccaatgatgaagataataaaccataaaaaccgcggccactcgtattctcgccacccaggccaaatcgagtttgtcgcctaagtctttcgtttggtttccgctcggcaaaacaaaaataatggctgaaaaaacgagtataagacagaagcgtaacgaaaacgaaatcaaagcggcaaacgggtaagtaccccgagaattgttggcctattgtgagccagagttggtactgggtctgggtctgggacctcttttgaccgactgacacagtggttgctgcacttagaagtcgactgactggctttgtttcccttatgccgcagttctgttttttctttttttttgtttttggcggcgacttaacggtggccggctcatttttctgctaagcgctttttaatgatggcgtgccatttttcacaccacccagacacagcgagttctacacgaattacgaatttccacacgtcacgttgaaaatgcagctgcagcctggcacttaatgagccaccaaatgatccacattcgcacgttgcgggttcaatgactgttttttggccaaaaaaaacagagcaaagcaaaatgataaagttctggctcaagaagtcattgacttgcagcctcgtctttttggcattacacgaccaaaaaaaggaatcttagtttaacattaagacaagctttatggcttgttaagtaatataagaattataagcaataataatgatgaatacttcacattttctttctgtgcactcaccatttgatcgctttgcctccgaaacctgcagagccagcaaaaggaggaaaaggcagccggagaagagtttcagccaacgttgatcatagtgcgccattttcgggcatccaagagttgccaaaaaaatttcctgttttcagacgctgttgctgtaaaaatcgacagaaataaaaaaaaagacagagagatcgtttgagtgcgtagtatgagtagtatatggttgccaagctcgatggtttgacgtcacgagccgtgagactcaaattttttaactagacactttcactatcagctaggcatacatttgcatctgcttttcggggcgcggcaaagaattcgaagcgattcgattgcgtaacaagggggggtttgatatgggtataatctgaagggtcacgaacccatccaaagactggcttctttttttctggagcccaactgtcttcgctttacggccgggtgattaatctgcgcagactttgccgctgacgttgacgtcgctgcgctttcactttgccaacaaaaacagccaacgaaacacacagcaacagccagtcaactttatacatcatttatttttatttatttttttttagcgtctcctcaaaattcacttttgcgccgtgtgtgcgagcgtgcgttttccggtccattgaaaatggctcagatgcggccaactccctggccactttaatgacaccgaggattttccctcattatgcccggccaattatataatgcattcatcccgcagtggttagagatacgaaatgaccaacaggcaggtaaaaaaaaaagtttgtggcctaagcctttgattttttactttggtttgggtgaaaactgtgtgaatcattttctcaatggccactggccgcatttgcaattggccaaacatgaaaacatgccaacacctggtcgatccacaatgaaaatttcaacacggaactggcggaggaaaaaccaaaatgaaaaatgccaaaaaaaatataaactgtacgtttgtgtgcttttttggcttgttgcatgtgttttgcaaaaaccaggccagccgcattttcactgcaaccgaaccaaaatgaaagcctggtgtcttg

SEQ ID NO: 11870 - DNA, 4536 bp, DROSOPHILA
atggcgcactatgatcaacgttggctgaaactcttctccggctgccttttcctccttttgctggctctgcaggtttcggaggcaaagcgatcaaatgccaatcttacggcctgccagcatttaaggcgctcggagtcgcgaagagcgaaagctctggaaggatcatctgtacgcgtacctcgatgccaaaagaacggcgactttgatgccatccagtgccaggatgagaaacacggacgcgattgctggtgtgtggatgactacggcgtggagctgcccggcagtcgaaatgagacgcgtacgggcgtggtatgcgccgaaccgaagcattgtgccgcctccgcgtgccgcatgttctgtccctcgggtttcgccagggatccggacacgggttgttccgtttgccgctgccgggatccgtgcgatgggctggagtgtccacgtggccagtcctgccaactgcaggaggtgcagtgcaaatcggagccatgtccaccactgcccacgtgcaagaaggccagatcgctggccaatctctgtcccgccggcttgccgctcgccatcgacgacaccgtgagaccattcctctgtggccaggagccgggaaagccgcagtgtccaccactttaccagtgcctagtggagtccggaaacgactacggagtgtgctgccccagtgcgctgaccttccagaaaccaggcatctgtccagctcccgatcactcgcagtacactgagcgaacgggctacatgtgcggttcaccctgctcccacgacttggagtgtcggaacatggagaagtgctgcttcaccaagggatgccagttcaattgccagcagccgggaaatgttacaagttgtcaccaggccaaggccctggccgacatcttatcgattaatgagcgcgaaggacgcggctatgtgcccgagtgcaacggtcctggtggtcagttctccccgcggcaatgttccaggaacggactcgtctgctggtgtgtagatccccgtaccggacacaagatcaaggaaaccatgggtgcggccaacaatgttaactgcgatggatgggagaacatgattagcaggtcgtatgccaggagtttccagatggagcagtgcgacacaaacatctgcgccgctgtctgcgagtacggatttaagaatgaccacaacggctgtcccacttgcgagtgctccgagccctgcgatggcttcaagtgctccattggctcccactgcgaagtggccacggatccgttgtgtgaatccggttcttccctgtgtgcctcatggcccgtctgcaagcctgatctagtgtactccaatccctgcgatgtgggaactccactttcagaccccgcaaccggtgaggtgatgtattgcttcgaggatcgtcaaggacgcagcttccagcccacagccttctttgaacccgaaccggaatcactgtcaaagcaaggtcgctccatgagcaacaggattatgtgtccggagcagtacaagtgcaccaaactgcatcgggaaacggagaatgtgtgctgtccagtgccggagaaaccaaatccagctgaggaggcaacgggaacgcatcagcaaaccatgtgcgaatatctgagggacttttccgagcgcatggagggcactgaggagggcatgcaactggcggttccttcgccacgttgcaccaacgatggcgactacgagggtcgccagtgtcagttgaagaaggtacgggtcacccgcgccaaacaacgcaaaattctcgaggagaataccattcggcgcatgaggatgctgctcgccagtgctgcaccaagtgcctccaagcggtctcgtcgggatttggaacgcctgaaactgtaccgcgtggatgacagcgctctaaaaatccaagtggctgctcctgtcatgggtcggagtgccaaggtgatcgacatgggtgcagatcgtcagcagggattgggacaactcttcgagacggagttcaagaaggtggcctcggcatccaagaggccgccggataatgagaatgagctggtggaaatggaggtggagcagtgctggtgtgtggatagctttggcacagaaattccccgatctcgaggctttaatgtcaccgatgatacctgccgaagtctgagggaggacttggactgcctggatctcacctgtcgaatgggttgtgagtatggcttctccctggatccggacacccgttgtccggcctgccagtgtcgtgatccttgtgagggtgtgacctgcggctctggaaaggaatgccgagtggtggacgtgagctgcgagggtgaatactgtcctccagtccccgcctgtttgcctaggaagccgggacagtgtccttacctggttccaccgggtcctgataacctggatgccaacacctgtgcctacgagtgccgtaccgatgcccattgtgatggagcccgacgctgttgctccaatggatgtggcacccagtgtgtggatcctcaattgaaaaccgcctgccagcacttgcaggccattcagctgcaccagagttccgagctgggcatccccgcccggcaaatggcggtggcccaatgtgacccaaataatggcaaatggaatcaggtccagtgctcacccgatggtcactgctggtgtgtggatgatcagggtaaaatcctgcctggcacaagggtcaaatctccagcaacacccaaatgccaggagaactctagcttcgcgtgcccaaagacgaactgcagcctagagtgcgagagtggctaccagatggactccaatggttgtcccacctgcgagtgtagaaactactgcaacgaagtaagctgctcccctcacgaggaatgccaattgatctctgtggaatgtgtggacagtccgtgcccgaagatgcccatatgtgtgccccgaagagcctccatttgtcccgagggtaatcctctccagcaaggcgacttggacatgagctgtggaccccacaatgagcacgaagtgtgccccaccacccactcctgtcagctgaatccggtcaataaccgtggtgtttgctgctccaagacccgtgatgtttgcttcgagtccatggataatggttgtctggccactggcaaatcggagaaaaatagcacgcgctataggttcagtcccaaggcaaacaagtgcctacccgtggtcatcgactccgaggcacccgcctgccaaactaagaacctcttccacaacgaactcgcctgcaactccgtgtgtccagtgctcactcaatgcgagcgcctgaagctcaagaacaacctggctgcccagcgaacaggacactcctcagtttggttccaaccaagatgtgacccagtcactggccactggagtcccgtgcaatgcttgggcaagcagccccaacccatggacaggcacacggagatcgttagtcgcgcctttgcatcggaaccagctgcatccgctggcgaggaagcgcccggagtttgctggtgtgcggacaagaagggtgctcctctaaagggaaccctcacccgggagagcgaacccatatgcaatagtcgacaggctcgtaaccgcaaggcattcgattctggcgatcctctgatggagcaactgattgctcagctcacccaactgaatgatgtcgctagcgaggatctggacttcgatgagctggaggctagggtgctgcctgccaccgccagtgcagcggagtccagtgttacggagagagtactagagctggcgaactcactgctggactctcagctatccgtggagcaggccaccctgaaacccatggagctgaagaccacacgttgtcgagctctgtcgaaaacggcaccattcccggtcagttgcgatgaggcaggagccttccgcccgctgcagtgcaacggcagaagttgctggtgcgtcgatgcggccggcaaccagctacagtccacccacgtctttggagctggcgatcgtcgctgcagtcatgttccgatagaggcggtggccatcgaactccatctgaccaacagcagtggccggagtataaggaatgcctacgacaccatccggcgggaactgcagcagctactcggcggtgagtccgtcgaaaacttgcgcgtccaagagaacttcgatggatccgctattgtccgttttgagctgcacaacgaggccaaggtggacttggcctttgccatcgaggcggcaatttccgccggcgacttccgcctggcgggcggtcacttccggccggacttgacccgctcccactttgtgcaccgcagtgctcatgtcccagtggctcaggcggccaccgcccaggacgagtccatccagctggtgctgttcataatggccaccagttccgccttcctggtcagcatatttgtggtctatgtcatgctgaagcgaaaccggaacctcaaggcggcgaatccctatttgaagggcgaaggaggcgacaagcctgtggactactccgcacccattttcgtgctggccgccgacatggacagcaagaaggggttcgccgcgtag

SEQ ID NO: 11871 - protein, 1511 aa, DROSOPHILA
MAHYDQRWLKLFSGCLFLLLLALQVSEAKRSNANLTACQHLRRSESRRAKALEGSSVRVPRCQKNGDFDAIQCQDEKHGRDCWCVDDYGVELPGSRNETRTGVVCAEPKHCAASACRMFCPSGFARDPDTGCSVCRCRDPCDGLECPRGQSCQLQEVQCKSEPCPPLPTCKKARSLANLCPAGLPLAIDDTVRPFLCGQEPGKPQCPPLYQCLVESGNDYGVCCPSALTFQKPGICPAPDHSQYTERTGYMCGSPCSHDLECRNMEKCCFTKGCQFNCQQPGNVTSCHQAKALADILSINEREGRGYVPECNGPGGQFSPRQCSRNGLVCWCVDPRTGHKIKETMGAANNVNCDGWENMISRSYARSFQMEQCDTNICAAVCEYGFKNDHNGCPTCECSEPCDGFKCSIGSHCEVATDPLCESGSSLCASWPVCKPDLVYSNPCDVGTPLSDPATGEVMYCFEDRQGRSFQPTAFFEPEPESLSKQGRSMSNRIMCPEQYKCTKLHRETENVCCPVPEKPNPAEEATGTHQQTMCEYLRDFSERMEGTEEGMQLAVPSPRCTNDGDYEGRQCQLKKVRVTRAKQRKILEENTIRRMRMLLASAAPSASKRSRRDLERLKLYRVDDSALKIQVAAPVMGRSAKVIDMGADRQQGLGQLFETEFKKVASASKRPPDNENELVEMEVEQCWCVDSFGTEIPRSRGFNVTDDTCRSLREDLDCLDLTCRMGCEYGFSLDPDTRCPACQCRDPCEGVTCGSGKECRVVDVSCEGEYCPPVPACLPRKPGQCPYLVPPGPDNLDANTCAYECRTDAHCDGARRCCSNGCGTQCVDPQLKTACQHLQAIQLHQSSELGIPARQMAVAQCDPNNGKWNQVQCSPDGHCWCVDDQGKILPGTRVKSPATPKCQENSSFACPKTNCSLECESGYQMDSNGCPTCECRNYCNEVSCSPHEECQLISVECVDSPCPKMPICVPRRASICPEGNPLQQGDLDMSCGPHNEHEVCPTTHSCQLNPVNNRGVCCSKTRDVCFESMDNGCLATGKSEKNSTRYRFSPKANKCLPVVIDSEAPACQTKNLFHNELACNSVCPVLTQCERLKLKNNLAAQRTGHSSVWFQPRCDPVTGHWSPVQCLGKQPQPMDRHTEIVSRAFASEPAASAGEEAPGVCWCADKKGAPLKGTLTRESEPICNSRQARNRKAFDSGDPLMEQLIAQLTQLNDVASEDLDFDELEARVLPATASAAESSVTERVLELANSLLDSQLSVEQATLKPMELKTTRCRALSKTAPFPVSCDEAGAFRPLQCNGRSCWCVDAAGNQLQSTHVFGAGDRRCSHVPIEAVAIELHLTNSSGRSIRNAYDTIRRELQQLLGGESVENLRVQENFDGSAIVRFELHNEAKVDLAFAIEAAISAGDFRLAGGHFRPDLTRSHFVHRSAHVPVAQAATAQDESIQLVLFIMATSSAFLVSIFVVYVMLKRNRNLKAANPYLKGEGGDKPVDYSAPIFVLAADMDSKKGFAA

SEQ ID NO: 11872 - DNA, 11501 bp, DROSOPHILA
tttgtaccgcagtcaagcgcaaaaattcctcgaaaaaccatagaccaaggtgtttatgagtttattaatactgtgtaattattatttgtgatatatgtgtgggaaattggtaatagatcaaacatgaaagtaatggtatctgtttttctgtattaaaataacatatctgataatttcctaaaggatgttaatgttaatttaataggtattccaaaactaagagtgaactggcaaaatgtaaaattagttggtatttccttttgaataagcttgacctttaacttacttcatagcctatgacaactcatatattataaatataaataataataaatgagtgctaataataatttttaatcaaaaattctcacaagctaaccttgtaatgatggtacgcctaactgatacccattatgttaccatggccaggcataaattcctgttactggcaccgcatcatcatcatactggcattcggtcatattaaaataatatcacctatctatagggctgcggctcttttgacacgcacacgtgctgctcagcagaccaagtgaacttatcaatgaacacccgccacacccacacggtggcccaagcacctgacccacccatgcccagtggccagcaccacccgaactcgcagaagccaatgaatggccggcagaccaagaaacacccactaacatctcgggagattcttcgtctgccgagttcaagaacaacacacaagtggccgtaatgaaatgtgaatagccttggcaaacatgagtccggaaagccaacttatgatggcttctgaatagccaaccgcatagtacacggctaagagcggggaccaaaaaaggacctgctctttgctcgctcgttggctttctctttcgcagcctcggctcggaaaaaggatgccgacaagcaacaattttcattgataaaaacaccagctgctgggtcctgaaactcagtcgtacgcgagtcctcagtcagtcagtttcgagctctgggatgcaacggatgcggatgccttaaatccccgagccgtttggcggtgttattgaaaattgcgtattcgccgcgtattaccaagtaatagcttgtccaaagccactacgctgtcaaaggacgggcttaaaacgctacttgcatttttacgtactatacatagataaattttccgggtaatcggcggaaattgagttaaagttttgtgtccggttggcgccagttggcaattggtgctggccaactttcggacccgaacgatgacaaactgaaaagtaaactttgtaaagactcagcaccttacaaacaaattcaagtgtttcgcgaaaaaaaataaaaaattttgaattgaagaggacacagttcggtgaaaaaaaaatatttgcaatgcacaatggaaaatcagcaaagtgacctccaagtttacgaaaacagaaactaactcaataaccatccctgcaggtgagcagaggcaacattttttctttaaaacattttttaccatatttccgtaaacggtttgcgtcctttggcaaatttatggttgtcttggaataaaatgaactttatttacttggcaacaaaacgagtgtttattcttgtcgcatagggaatcaagcagccaacataaggactatattttgtttaattcgatttaatgtgagttgcagaattaaatttctttttaattcaacacgcatctgtacaccatttgtaaaattacaagctaaagctcagcaaacactaaattttaatcagtgaaacgaactgtattctgtcaattttaatatcaaaagcatatacattgctcttaaaaatattaaactgcgttagtaacgtaaacagaaaatgctatgaaatttgttataatcaaaattcacttgaaagagatttcaacaaaattaccaatctcgtgttctaaggaattaatataataattataataatatcatagcttgttccctgtcacctaatatataccatttaaataaaagtaatgcctaggtaattgtttgtgagcgataagcgcagatttgtctgcataattatgtgttaatttgattgaggtctactgaagagggccttatttttataagccaaaagaacaaattcaaacaaaacacttgagggcggccttagctggcaataagcggcttttgcctaatggaaaataagtggaatgcctaggaattattggccaagtggacgggctgctctctttctggcaatcctgagtcctttcgactgattcgtttttggctcctttggccccatctccgcacgctttgttcggcttgacacacctgagtggcgatgttccacacaggcactttcccaaacaaatggaacccggcatctcgcatttggttgcccgaacgtaagtcccatgaagtggtcttctccagtggacagccagtcagccgcatttcttgggggcgctcttctcgagcgcttggcctctgagatggcctctttggatgtcttggagatatgcagctcatcctggccacccacttcgccgagccattccatttcatttccctggccaacatacccgtatgaaacgatgagtgctcttcacagtttttgcctacattccggccactgcaccgactgatggttgatggagacccattctccggttagtgttcgtcttggtcgtcttggtctgggtctcggtcctggtcacaatgggaattcgcagcttaaaggcgccgtggctttattcaggccagattggatacttgacatgttctaatgcggcgcagatctcagtttctgcaacgtgctctccctatctcagttacatgaattagcattcatcgccactgcactgagcaaaaaataggaccacaaatcgctctaactgctgtaaattgatatccattcaattattttatttaagtattataacacattgatagaacattaacatgtcatatatttttgaacacaattcagcattacactttaataaagtcgaatttgaatttatccaactgacgcgttgggtgatatcataaattcaatttcgagaatgacaggtcattaaaatgttgtcacctacactgtcaaatatttaagtcaaaatattaagttataaaatatcaaaaagctttgatagctttagagtatgatttacgtttaaaaggattgtacacgaatacaattttgtttttttaagcaatcagcggcgtgtttctgttttgccatcataaatcgcagagtttcataatccctctaaattaaaatgtcctttgggatttttctgaaatttttttcaaacgcttccccctttttgtttcctgcatgtttaggccgttaagagcctgttgatgatggcggcatggtagaactttctgttttgtcacagccttgggctgctggctttacatttggtggaaaaacgagaccagccgagcacgtgcggtccgcggggttggggggggttgtggaagctaaggacgtggcaggacgaaagcgctgagtgcagatgaggactgcaataaactgccatacataagtgaaaattgtgaaatgaaaacttgcgcgagcataaatcaatacacccaaggggggtcatgggctcccatggcaggcaacaaaaaaatatatatgtatatatatcagctgggaaatgtgctccctactcaggtttagcgacttgtatttcatgttcccaaatcagctggtgttatcctttgattgccgggcacacgacaaaagtggtggaccaggacacatgtgatgattgcttgcgtgggtcgcaggaatgagccaactcagattggtaatattgtgtatgaacgtgatttcgtgactttgcaatgtttctatttaacaaaaactcttgttaaagaaatacacacaaaacatcacttataaccctttttggatatctatgaggatttaaggtttgtaaactaaggcaatggtataccttaaaaagtctatagtaaatcgcatatattacatcaattttaacgttcatgctgatcttccagttccaaaatatatattttgaaatagcttacatttaattaagtgcacttgctataaaagttttgagcttgcctgaagtttattacataaaaaattcgcagaaaggcggctaaagaatgaaactaatttaagcccaaatgataaactatttgccaagcatgtttcgtttgaattatgctcccgttgctctgcctaccaaaaatggcaaaaactcgcaatatgattattgtggcagcttcttccggtgaattaaaaatacaaaaaaccagctcaaattgaaacttaattttaataaattgttttcatgctctttttcgctgccgttgtagcgttttcccgcccatttcacccgagtggctggataattgtatccgcgcaatcatcccgcggcttccattgccgcaggataaaaaccaaactgcaacgaacagaacagaactgagcactttaagccatttccactcgtaattaaattttgagagcggatgaaattgtggcggctaaataaaaggaacaaaatgcatctgtgcatacagcaaaaaaaaaacagcaaaaataaataacaaaatgcagaagagcaaaaaatcgcgcatatccgctttgtaaaaatacgagtctaagtgatgggttccgtttttgtttagtagtgctcactagtgaacggccttgtcgcatttggggctgatagtggatgtagtgtggggtgtattgtggtgtgcatgggggtgtttgaatcgcagaagtcggcccagcccgttggccgtcaagaggacctggcctaatcgaatgaatgtagaatgggcacaaacaagtcacgcctgcctgcgcatttcatcaaagaacggcgaacaagaggctaacagctcttcgtttctctctctctttctctgctcagctgggtcctttgaagatcctgaatgacactcaattggcctaatcggtttctgaaaagcatagtatgaatttcatacggtacgctaatttcgaatataacaaaaagcaaaaacgcttttgatatctaaattgtatttgccattgaaaagtttatacctatatgtataatatggaacctttctaaatatagtaattgatacgaaattgcaaaaatgatggatgaacatctcaacattcaacaggttgcccagttacttaatcaatccatcggtgttgaaagtgagcactttatacaaaaatactcatgagtggttctaaagcggataagaggatttatcttgagctcaaaaactgatgcagtgatgcaatattcaagatgtgtgccttagtattcaacatttttgccagatttatcgaaacgtaaataaataaaaatatacatgaaatttaataacattgcgcagctttttggtgaaagcagttttaatttaataaagcaatcgttgcgttgaaactaatattattttaaattatacaggatacaaaaaataatatacatatacatttaaattttgaatttaaaaaggggtgtgacagatttactgaataataataactttaaacatgccacctaacaaaagcgaaaacaattgtttaattacatttgtgcaacttgtggcatttagtaaaagcgaatatctaagcaaataagtcgtgtaatttgatatgcaatatagcaaccaaacaaaaatgcgtgttattaaaatcatgattactgccatacgtatagatgtttcatgtcctgtcccttgttgatttcatgctgataaaggacatacacttttaaatcttgctaacttggtacttttaacgagcattcgaaggtatcctgtgcccatttcaaaaaagctgtaagctctttggcagccaaaaaagctgacaaatttgtgccggaaaggaaacaacttcctatttgcatgatttattgccaatggaataacaggttggcttcagttgcgtatgtccctgctattcgattttcaacgaaatttcggttggcattcagtcggaatgaaagtgaaaacaaaaagtgctactactacccttttgtgaaagcccccggagaaaagacaactttcaattggccaattagtgctatttaaatggcaagttacgccgttttcaaagggccaactattttgtttttgaagttccgcgagttgtaaatgtaataagcaaatttcgcagttctccataggacacctttacactgagttcctttccagttgctcaagttttgctccttggcagctgcacttgttgttcctgtttgccagaaagttagtttctggccaagaatttgtctttggccaagtactgctcacgctcggtttctttgggcaaaagttggtatttgagtttcgcagtggaaaagcacttgcggcagatcttcaaattctgccaaacccggcgggctcacgtggccgccttctagttatttaataagtaattaagttccctaattaaatacattctcgcagagatttacataataagtaatctacgccgaacgtcttcctccattgcggcgttaattaaatttgcagaccgattgcatttcggaaacttgatttggtttgcgtctggctgccagtcgttaacaaatcatgattgctgaaatggtcaactttgggcatcgcacttcgtatacacttgagattaaaaattctttaataaggggaaataacacttatttatagaagtatttttaaaatatatacaattaatctagtcagcgcttttgacgtaatttatattgagttcgaacaactcatttgacaacatcaaagaatccaatattcagcaattttaaacatactcacatgcgaagggggaatcgaatttccaataatttaaaaaggaatcggaattttacattttctcgcgcttttgcggagaagccgtgatatggtgactgtatttatgaaatttgcttttacgccacttccatgaactgaaaattggttttcactgcctgtttttggtcgatataataatgctgagatatatatatgatatgtaatgtctttctatatattgtagcatttacgaagggttatagcttgatataaaaaaagaaagaaactttgaacaaactcaagtatataaaaaggtttcaataaaatatataaagtccattagctgtagcttacaggagcataagttttcttgtttaagacgaagctttatcgaactttatcttatagatacatatatctattactaggataagtaagtaattacaattatttatgcacgctgcattgacatatgccaaacacttaaagtattcccacccagccgcacttgctacatttatcagcaattgaattaatttcaggttgcggttcagctgagtttggtttgtaaaatacattataatgtttaataatcagcagagagcaggaaaaatatgtattaagttcggcattgtgttaaactttaagcgaatagttaacacagtgttattggttacccgctgcttttaataactttccctttcgatgcccacacaacctgagttattttccttaatggtctgaaaaaatgaagaaaaaaaagtttggctcaagtttattggtttcgcgctgctttcatcaattgctgcacgcaaatgcttctcaaaaaaaaaaaaaaaaaaactaactcttcatttatggcatttcttagttgcgaataaattccgatttaagctggttgaaaaaaacccatcctttcaacggtgactaaacatattttaagcagaccgctcaaactcaaaccgtgggtggttaattaaataagagcatcgattaagtcaactgtctttttatctgtcccacttttagggtcacccggtggacagctaattgcagctaaccccattggcatttagcaaacggaaaatgcatcgtgaccgctgcaaccacattgcaccactaccaccagcagcatcagcgccaccacttccacctccagcagcagcaagggaatccgcaccgctgaaactgaatctgaaggcatcccagtggcggcgacacacggaatccttgccaaatgcggccaaatgcgaggcgctggcaagtaaataagcgtaatcctttgcgggcacgtaccaccactactacctcctgttcggagtagctcgtaaatatttggccaagtcagtcatggaggccatcatcatgacgaccctgcccaacctgacaacggatgcaggtgacagcagcttctggctaaccggtgccctctcgctctccgagatgttggccaactcgagccacagccattccactgggagcacaacctcgacggctgggagttcggccaccgaatcatccgctgtgaatgtaggcaaggaccacgacaagcacgtgaatgacagcgtttccacgggtctgaggtaagtgcatgtgcctaggcttttccatttccatggcaacacacacacagattccattaagctcatgactgcgggctcaacaagtcatcgcgataagctcagcttcattttccaggagatgcattcaactaatgtgcttagaattctactattgtacataactaacatatagggaatataatcagattacttagaacctcagaacagtcaatacaatccacttaatataaatgaattaaaagtatctatcgaaactgaaaagaagaggatcattagcttgggtacaacatttataagaattttggcttatgaagttgcaaaaagaattcttaaaaaattcaatacaatgtcaaatagttctgaaaccataaattattaacaattaaatattaaattatttatattgatttaattcatacatttaaacataagttacactactgcaaggaggaaagtatcagatgacttgagctatactttcataaacttagcttagagcaatctaaaccaaattgaaaactcattgaaacccattttaattgaataaattgaaacatttacttttcccatttccccagcaattacagtaattaccccagctacattcactacagggacaagtacgacctgagctacattgccaaggtgaatcccttttggctacagttcgagccacctaagtcgagcaccttcctgattatggccgccctgtattgcctgatttcggtggtgggatgtgtgggcaatgcgttcgtcatctttatgtttgccaaccgcaaatctctgcggactcctgccaatatcctggtgatgaatctggccatctgcgactttctgatgctcatcaaatgcccgattgccatttacaataacatcaaagagggtccagctttaggagacattggtaagcttaaaacttggggaaataacttactaaatatctatataaatgaaattcattcggcttgcatttatgtcaaaaatcgatcaacaaaagcaatctacataataaataaaattaaattggcccaaaatgcttggactgatttcagctgtttcttgcagaaattcatttgtgggattctcttttcccgaaagcaattaatagaatttaaatgaaacaataaaagttcaatttgtagcctacacatcttggttcatgaaaaacatattccaaaatgtaatggctattaaaatttcaccgagccttttgtttgccttgaaacgggtggttcattaaaaatcctactgactttccgtcccacagcctgtcgcctctatggatttgtgggtggcctaagtggcacctgtgccatcggtaccctcaccgccatcgctttggatcggtacaatgtggtggtgcatccactgcaaccgctgagacgctgctcccgcctgcgatcctacctgatcatcctgctgatctggtgctacagcttcctgttcgctgtgatgccggccctggatatcggactatctgtctatgtgccagagggcttcctcaccacctgcagcttcgattatctgaacaaggagatgccagctcgcattttcatggcactgttctttgtggctgcctactgcattccactgacctccattgtgtactcctacttctatatactgaaggtggtcttcacagcgagtcgaatacaatcgaacaaggataaggccaagacggagcagaagttggccttcattgtggcggctatcattggtttgtggttcctggcctggtcaccgtacgccatcgttgccatgatgggtgtcttcggcctggagaggcacataacgccactgggatcgatgatacccgcgctcttctgcaagacagctgcctgcgtggatccctacttgtatgcggccacccatccgcggtttcgtgtcgaggtgcgaatgctcttctacggacgcggagtgctgcgaagggtctccacgaccagatcatcgtacatgacccgatcacgatcgtcgttcacccaccgattgaggacgagcaccaccggtgagggcggaatgggtgatcaccgcatggaaaactatctgatgaacaacaatctgatgatggtgcccgaggagacggaggagaacgaggagatcgttgtggtggccgagatcaacaattcgattagcagcgtcatggaacagagtaagttctgaaggctgacgattatgccagttaagagaacggaaattctgtcaatctgtttcgaaccaactaacataaacatttttaatcagttttaagttttacagacgtgttttatataatttgaaaattagtcaaacctatgatcacgatgatactgaaaactttgcttggaatatctgaaactcgcctgtttaatttccactttttccaattgaaaatttcaatttgatttttgcccaggtaatttataaaaaaacctttcctatctcgaaaagtaaactgttcgctgttaattgaaaatgtttgtgcactgcactgcaaggcatatcaaaatggaagctatcaataatcgtaaattgaatggatcggactcaagtttcattgttgaactaatctaatctaatttgtatgtagaaataatagaccgaactgaaatcagcaatggcagcaaagtaatttcgctcggcaatgatatatgccaatggcattgttcatctgagtgaatgcgttgtcattgatggacctacaattgaaatgaaaataataataataataaatagaaatgaagcagggaaatccgccgagcagtgggaaattggcaaaggcacaacgacgacacagtggtgatagtaaacatatttaatgagcttatgtgatgtttagacagggggagtaggcgatcagagcagggaatggattagttagcctatatacatatatatatacacaggcatatgtacatatgtataagacatcggaatagcaggccaattagagaggcagggccgaaattagtacaaagaaagagggtggcgtgggtaggggccgaagtggaaattcaatagtcagattatacatcatttcagggaaagtcactcggacccaaggtcaagccgtggtattggatgttaacaagcggatgtgcagattgtttgcattgtagtttaatattggaataactcacaatcaaagcagcctgcggacatcttgtatttctgaaatggagtc

SEQ ID NO: 11873 - DNA, 2177 bp, DROSOPHILA
ctgggatgcaacggatgcggatgccttaaatccccgagccgtttggcggtgttattgaaaattgcgtattcgccgcgtattaccaagtaatagcttgtccaaagccactacgctgtcaaaggacgggcttaaaacgctacttgcatttttacgtactatacatagataaattttccgggtaatcggcggaaattgagttaaagttttgtgtccggttggcgccagttggcaattggtgctggccaactttcggacccgaacgatgacaaactgaaaagtaaactttgtaaagactcagcaccttacaaacaaattcaagtgtttcgcgaaaaaaaataaaaaattttgaattgaagaggacacagttcggtgaaaaaaaaatatttgcaatgcacaatggaaaatcagcaaagtgacctccaagtttacgaaaacagaaactaactcaataaccatccctgcagggtcacccggtggacagctaattgcagctaaccccattggcatttagcaaacggaaaatgcatcgtgaccgctgcaaccacattgcaccactaccaccagcagcatcagcgccaccacttccacctccagcagcagcaagggaatccgcaccgctgaaactgaatctgaaggcatcccagtggcggcgacacacggaatccttgccaaatgcggccaaatgcgaggcgctggcaactcgtaaatatttggccaagtcagtcatggaggccatcatcatgacgaccctgcccaacctgacaacggatgcaggtgacagcagcttctggctaaccggtgccctctcgctctccgagatgttggccaactcgagccacagccattccactgggagcacaacctcgacggctgggagttcggccaccgaatcatccgctgtgaatgtaggcaaggaccacgacaagcacgtgaatgacagcgtttccacgggtctgagcaattacagtaattaccccagctacattcactacagggacaagtacgacctgagctacattgccaaggtgaatcccttttggctacagttcgagccacctaagtcgagcaccttcctgattatggccgccctgtattgcctgatttcggtggtgggatgtgtgggcaatgcgttcgtcatctttatgtttgccaaccgcaaatctctgcggactcctgccaatatcctggtgatgaatctggccatctgcgactttctgatgctcatcaaatgcccgattgccatttacaataacatcaaagagggtccagctttaggagacattgcctgtcgcctctatggatttgtgggtggcctaagtggcacctgtgccatcggtaccctcaccgccatcgctttggatcggtacaatgtggtggtgcatccactgcaaccgctgagacgctgctcccgcctgcgatcctacctgatcatcctgctgatctggtgctacagcttcctgttcgctgtgatgccggccctggatatcggactatctgtctatgtgccagagggcttcctcaccacctgcagcttcgattatctgaacaaggagatgccagctcgcattttcatggcactgttctttgtggctgcctactgcattccactgacctccattgtgtactcctacttctatatactgaaggtggtcttcacagcgagtcgaatacaatcgaacaaggataaggccaagacggagcagaagttggccttcattgtggcggctatcattggtttgtggttcctggcctggtcaccgtacgccatcgttgccatgatgggtgtcttcggcctggagaggcacataacgccactgggatcgatgatacccgcgctcttctgcaagacagctgcctgcgtggatccctacttgtatgcggccacccatccgcggtttcgtgtcgaggtgcgaatgctcttctacggacgcggagtgctgcgaagggtctccacgaccagatcatcgtacatgacccgatcacgatcgtcgttcacccaccgattgaggacgagcaccaccggtgagggcggaatgggtgatcaccgcatggaaaactatctgatgaacaacaatctgatgatggtgcccgaggagacggaggagaacgaggagatcgttgtggtggccgagatcaacaattcgattagcagcgtcatggaacagagtaagttctga

SEQ ID NO: 11874 - protein, 551 aa, DROSOPHILA
MHRDRCNHIAPLPPAASAPPLPPPAAARESAPLKLNLKASQWRRHTESLPNAAKCEALATRKYLAKSVMEAIIMTTLPNLTTDAGDSSFWLTGALSLSEMLANSSHSHSTGSTTSTAGSSATESSAVNVGKDHDKHVNDSVSTGLSNYSNYPSYIHYRDKYDLSYIAKVNPFWLQFEPPKSSTFLIMAALYCLISVVGCVGNAFVIFMFANRKSLRTPANILVMNLAICDFLMLIKCPIAIYNNIKEGPALGDIACRLYGFVGGLSGTCAIGTLTAIALDRYNVVVHPLQPLRRCSRLRSYLIILLIWCYSFLFAVMPALDIGLSVYVPEGFLTTCSFDYLNKEMPARIFMALFFVAAYCIPLTSIVYSYFYILKVVFTASRIQSNKDKAKTEQKLAFIVAAIIGLWFLAWSPYAIVAMMGVFGLERHITPLGSMIPALFCKTAACVDPYLYAATHPRFRVEVRMLFYGRGVLRRVSTTRSSYMTRSRSSFTHRLRTSTTGEGGMGDHRMENYLMNNNLMMVPEETEENEEIVVVAEINNSISSVMEQSKF

SEQ ID NO: 11875 - DNA, 18571 bp, DROSOPHILA
cacattgattcaccggcttcgggggaggttttctagttgtccccgggggttgaccatctgactgaatgttaaaaacgagtctcggtaattgtcaacacttttggggggatgggtacaactggagtgacgtcatgcaagggctcgaataggcggctgttccgaaatgccaaagttgttggcctgccctttttatcaaacgctttgttttcgttatacaatttatgtagatattcgctctgtcttcctctccctatggcactctctctctctctctctggggatccctctttcgcccttgccacccctcatttctctgcccgctgccccattctccgccgccctcgctctccaactgacacacattccgctgctccgagctgcgcagccaaccccttgcctgcctcacttgtcacactgccatagatttttcggctggaaagctctccaccactgtgcacttttcgcacgagagtctccactcgaaaaaaataagtaccacattttagatttcattttattcattaatttcatttttcatttaataacttatctgaaatactgccggttgtcactaaaatctcaaaaatgtgaatattgaaaacgtttgctttaatatgaagctttattcgcaattctttttttaaagagaagatctttggaattgccgttcgaaatatgctgataagagttcattacctatgaagcacatgcagtaagaagtcttatgttttaaacctatcttttcatatttttgtgacctgatttaatagtagtgacattgaaaggctacacgaaatattcttctttacgattagccttaaaagcgtttgtagcacattcatggttttttttcgccgagtgtatgagagcgttgggctgcggtgtaacatctgctggcgaaagctctctgccgacgtcggcagaacggaatgttctatccgagaatcgagaaagcttaaccactcgcggcgcgccgaaaagtttcagtcgaacgtcgaatccgaactgggaaggtccaactgtgacagcagcagctatctcgtctctttgtcgggtggtacagtacagctctgctcccctgccgcccgcccgccccctcggcgctggtgtgtgcccgctgctctgcttacacaataactgtgcatcgattgagtccagctccagcgagaagagaagcagcccaggactaactctcgttcgacataagaataaaaggatattacgttagcgtacagcagtcgtgtgtgatcagtatttgttgtatttgtctcgttccaacgcgaatcggttctagtgctgaaaacaagttcaatactgctaacggggtagttttctgcgaaagcccccaaaacacaatacgcaacgccaagcgcaaaaattgtgtaatagcacccaaacgtgtaaaaggtagaaaaaaataagaaagaataaaagaaaaaaaaacgaacaaaatgaaaccaagaactttccatgtctgctcaactgcagcgcccaccgactgccccaccacccccctttggggcgtcgagaaaacgacaacgtccttgtacgaaatcgatttttccaaaacttcatgcctggcgtaatggatatatacatttgtaaccatctgaagagagaaacggagatcgaaaagaactgtgtgcccagccattatacctttttcgtttttcccttagggaaaaacgggagatgggcataaagaaaatgcatttttcggacgcatttgacagtgttggagtgatctagagtgttttagtgtgtgtgccatagcgagacgaatatgcagaaataatgtttttcctcctctttgatttggcattcattttggcgttcatggcaagccaaacgcatgtccgtccgtttgtccgtttcctccgcatcgctttcgcctgacgtacttttgtggcaatgaaatcgtttagattcaattgacgcgatttacattttggaatagcagtaatttcctggccaccccacacgaatgagtggatatagcgagccagccacatatatagagcgatttgggtcccccgcctggcgatttcataattccgcacacagcataaaaaaaagaggggcacaggaaaaagtcttggaaaattttcctgccgctcttttcgaacttgcgcccccgacagtttgctcccactgcgctgtttaccgttaagctcgctcactttcgaaattctgtctctcgctttctctcttggcctctccattgccatgtgccgttattcggcatcctggaaactgcagctcgcctgcatttccatacacacactcgcttccattgtccacttccacacaatttcccgtgactccgtggccttccagcggtccacttgctgctccaccgcctcgtccttccagcgcccgcgtatcctgtggattgttgcataagctcgagtcgttttaaccgttttcgcctctattaatcttgcccttttccaaacttttaattttttcatttcagttttatcaagtttttattttttactttgttaatcgtgttttatctgccccaaccgttgtcgtgccttacatttttgtttgttgatcgttttatctgtctcgcctctaataagtttaaacaagaatccgcataatgagtgctcaggtgggtaatcgaaactgacgagctcagaaacattttattcatttacgtatatttttccatcaattgtaatttaccttgaccgcttcgagcatgataaatttaagttaacttttacgaatcagcgttacataacctatccttgtcctcttattaagtagggattcgtataagaaattatattggtctggtaaaaaatatgtatgtcggttttatagagagcaagcaaaacgtgcgaaaattaagcagacaattagctggaaattgttaataatatttaaattaaacactccggcaactgagatcattagcgagctcagctcatctggcgtttcagtctgcggatcacaaaaataataataaaaaaaaaaacaataaacaagtcgggtgaaaatgcatttctaagatactagagatgccagacacgatgtgttatcttgcccagtgaaactggtttttattttctttttcggggttactatgaaggggaaaaaacgagcctagcaaaacagtttcaatttcccagtcgaatgcattgtgttctatcaatccgaatcagacacctcaacgattgagccgcctcaatctggtttgaaaccggttaaaaccaaacttgcactcacctgccggctaatgcaccttcgaataaaagcgatatgtcaacaattcgcccgatttctggcttacacatttcccagatacttttgtatttgcacttttttgcattgattgaacaattagcgcgtcaattcgatgcacagctctttccctccaaatagtcgacatgttgtaaattgatattcaagttcaaatgccaaatggtttgcggcgaaatgtgtgcataccgttttgttctattcggtttagggggggacatttcagctggagcgcagcaacagatacacagatacaattgtatctgttcgtctaattggttcgctggcagctcacagttcgcagttctcagtttgctattttccatttcactggcttatgtaagtttctctgcggctgaccgcccattgtcgtattctgatttatactattttcgcccgatctccatcctggaccccaatcccaataccaaacccatacccctgtttccacatgctgtgccatttggcattgtttcggatcaattgaagcatgaaaagcgcgattaacttgaattaatgtgtatagaaaaatcggaattggcggcattgtgggaaaaccgggcgctttccgcccacaaagtcatggctaacaattgtttactatttcctaggcaaggtagcatgtaagcttaagatagtactatcattaggatatattctaacgcatatcttaactttaatcctcccatcagattgtttagcacttgagagggaatcttagaacgagggaaaccagcgacgcgagataaaagatacgaaagcagatcgatagtcgtttgaacacttgccacagtgcgtaagccgaaaagtagagaaacccttcagtagcaggcctctaggcccgattctctcgattctcgattcgatttatttcatgctgccaaagcggcctcaattgaaccagaaaacccaaaaggccgaaaaacagaaaaaacctgaaaccaaaagcacatacatataatgaaattaaataaatcaagacacgccaggcccgaaaaagcaaagccaaaaaaagcgtaagattctcgaatatgtatagtcgagtatacccgcaagttggatgccatgtgaacgcgacaggtttgcgttctcgctttcccctcgccctctgcattcattagtgtatacatactttcgtctcgagacatacgtatttttaattaatttgatttgatttccttcgacccctcggttttgcatggccaaacaaacagtagactatacgagtatgtttatattgcatatctcttgagttcttttgagtttcgctgacggctgcgctcttcactagcccattttgtttgttttttaataatattcataataataacagtgactcacgacgcactgtagataacgctgctcgatcccgaaaaacgggtcgaattttggctatcgcttgctggaaagcctttctattggaagtctatgtatagcacacgattcatagtcctttggcagcctggccaaagttttccatttccaattggcgctgaatcatcaaaacaaatcgcgtgttgccaggccaacgaaaaaccgcaatgcccgaaacgcctttagttttagctaagagttaatgtatgcatcatatcctatcatattaatgtttacactagtgttgcataagttgatttgtagtgtctctgttcgttcatatcatatttatcatatatatttggttattctttagttatcttatatgctacttgctagatctggtaaagtgaaaaatgaaaataattcctgaaactcaactatgaaataatttataaatataatcttattgcaaatacatatactgatttgtatagtttattttattgtaaagtaaaccagtctgatttattaatacacaatttatcactgtaacagactgaggtttgcattcacgaatatcatttatcactttaccagaggcggaaaatagctctcttatttattataatagccatatactacatacatgcatagtgtacgtcttgcatttgcttatgctcgtttttagttttgttcgatttttgatttttatctcttccccgtttgaaaacgttacttgttcgcccatcatcgacatcatcaatcaaacaccacccaacaaccgacccaccaacaacaacacccaaactgaaaccgaaaccgaacccgaatccaaactcgaaacccaaaccttcatgtgcgtagcatgggagggcggactcttatcgagtcgccacggttatagccaccgatgacgacaatcgcacagccgatggccagtacaaggtaaatcgaattttcctcactcacatcacacaccgccatatacactcgtatctatcatccactctatttatgtttttcatttctaataccgacccctttcgattttaagcgctttactaacccacttctttcccatcgatttcccttttcccggtctataattgcacatattatttattatatttgctagacttgggcatgcttccaatgacattttccgagtgcagttgacatttagaaagcactggcgaaatgtttacagcggctataaatagccataattcgctatgtataacgatggccaataataatgtcataaatatggccatttttgaatatctcggagtttattttcgaatctccattcattaaagaatatattattgttcaaggaaatatggccttgtactaataccaagcagttttttgtcttttgctcgattttaaaagttttccaaatgaacaggagttcaactagttgttgtttttttccatttgtttttccttgattgcatggcaaccccaacaatgacgtcagagagcaaaaaatcactgcccgtgcgtcttgaaaaaaagagaacacttatagacactgttaaagatagaatgccagacactagacagctgctaagactatatatataatataacttttgaatccacatatattttatttagaattctctttcttttccttcttattttttttatttggccaattcaaaggctttcgaggtcagcgaatgcatagtaaatctatatatttttggttgcactgtaggaaaagttacttttcattcatttttttcgtatttaatttttttttagttcctttgttttgtatacgtagcatatgtgtaggaacaaatgtttgtataattgcttgatgttttgttttgtgcacctcaattcatttacgtgctcttctcatttcgatcgggagcgtcatttagcgcgcattttgcatgccttagattgcgattactagagctttacgtatcacagcggtcgttttgaatattctcacgctcgaactcatttcggaatgggttcgcccaagtctataaccacatccccgtgcacaggttcggaaaatcacttgacaagtagtaaatttaagtcgggtaagtagttaacaacgggtaccggtacttaacttatctctaactgacccctaactcttaatggtaaacggaacagttgtacaattttgagggtttcttcagtgcaaacctatcgtaaactcttctctatccacttcctctgtaaccaatcccaaaacacactggtaatattgaatcctgtacgccttttttgaaaggcctaaccaaggcatgaagtaaatcgaattttgtgtcggctaatgggtctcgctgcagtgcatcattaacttccgccactaacgatattatccctctcaactcaacagtcaagacgcaagatgccggccaaagttaataaaaaggagaatttagatgatctcaaacaggagttggatatcgattttcataaaatctctcctgaggaattgtatcagcgctttcagacacatcccgaaaatgtaagtgcagcatttgagtaaatggtatcccattcgacatgtgaacttatacgtttttgatcttccgcagggtctaagtcacgccaaggccaaggaaaacttggagcgcgatggtcccaatgcgctgacgccacccaagcagacgcccgaatgggtgaagttctgtaagaacctgttcggtggcttcgccatgttgctgtggatcggtgctattctctgctttgtggcctattctatccaggccagcaccagcgaggagccggccgacgataatttgtatctgggtattgtactttccgctgtcgtcatcgtgacgggcattttctcatactatcaggtatgtgtccctcaaatctgagcagctaaagatcggcttactaactgtggtgtgtgttccgcaggaatcgaaaagttctaagatcatggaatcgttcaagaacatggtaccccagttcgccaccgtcatccgcgagggcgagaaactcacgctgcgcgctgaggatctcgttctgggcgatgtcgttgaggtgaagttcggcgaccgtatccccgctgatatccgcatcatcgaggcgcgcaacttcaaggtggacaactcctcgctgaccggcgagtcggagccgcagtcccgcggtgccgagttcacccatgagaatccgctggagaccaagaatctggccttcttctccaccaacgccgtcgagggcactgccaagggtgtggtcatcagctgtggcgatcacaccgtcatgggccgcattgctggccttgcctccggtctagacaccggcgagacgcccattgccaaggagatccaccatttcatccaccttattaccggcgtggccgtgttcctgggcgtcaccttcttcgtgattgccttcatcctgggctaccactggctggacgctgtcatctttttgatcggtatcatcgtcgccaacgtgcccgagggtctgctggccaccgtaactgtgtgcctgacccttaccgccaagcgtatggcctcaaagaactgtctggtgaagaatctggaggccgtggagacccttggctccacatcgaccatctgctccgataagaccggcaccctcacccagaaccgaatgacggtcgcccacatgtggttcgataatcagatcatcgaggccgacacaactgaggatcagtcgggtgttcaatacgatagaaccagccctggattcaaggcgctctctcgcattgccactctctgtaaccgtgccgagttcaagggaggccaagatggcgtcccaatcctcaagaaagaagtcagtggagatgcctccgaggctgctctgctcaagtgcatggaactggctctgggcgatgtgatgaacattcgcaagcgtaataagaagattgccgaggtgcccttcaactccaccaacaaataccaagtgtccatccacgaaaccgaggataccaacgatccccgctacttgctcgtaatgaagggagcccccgaacgtatcttggagcgctgctctaccatttttatcaacggcaaggagaaggttctggacgaggagatgaaggaggcgttcaacaatgcctacatggaactcggtggactgggtgagcgcgtgctcggtttctgtgactttatgctgccatccgacaagtatcccaacggctttaagttcaacaccgacgacatcaacttccccatcgataatctgcgtttcgtcggccttatgtccatgattgatcccccacgtgctgccgtgcccgatgccgttgccaagtgccgatcggccggcatcaaggtcatcatggtcaccggcgatcacccgatcactgccaaggccatcgccaagtctgtcggtattatatccgagggcaacgagaccgtcgaggacattgcccagcgcctcaacatacccgtctctgaagtgaatccccgcgaggccaaggccgccgtcgtccatggcgctgagcttcgtgatgtgtccagcgaccagctggatgaaatcctccgctaccacaccgagatcgtcttcgcccgtacctcgccccagcagaaattgatcattgtcgagggttgccagcgcatgggagctattgtggccgtgactggtgatggtgtcaacgattctcccgctctgaagaaagccgatatcggtgttgccatgggtatagccggttccgatgtgtccaagcaggtaagaaatcagattattatgataaaagtgggaccggacaaaaaatatcaccaaaattggccttccattaggcagtaattataattttaaagcagcataaaattaatttgaaaatgagtgtgatatttttttcttgtccacgcattaaccattccatattaacatttaaaaggattttgttgaatacgcgtttaatgtttttagtatgggaaaatacggtataattttcctttctgcatgaactcatgttttcggtttatgacactcctatagtaagtgagagatggttcaatgtggatttgatgttgtttttgcctaccaaaatgcctaaataaattatctaaatgatcctgtgtaggctgctgacatgattttgctggacgacaactttgcctccattgtgactggtgtggaggagggtcgcctgatcttcgacaacctgaaaaagtccatcgcctacaccctgacctccaacattcccgaaatctcgcccttcctggccttcatcctctgcgatataccactgccactgggaaccgtgacgattctttgcatcgatctgggcactgacatggtaagtttagacctctgccccaaacccaagctccatcgaagattaaagttaaagttgctattaagtcagtatcattcgagcaagttatatagttatacaagttgtagcccatcccagttaatagttaagaactagcctttttaacaccaactctgaacgtaaattgtgcggctgactgcactgccgatcagattcctgccatatcactggcctacgagggacccgaggctgacatcatgaagcgccggccgcgcaatccggagatcgataacctagtcaacgagaggtaaacgcgctagcctccgctccgatttagatccagcagctccagctagaaaacaacgcagtgctaggccatcgagtagtttaagtgctcttaatcacgtcacccaactctagctaaccccacagatctaggccaaaatcgaactgaattgaatttatggattgtaaaccgttgctaatgtaactacctgccgtaatccaatacctaggtgccagccatttcattggcctacgagcatgccgaagccgatattatgaagcgtccaccacgtgaccccttcaacgataaattagtgaactcaaggtgccaatcaagtcaatttataccccacactaaaacacacccacacacacacaccacacacacccactcgccaactcactaacctcaacctttaaaaggataaatccagactgaagtaaagaaaagcgcaaatcaagagaaaaaccatataactatagcatatgtcttatgtgtatgtggctggattgtattagaataagttggcctaaacgaaggcagcgtaaacatctaacaaagccgttgactcgtttatggcttactaactacccaactaactcttaagaatgttatcactcgaacatgcccaccacaccagctttcctctcagttaactcatctctgtagcatatgtccattcggtggcagatccctcgtcatgcatataccatctatacatttatacatagcatctgttctgtacatttcaagtacaataagtccatttcccatttttattgagtttccacccagagagttttatataaaaatcatacatacgctcatataaccgctcccacatgtacaattcaatcattccgactttgaatatcttgcccaaacgaatatcgacttcatctgccatactctaatgctctaaatgttaatatgtgtgcgtcgtatattgttaatctctcacaaataaataattcagatacatatcgctcacgattttcgttttgtggtgtaactaacactgagttaaccgtaagattcacccctcgacgttatatgaattggacaaattgattggcatttgtaatggattttaagtttgtacaatttggtaaaatttcaatatgaaaattagcatttgcacacgattttttatgaactaacccaaccgaaaataatggtttttatttcataatttgactcgagaacttacattagcttatgtttaactctgtttgtcactccacacatcaagcattttgcccaataagtctctgcagcttaagtttgatttaagaggggggtttaagttatgcaatctagtctgtaagatattacatatatacccttatgaaccagcgtcgcccccccagctcagcggatttctcagggttttgcagagttcaaggagaggagtttatgtttccataatttatcgtatttaatttcatttattttttccacttcaaccaactaccaaccgataacccaccaccacaaacgtttgcacgtttaggtgccagccatttccttagcttatgagacggctgaatccgatattatgaaacgccagccgaggaaccccttccaagataaactggtcaacgaaaggtaaagtttcgctccgtgctgatctcgaatcaattacaacatttaccagaacaaccaacaaacaaatttcaatcaatcaaccaaccaaccaaccagataacagcaagaaccgaatttctattctgtaacgtaaatgacacatatccgaactcaagtcaagattttgcatcttctgctactctatgaaccaccaaataattcctttttgtcacgcaatgaaaagtaaattgaataccattgaactgaacttgtactttggccggccaaagtccttaaagcaagctaaaatcagagtacgctttctttctatcctacaagtcgaagataatgaaatcattttactctacttttaacctatattatccgctatatctctgtctttctatatactaactaaaatatttttaaatagcttaagtacttcttggttgaatgttgattatttggattaattccacagatgttttccatgttttatgttaaatgtttcatttggtagcttttctttgaatttctgttcactgctctcttatttagttgaatattctcaagatttttctagtctctgatatttaagtttagatagtataaagtaaatttcaaatcgattagtaattttgattttacatacataactataacactgtgagtgaatcaaggtgtgttcttagtgaattcgttaagttttttcttataagctattcctgaacacactttaattcggacttgaaggtccaaaggataccattttggataatttttagaaagatctttaaaaaatacttaaagtatattttccttttgtatttcttcatatgtacggcatttcgtaagatttttaatttgtttttgcaataatgcaatatatccaattattgtacgctgataaatgtaattgtaattataactacatatacatacatagctactattgattatataacccaaaagaaaattttcatcctattaagttttaactaaagaagacaaaaggaagaacgactttttcggataccattttctcaaatatttttgcacttaaaatatttagaaactttatattggattaggagtacatgtaaatcttttccttatagccatgaagtcagttagtttgcctttcacttttctgcttaactttggtaaactttcgctctctctctctctctctctatcactttctctctatatctacaacgattcttaaggtgttatgaaattcaattttggggcttaagcatttttcccaagatacctgaatttatgttttccagtttcggaaacattcgtacttcttttgtttgtactccttaataacttggtttaatttttttagatttatgttctactgtagaagctctacagatatttgttttggtttttcgtataaagatccttttatttgtggtgcgaaggtaagtggtgatcaacttgatacctgaagactgaggctctagctcacttctgggctatgttttcgtagaataaacaataatttgttaccatgtcaatacagatcttttacttagttcttagccctatgctagagcaggcctattgttaatttagtgagtctgtataatctatgacatatgtacgtttctactgatgctacactcatgatacggtagacgaatcttttgtctcgacatcaattcattcacgaatctccacttactaaggtcaattcgaatcattcagcacattctatcaatcaatgccctgtatttttctctaccaactctcagtcagtcattcattgaaacgtctcgttttgagttgtagttgaacgacactcacacaaatctcccccgaactcaatctgaaatccagactgaaattgtcctctagtaataataatacatatataatgatttagcgcaatttaagctctaatccattcttgtacaccctatatctgtgcatttactattacctactacttactatatatcgattttactattactgggtgctctatgctctttttgccctagattagttttagcttcgtaagtacgtgggagctaacaaaaaaaaaaaaaatgaaaaacaccttaacatgcaacaaaaaataccccatgatggtactacttgacacagactcccggcctcccctcagatctctatctatctcttacgatctactagcgattattaattagcgtataaagaacaagtatttattactcgcaagcatatttatataaaacttttaaacaaatattttatatatatttgtaaactttaaccagattttcctttgtatttccctacattctttcgactcttgttatgtctttcttttgattatcaaacaaccaactaacaattgcaacttgcacaaataccgataaccgaacaatcaataaccattaattgccatataccgcaagattccggccatttcactcgcttacgagcaagccgagagcgatattatgaagcgtcagccgagagatccgtatcgcgacaacttggtgaaccgcaggtcaggaaaactaaacgctaaggtcttataaaaaaaaaaaaaaccaaaaaccaaactccaatatccaagtgttaaccgtcttttagttgattagttatggaatagaaaatgaacaaacatgcaaccatcattatttacgttaccaactttgaactttgtttgatgttctgtggtcgcgtttcttgcatcataatttgaccgaacaagtagatcaaccgatcatcaatcagactaaaatgcaatcaatcgaatgataaattccaaatttcacccagaaacttttgcgactgtttgttcgtttgctgatgcgttcatgcgtttttccttgtttcaattttaattccacacttatgaacgtacaaaaatacatttattccacagttttgtgttttacatagttttcttttgttccaatttctatgtaacctacttataagttgctttctgaaactctcaatgtggaatgaaaatatcttttaaatattctaaaatcaaaaaatttctaaaatgtaccaatctctaaagatttcgttttgattttaaacctactttacttgatttcttatggaataactccttttatgtatccctcacttaaatccctaaatctaagtgttacatttgtggtgtgttactcgcacaacaaacttcaatccttacacacacttattgtgtatgttcaaactattgaggaacaacattcgtattgaatctaaaagtgtgttttgcaaactgtagtgccactatgaaaaaagcccaacagctgcttctaaaaaatttggcgaagttagttcaaagaaaaacgctcgctcgctcaaacgctcacctgcataaacaataaacaaaaacaaagtacacgacccatacaacaaacaatcgaatataaggtggatctatttccacaagcccttagacaagcaaaagactgaacccaacaatcataaaaacacaaaacccacaaaaaacgaagcttctgccgttactcttagatcagttagtacgttacttgtagatgagtttgttcgagccaactacaaaacgaaaatcgcttcagttgtgttctagatacaccatatgattgttatataccaaatatatacatacctagactcgttccgaaatctggttccaagtttccaagtcgtggtaagtctgaatgtgagggagggtgtcctgataaacataggtaatacttgagaatctcacaacaatggcaacggataatgatttgttatgagttccttgtgtgtaatacttttacgtatttattactcttaagtttgtgttaacgtgtaagtttatgattgagttattgttttatgttttatgtgatttcgatcgaaacttccttgaacgtaagtaaacgaaaggatgtagagctgcactcgcctgtcgtagtaatagtggcacgcttaaatgtcctgcatgttccgatatgtatgtcctgtatttagaccgcatgttcaactagcactaacaataactttgcttttcacatccacatccaatgcgaaatgtatgaaagccaaacaatacaatgaaattcaaacaattctgcgccatcacgctttctatcgagtgtagactgtacgatttgctttaacgcgctcttgaaattaaaacgagatttgcccagacactttccacgctacatagagtaatgtcttaataccactaaatctaaacgataaacatccatttgcttaaacaatccataaaagagcttcaaggtaaagtggcactaacaccaatctaattgactaaccccgagtacgatttgctactcggatcgaggactgaacggacatttgcggtccttgggcagggtttttgtttgatttcctccttaagtgttttgtgtttgctttgagtgttattcttccgttctatttttctgtgtgccaacgtttatggctttatttcaagcattcgttgatcatttcttgagtaccccgaacgacctatcttacgataaacaaaaatcctagccaagccgcgcatgttcctgttttcttcagtccgatgcccgaaactttaccgctagccaaactgtaacgagaagtgtcttgcgtcctgaaaaacaaaaccaaaacccacacaaaagaaaaagtcttgcctgcctttgagagttacctaacgagatctgcttctttctcccaacttccgacttggtcccgcccatttaactaacccaggttgatttcgatggcctacggacagatcggcatgatccaggccgccgccggcttctttgtgtacttcgtcatcatggctgagaacggcttcttgcccaagaaactgtttggcattcgtaagatgtgggactcaaaggctgttaacgatctaactgattcctacggtcaagaatgggtaagtccaaactccaattcgatcttaaacacacttcatattaactctgaattcgtactttaacgataatgtaaacagccaaggatgagttagatactagtgaccaaaactaaccacaattggagccattctaattaatttatcctatactcccatagacctaccgcgaccgcaagaccttggagtatacctgccacacggccttcttcatctcgatcgtggttgtgcaatgggccgatctgatcatctgcaagacgcgtcgtaactcgatcttccagcagggcatgcgcaactgggctttgaactttggcctcgtctttgaaaccgtgctggccgcgttcctctcatactgcccgggcatggagaagggtctgcgcatgtaccccctgaagtaagtggtcctttaaaattagaatatatcattaattaaccttgtaaataaccttccttacgaatactatagactcgtctggtggttcccggctattccatttgcgctggccatcttcatctatgacgagacccgtcgtttctacttgcgccgcaaccccggaggctggttggagcaggagacctactattaaacacccacactgctacactcccacacacacagccacatgcccacacacgaatgcacaccacaacaagagcaaccaggaacacccgcaaacaacacctacaaaccatggagagcaacaaatagaaatgtttatgaaccacaaaacccacaaaagcaacacaaccacagtaatagcaacagcagcagcaacggcaacaacaacagcaacagctacgtctacaacaagctacagcaagaacatattacaatatattttatttttttaatttaattatttaaagtaaacgaggataaacaaaaatgcaagcgataattattttaaacgttaagtaaatttaaattataaattaaagctaaaaataagatttaaataaagtataaatgaaaataaaacaaacaacaaaaacgaacaacaatttcgatgaaacaccaatcacatccagacaagaacaacaacaaaatcaaccagtaactaagcaaaacagtaacaagaacatgtttttagtaaaattattaacgtaacgagaactggatgaggcgatttttatcgccacaataacaagatcccagaaagctaacacacacacacgcactcacaaacacactcacaaatacacacacacacacaccgatacacaacgcatgacgagacaaagtatataagaagtttagagaaattataaaacgaagtaaataaaaagtaaaatgaggaaagaaaacaatgaaaacccctagcgtagttaccaagtaagccgtgaaaagtaaagcccaataaaaaccacaacaacaacaaccaaaacaaaagaacagaaattaatttgcaaaacttgaaacttgtgtgtgtaaacgcagcttagcgcagaagaacgaaatatatatataaacagaagaaaaaccacaagaaatgtgaacacgacgaatataattgtttatatatatacacacatatattatatggaaaaaatttgattatataaatggagctatacaacaatacaccaaaaaccaaaattgaaaccataacgaaatcgaccgatctgcacttggcactacgccgagttccggataaaggtctccgagcaatgtttggagacctgccggtctagaatttgttaaaatctaatgaaaaaaccaactaaatgtttaataataaacccccttaaaccaattgacatgcaatattatgctttgtgtgcatttaagcccaaaagaaccgatgccgagattcggtgggattaagtcccccgatgtcgatatcgagattcagatacagataccattaccgatacctaggcccagaaggaaaagataaaaccaaataaaactaaaaaccaaattcaatacgaaacaaaagaaaacaaaaggaaaaagcgcccacaaaataaatgtttgtaagtttta

SEQ ID NO: 11876 - DNA, 3928 bp, DROSOPHILA
ccgaactgggaaggtccaactgtgacagcagcagctatctcgtctctttgtcgggtggtacagtacagctctgctcccctgccgcccgcccgccccctcggcgctggtgtgtgcccgctgctctgcttacacaataactgtgcatcgattgagtccagctccagcgagaagagaagcagcccaggactaactctcgttcgacataagaataaaaggatattacgttagcgtacagcagtcgtgtgtgatcagtatttgttgtatttgtctcgttccaacgcgaatcggttctagtgctgaaaacaagttcaatactgctaacggggtagttttctgcgaaagcccccaaaacacaatacgcaacgccaagcgcaaaaattgtgtaatagcacccaaacgtgtaaaagattgtttagcacttgagagggaatcttagaacgagggaaaccagcgacgcgagataaaagatacgaaagcagatcgatagtcgtttgaacacttgccacatcaagacgcaagatgccggccaaagttaataaaaaggagaatttagatgatctcaaacaggagttggatatcgattttcataaaatctctcctgaggaattgtatcagcgctttcagacacatcccgaaaatggtctaagtcacgccaaggccaaggaaaacttggagcgcgatggtcccaatgcgctgacgccacccaagcagacgcccgaatgggtgaagttctgtaagaacctgttcggtggcttcgccatgttgctgtggatcggtgctattctctgctttgtggcctattctatccaggccagcaccagcgaggagccggccgacgataatttgtatctgggtattgtactttccgctgtcgtcatcgtgacgggcattttctcatactatcaggaatcgaaaagttctaagatcatggaatcgttcaagaacatggtaccccagttcgccaccgtcatccgcgagggcgagaaactcacgctgcgcgctgaggatctcgttctgggcgatgtcgttgaggtgaagttcggcgaccgtatccccgctgatatccgcatcatcgaggcgcgcaacttcaaggtggacaactcctcgctgaccggcgagtcggagccgcagtcccgcggtgccgagttcacccatgagaatccgctggagaccaagaatctggccttcttctccaccaacgccgtcgagggcactgccaagggtgtggtcatcagctgtggcgatcacaccgtcatgggccgcattgctggccttgcctccggtctagacaccggcgagacgcccattgccaaggagatccaccatttcatccaccttattaccggcgtggccgtgttcctgggcgtcaccttcttcgtgattgccttcatcctgggctaccactggctggacgctgtcatctttttgatcggtatcatcgtcgccaacgtgcccgagggtctgctggccaccgtaactgtgtgcctgacccttaccgccaagcgtatggcctcaaagaactgtctggtgaagaatctggaggccgtggagacccttggctccacatcgaccatctgctccgataagaccggcaccctcacccagaaccgaatgacggtcgcccacatgtggttcgataatcagatcatcgaggccgacacaactgaggatcagtcgggtgttcaatacgatagaaccagccctggattcaaggcgctctctcgcattgccactctctgtaaccgtgccgagttcaagggaggccaagatggcgtcccaatcctcaagaaagaagtcagtggagatgcctccgaggctgctctgctcaagtgcatggaactggctctgggcgatgtgatgaacattcgcaagcgtaataagaagattgccgaggtgcccttcaactccaccaacaaataccaagtgtccatccacgaaaccgaggataccaacgatccccgctacttgctcgtaatgaagggagcccccgaacgtatcttggagcgctgctctaccatttttatcaacggcaaggagaaggttctggacgaggagatgaaggaggcgttcaacaatgcctacatggaactcggtggactgggtgagcgcgtgctcggtttctgtgactttatgctgccatccgacaagtatcccaacggctttaagttcaacaccgacgacatcaacttccccatcgataatctgcgtttcgtcggccttatgtccatgattgatcccccacgtgctgccgtgcccgatgccgttgccaagtgccgatcggccggcatcaaggtcatcatggtcaccggcgatcacccgatcactgccaaggccatcgccaagtctgtcggtattatatccgagggcaacgagaccgtcgaggacattgcccagcgcctcaacatacccgtctctgaagtgaatccccgcgaggccaaggccgccgtcgtccatggcgctgagcttcgtgatgtgtccagcgaccagctggatgaaatcctccgctaccacaccgagatcgtcttcgcccgtacctcgccccagcagaaattgatcattgtcgagggttgccagcgcatgggagctattgtggccgtgactggtgatggtgtcaacgattctcccgctctgaagaaagccgatatcggtgttgccatgggtatagccggttccgatgtgtccaagcaggctgctgacatgattttgctggacgacaactttgcctccattgtgactggtgtggaggagggtcgcctgatcttcgacaacctgaaaaagtccatcgcctacaccctgacctccaacattcccgaaatctcgcccttcctggccttcatcctctgcgatataccactgccactgggaaccgtgacgattctttgcatcgatctgggcactgacatggtgccagccatttcattggcctacgagcatgccgaagccgatattatgaagcgtccaccacgtgaccccttcaacgataaattagtgaactcaaggttgatttcgatggcctacggacagatcggcatgatccaggccgccgccggcttctttgtgtacttcgtcatcatggctgagaacggcttcttgcccaagaaactgtttggcattcgtaagatgtgggactcaaaggctgttaacgatctaactgattcctacggtcaagaatggacctaccgcgaccgcaagaccttggagtatacctgccacacggccttcttcatctcgatcgtggttgtgcaatgggccgatctgatcatctgcaagacgcgtcgtaactcgatcttccagcagggcatgcgcaactgggctttgaactttggcctcgtctttgaaaccgtgctggccgcgttcctctcatactgcccgggcatggagaagggtctgcgcatgtaccccctgaaactcgtctggtggttcccggctattccatttgcgctggccatcttcatctatgacgagacccgtcgtttctacttgcgccgcaaccccggaggctggttggagcaggagacctactattaaacacccacactgctacactcccacacacacagccacatgcccacacacgaatgcacaccacaacaagagcaaccaggaacacccgcaaacaacacctacaaaccatggagagcaacaaatagaaatgtttatgaaccacaaaacccacaaaagcaacacaaccacagtaatagcaacagcagcagcaacggcaacaacaacagcaacagctacgtctacaacaagctacagcaagaacatattacaatatattttatttttttaatttaattatttaaagtaaacgaggataaacaaaaatgcaagcgataattattttaaacgttaagtaaatttaaattataaattaaagctaaaaataagatttaaataaagtataaatgaaaataaaacaaacaac

SEQ ID NO: 11877 - protein, 1002 aa, DROSOPHILA
MPAKVNKKENLDDLKQELDIDFHKISPEELYQRFQTHPENGLSHAKAKENLERDGPNALTPPKQTPEWVKFCKNLFGGFAMLLWIGAILCFVAYSIQASTSEEPADDNLYLGIVLSAVVIVTGIFSYYQESKSSKIMESFKNMVPQFATVIREGEKLTLRAEDLVLGDVVEVKFGDRIPADIRIIEARNFKVDNSSLTGESEPQSRGAEFTHENPLETKNLAFFSTNAVEGTAKGVVISCGDHTVMGRIAGLASGLDTGETPIAKEIHHFIHLITGVAVFLGVTFFVIAFILGYHWLDAVIFLIGIIVANVPEGLLATVTVCLTLTAKRMASKNCLVKNLEAVETLGSTSTICSDKTGTLTQNRMTVAHMWFDNQIIEADTTEDQSGVQYDRTSPGFKALSRIATLCNRAEFKGGQDGVPILKKEVSGDASEAALLKCMELALGDVMNIRKRNKKIAEVPFNSTNKYQVSIHETEDTNDPRYLLVMKGAPERILERCSTIFINGKEKVLDEEMKEAFNNAYMELGGLGERVLGFCDFMLPSDKYPNGFKFNTDDINFPIDNLRFVGLMSMIDPPRAAVPDAVAKCRSAGIKVIMVTGDHPITAKAIAKSVGIISEGNETVEDIAQRLNIPVSEVNPREAKAAVVHGAELRDVSSDQLDEILRYHTEIVFARTSPQQKLIIVEGCQRMGAIVAVTGDGVNDSPALKKADIGVAMGIAGSDVSKQAADMILLDDNFASIVTGVEEGRLIFDNLKKSIAYTLTSNIPEISPFLAFILCDIPLPLGTVTILCIDLGTDMVPAISLAYEHAEADIMKRPPRDPFNDKLVNSRLISMAYGQIGMIQAAAGFFVYFVIMAENGFLPKKLFGIRKMWDSKAVNDLTDSYGQEWTYRDRKTLEYTCHTAFFISIVVVQWADLIICKTRRNSIFQQGMRNWALNFGLVFETVLAAFLSYCPGMEKGLRMYPLKLVWWFPAIPFALAIFIYDETRRFYLRRNPGGWLEQETYY

SEQ ID NO: 11878 - DNA, 4675 bp, DROSOPHILA
ccaaaggaaaatggaagagcgagtcttcagctttggggaacacgcccaaaaagttggcttacaaacaatcgacgttttatgtcacatattgctgggaaaatcgagccgaaaggatctgaattcctgggttagtcaatgggtatcactggtttttacctgcttgcaccgatttaatgccattattgaccagcaataggaggcataacaatccaaactgaagcgaggaaaatgctgctttcgtattgctcctgggcggcctcatcttggaggctgttaattaaacactatcgcttggtagatttataaacacatctatattcgatttccgaagaagtttaacaccaaaatgcacttttccgctggaaaaaccaccgtgaaaagctgatgatttgtggcaacgcgtccgcggtgttaaaaacgttggactgcactttacgctccgctttaaatcgattttgaatttatgtaatttatccactgggtgtacggctccagcagatcacgcccacttcggaagagtttcgtttgaattaagaaaataattatcgcaacgcggatgacacacgaacagaatgtctcgctgccagtgtgaccgtgactcaaacgtggcaagataccgagggagtcaccaactgggtgcttgtcgcgtgagctaagctatcgtgtgattaagtatatgaagtatttacaaattatttcaactgctactatgaaattaaatttggtcactaataatagctttccgttaacatttatattaattcgtgatagaaatttttttgcatagttttaaagccatgtaatatcattgcaaaatgaatgatataagcaaagtatacaaatgtaatggcaaataagtcaaatcccctctaaaatattttttaaaaatctagttttcttatctatccagaaatttgaaataaaatacatattttacaaaaaattatttcgaataccaaatcgataggggcgtaaaacatcgatagtcgtagtagtatcattatcgatagttggtcacactgtttatccctcttttcgccaaaaatttgttggcgtgttgtcaatttcctaagcatttgatcggttttttcgttttgtgtgtaacccggagaggataaaacagcgacaatgtacggtggagacgaatacgcaaccaactcggtgagtgcagccagcgaggaatgattcattctcgggaaaccaatccccggactccgccgacaacataacccatcttttgttgccctcgcacaaatacaaaactcactgggatgattttaaagccgttttacgacttggcatagttggtgtttagatcatcataggtcattaagcactgataatccgtgggccactcctttgacacgttcctttgctatttggaaacgaatcctgtagtccgggggacaccccggcgccatgtggtatattattggtatcggtgtacattattaataagtcataataccttctacatttttgatttgcgtgcaattttagatggtgtgtacacacctttaaagaacacatgaatatattctagcttactccttagagatgccgtggaaagaagtacccctctaaggttcatccacttcgtaatcgtaggaatgcgctcgttttgttagctacagctcgcttagctaaatggtcgggattaaactcggaacagttgtagcatagtctctcgaattcctatttacaaagtcgaaagtcttcaatagtctaggcaagctgttaatttataaaatcgatccactttaagcgattaactctatttaatagctcatttatgcagagagtcgtagatcagtatttcctgcaattctgcttccaaaaagtcattgggttttttacatattacaggattactacgatgactacgctcataccggagacccgcaactggacatggagtacgagaggaactactacgccgcccggatgccggacaacgtcaagtacttcctcataaacttctgccaggcgatcaaagagggcaacttgtacgacatccaaaacatgtacgagaacacgttcccgcagatcagcgaccaccacttcgacaagactgcttggcccgaggagcaggaggtggctgctattgtagacaacgacaaggtcttcctgatcttatacaaggagttgtactatcgccacatccacgcccgcatccccggtggtcccaagttggagcagaggatcaactcgttcttcaactactgcgacttcttcaacctgatcatctcggcccagaacccagtgatgctggagctgcccgacatctggctgtgggagttggtggatgagttcgtgtatcagttccagaacttcgcgcagtatcggtatgtagctgtttccgcagcctgtggaactcgattaaccttccatttttgcagcgcccgccttacggagaaatcgcaggatgagatccagcagctgtgcgtgaaccacagcaacgagtggagcattctctgcatcctcaacgttctgcattcccttgtggacatctcgaacatcaagaagcagctggaggccatctctcaaggtgttgatccccaaaccgtggccggtgacttcggcaaactgtccttctacaagatgctgggatacttctcccttgtcggactgctgcgcgttcattcgctgctgggtgactactaccaggccatcaaggtgctggagcccattgagatccacaagaagtccgcctattcgcacatccccgcctgccaaatctcgacgtcgtactacgtgggcttcgcctacatgatgatgcgccgctacgctgatgccatccgcaccttttctgatatcctcctgtacattcagcgtaccaagcagctgtacagcacgcgttcataccaaaacgatcaaatcaacaagcaggccgagcagatgtaccatcttttggccatctgcctggtactccatccccagtgcatcgacgagtccatccagcaggtgctcagggaaaagaactaccacgacgccatgtttaagatgcagtgcggtgatctggaggtcttcaagtccttctttgtcttcgcctgcccacgtttcgtgagcccctgcccgccagctgtagacgcacccatggacgactacgtcaaggaccccatggaacaccagttgcaggttttcatggatgaggtgcgccaacagaaggatctgcccacaacgcgctcgtatctaaagctgtacaccaccctgccgctgaccaaactggcatctttcatcgatcccaacgccagcgaggatgacgtgtcgaagctgctgattcgcctgctttgcttcaagcacaaaatgcgcaacctagtgtggagcaagggacccagcggcctggaaggcacattcaagtctggctccgaggtgagattaatatagacaaattctgatggcaaatataataatatacattaatattctagttggacttctacatcgacgacgacatgatccacatagccgacaccaaggtttcacatcggtatggcgacttctttgtgcgtaaaattcttaagttcaacgatctgaatcgcaaattgaagaacatcaacatttaagccgactccttgtgacccttaatgataaatttaatattccatactggaccgatttgtttcgatatcaataaaaatcgcttgcgatcttgcgcaagtttggtcctcaaaatgtgtcttgagtatttaaataatttaaaataattatctaatttttaataagaatccaagttgttttaacacttgctttatttttaacaataccgttattttataaaaattgtttgtatgactataaggaaattcaagactacacagtacgatttttgagttcgccacaactccacttgtgctcggcatgtgccttcagcaacgcaaccaagattcgttttcggttatgggggaatgtgcgttgaattaatacgtagtatataataataacatctcatatcaaatttctctcctgttcgtcgcatagcgaacacgagcaaatttctttggtaaatcaatcgtattaagcgcttgttgggggtaaataattgtgattttcgggggggttggacagttggcgtggagttggggctacaagcagttccacacacatacacacagtttaaaattcaacttaggattacagtacactttatacacgacattgccttctgttctctagtttctgttgcgtttttgtgtgctctctctttagctaaccattggttcacttaggactaacattaaaatcaaacaatttacaattacggacttgttggtggccgggccagttgttagtccacggacactgtgcgctgattgacgtcgatcaagtagatgtccttgtgattctgcagcacaaagtcgacgaaagcattgatgggagcgatctcctccagggaggtactggtgctgcgcgaccacaggaaattcggaccgaacacgatggccaggttggaggaggtcatcttgttcagatcctcgcagtccatcaccctgaccaggaactcaacaatgtacttgaacagttcatagttctcctctggcagtttttcgcgtatcagttgcgtcacgttcctcgaacgctcttccttgggccagtctagaaaaccggtcacatcctcgtacagctcgaaggtgagcagcggctcggcgagatcgcgcaggaaactcttcagcag

SEQ ID NO: 11879 - DNA, 1857 bp, DROSOPHILA
ttatcgatagttggtcacactgtttatccctcttttcgccaaaaatttgttggcgtgttgtcaatttcctaagcatttgatcggttttttcgttttgtgtgtaacccggagaggataaaacagcgacaatgtacggtggagacgaatacgcaaccaactcggattactacgatgactacgctcataccggagacccgcaactggacatggagtacgagaggaactactacgccgcccggatgccggacaacgtcaagtacttcctcataaacttctgccaggcgatcaaagagggcaacttgtacgacatccaaaacatgtacgagaacacgttcccgcagatcagcgaccaccacttcgacaagactgcttggcccgaggagcaggaggtggctgctattgtagacaacgacaaggtcttcctgatcttatacaaggagttgtactatcgccacatccacgcccgcatccccggtggtcccaagttggagcagaggatcaactcgttcttcaactactgcgacttcttcaacctgatcatctcggcccagaacccagtgatgctggagctgcccgacatctggctgtgggagttggtggatgagttcgtgtatcagttccagaacttcgcgcagtatcgcgcccgccttacggagaaatcgcaggatgagatccagcagctgtgcgtgaaccacagcaacgagtggagcattctctgcatcctcaacgttctgcattcccttgtggacatctcgaacatcaagaagcagctggaggccatctctcaaggtgttgatccccaaaccgtggccggtgacttcggcaaactgtccttctacaagatgctgggatacttctcccttgtcggactgctgcgcgttcattcgctgctgggtgactactaccaggccatcaaggtgctggagcccattgagatccacaagaagtccgcctattcgcacatccccgcctgccaaatctcgacgtcgtactacgtgggcttcgcctacatgatgatgcgccgctacgctgatgccatccgcaccttttctgatatcctcctgtacattcagcgtaccaagcagctgtacagcacgcgttcataccaaaacgatcaaatcaacaagcaggccgagcagatgtaccatcttttggccatctgcctggtactccatccccagtgcatcgacgagtccatccagcaggtgctcagggaaaagaactaccacgacgccatgtttaagatgcagtgcggtgatctggaggtcttcaagtccttctttgtcttcgcctgcccacgtttcgtgagcccctgcccgccagctgtagacgcacccatggacgactacgtcaaggaccccatggaacaccagttgcaggttttcatggatgaggtgcgccaacagaaggatctgcccacaacgcgctcgtatctaaagctgtacaccaccctgccgctgaccaaactggcatctttcatcgatcccaacgccagcgaggatgacgtgtcgaagctgctgattcgcctgctttgcttcaagcacaaaatgcgcaacctagtgtggagcaagggacccagcggcctggaaggcacattcaagtctggctccgagttggacttctacatcgacgacgacatgatccacatagccgacaccaaggtttcacatcggtatggcgacttctttgtgcgtaaaattcttaagttcaacgatctgaatcgcaaattgaagaacatcaacatttaagccgactccttgtgacccttaatgataaatttaatattccatactggaccgatttgtttcgatatcaataaaaatcgcttgcgatcttgcgcaagtttggtcctcaaaa

SEQ ID NO: 11880 - protein, 539 aa, DROSOPHILA
MYGGDEYATNSDYYDDYAHTGDPQLDMEYERNYYAARMPDNVKYFLINFCQAIKEGNLYDIQNMYENTFPQISDHHFDKTAWPEEQEVAAIVDNDKVFLILYKELYYRHIHARIPGGPKLEQRINSFFNYCDFFNLIISAQNPVMLELPDIWLWELVDEFVYQFQNFAQYRARLTEKSQDEIQQLCVNHSNEWSILCILNVLHSLVDISNIKKQLEAISQGVDPQTVAGDFGKLSFYKMLGYFSLVGLLRVHSLLGDYYQAIKVLEPIEIHKKSAYSHIPACQISTSYYVGFAYMMMRRYADAIRTFSDILLYIQRTKQLYSTRSYQNDQINKQAEQMYHLLAICLVLHPQCIDESIQQVLREKNYHDAMFKMQCGDLEVFKSFFVFACPRFVSPCPPAVDAPMDDYVKDPMEHQLQVFMDEVRQQKDLPTTRSYLKLYTTLPLTKLASFIDPNASEDDVSKLLIRLLCFKHKMRNLVWSKGPSGLEGTFKSGSELDFYIDDDMIHIADTKVSHRYGDFFVRKILKFNDLNRKLKNINI

SEQ ID NO: 11881 - DNA, 7034 bp, DROSOPHILA
agtacttaacgagttttgcatttgcttaaacctcttcgctcagctggctctaagcagcttccgcagttacgaattaacatgctccatttgtttatacatataaatacaataatagaaactatagttaaagttaccattttttttttttactttgaatgcggactaaacagattaactcagagtgcaacaaaggtgttgatcacaaaacaaacgaaatgatgatgaagaggcaataatcattgaaccacttatgacttatacaatatgttctttttatcgtttattaggcattctttttcaacatttttcattaatcttaatctaatgcttgttgcttacttgatttctggtttcgtttttacacttgcgttatttgaatatgttcttcttttttgttttactgattggcatcctaggcaaacatcaactttaactagagatgggtcctattcgtttttcggatctgctagttaggatctgagattggtgttagttactagatgggcataacaaacaggtcgagtcgataagtgctgcctgttcgagttttaacatttcttcgtgtttcattatatttggtgttcttcttggaatcttttgaaaggcagtaggacttaacgctcgggggctataggattcgatctgatcgctattgtgggctaatgaggggaggcagggagggatgatactcgtgggtagtttgtagtagctctagttgtagtttgctgtttaggcttgggcttcgtttagctatttcatttgtttaattacacgctaatataaagatgcaaaactttcttacacacacgtcgcttagtatttaggccatgggttcaatttgtgtttcgaaatatacgaccaatctttagttagatgccctcaatgcgcctttcgctcgcttttcatttcatttaatttcattttttgcatattgttgacgttttacaaacatatttaataataacgctaacttttacgtttcctttagattttttttaagttttttttttgcatttttcgtttttgtttgcaatatatgtatacatatatgtgtataataactcacgattcacagacacaattatcattaatattatatgaactttcgcggtttcgcctaatgagagacattcattagtggatacttccctatagttttgctcctataatgcatgcttctttctatactttgtaatgggcgcgtgagagttgaatgaacaaacatacatatgaatagcatatctcatatataaattttatatatttccttactatgagtgcggctaagtgtgagtgtgagatgctgggaaagcggcccaaaagtatttcccctgtttaacttagctacattatttacaatcgaaggtattgtttagcaaatcgaatgacaattgtgcgcatttccgtgagcagtgaataataggttgagttcttaattcaatcgagaagagtctgaaaggcatttgcaaactatttgttacttgaaactgggccgcttttcgcagagatatacatttatggaaaggagcttttagtatgtgtgtggatgcatatcgagcctggactgtgaactgtggaaatgtatcgcaagatgccaattaacgtatgcccaagctgaattttccataaccttgttctaaagactatcgttttgctgggttattggtatctctagcttaaactttttacaattctcaatatttgtaatcatttcttgccgagtacatgttgatttccgcgcatgcgcctattcctcagctgggagatatatagttttgtgtatccgccgctttacactttacatacatttatatagatcagcgtttatcgtacgttatagtatggtattcaattgtgttcttaactaattatagatttgccggctccctgtccatctcggcccgtttagcagcaacttcaacaatgtactaaaacttggcttcgctttgcttatgtttttctcatgtctctctacgttcgaatacagattcggcttggtaactgcgcaggcattttctttagcgggtattgttggaatttctgttttcgagaagtcttgacggagtgtgcaacacttaaagctaagtaacaaagtttcattgtgggtgagggggagcacaattctcgattaatttatatacaattcagtgggaagtctgcaataagacacgccgttctatggagcaattcgttaatttgttaattaaaaaaaaaaaaaaaacaaaagtctgaggattcagcgcagtttcaactattttacaatcttcaaatgaacgcgattacttagcatgtgaacatttcggtgatttgggtgctgtggttttctttgttgggtgagggggggggggggggaataggataggatggctgatcgatctatgctctaggatctctagttagcaatatgtttagttaataatattcaatgcgcttcaacaatcgtcaatccgttatagttatcgctctgctgcttttcacttactaacatgatttctctttattcaacatcttttcgcttaaacgtaattaataattattttcttcctttgtaatatatatttatacgtgtcgcgcacgtgtgtgtggtgtgtgtgtgtgtgttgctgtagtcgtaagatacattatttataaagatttctttaatgccgcactcaagcttcttaattaacgcggacacacacacgccctgggatctgatgatccagctcccgatcctgatcccgatccagatttcggttctacctccttcaacagccgcccaagcgagctgtgggtctggccagcttggttggtgtcttgtcaatcgagtatacgtttcagttttatgttttctggttttaaggtttagcatatgtgtggtttagtataactatttatttctcctttagatgtggttgcttgcttgctgtctctctgccgtttacggatatcggataacgcgttacgcttacgctcttactgatcttggttttattgttagtttccggcgcgcctcgcgttgcttagttgtccgccttatcctgtttgattttcgcatttgtggtcgcaggattattgtcgccgccggcaccgccgctggacaggctaccgctgctgccgctattcgactgctgctgatgagagttcaggccagcggagctgggtggctgcagggacgttgacgccgcggaagctgcgctgttcgatgtcgtggcgctgccgccggcggtgcgcccactagaacgattggattcgagttcgtgcagtttcttccacagttcctcgcggtcacgctcacgttttttttccctgcaaacagaagaggaaaatgctcatcatttgctgccttgaaacaccagctctagaactcacttttgccgctccgccttgtagctggaggtaagctcgtcgaacagtttcgaattcatctccatgaacgtcttcaaaacgttgtatacgagcgccacgatagtttgattccagtgttccttgctgatgcggtatagggccgggaacatgatcggcatgatgaccgcattgttctcctcgattagcgacatggcgtactcattgttccacagataaagagctcgctcagcaacctgaagaaacacaattttatgatgtactatttcaataaaaccaaacttaggtgacttacctgaaaatgtggactcgacacgcattttgcaatctgacggaatagcggctcctgaatcttgacaaactgcggcggatcgatcacatcgaggatctcctcaatctcgcccaggaacatgacctccttctgggaacacgtcttgggccagaacttcagcaggccacgcaccaccggttcggtaaggaatggatccttctctaggaattgtacaatgcaatacgccagttgagcgtggtagagcgacaggcatttgactttgtgcagtggcaataggaccttaaccagaaactgtttgtgttcggccttcaggggcaaggcgaatccgttgatgatactgttcgaataaacatgagtttaattaacattcgtagaatgagagattaacgtgtgaaacatacctgccaaggatttccaagagctcaccgactccattaaagtgctccgtttcgtaaatgaatcgcaagaatatgttgttaatctgttttcgtataaaagcccgcagtcctaagaattttccatatatacgatgcaataccgtcttcagaaagtcccgctccctgggatcctccgagtcgaaaagttccaaaagcttaaacaataagcattttcactcaattaagttgttattttaattatgcgacattttgcactcacctgcaagacaaacttttgatcgatcacacgcttgccgatagttgcttggaaatcctgcgactccagaaaccgcaagaagacctcgtacaccagttggaggtgtggccaggacgcctccagtgtcggatcgtcctcctcgggatcgaaatcagggttctcactgggcggcaacgtgcgaaataggttgcaagaaatctggtataaataaaacaaacattattaagtaatcaagagctaattgacttggatatagttcagtttgataatagttgtggtagtctggatatttaccatacgaattatttccggataaaccggttccgtaagcacgccgcgcccatgtgttatataggtggataggtcattgagcgcggcccgtttgatctccttgcccttcaagtccgtcacgggatccataaagtcaaaggacacgcaacactggcgcagcttccttatgaacagctcctcctgttctaggctggagcaatcagctgtggcagtgggacaatgattagattgataaattggtaaagttcgaatgcatttgatgctcacctttcagcggcggcaattgctgcagctcaacatcctgagaatttctgtagcgcgaggaaccttgactctttttacccttcttcttgagcgaacgtttggcgaacgggtcgattcgatccacaaacgtgcccgatgacatcttttcagatttgggttcgtttgaatcgatggcggtctccgtggctgtctgtgtggtattcagcttgccggctttgtttttaacgcttgccactggaaattgatcggctgcaccgccagctgcactggcagctgctcctcctccctcgcctgcgccttggcctttgccctcgccaacgccctcgtcgccgtcttcgccgaaatcgctgttgaggatctcgactggtcgtttgttgcgtgtcttgcgtagccaaccgaaaattttatgtgttatgttggcgacttttgcggttgagtttggcgtcttgcaattgttctcggtacctttgggtaagcccaacagctctactccctcctctcctcctccgcctatcccgttcgcgtcctgaccaatctgcaactgcaacggctgctgcaattgcaatttcagcttctgtttctgtttcttctccctgaaagcgatcgcctgctgctgttgctgctgctggagctgctggatcagcttttgttgctgggtaatgttgatggcggtattaaagcggtaacgacttatcttggcatttatcagacggttactcgggggcgtgaattgggtctatactcttctttagccgcttgcttcttgcttaaattcgttacagttgtatgtacactggaattaagtgggcaatcaattagctcacggtgacttcatcacgctcattaattatcagtcaactactcacctgtttctttttgtgtttgctatactttgctttctgtattgtttactggagggattgttgcatatgcgatgcgccttacactctggttaatactctcgcttagcttctacgttgctccgatctgatctgatgtgatcctgatcctgatcctcttctttctgcgctgctgctcctgaatggcacatcaatttggttaactgagggagagctgctgctgctggctaactgctgattgccgattgctgcattcacatagtaattcacatttgccgatttccttgttgcgttttatggatatttggcatcacatgcactgcaatcagaacagaaacgtatgggctttggttagataggcgcttcttatcgctgtaaattactcaaaaattgacatcgcagcgaaaggcacgaaaaagcgctattcccgataaaatgagacattcaggtgtatctaatcgttggctttgcgggtgtgtttgtatgtttgtatgtgcgctcggagataaaggctttgccagtgatttctttgttaccagataacagatagcgctgataaaaagcagggactgtgactgtgccagcactaaaagtcaagttaagcattcaaattcaaaagagcactgcgaattcgctttgtatttcataataaagatgtaacttttcatttcagcatgattatattgaaactaggtttattagattcagtgagcaactaaggaaacccattgtctacccattgattgattggcacatagcaagcaagcaaccgctgagtcctgaattccgttcccgccagctgaactttctccggcagtccacgttaaccgagaggcccaaatggacttcgccagttggacaccaccaaccgcaaagcccagcttttggccaacttgtgttcggtttgcgagttgtaactgactgttaaattaaattaagcatggcgtgtaaattaaatcaaaacgagcccggaaaagccattgaccggaaactagatgccgctgtcatcttcaacggaaatgaagccaaatgaaggacgcgccgcacaggctgggaaaactcattcatttgcatggctcgtttcgaagggggagaaatcaactggcccaggttgaacttcaatctgaggaaaatggatggctggctgaggcaggaaagtgctgccacatatgcatgtgtgtgtgactctgtggctgctgcacagttttcacttcgaggacgacattgcggaacttgttcagtgtttccagttaagcacacaaatttgcacaaatgcaagtcaaaccgactgcccaccgtcgatttccaagcgaaaacatgtttaacat

SEQ ID NO: 11882 - DNA, 3089 bp, DROSOPHILA
tgattgcagtgcatgtgatgccaaatatccataaaacgcaacaaggaaatcggcaaatgtgaattactatgtgaatgcagcaatcggcaatcagcagttagccagcagcagcagctctccctcagttaaccaaattgatgtgccattcaggagcagcagcgcagaaagaagaggatcaggatcaggatcacatcagatcagatcggagcaacgtagaagctaagcgagagtattaaccagagtgtaaggcgcatcgcatatgcaacaatccctccagtaaacaatacagaaagcaaagtatagcaaacacaaaaagaaacagtgtacatacaactgtaacgaatttaagcaagaagcaagcggctaaagaagagtatagacccaattcacgcccccgagtaaccgtctgataaatgccaagataagtcgttaccgctttaataccgccatcaacattacccagcaacaaaagctgatccagcagctccagcagcagcaacagcagcaggcgatcgctttcagggagaagaaacagaaacagaagctgaaattgcaattgcagcagccgttgcagttgcagattggtcaggacgcgaacgggataggcggaggaggagaggagggagtagagctgttgggcttacccaaaggtaccgagaacaattgcaagacgccaaactcaaccgcaaaagtcgccaacataacacataaaattttcggttggctacgcaagacacgcaacaaacgaccagtcgagatcctcaacagcgatttcggcgaagacggcgacgagggcgttggcgagggcaaaggccaaggcgcaggcgagggaggaggagcagctgccagtgcagctggcggtgcagccgatcaatttccagtggcaagcgttaaaaacaaagccggcaagctgaataccacacagacagccacggagaccgccatcgattcaaacgaacccaaatctgaaaagatgtcatcgggcacgtttgtggatcgaatcgacccgttcgccaaacgttcgctcaagaagaagggtaaaaagagtcaaggttcctcgcgctacagaaattctcaggatgttgagctgcagcaattgccgccgctgaaagctgattgctccagcctagaacaggaggagctgttcataaggaagctgcgccagtgttgcgtgtcctttgactttatggatcccgtgacggacttgaagggcaaggagatcaaacgggccgcgctcaatgacctatccacctatataacacatgggcgcggcgtgcttacggaaccggtttatccggaaataattcgtatgatttcttgcaacctatttcgcacgttgccgcccagtgagaaccctgatttcgatcccgaggaggacgatccgacactggaggcgtcctggccacacctccaactggtgtacgaggtcttcttgcggtttctggagtcgcaggatttccaagcaactatcggcaagcgtgtgatcgatcaaaagtttgtcttgcagcttttggaacttttcgactcggaggatcccagggagcgggactttctgaagacggtattgcatcgtatatatggaaaattcttaggactgcgggcttttatacgaaaacagattaacaacatattcttgcgattcatttacgaaacggagcactttaatggagtcggtgagctcttggaaatccttggcagtatcatcaacggattcgccttgcccctgaaggccgaacacaaacagtttctggttaaggtcctattgccactgcacaaagtcaaatgcctgtcgctctaccacgctcaactggcgtattgcattgtacaattcctagagaaggatccattccttaccgaaccggtggtgcgtggcctgctgaagttctggcccaagacgtgttcccagaaggaggtcatgttcctgggcgagattgaggagatcctcgatgtgatcgatccgccgcagtttgtcaagattcaggagccgctattccgtcagattgcaaaatgcgtgtcgagtccacattttcaggttgctgagcgagctctttatctgtggaacaatgagtacgccatgtcgctaatcgaggagaacaatgcggtcatcatgccgatcatgttcccggccctataccgcatcagcaaggaacactggaatcaaactatcgtggcgctcgtatacaacgttttgaagacgttcatggagatgaattcgaaactgttcgacgagcttacctccagctacaaggcggagcggcaaaaggaaaaaaaacgtgagcgtgaccgcgaggaactgtggaagaaactgcacgaactcgaatccaatcgttctagtgggcgcaccgccggcggcagcgccacgacatcgaacagcgcagcttccgcggcgtcaacgtccctgcagccacccagctccgctggcctgaactctcatcagcagcagtcgaatagcggcagcagcggtagcctgtccagcggcggtgccggcggcgacaataatcctgcgaccacaaatgcgaaaatcaaacaggataaggcggacaactaagcaacgcgaggcgcgccggaaactaacaataaaaccaagatcagtaagagcgtaagcgtaacgcgttatccgatatccgtaaacggcagagagacagcaagcaagcaaccacatctaaaggagaaataaatagttatactaaaccacacatatgctaaaccttaaaaccagaaaacataaaactgaaacgtatactcgattgacaagacaccaaccaagctggccagacccacagctcgcttgggcggctgttgaaggaggtagaaccgaaatctggatcgggatcaggatcgggagctggatcatcagatcccagggcgtgtgtgtgtccgcgttaattaagaagcttgagtgcggcattaaagaaatctttataaataatgtatcttacgactacagcaacacacacacacacaccacacacacgtgcgcgacacgtataaatatatattacaaaggaagaaaataattattaattacgtttaagcgaaaagatgttgaataaagagaaatcatgttagtaagtgaaaaaaaaaaaaaa

SEQ ID NO: 11883 - protein, 524 aa, DROSOPHILA
MSSGTFVDRIDPFAKRSLKKKGKKSQGSSRYRNSQDVELQQLPPLKADCSSLEQEELFIRKLRQCCVSFDFMDPVTDLKGKEIKRAALNDLSTYITHGRGVLTEPVYPEIIRMISCNLFRTLPPSENPDFDPEEDDPTLEASWPHLQLVYEVFLRFLESQDFQATIGKRVIDQKFVLQLLELFDSEDPRERDFLKTVLHRIYGKFLGLRAFIRKQINNIFLRFIYETEHFNGVGELLEILGSIINGFALPLKAEHKQFLVKVLLPLHKVKCLSLYHAQLAYCIVQFLEKDPFLTEPVVRGLLKFWPKTCSQKEVMFLGEIEEILDVIDPPQFVKIQEPLFRQIAKCVSSPHFQVAERALYLWNNEYAMSLIEENNAVIMPIMFPALYRISKEHWNQTIVALVYNVLKTFMEMNSKLFDELTSSYKAERQKEKKRERDREELWKKLHELESNRSSGRTAGGSATTSNSAASAASTSLQPPSSAGLNSHQQQSNSGSSGSLSSGGAGGDNNPATTNAKIKQDKADN

SEQ ID NO: 11884 - DNA, 6424 bp, DROSOPHILA
agccaaatgaccagaaaaaaatcgacttcgtcaggagcttagttctcgatccggatgtgggagctgttttggtggccagagacgacaacatgatagcgaacgagttgcttgtggcctgcaactatcttcaaaatcccaaagtcttgttccttaccacttgcattgatggattccagccatttgggaaaaagaggatcccagatgccggatctctggcctctgccatcgagataattgtacaacgcaagcctatcgttttgggcaaaccgaatcagcggattttgggcaagttgatgaagtctggcgaaataaagcccgaaaagacgcttgtcattggaaactcgtaagttcaatgattacttttattgaggatcatactttatcctctttcctttaggcttaaatcagacattttatttgcaagtatatgtggtttccaatcattattggtgggctgcgataacggagcgatcgaaaaagccgagaaaattaaaaaagagggagatgagaagaaaatgaaacttgttccagatgcttttctctccggtcttgcttcttttggggagtatttatgcatctaggtgatgtcgggcaagaaaagcgatttccatatccaaaaaacatacccagctgaccaaaaagtaatttagatcatattcaaaattcaaactaagccgctcaaaagctgaacagctgttttgtttctgagcactcctgtgtgctaaatgatttcggtattttggcttttagcacaagtcgcgagtcagtgctaccagtatatttgtaaatttttagttttaaaatttgtaatctaaaatagtaaagcaaattgccagttttctgttgaaactaatagttttgcatcaataatcgcgaagaaaaagttgaattaatgtgataataaaaaaatacatgttgttggtatatttttggtatttgatttgattgcttcgtggtcgcactgaaagaagaagagtaataaaacatcgaactatcgaagaacgatatgccccgataggttcggacaagacaaagaacaaaatgttctctgcaaaagctgtgctcgcttaaaaacgcaaaaagtcagtgcatctagtgcattgtcagtggtgcataagattgttctataaatagcgaaaaatgaaaataaactgcaggcgaagtagaaaaaacaccttgagttgagtgcaacggctgtgcgagtgtgtgtgcgtgagagcgagagtgcgctcgtgtgtgtgtgtacacatgcatgttgataaacgaaaataaaacaagggaccgccccccgccgtagaatagccaccccgcaaagttcatcaccctaaccagaatcggtggcactgcatcgcgctaaatcggccactttccattatccgcatccaccgcccctcccgctctctgggtccatcatccacctcctgcgaaaacaacaacagcaaccaccagcgcccttacaacaactgttacaaaagagcaagagagaagacaccccgcactcacactcacacggaagcagtgagtgtcctcgccagaaactcgaattcccaaccaaacatcccgaatctgaggcccaaatcttaagcgccaatccgccggaatggactcggacatcgaaatggatatggaatcggacaacgacggggagtacgacgacgactacgactactacaacacaggtaagtggaaactagtacctgatctagaggggcacttccccctgacaacaatcggccatcgatttaactgtggccaaattaggggtacgagtgtatctgtgaggaagtacacacacacatgtcgggctcttggtttggttattcaccttttcggaaggaggcccgcaagacctgggaatttgcattcagcacttgacattcgccttgggttccatgaccaaaccccacaccccccatttgatctccgcccttcttcgctgaccatgaagcttaaattatggaattgaacttgaaacaaacacacacgcacgtagctgcacggcgagaaaattgcactgtgtaataggataaatgtttagttttaaaatgtcaaatctaggccaaactaaatgattacatttggtacatttcccaaagcaattctaatgatgatttgatacctcaatttagagaattatgtgatagggcttgattttcaaatggttttataacatgaactcaaatcaatattgatttaaaaggggcaaaataatataagaatattactaaagacttgatttctctcagtgcatgggcaagtacaattggtagttgcgagttgggactgattgcgaggcttgtgttttgtggctggcttcattattgcccgccactctgctcacgctcttcgtagctccacaacccacacaagcacacattaacacacacaccacgaacaccagctcaggtgcgtgctcaagtacgcagttgcattctgttgtgtgccgctgttccgtcaactcggtctccgcttcttgacctgtcccttattgttccgacctggccaagacgccccctaactcaaccttcaatcggatacctcatatcggtaacatcgtaacgtcgagcacttctatggcagccttgtcgcgcggttgttttctcgaattagccaatgtgactaacaaaatgcaaacatgattaccggctgcatacactgtaatcccttttgatccatacatgtcagattaacatagaagatattcccaaagtaataatgtttcgtcggtttcaaccgatcaatgtaagtcagccattgcttaacttacaaactcaactcaaccttcgtaactctggaaccagttttgtacaataagggattaaaagtgccctattgtatataactgcaactgctaactcagggttcgtttgaaatccacccttgctgtctttcagtctgattttggtttaaaatacaatcagttagcttaaataaccaaaagaaaaagtggaaactgtcctatcaaagcataatagatttatgatttataaatgttataaagttcaattatattataatactaatatccttttcttcttcaggcgaggactgcgatgtggagcgtctggatccgaagcgggccgacccggagtactttgagtacgagtgcctaaccgtcgaggacatcgagaagctgctgaacgagcgcgtggagaagctgaacaccatcctgcagatcacaccctcgctggccaaggtgctgctgctggagcaccagtggaacaatgtggccgtcgttgaaaagtaccgccaggacgccaatgcactgctggtgacggcgcgaatcaagccgccatcggtggcagtgacggatacggcttcgacgagtgcagcggcggccagtgcccaactgctccgactggggagcagcgggtacaagacgacggcatcggcgacaccacagtaccgcagccagatgtgtcccgtttgtgccagctcgcagctgggcgacaagttctacagcctggcgtgtgggcactcgttttgcaaggactgctggaccatatacttcgagacgcagatcttccagggaatctccacgcagatcggctgcatggcccagatgtgtaatgttagggtgcccgaggacttggtgctgacgctggtcacgcgacccgttatgcgggacaagtaccagcagtttgcatttaaggactacgtcaagtcacacccggaactccgcttctgtcccgggcccaactgccagattattgtgcaatcatcggagatctccgccaaacgtgccatttgcaaggcttgccacacgggcttctgcttccggtgcggcatggactaccacgcacccaccgactgccaggtgatcaagaagtggctgaccaagtgcgccgacgacagcgaaacggcaaactacatcagcgcccacaccaaagactgccccaagtgtcacatctgcattgagaagaacggcggctgcaaccacatgcagtgcttcaactgcaagcacgacttctgctggatgtgcttgggcgactggaagacgcacggctccgagtactacgagtgctctcgctacaaggacaaccccaacattgccaacgagtcggtgcacgtgcaggcgcgcgaggcgctgaagaagtacctgcactactacgagcgctgggagaaccactccaagtctctgaaactcgagcaacagacgatcgaccggctgcgccagcggatcaactcgaaggtgatgaacggcagcggcacctggatcgactggcaatacctcttcaacgcggcggcactgctggccaagtgtcgatacacgctgcagtacacctatccgtacgcctattacatggaggccggttcgcgaaagaatctctttgagtaccagcaggtgagtcgcagttcggctattctttaactggttgcccaataatgtattaattccgtgcaggcacaactggaggccgaaatcgagaatctgtcgtggaagatagagcgcgccgagacaacggacctgggtgatctcgagaatcaaatggacatcgctgaaaagcgccgcaccacgctactgaaagacttcttcccagtggacgcataggcaaccgtcgagcttccagggccaccagaacggacagcctgtcttgtttagcacaaacactctttgattgactgctgacaggtcgacgtgacgcgacagtatagagacgcttatttaaattaaattatacacatatttacatgtatccatctagtagtaggcccaacgacgtgtagctaatttttaaattaaactaataatcaagtgcatatagactagaaaacgtagcatagagcatagtcgactactcgaagtataattactatagttgtgacattcgaaatcactcaaaatgatcggtgtaactgcaatacaacgccttgcgcagaacgttaacgatatacagtatctatagctaaagccctagcgataccgataccggtagctataccataactataaaactaactttaaatctagcaactgactaactgacaaaccagacgcatttcagtggccaagtgttccaacagttttccaaaaactagcccaaacgacccgatgaaatgcagaaacagtaacaattctaaatgtatagcgccgcaagtcaagcaattatagatcaaagaccgcctaagcagatcggctcatcggttagaccctaagttttaaaccttgtattagccccgcgtgaacagcatcaagtattcgcaatctgtatctcgtaactaatcgcagcacatcaatcgaacgcaaaagtcttaagtaagaacgaagatagatactccccgtccccgatcccgttccttttgattctcactcgattctcgattaactttgtaagctgaatcataaattatattctaggattacgctatgtatgtatgcttatgcgactgaatttgaattaaatttacactagatatacaactattcaactgacttttcgactgtgggctgcaagcttacgatttgggtcttgtgcttaaagctttggagaagctcatacgaagcttggattgagtgttttaaggataagctttcactcaagtttcaagtttgggttttgagccgagtttattttttttagtgattgagtacgagctatattccaacttatcttccttgatttcgttgttattcagattggatgtgcttagttagtcttcgatgatgtttttgctattattttttaccctttttattgccgaacagtgaactctttctgctgctcttccggctctttcggctcttccggctcttcctgctcatccgactcatcctaacatcaggcgccaaaggtggtttctgcttcgcaagttggctggctaaggtgaacaaccggcactcggaatgctccttcagcagactgttggcgaacttcttgactcccgatatcttggtcaccctcacgttgttcatattttccactttcttggcgggatagacctccacttcgcagcagttcttgatcagcagcaggtcgctgttgtttgtgatgggataccggtagtaaagttcatttccgcagtccaggcaattcttttttgtgcgtctcagctggaatttcatcgggaagcaccgacctactatggtgttattgtccaggataacagaatgtttgtatgtgggcttgggaaggggtcgcttggtccactgtgaaagaaaaatttaagtaaggaacttgtatccttgaattaccacagacctcattcagatgcaaataggttttgagtggccggcattgcgctgagcagagattagggtgcagattctgctcctgggccacgcacatggtgcagcatcgcagcttgtccttgtcggattcgagaagcggacgtcccttgctgcactccgcccggatgttgatctcctgacgcacaggtccatccggttcaatgaccgccttaacaacctccgcctggggctcag

SEQ ID NO: 11885 - DNA, 3002 bp, DROSOPHILA
aacgatatgccccgataggttcggacaagacaaagaacaaaatgttctctgcaaaagctgtgctcgcttaaaaacgcaaaaagtcagtgcatctagtgcattgtcagtggtgcataagattgttctataaatagcgaaaaatgaaaataaactgcaggcgaagtagaaaaaacaccttgagttgagtgcaacggctgtgcgagtgtgtgtgcgtgagagcgagagtgcgctcgtgtgtgtgtgtacacatgcatgttgataaacgaaaataaaacaagggaccgccccccgccgtagaatagccaccccgcaaagttcatcaccctaaccagaatcggtggcactgcatcgcgctaaatcggccactttccattatccgcatccaccgcccctcccgctctctgggtccatcatccacctcctgcgaaaacaacaacagcaaccaccagcgcccttacaacaactgttacaaaagagcaagagagaagacaccccgcactcacactcacacggaagcagtgagtgtcctcgccagaaactcgaattcccaaccaaacatcccgaatctgaggcccaaatcttaagcgccaatccgccggaatggactcggacatcgaaatggatatggaatcggacaacgacggggagtacgacgacgactacgactactacaacacaggcgaggactgcgatgtggagcgtctggatccgaagcgggccgacccggagtactttgagtacgagtgcctaaccgtcgaggacatcgagaagctgctgaacgagcgcgtggagaagctgaacaccatcctgcagatcacaccctcgctggccaaggtgctgctgctggagcaccagtggaacaatgtggccgtcgttgaaaagtaccgccaggacgccaatgcactgctggtgacggcgcgaatcaagccgccatcggtggcagtgacggatacggcttcgacgagtgcagcggcggccagtgcccaactgctccgactggggagcagcgggtacaagacgacggcatcggcgacaccacagtaccgcagccagatgtgtcccgtttgtgccagctcgcagctgggcgacaagttctacagcctggcgtgtgggcactcgttttgcaaggactgctggaccatatacttcgagacgcagatcttccagggaatctccacgcagatcggctgcatggcccagatgtgtaatgttagggtgcccgaggacttggtgctgacgctggtcacgcgacccgttatgcgggacaagtaccagcagtttgcatttaaggactacgtcaagtcacacccggaactccgcttctgtcccgggcccaactgccagattattgtgcaatcatcggagatctccgccaaacgtgccatttgcaaggcttgccacacgggcttctgcttccggtgcggcatggactaccacgcacccaccgactgccaggtgatcaagaagtggctgaccaagtgcgccgacgacagcgaaacggcaaactacatcagcgcccacaccaaagactgccccaagtgtcacatctgcattgagaagaacggcggctgcaaccacatgcagtgcttcaactgcaagcacgacttctgctggatgtgcttgggcgactggaagacgcacggctccgagtactacgagtgctctcgctacaaggacaaccccaacattgccaacgagtcggtgcacgtgcaggcgcgcgaggcgctgaagaagtacctgcactactacgagcgctgggagaaccactccaagtctctgaaactcgagcaacagacgatcgaccggctgcgccagcggatcaactcgaaggtgatgaacggcagcggcacctggatcgactggcaatacctcttcaacgcggcggcactgctggccaagtgtcgatacacgctgcagtacacctatccgtacgcctattacatggaggccggttcgcgaaagaatctctttgagtaccagcaggcacaactggaggccgaaatcgagaatctgtcgtggaagatagagcgcgccgagacaacggacctgggtgatctcgagaatcaaatggacatcgctgaaaagcgccgcaccacgctactgaaagacttcttcccagtggacgcataggcaaccgtcgagcttccagggccaccagaacggacagcctgtcttgtttagcacaaacactctttgattgactgctgacaggtcgacgtgacgcgacagtatagagacgcttatttaaattaaattatacacatatttacatgtatccatctagtagtaggcccaacgacgtgtagctaatttttaaattaaactaataatcaagtgcatatagactagaaaacgtagcatagagcatagtcgactactcgaagtataattactatagttgtgacattcgaaatcactcaaaatgatcggtgtaactgcaatacaacgccttgcgcagaacgttaacgatatacagtatctatagctaaagccctagcgataccgataccggtagctataccataactataaaactaactttaaatctagcaactgactaactgacaaaccagacgcatttcagtggccaagtgttccaacagttttccaaaaactagcccaaacgacccgatgaaatgcagaaacagtaacaattctaaatgtatagcgccgcaagtcaagcaattatagatcaaagaccgcctaagcagatcggctcatcggttagaccctaagttttaaaccttgtattagccccgcgtgaacagcatcaagtattcgcaatctgtatctcgtaactaatcgcagcacatcaatcgaacgcaaaagtcttaagtaagaacgaagatagatactccccgtccccgatcccgttccttttgattctcactcgattctcgattaactttgtaagctgaatcataaattatattctaggattacgctatgtatgtatgcttatgcgactgaatttgaattaaatttacactagatatacaact

SEQ ID NO: 11886 - protein, 509 aa, DROSOPHILA
MDSDIEMDMESDNDGEYDDDYDYYNTGEDCDVERLDPKRADPEYFEYECLTVEDIEKLLNERVEKLNTILQITPSLAKVLLLEHQWNNVAVVEKYRQDANALLVTARIKPPSVAVTDTASTSAAAASAQLLRLGSSGYKTTASATPQYRSQMCPVCASSQLGDKFYSLACGHSFCKDCWTIYFETQIFQGISTQIGCMAQMCNVRVPEDLVLTLVTRPVMRDKYQQFAFKDYVKSHPELRFCPGPNCQIIVQSSEISAKRAICKACHTGFCFRCGMDYHAPTDCQVIKKWLTKCADDSETANYISAHTKDCPKCHICIEKNGGCNHMQCFNCKHDFCWMCLGDWKTHGSEYYECSRYKDNPNIANESVHVQAREALKKYLHYYERWENHSKSLKLEQQTIDRLRQRINSKVMNGSGTWIDWQYLFNAAALLAKCRYTLQYTYPYAYYMEAGSRKNLFEYQQAQLEAEIENLSWKIERAETTDLGDLENQMDIAEKRRTTLLKDFFPVDA

SEQ ID NO: 11887 - DNA, 4806 bp, DROSOPHILA
aaagaggctgctgacgagctggaggctctgcgcggagactagaacccttgtaatattctttaaataccattgttaggatcccgttttgtgggaaataaagtgtgaaatcgacttcgcaacatcatcttattcacatttaataatataaaaattacacagtagtcgaataaatacttaagacttagcaaagtcatgtgcgtatcgatttagccccacgcctgattcttgcagtagtagagcaccagtttcccattggttccatggcactcgtacaagttcttgattatctgatccggggcaggtgcaaatgtctgattaacgtacaggaactaaaaattaagatgacacataagatagggttctctggaacttcatttgttacgtgcaatttgctcgctggcatcgagtttcagaaacttgtggatgaacgtctgtatccagccgactgtcttgttgggatctacggtccaggttcgctttttgatgatgggcacattgccagtggcgttcagaaggatacaaactgataatgaagcaagtctttgtgataaaacgaatgcaaaatatataaagttaactttgattctcacttttggaaccatccttatctgcaggtgtggaggaggaagtgctcagcgctgcctgggattctggtgtctctgccatttatttggaatgtaactaaattaaatagttcctaattaatgaattaaaacagccaataatgtaaataaaatataatctgttagagatcagaattttctgaagaaattatcgataggtgtcacgagattagcgattcagctaattatttgagtaaaatatgctgcatatcatctgattttgttttaaggaattatttactcattttcttgtcatattttttatttaaacatatttttatatttgtctatcactttgagactttcaaaattcgttgttaattgttccacctttagcgttaacagcggctatgttattttacattcgactgttattgtaacacgtgtggagtttataaaacaatccagggaaataaacaaaactatgaataataatctttttgagggctccgacgacgatggggaggatctgcagctgtccacgaacaaggactatgccaagacctacaacatcctgcgcaagaaagagctactacagaaatgtaagttcagaatccggtactgcgatcatttgccatttgttaattatattacttaatatttctcagataaggatcgtggcttggatgtttccgaatcggaattcgacagtgacagctcgtcatccgaggaggacgaggtggaccccaaattcgaccaggacttcttcaagaccctgtcctcgctgaaaagtaaagacccatgtatctacgacaagggtacgaaattcttcagtgagtcctccggcgatgaagatgataaggatggggaggctccgaaaaagaagaaaaaagccaagccagtcactttgaaggactacgaacgaaaggtaattttggagcataatggcaagttcgagagttcagatgaggagcagcaggaaaaggagcacgaggaactccaacgtgcgcagtcaccgagcgccgtggaggaggagcgccgtctaaaggccgagttccggaaggtgatgaacaaggaagacgacagtgaggatgaggaatttggaggtatattcaagaagcgcagtaagaccaaggagcaaacagctgccgaggaggcagactttgccaaatggttggcgggaaaacaagctgagattcaagaaaccgacaagaagcagttggagcctctaaaacagtactggagcagcaacaagctgacccagggcgagagtttcctcagggattacattctcaacaagggctatgcaaacacggatgagtccgccattcccacctacgatgagatcgtgggcgaagctgctccgctctccgaggatgagcaggaacttgagaagcaggcagagtttgagcacaagtacaatttccgctttgaggagccagatgcggacttcataaagcgctatccccgcaccatcgaacaatccctgcgtcgcacggatgacaagaggaaagaaaaacgcaaggagctgaaggagcgcaaggatcaggagaaacagcaaaagatgaaggagttggaactggtcaaggaaatgaagcgtaaggagatcgatgaaaagatacgcaaattaaaagcggtcactggcaacgatgagcttggtttccgggacgaagaactcgaggaggactttgacccggcggcccacgatcgtcgaatgcaggagctcttcgacgatgagtactacaatgtcgatgaaggcgaggagaaaccagaatgtccctcggatatcgatgaattggtgctggaagattgggataactacgatcctagacagcacgccaatgggggcggtgaggattatgaaggacactgcgaggacgacgacttcaacatggattgcgactacgatccgtccacggccaaggagcaacttcaacaagagctcatcgaaaacactcgtggtcgcaaaggacgaaagggtagacgaaatcgctttatggaaatgatccaggcggaaaagcctgcattcaatcctgaggacgaaaagacgtacagtgagtacatcgatgagtactaccaaatggattgcgaggacatcatcggggatcaaccgtgtcgatttaaatatgtggaaaccacaccaaacgatttcggtttgacgatagaagaggtacattttcgattagcttcgttaaagttgaacaatgatattatattttctgttgaatagatcttgctggccaagaacaaggagcttaaccagtgggctagcttaaagaaagctgtccaaaacagaccggaacacgtagagaaaaaggagcagcgtctctacaagatgaaagccaagaatgaagaccttaagcgaaagatatttaagagtctttatggagaagggtgagtaacttacaataaaatttcgatttcgaacgggtgtgtattaaaacttgactctcatgcagttctgacgatgaggagcagccagcagaagagaaaccagaagtgacaccagctgaagcgacagctccagccgaaaatggtcaagtctcgacagaaggtttgtccaaatcaaagaggaaacgcctgaaacgtaaggctgccgcagcagcagccagtgctcctaaggttctaaaagaagaaagtgactccaaggatccaaaggaagcggatggatctactgaagatgtccaggcagaaagttctaagaaaaaagtcgatactccctctaaaaagggcaaagatgacgcaaatcaggaaactaaaaacagtccacaaagcacggagaaaacgaaaaacaataatgccttaaaaaataacaaaaaagagcctaaaaacgtgcaaaatggattccaaaaaccccaaaatcaagcaaataaaagtgcaaagacaaagtcgaaccaaccatttaaaactacggaaagtgcgcctgcaaaagcagaaaaatcaaatggtaataatcctttcaataagccacaatcgaaatcccaacaaaggcaggaactgccaccaattcataaaaatcaaggtggaaacaaaaagggaccgagaaacgctaacggcaccaatccctttaagaaatcaaaccaaaagccaagtgcacccttcccagctaagaaaacgaacaactttaaggcgaaaaacaagcaaaataacaatagtggaataaccgacgatcgattaaaggcatatggcataaatcccagaaaattccacaagcgggaaaaatatggaaaaaaggataactaaagagttatgataaatctaagaataaaagttcatatatagttatacattttatagttacattttatgtacatatgataacatattaaaaaccaacacagcacaatgaactctgatttgatcagttattctgcggcagtcacgtcatcatcggtggccactccatcatcatcatcatcatcgtcctcggtgctcttcatgcgatccaattgaagacgccgctcttggatgcgaatgcatttggggcaaatcatatttttgcgcgtgaggcaaactcggtggaagatggaattgcactgatcacacttgatgcagccatcgtcgaagggaaagatcacctcgttgttgctacaaatctcgcaaatgtacgcttgggcaaggcacatggggcaggatcgtatgtgatcattgaatgccttgaaaactccttgcagaaattcgctcagcgctccagattccacctggctgagatcacttagggaatagaactcatttgactgggccagatgtcgccggacacccagttgctgatccaccagcttcaactcgctggcaatcttgcaggcagccagatagtggcgcatatgcaccagattttggcgaagtttctttaccgcacacaatttttctacgaacacaaacagcttgggattgtcctcctccaagcgaatgagcggtttatttaggaacaacctaatctcttggagcgccgtgcgcgacactctgcgtggcgaaaagtcccaattgtggataatgcgggctggtataaagttactgtcgttccagttgcagcgagggcagtagtacaatccactatagtcgcatagacgcggctcaatccaggtattttctacgaggaaggagtctaattattcggaaccaaaagagtagccttaacttacttatatttagcatcgtcccgcactcggcgcacttgtatccctgggaggcgagtccgatttctggacatatctccgaaatgggatgctgccgctctgaaacc

SEQ ID NO: 11888 - DNA, 2615 bp, DROSOPHILA
taacacgtgtggagtttataaaacaatccagggaaataaacaaaactatgaataataatctttttgagggctccgacgacgatggggaggatctgcagctgtccacgaacaaggactatgccaagacctacaacatcctgcgcaagaaagagctactacagaaatataaggatcgtggcttggatgtttccgaatcggaattcgacagtgacagctcgtcatccgaggaggacgaggtggaccccaaattcgaccaggacttcttcaagaccctgtcctcgctgaaaagtaaagacccatgtatctacgacaagggtacgaaattcttcagtgagtcctccggcgatgaagatgataaggatggggaggctccgaaaaagaagaaaaaagccaagccagtcactttgaaggactacgaacgaaaggtaattttggagcataatggcaagttcgagagttcagatgaggagcagcaggaaaaggagcacgaggaactccaacgtgcgcagtcaccgagcgccgtggaggaggagcgccgtctaaaggccgagttccggaaggtgatgaacaaggaagacgacagtgaggatgaggaatttggaggtatattcaagaagcgcagtaagaccaaggagcaaacagctgccgaggaggcagactttgccaaatggttggcgggaaaacaagctgagattcaagaaaccgacaagaagcagttggagcctctaaaacagtactggagcagcaacaagctgacccagggcgagagtttcctcagggattacattctcaacaagggctatgcaaacacggatgagtccgccattcccacctacgatgagatcgtgggcgaagctgctccgctctccgaggatgagcaggaacttgagaagcaggcagagtttgagcacaagtacaatttccgctttgaggagccagatgcggacttcataaagcgctatccccgcaccatcgaacaatccctgcgtcgcacggatgacaagaggaaagaaaaacgcaaggagctgaaggagcgcaaggatcaggagaaacagcaaaagatgaaggagttggaactggtcaaggaaatgaagcgtaaggagatcgatgaaaagatacgcaaattaaaagcggtcactggcaacgatgagcttggtttccgggacgaagaactcgaggaggactttgacccggcggcccacgatcgtcgaatgcaggagctcttcgacgatgagtactacaatgtcgatgaaggcgaggagaaaccagaatgtccctcggatatcgatgaattggtgctggaagattgggataactacgatcctagacagcacgccaatgggggcggtgaggattatgaaggacactgcgaggacgacgacttcaacatggattgcgactacgatccgtccacggccaaggagcaacttcaacaagagctcatcgaaaacactcgtggtcgcaaaggacgaaagggtagacgaaatcgctttatggaaatgatccaggcggaaaagcctgcattcaatcctgaggacgaaaagacgtacagtgagtacatcgatgagtactaccaaatggattgcgaggacatcatcggggatcaaccgtgtcgatttaaatatgtggaaaccacaccaaacgatttcggtttgacgatagaagagatcttgctggccaagaacaaggagcttaaccagtgggctagcttaaagaaagctgtccaaaacagaccggaacacgtagagaaaaaggagcagcgtctctacaagatgaaagccaagaatgaagaccttaagcgaaagatatttaagagtctttatggagaaggttctgacgatgaggagcagccagcagaagagaaaccagaagtgacaccagctgaagcgacagctccagccgaaaatggtcaagtctcgacagaaggtttgtccaaatcaaagaggaaacgcctgaaacgtaaggctgccgcagcagcagccagtgctcctaaggttctaaaagaagaaagtgactccaaggatccaaaggaagcggatggatctactgaagatgtccaggcagaaagttctaagaaaaaagtcgatactccctctaaaaagggcaaagatgacgcaaatcaggaaactaaaaacagtccacaaagcacggagaaaacgaaaaacaataatgccttaaaaaataacaaaaaagagcctaaaaacgtgcaaaatggattccaaaaaccccaaaatcaagcaaataaaagtgcaaagacaaagtcgaaccaaccatttaaaactacggaaagtgcgcctgcaaaagcagaaaaatcaaatggtaataatcctttcaataagccacaatcgaaatcccaacaaaggcaggaactgccaccaattcataaaaatcaaggtggaaacaaaaagggaccgagaaacgctaacggcaccaatccctttaagaaatcaaaccaaaagccaagtgcacccttcccagctaagaaaacgaacaactttaaggcgaaaaacaagcaaaataacaatagtggaataaccgacgatcgattaaaggcatatggcataaatcccagaaaattccacaagcgggaaaaatatggaaaaaaggataactaa

SEQ ID NO: 11889 - protein, 855 aa, DROSOPHILA
MNNNLFEGSDDDGEDLQLSTNKDYAKTYNILRKKELLQKYKDRGLDVSESEFDSDSSSSEEDEVDPKFDQDFFKTLSSLKSKDPCIYDKGTKFFSESSGDEDDKDGEAPKKKKKAKPVTLKDYERKVILEHNGKFESSDEEQQEKEHEELQRAQSPSAVEEERRLKAEFRKVMNKEDDSEDEEFGGIFKKRSKTKEQTAAEEADFAKWLAGKQAEIQETDKKQLEPLKQYWSSNKLTQGESFLRDYILNKGYANTDESAIPTYDEIVGEAAPLSEDEQELEKQAEFEHKYNFRFEEPDADFIKRYPRTIEQSLRRTDDKRKEKRKELKERKDQEKQQKMKELELVKEMKRKEIDEKIRKLKAVTGNDELGFRDEELEEDFDPAAHDRRMQELFDDEYYNVDEGEEKPECPSDIDELVLEDWDNYDPRQHANGGGEDYEGHCEDDDFNMDCDYDPSTAKEQLQQELIENTRGRKGRKGRRNRFMEMIQAEKPAFNPEDEKTYSEYIDEYYQMDCEDIIGDQPCRFKYVETTPNDFGLTIEEILLAKNKELNQWASLKKAVQNRPEHVEKKEQRLYKMKAKNEDLKRKIFKSLYGEGSDDEEQPAEEKPEVTPAEATAPAENGQVSTEGLSKSKRKRLKRKAAAAAASAPKVLKEESDSKDPKEADGSTEDVQAESSKKKVDTPSKKGKDDANQETKNSPQSTEKTKNNNALKNNKKEPKNVQNGFQKPQNQANKSAKTKSNQPFKTTESAPAKAEKSNGNNPFNKPQSKSQQRQELPPIHKNQGGNKKGPRNANGTNPFKKSNQKPSAPFPAKKTNNFKAKNKQNNNSGITDDRLKAYGINPRKFHKREKYGKKDN

SEQ ID NO: 11890 - DNA, 3660 bp, DROSOPHILA
gaaatgggggtggggggcagcagtggaaacacaattcactctgttgcgtttttgtccgacttttggtctttctgctttccgtttgctctgcttttcagtttgtttttctcttcgtcttcttgtacaccgttatttcgattgcgagcctcccgttcgcaaaatcagcgaactttgcgaacttttcgcggctccacaaacaactgcacatactaccactaataaaattaagattaaattgtgcgcaattcgacattaattcacttgcacaatttttcctgccatttttttcggcggctgctcattgcaactcgctgcgtttttgcgctgaccatatgtgtctgcccatatattcactggacatgggtcattaagtgcagcacgatgaaaataagaaaaatagcacgctgtatgtacactttgttacttcgatttgcgtttatctctgttttttaacgaacgcgacgcgatgttgtgttgttgttcatcgttcgactcggtgtgaccgttcgcagaacagtgctaataaactgcggagttacacactcgccttctggcagtgcggtcacaccaattcgatgttttcaacattcatagaaatggttgataacacggatagcgcatactcaaaccgatttgaatgttttctaaattcaaaaacttgttcctattgttcaaaccaaagatttttaaaaaaattagatctaactttagaggcagatctcaaatactcagcaatataaccttgttcatggacgcaatttgtcatcattttaattttaaagcttacaaaattgaggtgcatttcgaaaatattaagcccgtgttgatacgataaaacgtttacaaagtgaggcaattaaagctatttgttagtgctgttaaacagcattgaagtaaattatagaataggtttgcatttttcgatcacactcattctcagttgacaacaatgtacacagcatacaaactaaggctcctaatctccaccagactgcctgggtcatacgtaggtgccgttccaccgctgacaccactccagcgcatactcgtagcccaggaaagtggcggcattgaagggaaccgcccgcgccaccagcatccagctgccgcggaagatgctcctccagccgtaggctctgtactgcacccgcacgcaatggaagatgccccggtacttgtgattctcatccgcctgcatcagcgtcttgaccacgtcgaacggaatgacacacacccacgagatgactcccgcccaggcgccggccagcgtggtcaccagcaggttcacactggatccgtccgactgactgcgtcgccggcgcacaaagtcccgcctgtccatgtagtcaacgccctggcgataggccagcatatagattccatagggcaggacgtcgctgtaaccaaacgaccattgaaagattcatgtatttttggactaccacctggactaacttaccggcacatcatgggcaaaaggccgcgatagagccccgagatgccatcagtcttgagtatccttttgaacgtgccaaaggcggtccttctctggccatacagatagtcactgtaatctacggaatttcacaaattaatcctccattttgggattaaaaaatcaagtagaacccacaagtggctgtctgcaggcgaaccttgatcagctccatgggacaggcgatgaaggactgcacgaatcccgccacagagcccgccaggaacatgttgtggtactccagctgctcccgctggtagtcactgtggcacacctttctcagctgccgcagatggtttccatagatgccgaaaagcagcgagttgatcgctcccgtcgagatgaacgggaagaacatgcccctgtagaagccgttgacctttgaggcgatgctgatcgattaaacccatcacgacccacctaggcgctctaagggattgcgtccagtcggagtcgggattaagaataggacaaagccattttggctggtttaaatatttgaaaagttatgaataaaaaaggagattggaagatcgacatgtacatcgttatccaaatatttcacataaaatttgtatccttgaaaaaaagtttccaactagacgcaatccttctttccaaacttaccccattatttctgctgtagatctgttgaatggctgtcacaacggatgaatttgaggcctgttgccaaactttgatcgtgtcgagtgggtgggccaccagcaccccgcaggcacctgaatatcagagtataaaaatcaagaatgcagcataaattaattaaaattgtggccacaaagttaaacaacacatgttgaacggccgccgccgccgacagccgcttgccaagaatccgatggatcaggggcgccgcacgtgaacttgaccatggcgcccgttttccgccgggactgaggcagttcccctcaacaagtggcctatcgccacacggctgctgcattgcgtcatgcatggcccagagttctgaccaaattgggatgaataccagctggagctctgccgctccgtcactcaccaccaaagcatccggccacaaagtcgcagtagttctcccacttcatggatgcggattttcagcgaacgcttggagttttcggaaaattgatttttctcgcgattttccaactgcacctcacgacggcagcgaaccaactgcagtgcacagcttttgtggctcggcagcaaagctctgcgatttcgccagctttcccagcgaacagaagctgattgctaaaaaataggcaaaccgaatgctcacttttcaaaaaaagatactttctaacgaaaaagtaactctgctaagcataatgatatcttgtgggtatacagctcaaaactattcagttctaaacttaaaattttcaaaccaaactttctagaatttttcctacgcataggaaaaagaagtgtagaaagtttcttagcttttcacttcaagttcaaaggaatataaatcctttaattttaaaaatactattttgaatcctatctaaaatcaaacacgttgtgttaattattttgtatttattaattttttattgttgattgatctctttgcttcttttctctccgtttgctcatcattctcattcattcagtttttgtgtgttttttttttgtttcatcttttacttggtttttaatcatttttggttaattctgcttgcagctaaatatttgtttttgcctgcgccatgcaattttaattatttttttttctgctgcttctcgccattagttagttaatttactttattttcgcatactttctgcctggattcgaaagcaatcaactaaacctcttttttccgatgcttctccatatataattttccttttttatatatatatgctgtttatatatacctatatatatatatatttattcccatttatgtttgtgtaattataatttactctttatatttactctcagcataagattttgtttagtcgtgtgtgtgtgtgtgagtgagtaagtgtgtgtgcgattgtgggtggtgtgggtgctgtgtgcctttaaccaaaggaaaaaagaatcgaaatcctggcacaccggcctacacagaactagaactcaaagtttaaaaaacgtaataatatagcgtgtgtacgataggtttttttttttacaagtctag

SEQ ID NO: 11891 - DNA, 992 bp, DROSOPHILA
ccgtcgtgaggtgcagttggaaaatcgcgagaaaaatcaattttccgaaaactccaagcgttcgctgaaaatccgcatccatgaagtgggagaactactgcgactttgtggccggatgctttggtggtgcctgcggggtgctggtggcccacccactcgacacgatcaaagtttggcaacaggcctcaaattcatccgttgtgacagccattcaacagatctacagcagaaataatggggtcaacggcttctacaggggcatgttcttcccgttcatctcgacgggagcgatcaactcgctgcttttcggcatctatggaaaccatctgcggcagctgagaaaggtgtgccacagtgactaccagcgggagcagctggagtaccacaacatgttcctggcgggctctgtggcgggattcgtgcagtccttcatcgcctgtcccatggagctgatcaaggttcgcctgcagacagccacttattacagtgactatctgtatggccagagaaggaccgcctttggcacgttcaaaaggatactcaagactgatggcatctcggggctctatcgcggccttttgcccatgatgtgccgcgacgtcctgccctatggaatctatatgctggcctatcgccagggcgttgactacatggacaggcgggactttgtgcgccggcgacgcagtcagtcggacggatccagtgtgaacctgctggtgaccacgctggccggcgcctgggcgggagtcatctcgtgggtgtgtgtcattccgttcgacgtggtcaagacgctgatgcaggcggatgagaatcacaagtaccggggcatcttccattgcgtgcgggtgcagtacagagcctacggctggaggagcatcttccgcggcagctggatgctggtggcgcgggcggttcccttcaatgccgccactttcctgggctacgagtatgcgctggagtggtgtcagcggtggaacggcacctacgtatga

SEQ ID NO: 11892 - protein, 303 aa, DROSOPHILA
MKWENYCDFVAGCFGGACGVLVAHPLDTIKVWQQASNSSVVTAIQQIYSRNNGVNGFYRGMFFPFISTGAINSLLFGIYGNHLRQLRKVCHSDYQREQLEYHNMFLAGSVAGFVQSFIACPMELIKVRLQTATYYSDYLYGQRRTAFGTFKRILKTDGISGLYRGLLPMMCRDVLPYGIYMLAYRQGVDYMDRRDFVRRRRSQSDGSSVNLLVTTLAGAWAGVISWVCVIPFDVVKTLMQADENHKYRGIFHCVRVQYRAYGWRSIFRGSWMLVARAVPFNAATFLGYEYALEWCQRWNGTYV

SEQ ID NO: 11893 - DNA, 3681 bp, DROSOPHILA
cacaatcacaagtatattaatttcgttaaaaatcattaaagaataagtaaatcgttccggttttgttttcaagtaagctaagcaatttttaacttacgagcgctttgaaaatactttttaaaatttatatatataatcagaagttacatttcatttgggtgttcaattaaatatgcgcatatttcactaaactgaagatcccaccaagttatttataaatacttccaacaatggcgaacttctaataatataacctacatattaaaatattctcaagtcaggaatgagaacaaaaaaaaaaaaacaggttccagtgagcagaaaaaatcgcataattgaaaaaccgatgtaaacacgtaatttaccgttgaaaagatcacttagtttagaacacacataaagataatgttaattgcaaaattatcaagtatatgggcggaacaaacgcgacctggcttaattgaattgcctcgaatcccgttcaactagtcattgtttttatgttttcgagagtaagtgtaaaaagtgtaggtcagagactccacagcaattaacctggcgaggatggagcgattctcctgcgtcatttgccattcatcgccaagcgaacgatccgctctaagcgtttacttttcttccaattccagcccggccaccgagtgccccgctactccttgatcaactggggcctctgtgtgccctccggctgctccgcccgcgatgtggagtacagtgtggccgagtatctgggcaaccagaccgcttccacgggcatcaccttcaatgtgcgcgtggagccccagatgtgccaggtgcgcgatcagcggccctgggatcggaacaccacgtgggcggtgcgcttctttctgctcgtgctctccgtggccgtactgtccaccatctacgatcggtccaccaagtcgcagcccaagcagagtgagctctccaagcctcagccgtcgtatagcagtcatatatctaagggtgattccattttcagatccctggttcacggccttctcgctggacaagaacctgcgctggctcttcagcacgagcagtgctcccggagacattgaagcggtgcatggcatccgcttcctgaacgccatcatgctgatcttttcgcacaagtccatggccatgttcttcaatccgtacaacaatcgcaccgccatgtcagagagtctgggtcagccgtggacggtcattggacgagctgcctccctgtacacggatcccttcctgctcttcagtggaatgctgacatcctactccctctttggtcgcctcatgaagcagcaacccatcaggctgaagaacgagtacattagtcggctgatgaggtgggcgtagttaaatgttacgagttaattgcttgtactaatcgcattggtttacccgctgcaggattgttccgcccctggccgccttgatactcttctgcacgtatgtgctgcctctgtggggcagtggaccccagtggaatctggtggtgggccaccatgcggacatctgcaagaagaactggtggcgcaacctgctcttcattcacaactacttcggattcagcgaaatgtgcctgacgcacacgcaccatctgggcatcgatacggaactctttgcggtggctccactcctcatcctggcactgtggcggtggccaagacgtggcctcttcgccctgctgctgctctgcacggtgggtacggcggctaggtactacaccacgattgtcaaccagctatccaactatatctactttggtaccaagtgagtttggtcataagtgcaaatatctgatctgaaaattgcatcgttatgtttgtgatattccttcctagcattcagcgcctgttccgcaccgccgactacatgtactccttcccgccccaccgctccacggtctacatcatgggcatcctgctgggctatgtgttgcgcaagtaccagaatgcccggctgagcagcctgcagctgcgacttggttggctggtggccaccgtctgtgtgctcgcctctctgctgggaccagcgcccatgggtgacatcaactacgtgtacaattccacccatgcagctatatacgccgcctttgcgccgatcgcctggtgtttgtttttctcctggatcgtctttgtctcccataatggatacacaagtgggtgttgtgaaagaatatccacgctttcgagttgttaatttatttttgtgttattccaatcagataaactgacgaagctgtttgcctggcgcggtttccaggtgtccacgaagctatcgtatgccatttacctgacgcagttccccgtgttcttctttaatgtcggccgaaggcgtcacattcaccactactacaactttgtttcgataattgtaggtattcgcccaggtctagcatttatagagaattgtattttttgttgttttttatttgctcaacgcagctcgataccaacgaattcatatcgatcttcctggcctccgtggccctgacggtgctcttcgatgcaccgttccagaatctaaagaagctgctgatcaagcgacccacggcggcaaaggtggtaaaggatagcaaagccaaggcggcagagtcccaggatgcgacgacaacgacactagcctcacagcccagcagcactgccctcctacaatcgcatcatccgcactcggattagtcttggatgcacacactctttcttagctatgtataacttgtaaatgtcttagcatttagtggcaatatgtttaagtgatccccaggcgaaatccccccccccccccccaaaaaaaaaagaatcgcatccaatccgtccatgtgctcatcacatcccacagccttttccccgaattgaatccaagacagcccctagttttagtggaacgctttatacattgtaaattgtactattagtcaaaacgagcgacaattaagaaccgaaccgaaccgattcgtagtcataaaccaattaatcaatcactgcttgatgtacgatattatcttgcttgctaaaccgggcctcgagaggtagtctctgctggggaaccctatgtcatatcatattcacatgatattggggccctggacgcagactctcggtgcccatgtttattagaatacttacgttaccttaagcgaggtcgaatgtcagtttttaaatggtaatttaattaataaaatatataaatatgttacgaaaaaacctttaagcgtttgcaaacgtttggtgtgaatgaattcctgaaagtatgcaatattcgaattcagagcatacagttttggagtgactgaaatgtgataaaagcccgactacagtttgagtagccacggttaaaattggttaaggtttacagccactggatcgccattaccaatgccataaaactgtaagaacgaaaacttatttcaattctaatactaataaattctatacctttaccgtagtgttggtggcaaagcaaaacagcttctgtaaaaaatcctatgctttctgtgtaattcagtactaggtgtgctatatggaaaattgcttgttgcagacaattgttgttttatgcttctatttgatgcacataagaaaaccaaaatgagccccaattaaataaatattaatttctgcgtgctacctaagccgattgtaactagaatttgtttaaagcaagtggcaggtaaaaggt

SEQ ID NO: 11894 - DNA, 1295 bp, DROSOPHILA
atccctggttcacggccttctcgctggacaagaacctgcgctggctcttcagcacgagcagtgctcccggagacattgaagcggtgcatggcatccgcttcctgaacgccatcatgctgatcttttcgcacaagtccatggccatgttcttcaatccgtacaacaatcgcaccgccatgtcagagagtctgggtcagccgtggacggtcattggacgagctgcctccctgtacacggatcccttcctgctcttcagtggaatgctgacatcctactccctctttggtcgcctcatgaagcagcaacccatcaggctgaagaacgagtacattagtcggctgatgaggattgttccgcccctggccgccttgatactcttctgcacgtatgtgctgcctctgtggggcagtggaccccagtggaatctggtggtgggccaccatgcggacatctgcaagaagaactggtggcgcaacctgctcttcattcacaactacttcggattcagcgaaatgtgcctgacgcacacgcaccatctgggcatcgatacggaactctttgcggtggctccactcctcatcctggcactgtggcgcattcagcgcctgttccgcaccgccgactacatgtactccttcccgccccaccgctccacggtctacatcatgggcatcctgctgggctatgtgttgcgcaagtaccagaatgcccggctgagcagcctgcagctgcgacttggttggctggtggccaccgtctgtgtgctcgcctctctgctgggaccagcgcccatgggtgacatcaactacgtgtacaattccacccatgcagctatatacgccgcctttgcgccgatcgcctggtgtttgtttttctcctggatcgtctttgtctcccataatggatacacaaataaactgacgaagctgtttgcctggcgcggtttccaggtgtccacgaagctatcgtatgccatttacctgacgcagttccccgtgttcttctttaatgtcggccgaaggcgtcacattcaccactactacaactttgtttcgataattctcgataccaacgaattcatatcgatcttcctggcctccgtggccctgacggtgctcttcgatgcaccgttccagaatctaaagaagctgctgatcaagcgacccacggcggcaaaggtggtaaaggatagcaaagccaaggcggcagagtcccaggatgcgacgacaacgacactagcctcacagcccagcagcactgccctcctacaatcgcatcatccgcactcggattag

SEQ ID NO: 11895 - protein, 372 aa, DROSOPHILA
MSESLGQPWTVIGRAASLYTDPFLLFSGMLTSYSLFGRLMKQQPIRLKNEYISRLMRIVPPLAALILFCTYVLPLWGSGPQWNLVVGHHADICKKNWWRNLLFIHNYFGFSEMCLTHTHHLGIDTELFAVAPLLILALWRIQRLFRTADYMYSFPPHRSTVYIMGILLGYVLRKYQNARLSSLQLRLGWLVATVCVLASLLGPAPMGDINYVYNSTHAAIYAAFAPIAWCLFFSWIVFVSHNGYTNKLTKLFAWRGFQVSTKLSYAIYLTQFPVFFFNVGRRRHIHHYYNFVSIILDTNEFISIFLASVALTVLFDAPFQNLKKLLIKRPTAAKVVKDSKAKAAESQDATTTTLASQPSSTALLQSHHPHSD

SEQ ID NO: 11896 - DNA, 5557 bp, DROSOPHILA
ggtgaccacgatgtatgacgcagttaggagcgccctgacggagcaccaatacggtctgctggagaaccgtagtcgccagctgccactgggaatagccacatcctattaccagccggtggtccggcgcagggatcgacgagcggcctttatcatgcgggattttcacgcccgtgactttctggccatcacctatgactcgcaggcagagcgaccagcctaccacatcgcccgggaatatctgcgctctatgatatgcacctacatcctaccaagaggatcgccctttctgcaccgcttggaatctctgtacagtggcttcctcgagcacggcttctttgagcactggcgtcaaatggatctgatcacccgggttggtgcgtcgccggatgctgaggagtttctcgaggatctgggcgaccagacggacacggattccggctccaacgagttggcgattcgtaacaaaaaggtggttctcactctggacatcctgcagggcgccttctatctctggtccgtggggattggcataagctgcttgggatttgcagtggagcacgctcattggttttggcggagacagacacttcggaatgcggttgaagctagaacaagctaactaaaaatattaaaaattactaaataaaaggtacatatatgtttgttattgtaaatactatactaagttttcaataaatttcaccgctgtttagttggacatgttgttttatacattttaatgataaaactgtagttttatattattctaaccatttaatgaatttaaccatttattccaattaacctttcttgtaaatttaaatgtaacggctttttatgttgttatggcttaacattccgcgcgtaacagcacactggagacccccagtatcagagcatcgatagcacccatcgatagtccgatcaccagcaaccctgcctccggctgtcatgtttcacttccggagcttgcgaacaaaatagaatcgctaaggcaaagaaaaccctgcgagtggcgagtgttttaagatcacactcaaaaacaacatccaaagtggttagtggcagttgagagagtgcccaagaccccgaataccagccgggcagacacgaacaacaccagcagcagcagcaccaccatcatcaacagcagcagcagcatttcccgcttttcgttttcgtcgtcgccgaacaacaaataacaaaaccacgacaaacgatggctgatgccgcggagagtaagccactggccgccgaacagcagcaggcgcagcagcagccggagcagcagcagaatccgccgaatccgcaggagcaggatcacgagcaggagccgctggacgagctgcagggacagcagggccagcccgctccgcccaccaaggaagtcatcggtaaggctgaaactcgcatgttaaacccaattcccaaccaatttcattcatgtgccgcgaacacatggcggctgctaccaaaatagcaatgaaaaaaaggaggaaaaaagaacaagaaacatgcctccctgtatgcgtgtgtgtgtgtgtgttttgagtcttaaaatatacgcgcgtcggccattttgtgcggccaaaggcaacgcaacgcatgtatatatgtatgtgcacgaacgctcgcgccgccggctaaccaaattgaaaattctgccttttgccggtcgtctgtctttccacccacccaaccaccaaccccacccgcttcgcctctttaaaaaatgcccccccataggtgtacacacacacacacatacacacatgcagagcgagccagggcaacccaatttgttaatgcgcgcgcagcgggagtgcgaacgagagggcagacagccgggtgtggatgtgtgtgttcattgttttggtacatctatttgcacacacacactaaaacgcatggaagcatggctataaggcgatttcaaaacacgagaccataatgcaaccaataagatacaataatattcggcgactattacaatatattgccaaataatttgggatgccactatattttcgcgtaaatcaacatattatatgcatacttatatggtttattcgaaattttggtaaccatagttttaaataattgttaaccaataatttgtggttataaaacgtctttcaatgttattgcacgcttcaatgagttttcaaactgcgtattagtttagtttcagatgtattgcgttttgcccctcctttataataaaaaaaaaatgcaaagtattatctcaaaactaccccttttgtataatttaagtttcttatgtagaattatttgtattttagaagtcagctcgctgtgcatccctactgttccctaatatttttgttgcatgtataatgtttaaaggattataatatttgataaaggaatgattgcaactgatcccaaacaagtattataccattgaaatcaattaaatgatcacacgtttgtagaataagtaccgccaaaaatattgaatcccactattatccccaattgtttataatttctactctttcccattgcagccaccaaagtcaccggcaccgtcaagtggttcaacgtgaagagcggctacggcttcatcaaccgcaacgacaccagagaggatgtctttgtgcaccagagcgccattgcgcggaacaaccccaaaaaggcggtccgctcggtgggcgacggtgaggtcgttgagttcgacgtggtcattggtgagaagggcaacgaggcggccaacgtgaccggtccctccggtgagccggtgcggggcagtcagtttgcagcggacaagcgccgtaacttccgtccctggatgaagaagaatcgccgcaaggatggcgaagtggaaggcgaagacgccgaatcgtcggcccagcagcaacagcagcaggcggcaccaatcgttgacgggcagccgcagcagcaggtgcagtccggcccgcgtcaaccacgacagaacttccgccgaggaccacccggtggaccgcccggaggacctcgaggtggcccccgaggaccgcctggtggagctcccggtggcccccggcgctacaacaactattatctgcgtcagccgagacgcggcctgggcggcggtgacggcagcgccgagcccggtgtccacgatcagaatcccgagggtctgcagcgcggcgagggtcagggaccacgtcgcggtggaggcccaccgggcggaccccagaggcgcttcttccgacgcaacttcaacaatggtccaccgccaccacgccgcgacggcggagaatacagtgagtgaactttgtgctattagataattggtatatattattattaatattattctgttgcagttcaaggccagggaccgccacgcccacaacagccacgtccacgtcgccagaggaaaccaaatggccctggcggtggttcggagcagcagccagagaaggtaatgaactaatcaccagcatcatcacaacagcagaaacaactgaaacatcttcgccgaaacaaacctacgataacaacatctaaattagtaaacatcagcaacagtcagtcgcaagcataacaacaaggtctacaataataacatggtgaaggcgtcttaaaaactaaacaactaactaaagtgcattgtgtagatgcattcgtaaataaccactaacaaccagagcagccacacgcaccgacaccaaaagcagagaaacagcgataaagcggagaaaccaccctaacatttaacactttacacttaacttggaggctttgggtctaacataacattctaatacatttagtttttagttacctaacctgtgactaattggctaacaagcaacacacacacacttaatttacaaccgaaaccagcattttgctttcatcccttcgatttatttttgaagttgtacttacgttaatgatttctacccccctcgccatgttttcccatgttcaaattcctagaacggcgctcaagagctgcaaaatacaaccacagagagcactgcatagaaaaggatccgaaaggatctaaatcgtcaaccgacaaacaaaaacatcgtcagcagtagccgcagtatataactacaatcgcagaaaaacagcagcagcagcccatcctcaacatcagcgaccaatgcaacatcatggtgcaataagatcagcaaatgttgcagcaaattttgctaaatgagccgccgcgttttttcggtttgtttgctttttgtttagtttcgtagggcagagaatcaattgtacaactcataccacaacaaaactaacatcctcaaaatttcaatcaaattcaaaaacaaacaaaaaattgtataaaatttccatcaagcctggccgtcgtcaaaaaattgcataattgtggaatttttattgtatgaaccaacaaaccaaacacgaaaacataaataaatttcaattacactgcaatttagatggcgccggtatacaatttactttaatgattattaccattttttatttatttattcttgaaagcattgttacccgttgtgcgttaagcaaacccataactctaagttactcgatttaaagatcattaaaaacgtaaacctataccaataaccacaccaccactttgtcccatttatgcatcatccgaaatcgagaaccatagccatcgggcgaaaagaaatgaaagcaaagcagagcaaacaaacagaagaacgaaatcatgtaaatcacagcaaacaaacatacaaaaaaaaactgtaaaagatgcaaaaatatacaacaaacgcaagatggcaacaaaggaaagtaaaaaaaaaaactttaaaaacgtattggaaaaaataaaaaaattgaaaaacactttttggtattgtttatttgtgtaaattctaaactaaagtgtagtttataaatgtttacttaaatcgctatcgaatatattattttatatatttattctaatttttattatttatttattggggatctacgttaagtgagcaaatcattgagtctgcaatataaataaattcttaagctaatttacatatgcggtattggcatggtgaggtgctacaggtttgtggtcaaggatgtgaccgtggaaatgctcagtcgctccagacgacccaagaccagtagttcatctatggagcgcttggcgtagaacttttggtcctcgttcagccgcaggaaggcgtgagcccaggctttggcataggattccgcttcggaaatggcattggcatcgaactgggcgacactttccgttggcttgggttcgattgcctcaccgccagcatcggatgtagtatgttggatgtcacataggtccagctcgatgggcacctgatcttccgcctccacaatctcaatctcgtcttccggctcctctggttcagtcgacaagttctcctcggagaagagcttcagcaggggtctggagtgggaggattccaattcacgttttgatttcagctgcaggataatctaaattatgtagtttcagcttgacttgtatgggtataaaagtgcagtacttacagtctgctcctcctccaaagaagcctcaatctcatcatcc

SEQ ID NO: 11897 - DNA, 2275 bp, DROSOPHILA
aaaaccctgcgagtggcgagtgttttaagatcacactcaaaaacaacatccaaagtggttagtggcagttgagagagtgcccaagaccccgaataccagccgggcagacacgaacaacaccagcagcagcagcaccaccatcatcaacagcagcagcagcatttcccgcttttcgttttcgtcgtcgccgaacaacaaataacaaaaccacgacaaacgatggctgatgccgcggagagtaagccactggccgccgaacagcagcaggcgcagcagcagccggagcagcagcagaatccgccgaatccgcaggagcaggatcacgaccaccaaagtcaccggcaccgtcaagtggttcaacgtgaagagcggctacggcttcatcaaccgcaacgacaccagagaggatgtctttgtgcaccagagcgccattgcgcggaacaaccccaaaaaggcggtccgctcggtgggcgacggtgaggtcgttgagttcgacgtggtcattggtgagaagggcaacgaggcggccaacgtgaccggtccctccggtgagccggtgcggggcagtcagtttgcagcggacaagcgccgtaacttccgtccctggatgaagaagaatcgccgcaaggatggcgaagtggaaggcgaagacgccgaatcgtcggcccagcagcaacagcagcaggcggcaccaatcgttgacgggcagccgcagcagcaggtgcagtccggcccgcgtcaaccacgacagaacttccgccgaggaccacccggtggaccgcccggaggacctcgaggtggcccccgaggaccgcctggtggagctcccggtggcccccggcgctacaacaactattatctgcgtcagccgagacgcggcctgggcggcggtgacggcagcgccgagcccggtgtccacgatcagaatcccgagggtctgcagcgcggcgagggtcagggaccacgtcgcggtggaggcccaccgggcggaccccagaggcgcttcttccgacgcaacttcaacaatggtccaccgccaccacgccgcgacggcggagaatacattcaaggccagggaccgccacgcccacaacagccacgtccacgtcgccagaggaaaccaaatggccctggcggtggttcggagcagcagccagagaaggtaatgaactaatcaccagcatcatcacaacagcagaaacaactgaaacatcttcgccgaaacaaacctacgataacaacatctaaattagtaaacatcagcaacagtcagtcgcaagcataacaacaaggtctacaataataacatggtgaaggcgtcttaaaaactaaacaactaactaaagtgcattgtgtagatgcattcgtaaataaccactaacaaccagagcagccacacgcaccgacaccaaaagcagagaaacagcgataaagcggagaaaccaccctaacatttaacactttacacttaacttggaggctttgggtctaacataacattctaatacatttagtttttagttacctaacctgtgactaattggctaacaagcaacacacacacacttaatttacaaccgaaaccagcattttgctttcatcccttcgatttatttttgaagttgtacttacgttaatgatttctacccccctcgccatgttttcccataacggcgctcaagagctgcaaaatacaaccacagagagcactgcatagaaaaggatccgaaaggatctaaatcgtcaaccgacaaacaaaaacatcgtcagcagtagccgcagtatataactacaatcgcagaaaaacagcagcagcagcccatcctcaacatcagcgaccaatgcaacatcatggtgcaataagatcagcaaatgttgcagcaaattttgctaaatgagccgccgcgttttttcggtttgtttgctttttgtttagtttcgtagggcagagaatcaattgtacaactcataccacaacaaaactaacatcctcaaaatttcaatcaaattcaaaaacaaacaaaaaattgtataaaatttccatcaagcctggccgtcgtcaaaaaattgcataattgtggaatttttattgtatgaaccaacaaaccaaacacgaaaacataaataaatttcaattacactgcaatttagatggcgccggtatacaatttactttaatgattattaccattttttatttatttattcttgaaagcattgttacccgttgtgcgttaagcaaacccataactctaagttactcgatttaaagatc

SEQ ID NO: 11898 - protein, 315 aa, DROSOPHILA
MPRRVSHWPPNSSRRSSSRSSSRIRRIRRSRITTTKVTGTVKWFNVKSGYGFINRNDTREDVFVHQSAIARNNPKKAVRSVGDGEVVEFDVVIGEKGNEAANVTGPSGEPVRGSQFAADKRRNFRPWMKKNRRKDGEVEGEDAESSAQQQQQQAAPIVDGQPQQQVQSGPRQPRQNFRRGPPGGPPGGPRGGPRGPPGGAPGGPRRYNNYYLRQPRRGLGGGDGSAEPGVHDQNPEGLQRGEGQGPRRGGGPPGGPQRRFFRRNFNNGPPPPRRDGGEYIQGQGPPRPQQPRPRRQRKPNGPGGGSEQQPEKVMN

SEQ ID NO: 11899 - DNA, 4409 bp, DROSOPHILA
tccgtctacaagaaaattataaatgaagctcaataaacattaatcataacagtgagttacagcttacattacacaactcctggagctggagggcatagaaacaggccctgcgcagcttgttgaccagatggaaacgctttcgcggctccgtattggactcctgcttgagctgcatggcatacgcccaggcccgctcggcgcagatcaatgggatgtggatgaaacgctcgtccgccttcttgcctgtcaattggccaatggtcacgtcgcgtcttttgaagtgccgcttgtcgccctgggggtacttcagggccttcctcaatcgacggatgcggcggctgcagtatccgcggtacctctggaagtcgccgtggcgcaggccgtgttgttgctgggcatccttaatcatgtgcagaactgcagcaggagtgaaagttcagggcattagcattaaattttaggttaaatggttgggcgtctgggccacctggcagttggctgtaggcgattggggcacttactctccaccgtgaagatcttggagggctctgccaccggagcagtctccgtcttttcctgaacgtccccagtatttggattatcttcttgcacgaccattttcttagcagtcgacacaaatcaacgacgtgtaaaaattagtgattgcaattccaatgggattgtcaaaaacactaaataatcgatattattaagagcggctcttgtgcgatatatatttatatttatttataggatatattatcagttcggaaattacatgttcctatattgagagatagaagttataaattttatttgattgtcactaagcttactttaaataaaatccctgaaacattataaaacttatgttatgtaaaaataactgcacaaaacaataaataattataaacatgctatacgaaattcaagcccacttattgatatcgatagtttcaacggcgcatccctattcgtagtagtgttgagaaactcatcaaagctccccccttttgaaacttgttggctgacacgcaagagcgtgcgttctgtctgttttacaacaatttcggccaagttcgcaggtaaatttcaaatatttcagcactctgtcaacgtgaaatttaagaacaatgcctgacgcatgagagacaatagaaatttatggtggaaacccattgttttggccacgctttgaggttatactttcactcactgacaaacgctggcacctcacccccgctcttgtgtccatgaatcggtgcaccagttttgttttgacggtcggggatggtgatttgcaacgttgacaatggactgattatcatataggcggctgattagtggatcgaagccaattctgtttaatttgctcatttgaaaactatcaacagcatgtcgcgcagaaaggagaacgaggaggtggacaagcagacgcgtattgccatcgtcagcgatgacaagtgcaagcccaaacggtgtcggcaggagtgcaagaagacctgcccagtggtgcgcatgggcaagctctgcatcgaggtgacgcccacgtccaagatagcctcgttgtccgaggagctgtgcatcggttgcggtatttgcgtcaaggtgggtcagcttacctacaactgctgtagttcccggaataacccgtgctttcaattccccagaaatgccccttcgaggccatcacaatcatcaacttgcccagcaatctggagaagcacacaacgcatcgatacagcaagaactccttcaagctgcatcgtctgcccattccgcgtcccggtgaagtgctcggtcttgtgggacagaacggtattggcaagtcgaccgctttgaagatcctcgcggggaaacaaaagccgaacctggggaagtacgccaatccgcccgactggacggagatccttagctacttccgcggctccgagctgcagaactacttcaccaagatcttggaggacaatctgaaggcgctggtcaagccgcagtatgtggatcagatccccaaggcggtgcgtggcgctgtgggcgatcttctggataagaaggacgagagggagctgcagactaagatttgtgaaatgctggatctatcgcacatccgtgatcgtgagatcgctcagctttctggcggagaactgcaacgctttgccatcgccatggtatgcatacagaatgcagacatcttcatgttcgacgagccgtcctcgtatttggatgttaagcagcgtctgaacgctgccttgaccattcgatcactcctgcatcccaccaagtaagttgatgaataatgtgccattgtttaaaattatgacgtggttctgtaatatgcaggtttattattgtggtggagcacgatttgtctgtgctggattacttgtctgactttatatgctgcctttacggagttcccggctgctacggtgtggttactatgcctttctctgtgcgcgaaggcatcaacattttcctcgatggctttgtgcccaccgaaaacatgcgattccgcactgagtcacttactttcaaagtatctgagtccgctacggaggaggagatcaagcgcatgaaccactacgtatatcccgccatggtcaagaccctgggcaagttcgagttgacggtggaaaagggtcacttcagcgactccgagatcctggtgctcctgggcgagaacggtacaggaaagacgacgttcattcgcatgctggccggtaacctccaacccgatggcgaggtggaactgcctatgctgaatatttcctacaagccccagaagatttccccgaaattccaaaatcatgttcgccatttattgcacgataagattcgtgacgcctacgtgcatcctcagtttattgccgatgttatgaaacccatgaaaattgaggaaatcatggaccaggaggtgcagaacctttccggtggtgagttgcagcgagtcgccttggtcctgtgtcttggcaagccagcggatgtctacctcatcgacgaaccctctgcctacttggattcagagcagcgtctggtggccgccaaggttatcaaacggtatgttttacatagactttaaatctgcacacaaatattgatggtatctcgttttagttacattctgcacgccaagaaaactggatttgtggtggagcacgatttcatcatggccacctacctcgccgaccgtgtcatcgtgatcgagggtcagccttcagtgaagacgacagccttttcgccgcagtcgctgctaaatggcatgaaccgcttcctcgaactgcttggtattacgttccgtcgcgatcccaacaacttcagaccccgcattaacaaaaacaattcggtcaaggacacagaacagaaacgctccggccagttcttcttcttggaggacgaagcctgcaactaagacaggatcacgggcaacttcgatgggacagctcgtttctctatgttctcctcagctttccttcgttcattttgcattctttcgttgaagaacacatttgctttcaaattaatttgttattgttgtcgaggattgcgtacaatcgaaaattggggattaattgtacttgattaaagtgagttttatatacgtttttacagcgaaataaatagtgaaccgaaacaacagaatgttgttttaaatgagtctagcaaaaataaaccaattttctttatacaaaactgcatttgaaagttcttttttctaaagtggtgctcatagaatcctgcgagtttaaaagagctaacgtttgcaaattaacacgtatttattgcacttaagcgataattactcaaaatacgcacaatacaaatgtaaattacatacaaatttctgtcatttcaaatttgatcacaatacgaaatcgacgcacaatgaataacagctacaaacatttataagtatataatttacaatatttgtttttagatataccaacgcatgcacagcatatttttaatgtaaacgcttttgaagctttaaatttatgcgatttaatcaaatttacatacaatttttcgaaaaaggcaaatcttttgagtttataatacttaatttgatctgtggcttgttgaccactaaataactgacacaagtaagtactataaataggtaattttggagacttatacgctaaaaattccataaaagtaaatgcgtcaaaaattgacccaaatatttgatagttgcattgtgctgtttcgaatcccaatctgagtctgagagtagagagcgttttacaaggagagttttcttactgttttgccgaacttatgcaatagaagtatagttagtaaaaatggacacatgtatgtctaaaattgagtgtttcagttgatccaaaagcagatcctatggtttatccaataatttaattaccttgtttattttctttttcctt

SEQ ID NO: 11900 - DNA, 1922 bp, DROSOPHILA
aagctccccccttttgaaacttgttggctgacacgcaagagcgtgcgttctgtctgttttacaacaatttcggccaagttcgcagcatgtcgcgcagaaaggagaacgaggaggtggacaagcagacgcgtattgccatcgtcagcgatgacaagtgcaagcccaaacggtgtcggcaggagtgcaagaagacctgcccagtggtgcgcatgggcaagctctgcatcgaggtgacgcccacgtccaagatagcctcgttgtccgaggagctgtgcatcggttgcggtatttgcgtcaagaaatgccccttcgaggccatcacaatcatcaacttgcccagcaatctggagaagcacacaacgcatcgatacagcaagaactccttcaagctgcatcgtctgcccattccgcgtcccggtgaagtgctcggtcttgtgggacagaacggtattggcaagtcgaccgctttgaagatcctcgcggggaaacaaaagccgaacctggggaagtacgccaatccgcccgactggacggagatccttagctacttccgcggctccgagctgcagaactacttcaccaagatcttggaggacaatctgaaggcgctggtcaagccgcagtatgtggatcagatccccaaggcggtgcgtggcgctgtgggcgatcttctggataagaaggacgagagggagctgcagactaagatttgtgaaatgctggatctatcgcacatccgtgatcgtgagatcgctcagctttctggcggagaactgcaacgctttgccatcgccatggtatgcatacagaatgcagacatcttcatgttcgacgagccgtcctcgtatttggatgttaagcagcgtctgaacgctgccttgaccattcgatcactcctgcatcccaccaagtttattattgtggtggagcacgatttgtctgtgctggattacttgtctgactttatatgctgcctttacggagttcccggctgctacggtgtggttactatgcctttctctgtgcgcgaaggcatcaacattttcctcgatggctttgtgcccaccgaaaacatgcgattccgcactgagtcacttactttcaaagtatctgagtccgctacggaggaggagatcaagcgcatgaaccactacgtatatcccgccatggtcaagaccctgggcaagttcgagttgacggtggaaaagggtcacttcagcgactccgagatcctggtgctcctgggcgagaacggtacaggaaagacgacgttcattcgcatgctggccggtaacctccaacccgatggcgaggtggaactgcctatgctgaatatttcctacaagccccagaagatttccccgaaattccaaaatcatgttcgccatttattgcacgataagattcgtgacgcctacgtgcatcctcagtttattgccgatgttatgaaacccatgaaaattgaggaaatcatggaccaggaggtgcagaacctttccggtggtgagttgcagcgagtcgccttggtcctgtgtcttggcaagccagcggatgtctacctcatcgacgaaccctctgcctacttggattcagagcagcgtctggtggccgccaaggttatcaaacgttacattctgcacgccaagaaaactggatttgtggtggagcacgatttcatcatggccacctacctcgccgaccgtgtcatcgtgatcgagggtcagccttcagtgaagacgacagccttttcgccgcagtcgctgctaaatggcatgaaccgcttcctcgaactgcttggtattacgttccgtcgcgatcccaacaacttcagaccccgcattaacaaaaacaattcggtcaaggacacagaacagaaacgctccggccagttcttcttcttggaggacgaagcctgcaactaa

SEQ ID NO: 11901 - protein, 611 aa, DROSOPHILA
MSRRKENEEVDKQTRIAIVSDDKCKPKRCRQECKKTCPVVRMGKLCIEVTPTSKIASLSEELCIGCGICVKKCPFEAITIINLPSNLEKHTTHRYSKNSFKLHRLPIPRPGEVLGLVGQNGIGKSTALKILAGKQKPNLGKYANPPDWTEILSYFRGSELQNYFTKILEDNLKALVKPQYVDQIPKAVRGAVGDLLDKKDERELQTKICEMLDLSHIRDREIAQLSGGELQRFAIAMVCIQNADIFMFDEPSSYLDVKQRLNAALTIRSLLHPTKFIIVVEHDLSVLDYLSDFICCLYGVPGCYGVVTMPFSVREGINIFLDGFVPTENMRFRTESLTFKVSESATEEEIKRMNHYVYPAMVKTLGKFELTVEKGHFSDSEILVLLGENGTGKTTFIRMLAGNLQPDGEVELPMLNISYKPQKISPKFQNHVRHLLHDKIRDAYVHPQFIADVMKPMKIEEIMDQEVQNLSGGELQRVALVLCLGKPADVYLIDEPSAYLDSEQRLVAAKVIKRYILHAKKTGFVVEHDFIMATYLADRVIVIEGQPSVKTTAFSPQSLLNGMNRFLELLGITFRRDPNNFRPRINKNNSVKDTEQKRSGQFFFLEDEACN

SEQ ID NO: 11902 - DNA, 8848 bp, DROSOPHILA
tccaattaattcattcaccataataaaaagcaacaaaaattatgtatatattacgtatttatttttttacgatagcagccgctctgtggaattggcctgtccctgagggacttccatttgagtggccggaaccatcaggttttactacatctaggctattattgtttcacttattgccatcgatccgccgatcgatcaatttcaccattcaatatcaactagcatattgctataagtaaacttagtctatgctttttacattgaacatttcatgttgttacatcttcgggaattgtactcataattagtgtagtttaattgcgacgcatcgacttagttctagaacttagtagctagtgaacctaatacctactgctaaacatctgcccacctagacccttcagtgttcgatttgtacaagtagcttacgcctaggattggattactattactcgctcgtgaaatgttcagttacgctcatttgtttggattctgattctgatctataacttcagttggcaatcacagactaaataactggaataactttttggaagtcgtacacctatgcgtataattaactagtaaaggtaaataattaactaattaaaactggccgtaaaaacaccaacaaaccatctaaacaaacctccaacgcgatatcgatactaatagatagaatatatatttgcacttggtgtagtacaaatcagagattgcaacgtcgccactggcagttacatttaaagtgatttcaatataaagctccgattcagtagataacaatgggtataaaaaatgtcgcacatatgttcgagtgttagaaaggacactggtggtcttacatagctacggggcttaaaactaatttaatctacacagtagcttcggctagctaatcaaaacaggtccatgttgtcgttcatatagcttaacaggtagtacaagtaaataaaaagacacactgtaggcaggagataattcagcagtaggttaactattatcccgtcccgtgtttgccgttctcgaacaggcccttcttgaaaaaagacgacagctggacgagggaggcgcgtgtgaggcccgttccgccgggtccctcgtagattgggcactgcggaatcttcgagcacacgacgaataggcgtcgtaaatagagctctagaaggcgacgacgatgcttcgccaccggctcgctgttcgaggcgaagagctctctccgcggaaagggtagtgcagatatctgttcggaaattaattaatatattaaaagggtaaaactaatacttcaacaaactgttaccttggccccgtagcagtgtttcatgcacaggtgcagttccctgaagcgactgtatcgacgcagaatgtttaacttgccatcgggtagagcgatgcgaacctcgtattcgtagtgcgtttgcttgccggcgccccgcatcacaaaactcggtatggtaataaagtgttcgccttcagctaaacaaataagttaagttacaactgaaagcataaaactgaatcaaaatacgtacgaaattcgcgcatagatgggcaggatcttgtcatgctgggtgaatatatctgcgaagtggactcctccatgctggtgggactcatgacactcgaacgcataatagagctggccagttcatattgccgttccatgccggaacgctcgtcagcacaacactgggcgtgcgcctccagatcctgcaccgattgcagcatctcctgctccatttgtatataccgtcgctgcagatcctgcagatcggcaatatgctcatccaactgtgccttgttcaagtccgtttctaggttcttcatgatcagtgccttctgggcagcaatcttgcgtcgcagcgagtgcagtggacaatacggacgagcaacatctgagtgccgtcccagctcgcaggacgagcatgaaccggtgtcttcgtcgctggtgcgcactgcctgcttgtaattgtttaggtggccattctggagaatggcctgattacgactgtccaggcaaacaccgctgtcactcatgatagcctgcgaactgggtgtgcagctgggcgcggatcccgaaccaccaatgcctacactcccactaccactgccactgctgggaccagcggtacaggttcgtgaagtctcctcgctgctgccggaaaggtcatcttttcgcgtgtcctcggcctcatcctccgcatcgcaggaacaattgcttagcggcgactgctggccttccgtaatagtgggcgatgaaaccagcgataagttggactgagcggtatggaaggtatcacaggtttcatacgtatccgacttggacacatcgtcagcctcgttagtgctggtcgaggtggacatcgacttgttgcccaactgcagtttcatgttctgcttcttagcgcgcatcgcctgagactcagcctcgctttcggcgcgttccagacgcaggcgctccagctgggcctggatctccagcatggtctcatcgaccttagctatttttgtagtgctggcattgagtattctttccttttcggctatttgctcgtccagtttccgtatttcctcattcttaaatcgattgaatgtaattattcattctctataataaataaatatacttacatttctacgcacagtgtcctttataaactgcgctgcaaacaaatccagggaatccgatacctgcaacagcagttcatcattcagaggagtgccctcttcgatcttcattcccatctgcaaatacacaaatatgattgtaagtcattgaaatagatatatacttgtatttaaagtgtattctaatctaagcaaagaaattctaaacaaacaaacaaacctcatccagtttgccacaatcttgcagttcctgcaattcttttgctacatactcagagaaatctcgtttcttagagtcgagctgcgtctgaaacgctgaaatttgtctacacacaatgtcgatctaaaacgaaaatggaacgaacagaaaatcgtaaggaacataaagccaaaacaagaaaaagaataaatatgaacaggcaataaacaagcacaattatcaatccatccatttcgggaacaattaatgatgacatgcaatcaaacggatgggatcagaatgacgcacctgaaccttctcattgttcttttcccacagcagcatgtccttgcgcgcgatcagctcctgttcacggcaattcagcaactgcaagccgtccatctcctcctgttcaaggcgaatgagttcttcggtcagcttgcgcactttggtcttgtattggtcgtgcatctggacgcgttcctaaaagataaatatacagaaatttaatattgagtttacacatatcattgttgtaatgatcacttaccacattgagctgcttaagggcattctcaatggtatcaaggatttttctattctcgtcctgcaattccggatcgtcacgcgacatgggacgctggggataatactgtcgctctggacgcttgtatggcgatgctccatcttcatccgagtatatgctgcatgtgagcaaattctccttggacgaagtgatcagcgaaagccgcgacatgtccaactgcgaccgactcaaatcctttctcagttttgcagcttcggcgggattgttaaaacggaagatgttcgtacggcccagcaatatgatatcgccctgcgaaatttgcttgggttcgtcaataagatgggcgttcacccagcactgggccaagggccagggatgcagggtgaccacaccaccctttaggaaaatactgcagtgttgcgccctaatgccatcgccggccaactcgatgtcctgggctacgtctgcatcctcactgccaattcgcgtctcgccctccttcaggctgtacagggtcactccggtggtcacgtcattgtggatgccaatcagatgcggcatctctgagtccaataccacgccgacacccgacttacgcagacccagactcttttgctcctgcagaatggactgggccaccttccatttctccgtccattcctcggtgagtactttctcttgggcctccttcttttgcagatcggccaatactttgagcgatggctgcagcgagtgctaaaagaatgaaattcaaaatataagtgctggttggtataatgttgtatgtttgcttcttacaatatcgcccgccagcatggacttcagcttattgatctcctccctgagctcacggatcagcttgacattggtgtcctcgttgaccgtcggcttgttgatgatgttcttcgcccgattcgcgtaccgcagcgtgctgagtgtttcactgtagttgcaatcggccggcgaaagagcggcaatcataatggtcttgctattgccacccaaactgtccttgagcagccacgtgagtatggagtcgcgatagggaatgtagagcacccgcttactcgccccattcggtgtggtggctagtgcggagctgctgctgttgtgaccgccacccgtttgctccgccaaagccgagatcacgctacccagagtcacgagcgatttgttgatgtgagcgccctccttcagccgctgacccgttgctcccgttgcattggcacgctcactgaaaggaatcataagaggggggaatatattaaatataaatcacagtatactgcgctgaataagtttacttatattttaataacaagctaatcagcttaggtttcagaatagcaattctatgtatgaaagagttttttccatgtgtgattttactttctagagcagtgcttcatgctccgcttacgcctacgcttacgcacctgcctgccaaatcgaccaaatggatcttcgagactgtctcgcttggcatgtcattcatgaagacagcctgcacaaatgtgatcgtgaagatggcgtgactgcggctgctcgtatcgttcatgttggtgctggccgtggtgcgttgcgcatttccccttgcaatgcattcctgtaaatcagttttggtaatgagtaatgagttctcgaagcacacagaatgcccataaactcacctgaatctcatcgaaatcagagacagcatgctgtgacaggttttccacatagggacccaggctgcgatgctcccgcacccttagcccatgcccagtgctctgtgccgccagcagatccttgacccgttcgttgtagatctccagatagctggcatgcgtcctgtagccagtgcccgactcctggcccacacgcatgcgggcaaagagctcctcgcagatgcgcggtattaggccgggattgtttggcgtgcccatcatggtgaaggtcttgccagagccagtctgtccgtaggcaaaaacacacgcattgtatcctggaaaataaaattcaaattcagagtaattagttgaggaaacgaatgaaagggaggtgttgcagcttattaatagcaatttgaccatggatcattacgtttcttgtgctaaagaactatgaaaagcgaatgttagccgtttgccactcgagcgcatcgtgctacccaaagttaactgccagtcacgaagggtatgctgcaattgctgaaccgcccagaagtgaggcaagtctttcgtgactgtgtaatgggaatgcagcgtcaccggtgacacataataacatttagagtggaaataaaaacaatcaaagttgagccatacaaggcatctaaaatatataatatatttgccgaatactttagggcaaacaacttttgcttcctcagctgaattacgagttatttgttctttggtaaatattgatatttttcattaattgactgattttatagctgcactaaaactcttatcggtctcaagtgccatttaatggccaagaatcgaattatttgcacaaaatccaatgcagaaatgtttccatacaaatgatgactcaagcgatgacctatctgaaactttgaaaagagccaactaattgcgacatcatcgttggcgcctagccaacagcaattaaagccatcggatccagtgcctccagctcgaattacaccaagtgggtatggggatggggctggagattggaggatgggcggctcaagcgtttcagcagctcgttggacaatctcgatggtcgacaggtgtgagataagatttgctttagcattcgacgtcactcgagaccgcacaggtggtgcaacaacaattaacaagacaatgctcagagctgtagaaaaattatccgtcgtttagtaagctacacagcaagaaaatagagaagactacgaaaagaaaagcaagttgcacaacttttaaatgtacatcaatttatagtatgtatttgtatataatctgcttaatcgatcagagatcttttcagatcttttctgaatgaagtcaagaatatatattggaaacattgaaatttctttctctgcacttgcacatttccgaagagtttcaactcaaatcgccagtcagttggacgccactgcactctggttggaatgacttggctttatctgcatagcgaatgtatgttggctgtttgtcattcctactgccactttgccactcttggctgctcgtaatttgatattgaaagcgtgccaaagcaacgccgagcagaaacagctgttccatttcgcttggcatcttgagttgtgggcgaaagttttgttcgacttactttcttgtccaactcttgcaatcgaatcaagcccacttcgcagctacgcgaagcattacgtactctagagccttgaaatggcaagtgaggagcctcaaaatgtatttaaaactattaactaaacaaaatacaaatcgtgagcaacagttaagttttaattatacctcttgaattaatccaataaaatttatattgtatatagtaattgcgcaacaactatttatgccaccttgccagagggtaaactaaatacttaatcgcaaaatggccaacgaaatacaagtttttggcagttggaaaattttcccgtacttctcgaaatctgtggaatcctctggagcggcggtcatccatccggtagcaggaaattcgcatgattattgctaactgcacctacttgcatacaaacttaaattcatttgcaattagtcgccagcagagcgtttcagcctgcatttttttgtggtatacactcgtatacactcttttttttatatttttagagccgcaatattgtttacacagcagaaaatttgggaaaaaagcgggcgaacacccaatatcaaagccaataaacagacgcacagggaaaatgtaaacaaaaccgtgagtgcaggcaaacagaatgaagaaaactcgctctcggtgtggggctaatggaaaatgtgcacagaaaataaatatatacctatttgcaacaatgaaaatgggttatatctaaatctatagtaagaagatggctgtagttgccttttaactctttaagtttcctaatttcagaggtacctctcacgcgaattctaaagtctatataaagttcgaattacttgaagctttttgcagtgcatagtgtgggaaatggactaaaagccaaagcgtagaccaatattcgctcaattagctgggggctcgcgcgtcacaattatgtaatcgaatggtgtgaccccaaatgggaccttggctcaccttcgtaggcgcaatccacgacatcattgcccagatcgctgtaaacctgctcctgggtggcgaagtgcggatcctccgcatcgaatgaccaataggagtagtcgaaggtgaagtcgtgatgattgtcccgcccggcatcgcgaatggactgcaaacgtggcttcagcagacgcgtcttcttgttctccatctccatgatgagctgcgcgtccatgtcgatctcgctgcaatgggaagtaaagatgacagttttatttacttactttattattacattacataatggatctctggctcttaacttgtgttaagttaaagctacatataatggataggcatttgcatacacctccgcacagcccgtccccttctggtgcctttcgtgttggattataaatagaccgagccgctggctcataaatattcttattaacgatttttgcatgaccccaaacaaatggcgaaaattcagggggcgtttcttggttcacgcgaatggaaatggaaatggacgggaaatggactggcccatgcaatccaattgacatgttagccctgtgatcagacgactcgacgctccacagctagctggatacaaattataaaagaaaatccggtttgtagcgaatacagaaatgaagaagaaacaaccgacgacttgattgcaacatcaaaaggaaaagcggcgcaaataaaaaaaagagagagagagatgaaaaactcgcgtctgggcatagatagaacattcgtttaaagatggaaccgaaccggttgactggagttcataggggcacccacacatcgaaatagacttcagctgaaaaagtaacacatgcaaaggcgcctctaagcaaacaaaagatgcacgatagcaggcatcgaaaaagtggaaaaacgtggatttagcatcttcatagatccaaatagacgtctatcataactttaaggccaagatggacagaagaagatcacatcattcatttacagtctgtattcggcactatgggaagatcgtgagatttgggggaacaattagttattagcgtagattattgtaattttgtgtattcatttatttccccaattgttctctgtacctttgagagttgggttgttcccatgattgtactgtttaacttttactcaaatgttctgtcttctttgcagtgaaaagggtgtttgttctgcgactgtaaagctctaggaatcccatg

SEQ ID NO: 11903 - DNA, 3525 bp, DROSOPHILA
atggacgcgcagctcatcatggagatggagaacaagaagacgcgtctgctgaagccacgtttgcagtccattcgcgatgccgggcgggacaatcatcacgacttcaccttcgactactcctattggtcattcgatgcggaggatccgcacttcgccacccaggagcaggtttacagcgatctgggcaatgatgtcgtggattgcgcctacgaaggatacaatgcgtgtgtttttgcctacggacagactggctctggcaagaccttcaccatgatgggcacgccaaacaatcccggcctaataccgcgcatctgcgaggagctctttgcccgcatgcgtgtgggccaggagtcgggcactggctacaggacgcatgccagctatctggagatctacaacgaacgggtcaaggatctgctggcggcacagagcactgggcatgggctaagggtgcgggagcatcgcagcctgggtccctatgtggaaaacctgtcacagcatgctgtctctgatttcgatgagattcaggaatgcattgcaaggggaaatgcgcaacgcaccacggccagcaccaacatgaacgatacgagcagccgcagtcacgccatcttcacgatcacatttgtgcaggctgtcttcatgaatgacatgccaagcgagacagtctcgaagatccatttggtcgatttggcaggcagtgagcgtgccaatgcaacgggagcaacgggtcagcggctgaaggagggcgctcacatcaacaaatcgctcgtgactctgggtagcgtgatctcggctttggcggagcaaacgggtggcggtcacaacagcagcagctcctacattccctatcgcgactccatactcacgtggctgctcaaggacagtttgggtggcaatagcaagaccattatgattgccgctctttcgccggccgattgcaactacagtgaaacactcagcacgctgcggtacgcgaatcgggcgaagaacatcatcaacaagccgacggtcaacgaggacaccaatgtcaagctgatccgtgagctcagggaggagatcaataagctgaagtccatgctggcgggcgatattcactcgctgcagccatcgctcaaagtattggccgatctgcaaaagaaggaggcccaagagaaagtactcaccgaggaatggacggagaaatggaaggtggcccagtccattctgcaggagcaaaagagtctgggtctgcgtaagtcgggtgtcggcgtggtattggactcagagatgccgcatctgattggcatccacaatgacgtgaccaccggagtgaccctgtacagcctgaaggagggcgagacgcgaattggcagtgaggatgcagacgtagcccaggacatcgagttggccggcgatggcattagggcgcaacactgcagtattttcctaaagggtggtgtggtcaccctgcatccctggcccttggcccagtgctgggtgaacgcccatcttattgacgaacccaagcaaatttcgcagggcgatatcatattgctgggccaggatttgagtcggtcgcagttggacatgtcgcggctttcgctgatcacttcgtccaaggagaatttgctcacatgcagcatatactcggatgaagatggagcatcgccatacaagcgtccagagcgacagtattatccccagcgtcccatgtcgcgtgacgatccggaattgcaggacgagaatagaaaaatccttgataccattgagaatgcccttaagcagctcaatgtggaacgcgtccagatgcacgaccaatacaagaccaaagtgcgcaagctgaccgaagaactcattcgccttgaacaggaggagatggacggcttgcagttgctgaattgccgtgaacaggagctgatcgcgcgcaaggacatgctgctgtgggaaaagaacaatgagaaggttcagatgggaatgaagatcgaagagggcactcctctgaatgatgaactgctgttgcaggtatcggattccctggatttgtttgcagcgcagtttataaaggacactgtgcgtagaaataatgaggaaatacggaaactggacgagcaaatagccgaaaaggaaagaatactcaatgccagcactacaaaaatagctaaggtcgatgagaccatgctggagatccaggcccagctggagcgcctgcgtctggaacgcgccgaaagcgaggctgagtctcaggcgatgcgcgctaagaagcagaacatgaaactgcagttgggcaacaagtcgatgtccacctcgaccagcactaacgaggctgacgatgtgtccaagtcggatacgtatgaaacctgtgataccttccataccgctcagtccaacttatcgctggtttcatcgcccactattacggaaggccagcagtcgccgctaagcaattgttcctgcgatgcggaggatgaggccgaggacacgcgaaaagatgacctttccggcagcagcgaggagacttcacgaacctgtaccgctggtcccagcagtggcagtggtagtgggagtgtaggcattggtggttcgggatccgcgcccagctgcacacccagttcgcaggctatcatgagtgacagcggtgtttgcctggacagtcgtaatcaggccattctccagaatggccacctaaacaattacaagcaggcagtgcgcaccagcgacgaagacaccggttcatgctcgtcctgcgagctgggacggcactcagatgttgctcgtccgtattgtccactgcactcgctgcgacgcaagattgctgcccagaaggcactgatcatgaagaacctagaaacggacttgaacaaggcacagttggatgagcatattgccgatctgcaggatctgcagcgacggtatatacaaatggagcaggagatgctgcaatcggtgcaggatctggaggcgcacgcccagtgttgtgctgacgagcgttccggcatggaacggcaatatgaactggccagctctattatgcgttcgagtgtcatgagtcccaccagcatggaggagtccacttcgcagatatattcacccagcatgacaagatcctgcccatctatgcgcgaatttcctgaaggcgaacactttattaccataccgagttttgtgatgcggggcgccggcaagcaaacgcactacgaatacgaggttcgcatcgctctacccgatggcaagttaaacattctgcgtcgatacagtcgcttcagggaactgcacctgtgcatgaaacactgctacggggccaagatatctgcactaccctttccgcggagagagctcttcgcctcgaacagcgagccggtggcgaagcatcgtcgtcgccttctagagctctatttacgacgcctattcgtcgtgtgctcgaagattccgcagtgcccaatctacgagggacccggcggaacgggcctcacacgcgcctccctcgtccagctgtcgtcttttttcaagaagggcctgttcgagaacggcaaacacgggacgggataa

SEQ ID NO: 11904 - protein, 1174 aa, DROSOPHILA
MDAQLIMEMENKKTRLLKPRLQSIRDAGRDNHHDFTFDYSYWSFDAEDPHFATQEQVYSDLGNDVVDCAYEGYNACVFAYGQTGSGKTFTMMGTPNNPGLIPRICEELFARMRVGQESGTGYRTHASYLEIYNERVKDLLAAQSTGHGLRVREHRSLGPYVENLSQHAVSDFDEIQECIARGNAQRTTASTNMNDTSSRSHAIFTITFVQAVFMNDMPSETVSKIHLVDLAGSERANATGATGQRLKEGAHINKSLVTLGSVISALAEQTGGGHNSSSSYIPYRDSILTWLLKDSLGGNSKTIMIAALSPADCNYSETLSTLRYANRAKNIINKPTVNEDTNVKLIRELREEINKLKSMLAGDIHSLQPSLKVLADLQKKEAQEKVLTEEWTEKWKVAQSILQEQKSLGLRKSGVGVVLDSEMPHLIGIHNDVTTGVTLYSLKEGETRIGSEDADVAQDIELAGDGIRAQHCSIFLKGGVVTLHPWPLAQCWVNAHLIDEPKQISQGDIILLGQDLSRSQLDMSRLSLITSSKENLLTCSIYSDEDGASPYKRPERQYYPQRPMSRDDPELQDENRKILDTIENALKQLNVERVQMHDQYKTKVRKLTEELIRLEQEEMDGLQLLNCREQELIARKDMLLWEKNNEKVQMGMKIEEGTPLNDELLLQVSDSLDLFAAQFIKDTVRRNNEEIRKLDEQIAEKERILNASTTKIAKVDETMLEIQAQLERLRLERAESEAESQAMRAKKQNMKLQLGNKSMSTSTSTNEADDVSKSDTYETCDTFHTAQSNLSLVSSPTITEGQQSPLSNCSCDAEDEAEDTRKDDLSGSSEETSRTCTAGPSSGSGSGSVGIGGSGSAPSCTPSSQAIMSDSGVCLDSRNQAILQNGHLNNYKQAVRTSDEDTGSCSSCELGRHSDVARPYCPLHSLRRKIAAQKALIMKNLETDLNKAQLDEHIADLQDLQRRYIQMEQEMLQSVQDLEAHAQCCADERSGMERQYELASSIMRSSVMSPTSMEESTSQIYSPSMTRSCPSMREFPEGEHFITIPSFVMRGAGKQTHYEYEVRIALPDGKLNILRRYSRFRELHLCMKHCYGAKISALPFPRRELFASNSEPVAKHRRRLLELYLRRLFVVCSKIPQCPIYEGPGGTGLTRASLVQLSSFFKKGLFENGKHGTG

SEQ ID NO: 11905 - DNA, 4275 bp, DROSOPHILA
tggggcacaaaatgatgacccaccacagcacgtatggcattcataactaccatgtccgacgatagggaatgctgctcctgggcctcctccagctcctgcagtgagtatcgcaaatctaccaggtgccgcaccaaccagcgacgctcctcgctgagttcctcgctcagcaggacgagatctctgcaatgggcgatggccgcctgcaaatcctggatattggcatcgctggtgaagattaggcgccattgctcgcgcaccaaggacgcgggaatgggcaacgccctgtactccgcaccttgtggaccactttcctcggagcctccggcctcggatccagatccagtggagccagagcctccaaggccaactgttgatcccagcgtggatgaggcgtgtaacaggttgctggcgctctcgttaatcaactgcgccaccgtgcccggaatgctcgtgagactgtccttccaggagctcatttttggggaagaacaacaaaacaagtctttgtgtgtttttttagcgaccagggatgcgagcaattggtgcagatgagcgaactagttatcgttcacggggcaaactgcaggtggttgtacgcatccctggaatgcaccttaatacagtgaaagaaaaaatgtgagggttaattatttataaatattttgaatttaacttttaatatttttaaaatatgatacaatttgaaaccatattctgaaatatgtcaagcgtggtttgcataaagcaaatatttttgttaccatattttaccatttaatattaaattgtaatttaagaaatctaacaatctattgtgtttattccagataaaaatgcctatttttaacttgaaaattcgtctgctaaaaactgtaggctttaaaactagtatcaataagccctttattctattgttccttctatttacatatattctgtaagtagaggaaaataactagaaaaccaaaaatatattttgaaaaattgaaaagagagtgacttgtgttgaatacgtttattgttcgatggtcacaaggtggactgacaagctgggtaaaaattgagttaaattacgatctctatggggtaagtggatgcagacaaagatataacaaggaaaacatatgtaatctatccaatatcgttggttcgttttggggttcgtattcgttgggtccaggatctagaccacattggtgtgctcgtcgcgatggaagatcttcacgtcgacgaacttgaagttgtggacatcgaagtagtagtcatgcttcaccggcctgttgaaggggaaaccgaagggcagggcgtccacgtagcgggaaccgtgtcccacgccgcagctgaccaccggatcgtagccagtgaactgggcaacctcgggctggtggtacgggtagaccatgtagaagaactggaacacctggccgcccttcttgccgcgcggcagcatcattcggttgggcacgccgcaatgggcctccgactgatccagcttgaacttgtagtcactgttggtggcgtccatcagcttctggtagagctccaggtaggtggtgcgatcgttcacccagaaggagaagtcaccgctggcgcgcttgatgtggttaacgcccgcctccagatgcaccttgaagtgctccagctcgaagaagttctggtagttgtgctccagtgggatctcgtgtccgtgctcatcgtacttgggtccaatgaagaccttcacaacggcatcctgagccttgtccgaggtcacgtccagggtgaactcgaagggcttgtggttgagacgctgctggcgggccttgatcacatagctggatcccttgtagtgggagttcctgccgaaggtgtacaacggatcggcggatccctcaacggcgggctccacattgacggcattgctgatgtccgagtcgaagtgctcgaagtaggtggtcagactttcgggcatgtggacggcatcgatgtggacaccctcgaaggcgtaatccttcttgtggtactccggataggtctccatcagatgccagtagtggctgacaatggtcttgtatacctcgtagaagatcggatcgcgcatagaggtgtcgtagtgcatgaaaaggccagggaagctctcgtcaccatggccataatggtggccctcgttcacaatgaagcggtacagcttgtcaagactgccgtagaacttcttgtccacgctgtccgcattgccctggatgatgttgcccagcacattgatggtctccacatcgaacttctcgttcttgtggatccagtccatgacacgctgcgtgtacatctccacatgctcgatgtgctcgtagttgtgctcgtggtagaagctgtggtgattctcccggtgccattggggtacgccgtagtaggtgcgcaggttactggcatagccggattcggttggcacatacatgttgaaagcgggcacctcgccgagatcgtgggacagacgctccaggtaccaacgggccagcaattgccagtggacatacaggtagagctcaccgcgacgatccttgttaaggacatgctcctcgccgcccttcgtccagaacggatagtccagattgaagtagtagtagaaggcattgaagccaacatcctccaggtagtaggccaaatcgtgatcgtagttcagggaaccgtgcacgttcgaatagttcgtacggatcaccacgttgtagatgttgtccatctgcttgacatgatggaagccgtgcattttgtagtgctcagcccattccagtgcctggctatcgaagtagctccatgggtggatctcgtagtgggccggcaggacgactccctgcatatcatcacggaacaaactggcaatggtcacggcgtacacgaacaactgcttgtttacgtgctggcgggcccagtagacgacgtgctggaaggtctcccagttcttggcgaagtagaagagacgcaccagacccaccacatactcctcgtgcttgtcgtacatcaccgaccacaccatgtcatcggtgaagggttggtgttgccacagctcgaagaagtgctccaacatctccgggtgcacatagtcggccacgtgctcccacggcttgtactccacgtagctgcccccgaagggcgtggtgaacacatcgtcctggtagatgtgctgcaggatctggtacatgaacttctgtttcatcagaaagtccttgtccgccaccttggagtccaggtgcttggcctggccgagagtagccagcaatgccactgcagctaacgcaatcaccgtgaacgacttcatcttctcgagtcgattcgaatcgtaacgctgcaatgatcggtagccagtatttatacccccggatcggcgatacgcagattgcaatccggccaatgaccggtcgcatccgtagccttgatccgcgccatcgccggatctgaacgacccgcgaagctctcaatcttagcgcccatgctgcatccataattgcaggtgataagaccgacgattaggcggccataccaagatcaatcctacatcattatctaaattcaagagtgagccactagaaactggtggttaggtgaagcagctggaagatccagttaagatttcctcgctccagagacaccttctccagctgtctaaataggagagtctaaaaaaaagaatgcccaaaatatcacgattacattgatactatttataagcaaacccacttgcattgtcaacttaaaaagttcataccacagcacattaaaaacgtgaattggtacacctattttgtcgccgtgtaatgactttcatttttccccatttttccatttcaaactgatgatcgtgcttttttcacacatatcaacaacaggtgtttgacgggcccccttgattaacctatttcaaatagtgattaagattacatggccacctgatctcctgtcaattgaggtgttaccaggcggcttccttgataagtttgctttgttcgccgcatcgattctttatcaatgctaaaaatattccgaattgcaaaacacggagcatcatgttgctgcgacaacaaatcccggacaacaaagaacaatggaccatcgaatgatccgcaggtcaatggagaacatatcaatcaatcagacccatttcagtcctcggtttttatactgctattaaatgtccttcaaaataaaaatatatatgattacaggataggaaattatgacgttctatgcaaatgcatatgatctcattagtatatctatacgtacatatctttattttagtttaca

SEQ ID NO: 11906 - DNA, 2275 bp, DROSOPHILA
ttgtgttgaatacgtttattgttcgatggtcacaaggtggactgacaagctgggtaaaaattgagttaaattacgatctctatggggtaagtggatgcagacaaagatataacaaggaaaacatatgtaatctatccaatatcgttggttcgttttggggttcgtattcgttgggtccaggatctagaccacattggtgtgctcgtcgcgatggaagatcttcacgtcgacgaacttgaagttgtggacatcgaagtagtagtcatgcttcaccggcctgttgaaggggaaaccgaagggcagggcgtccacgtagcgggaaccgtgtcccacgccgcagctgaccaccggatcgtagccagtgaactgggcaacctcgggctggtggtacgggtagaccatgtagaagaactggaacacctggccgcccttcttgccgcgcggcagcatcattcggttgggcacgccgcaatgggcctccgactgatccagcttgaacttgtagtcactgttggtggcgtccatcagcttctggtagagctccaggtaggtggtgcgatcgttcacccagaaggagaagtcaccgctggcgcgcttgatgtggttaacgcccgcctccagatgcaccttgaagtgctccagctcgaagaagttctggtagttgtgctccagtgggatctcgtgtccgtgctcatcgtacttgggtccaatgaagaccttcacaacggcatcctgagccttgtccgaggtcacgtccagggtgaactcgaagggcttgtggttgagacgctgctggcgggccttgatcacatagctggatcccttgtagtgggagttcctgccgaaggtgtacaacggatcggcggatccctcaacggcgggctccacattgacggcattgctgatgtccgagtcgaagtgctcgaagtaggtggtcagactttcgggcatgtggacggcatcgatgtggacaccctcgaaggcgtaatccttcttgtggtactccggataggtctccatcagatgccagtagtggctgacaatggtcttgtatacctcgtagaagatcggatcgcgcatagaggtgtcgtagtgcatgaaaaggccagggaagctctcgtcaccatggccataatggtggccctcgttcacaatgaagcggtacagcttgtcaagactgccgtagaacttcttgtccacgctgtccgcattgccctggatgatgttgcccagcacattgatggtctccacatcgaacttctcgttcttgtggatccagtccatgacacgctgcgtgtacatctccacatgctcgatgtgctcgtagttgtgctcgtggtagaagctgtggtgattctcccggtgccattggggtacgccgtagtaggtgcgcaggttactggcatagccggattcggttggcacatacatgttgaaagcgggcacctcgccgagatcgtgggacagacgctccaggtaccaacgggccagcaattgccagtggacatacaggtagagctcaccgcgacgatccttgttaaggacatgctcctcgccgcccttcgtccagaacggatagtccagattgaagtagtagtagaaggcattgaagccaacatcctccaggtagtaggccaaatcgtgatcgtagttcagggaaccgtgcacgttcgaatagttcgtacggatcaccacgttgtagatgttgtccatctgcttgacatgatggaagccgtgcattttgtagtgctcagcccattccagtgcctggctatcgaagtagctccatgggtggatctcgtagtgggccggcaggacgactccctgcatatcatcacggaacaaactggcaatggtcacggcgtacacgaacaactgcttgtttacgtgctggcgggcccagtagacgacgtgctggaaggtctcccagttcttggcgaagtagaagagacgcaccagacccaccacatactcctcgtgcttgtcgtacatcaccgaccacaccatgtcatcggtgaagggttggtgttgccacagctcgaagaagtgctccaacatctccgggtgcacatagtcggccacgtgctcccacggcttgtactccacgtagctgcccccgaagggcgtggtgaacacatcgtcctggtagatgtgctgcaggatctggtacatgaacttctgtttcatcagaaagtccttgtccgccaccttggagtccaggtgcttggcctggccgagagtagccagcaatgccactgcagctaacgcaatcacc

SEQ ID NO: 11907 - protein, 684 aa, DROSOPHILA
MEDLHVDELEVVDIEVVVMLHRPVEGETEGQGVHVAGTVSHAAADHRIVASELGNLGLVVRVDHVEELEHLAALLAARQHHSVGHAAMGLRLIQLELVVTVGGVHQLLVELQVGGAIVHPEGEVTAGALDVVNARLQMHLEVLQLEEVLVVVLQWDLVSVLIVLGSNEDLHNGILSLVRGHVQGELEGLVVETLLAGLDHIAGSLVVGVPAEGVQRIGGSLNGGLHIDGIADVRVEVLEVGGQTFGHVDGIDVDTLEGVILLVVLRIGLHQMPVVADNGLVYLVEDRIAHRGVVVHEKAREALVTMAIMVALVHNEAVQLVKTAVELLVHAVRIALDDVAQHIDGLHIELLVLVDPVHDTLRVHLHMLDVLVVVLVVEAVVILPVPLGYAVVGAQVTGIAGFGWHIHVESGHLAEIVGQTLQVPTGQQLPVDIQVELTATILVKDMLLAALRPERIVQIEVVVEGIEANILQVVGQIVIVVQGTVHVRIVRTDHHVVDVVHLLDMMEAVHFVVLSPFQCLAIEVAPWVDLVVGRQDDSLHIITEQTGNGHGVHEQLLVYVLAGPVDDVLEGLPVLGEVEETHQTHHILLVLVVHHRPHHVIGEGLVLPQLEEVLQHLRVHIVGHVLPRLVLHVAAPEGRGEHIVLVDVLQDLVHELLFHQKVLVRHLGVQVLGLAESSQQCHCS

SEQ ID NO: 11908 - DNA, 3431 bp, DROSOPHILA
tcgctgaaccaaccgcagaacatatagatcaggatggcggcgcccctgaagaacaggtggaagaaggtgacgtacgggtgcctgtggagtacacgcgttgggttgggttggggtaaatggaattgatcaacaaacattatggttctgcatacgtgtatttctgacccgcgcgactgggatcccgcatctcgtcctcctcgccaaagggtatcgtgtcatcgtcgagcagcggcacctgtgtaacacgtatgtgggattagtttggcttgcctcgttgtaaaatatgagttttcgtggaaaacctcggatcgtattgtcagaatggcaccccaatcaagcagcttgttaggtgttagtgcggcatacatacatttcttaccgtagcggatgccatgctggtgtagggagtgacttctaattcctagttgggtgcaattttcatggattttcgtggtttttcaggggatttaatatattttcttcgcctgggacgttgttgttgtttctgcctgcgtagccttctatcgttttcgcactgagtcgatagctcgcaggggtgaagcacttcttcgacttcgattgggttggcagcaccataagtaatcgagcttaaacctatcgtatttgaaaattttgcaaacattttttattgagctccccttcattttgtttgtggaattgttatttgcaatagcagcgccaaatgagaaaaaaatgccacttttaagttatttatgaaacataattttttacgcatcatattaagtaataaaagccgaagcaatattatctaagacgacttttatgttctgtgacccggattctcaatgttacatggttgtggctgaaaaccagcagagtgtgcaaaaagttgtactccaaccgcagtggaagccattgaaatgcagcatccatcacttgccaagttagcccacaaacttcatcagtagctcgttgatcgtctgctctttctgtcgaacttaactaccaacgtttcaaaatggaaaaatgccgtgcctcctctaggataatcataatcggagcaggagtttcgggcatagccgccgccactcgactcctgcaaaacaatttccagaatgttcagatcctggaggcggaggatcgcattggcgggcggatcaacaccgtgtattttggtgacaacgtcatcgatttgggagcccagtggtgtcatggaaagcagcaaaattgtgtatacgacatggtcaaggatatgggtatcctgcacgagacaggcgactattacagtcccataaagagggtgagatccaacaaggaggtggttccacatgagttggcctgcaggattcacgacattgctgtgaagagcatgccgagtggacctcacccggttgtgggatcctttggcacccacctgactcagaccttctggcgcaagatcgagtccgagctaccccaagtgaatagggatgtggctagtgaggccttgaatacatttgcgaagcatgaaagctctattattggtgcggacaatcttttcgaggtctccgttagggaacacatcgagtaccacgaatgtgatggcgacaagctgctccactggggaacgaagggttaccggcgcttcctgcggctgctgatgaaggtcagcgcggatacgccagaagagctgggtctactggaaggacgtattcaacttgatatgaaggtcatcaagattgagttggcgtgcccccgtaaggtaatcctgcgctgccaggatggggattacttcgaggcggaccacgtcatctgcaccgtttccctgggagtcctgcaggagcagcacgagaaactgttcgtcccgccgctgcccgcagccaaggtgaatgccattcgcagcctcaccctgggcactgtgaacaaactgtatttggagtatgagaagcaacctcttcctgacggctgggtgggtttcttctgcttttggctggaagaggatctgatagagctgcgaaagacggaatatttctgggtggagggtataaccggtgtacacatgatcacttgtcagccccgaatgttgatggcctgggtgaatggtccgcatggacgccacatggagaccctgtccgatgagaaagtccttgagggcttgtactggcttttccgaaagttcctcactttcgaaattccgccgccaaagcgtttcgttcgcagctcgtggttttcgaatccgaatttccgtggcagttggagttatcgtggagttatggccgatgaaaggaatacgggcccctgggatctagagtctcctgtgttgggcgaagatggtcatttaggcctcctttttgccggagaagcgtctagcaggaatcacttttccaccgttcacggagctgtggaggcgggctatcgggaggcagaccggctcattgatcattacacctcatgcagtgtcagtgcctgaaaaatatatttttttatcgtacttttctttatggtttcttaataaaattgttctcttttataaattaaaaaaaattacattggatcctgatattcacatacgtaccctctgagatgttttatgtttctcttttgacaaatcaaataaataatgaagtttgaaaaaaaattgaggaggaaagctctaccgtttctcgtttgaaattggcgcccataagccgtatatcgattatctcctcagctgtttttataccatcaccaataagattacaattttttttgacataacataacacaacattaaaaatgcaaataattgggaattgtagcagtaaactgctcagacacaagtacctgtgccagccaagggtgtactctctatactacagtacccttaaaggtgcgttacctccagtttcattcaaaaccccagtgccggctaaagaactcacttttttccacttttagatgcggctaatgagcttcccttggcagcaggataccagccacaaccagtggaaaatgcttactgggagcgggagcatcgccaggcaaatttgcccaaggcttcagccagcagttgcaagcgggggacctatcgcatgcttctaccgccaccaaatgtaaccgggaatctacatttgggccatgcactgatggccaccgtgcaggatgtgattgcccgccagcgcgaacagcttggctaccaggtggactgggtaccaggcacagatcacgcgggtatcgccacccaggtggtcgtagagcgcacgattgccgcttctcaggcgaaaacccgtcatgaattgggacgttctgcttttctggacgaagtatggcgctggaaggcggaaaagggtgctggtatcgtacaggatctccgccaactcggctgtaaactgaattggcaacgagaatacttcacaatggatgagcagcaggcgcatgcggtcaacgtagctttcgagcgactctttgaagaaggcctaattcagcggcgc

SEQ ID NO: 11909 - DNA, 1431 bp, DROSOPHILA
atggaaaaatgccgtgcctcctctaggataatcataatcggagcaggagtttcgggcatagccgccgccactcgactcctgcaaaacaatttccagaatgttcagatcctggaggcggaggatcgcattggcgggcggatcaacaccgtgtattttggtgacaacgtcatcgatttgggagcccagtggtgtcatggaaagcagcaaaattgtgtatacgacatggtcaaggatatgggtatcctgcacgagacaggcgactattacagtcccataaagagggtgagatccaacaaggaggtggttccacatgagttggcctgcaggattcacgacattgctgtgaagagcatgccgagtggacctcacccggttgtgggatcctttggcacccacctgactcagaccttctggcgcaagatcgagtccgagctaccccaagtgaatagggatgtggctagtgaggccttgaatacatttgcgaagcatgaaagctctattattggtgcggacaatcttttcgaggtctccgttagggaacacatcgagtaccacgaatgtgatggcgacaagctgctccactggggaacgaagggttaccggcgcttcctgcggctgctgatgaaggtcagcgcggatacgccagaagagctgggtctactggaaggacgtattcaacttgatatgaaggtcatcaagattgagttggcgtgcccccgtaaggtaatcctgcgctgccaggatggggattacttcgaggcggaccacgtcatctgcaccgtttccctgggagtcctgcaggagcagcacgagaaactgttcgtcccgccgctgcccgcagccaaggtgaatgccattcgcagcctcaccctgggcactgtgaacaaactgtatttggagtatgagaagcaacctcttcctgacggctgggtgggtttcttctgcttttggctggaagaggatctgatagagctgcgaaagacggaatatttctgggtggagggtataaccggtgtacacatgatcacttgtcagccccgaatgttgatggcctgggtgaatggtccgcatggacgccacatggagaccctgtccgatgagaaagtccttgagggcttgtactggcttttccgaaagttcctcactttcgaaattccgccgccaaagcgtttcgttcgcagctcgtggttttcgaatccgaatttccgtggcagttggagttatcgtggagttatggccgatgaaaggaatacgggcccctgggatctagagtctcctgtgttgggcgaagatggtcatttaggcctcctttttgccggagaagcgtctagcaggaatcacttttccaccgttcacggagctgtggaggcgggctatcgggaggcagaccggctcattgatcattacacctcatgcagtgtcagtgcctga

SEQ ID NO: 11910 - protein, 476 aa, DROSOPHILA
MEKCRASSRIIIIGAGVSGIAAATRLLQNNFQNVQILEAEDRIGGRINTVYFGDNVIDLGAQWCHGKQQNCVYDMVKDMGILHETGDYYSPIKRVRSNKEVVPHELACRIHDIAVKSMPSGPHPVVGSFGTHLTQTFWRKIESELPQVNRDVASEALNTFAKHESSIIGADNLFEVSVREHIEYHECDGDKLLHWGTKGYRRFLRLLMKVSADTPEELGLLEGRIQLDMKVIKIELACPRKVILRCQDGDYFEADHVICTVSLGVLQEQHEKLFVPPLPAAKVNAIRSLTLGTVNKLYLEYEKQPLPDGWVGFFCFWLEEDLIELRKTEYFWVEGITGVHMITCQPRMLMAWVNGPHGRHMETLSDEKVLEGLYWLFRKFLTFEIPPPKRFVRSSWFSNPNFRGSWSYRGVMADERNTGPWDLESPVLGEDGHLGLLFAGEASSRNHFSTVHGAVEAGYREADRLIDHYTSCSVSA

SEQ ID NO: 11911 - DNA, 3158 bp, DROSOPHILA
aactatcagtttgggtaataccattaatgtaatcctctctttttttatttacaatcgataaaagtgcaacaggttttttatgggtattcgattattttgacataaatatgattggaatttaaagttcctttattcaaaagcaaaacctgctatctgaataatttaaaattttaaaaaattttcaaaactttaaaaattacactcgtatcttaaggctagttggtttccgcaaaatgaattcttggtaccacttaattctcaactgttgactttaattcgtaacttgaataaatcaaaataggccaatcatcagtaaatgttattgaagcaaaaaggactcgaagacgaagaaataaaaacaagtgttttgccgtgttaaccaatttctcatttatttgtctcgctttttatttgtttaaaaagtttctgcagtccatcgtttaaatatttaatagccccttgggctaactaactaatcgtcgttatcataagtattgcttagctatgttttgaactttaagcaatctaataaatctgaaagtgacgttaagagatactccaacaaatgacctgttaatttagttaaatgaaataaaacataaacattaaaaccgatgcgcttaatatagttgcttgcagcattggctagatttttgccgtttcgacccaactacaataagttatagatttgtatagtatttgtcttaataggtaaaaagttagatcgatggatagtacacatgcaatatttcttaccaaaacgtaaagtcaatgatttgtttgtaaacacttggcggttattgctttttaggttttcgagattcagaaaacaaagcagattttcgaaaacgctttcttaccagtttcggactgctgactgcttcatttcgtagggtttattacgatggttataagaggttctgtaaaaatgaacacctacacaattccgagttctcaaaattctttaatgttttagaccaattattttgcgaaagcttttatgtatacgagaaactgttccgcatttcctttattaaaattgcgtacttctagattttggtttgacgttgttcgagtcttagcgtatttttcttactagttttctacgttataacttaaattttacgtgcttgcaattgtcatgttaatgggtattcgttaaataaataatgaagagacgacgactatcagttttttgttttttcttttttttttatcattctgttgttgttgttgatgtgggggaatgagggaatctgttggacgatcgaaaacgatcgaatgctacgattttaaatgtttgagtctgcgttttacggtcgcgcttaagttattatttattaatctttactcataggcaatccttaagcaactatgagtggtgttgtcattagaatcgatggtttcccaccggcgagcgggacctgaagcgtccggccgactgaccaccagtgcgtccgtagctggcgctacttccgctgctgtagcggctgctgtcgcgtccaccgccgtaaacctcgcggcgattgaagccgctgccgccgccctctctgccattatagctgcttgcacctgatcggccggagctatagccccgctccgtgtgccggcttgaggatccgctggatccgcgctgccggaaaccgcctccgccgctaccaccgcttgtgatgctgtgccggccaaagtcgccgcgtcgtccgcccctgtccatgggtccgccacgcctaccctggcgtggccgcccttttgagatctccacgcgcagctgggagccgagcagctcggatccgttcagtatgtcgcacgccttttcggcgtcgtcgcggtgctcgaactcgacgaacgcaaatcccggcggattgaaggctatccacaccgaattcagcttgccatactttgtgaactccccctccagatcatcctttttcactttgtcggtcagattgccgacatacacccgtgtcccgcgctgatcacccatgctggacatctggattcactgtttctgattcgttttcggagttatcctgcaaatcggatagctgccttgaaaaataaataatcaataagttatcaccaccggacaatttagcgtttgtatctatatcaacttttcgaccagggtggttaaactcgttgcaaaaatgctaattttcaaaaatatcctcgcatttggaacactgagaatggacgtgtgttgggatgtatttatagtttaacggccccgtaaaaagggacttcccgctgctctagtgacttgtatttttaattatttttatactttgtgctgggaaatgtatcatggtaatctgaataatacgtcaatttaatttatataattttataaatatttgtatgatctttagtaaagtaaataaagtaaaacaatatataaaatgtttgttaatatatagccgtgtacttttatattttcttcaaaccccaaataatgaataattatattgaacatttattaattattatttaattaatttataatttaactattatcataatttaactatttaaatataatgactattatcattttaagtcattaaaagaaaatttgttacgatttaaactttatttatatttttgttcttaaatataaaatacaaatagttcccttaatgtgttccattccatcgtttctgttaagatatatttcgattggcacctttgtgtgtagtggttttgtttattgttaccttgagtatttacgaaagacgcataataacaaagagttgcaaagttgttgtattatttgagagttataatggctgatatggagatacagagcaacaaaatgtcaataacggaggaaacacaagtggtaatatattattaaatataaaagatgtggtctttttgtttgaacatgatctgaattgttctaatgcgcagtaaggccttgcgtgtatgtatatacacatatataagctatcttctgtgtatgcgtgtatatacatatgtgatttttatcatgcaaaagcgcctattttcaaaaaagattttaagtttgacttatcggaactaaatttttgcgaataagaatattgaaagcaaattgtttttgggatatcgtcaaatatttacattttatattatatttataagcagacgcgcaaggaatgtggaaaaaggggacgaaa

SEQ ID NO: 11912 - DNA, 1158 bp, DROSOPHILA
aaaattagcatttttgcaacgagtttaaccaccctggtcgaaaagttgatatagatacaaacgctaaattgtccggtggtgataacttattgattatttatttttcaaggcagctatccgatttgcaggataactccgaaaacgaatcagaaacagtgaatccagatgtccagcatgggtgatcagcgcgggacacgggtgtatgtcggcaatctgaccgacaaagtgaaaaaggatgatctggagggggagttcacaaagtatggcaagctgaattcggtgtggatagccttcaatccgccgggatttgcgttcgtcgagttcgagcaccgcgacgacgccgaaaaggcgtgcgacatactgaacggatccgagctgctcggctcccagctgcgcgtggagatctcaaaagggcggccacgccagggtaggcgtggcggacccatggacaggggcggacgacgcggcgactttggccggcacagcatcacaagcggtggtagcggcggaggcggtttccggcagcgcggatccagcggatcctcaagccggcacacggagcggggctatagctccggccgatcaggtgcaagcagctataatggcagagagggcggcggcagcggcttcaatcgccgcgaggtttacggcggtggacgcgacagcagccgctacagcagcggaagtagcgccagctacggacgcactggtggtcagtcggccggacgcttcaggtcccgctcgccggtgggaaaccatcgattctaatgacaacaccactcatagttgcttaaggattgcctatgagtaaagattaataaataataacttaagcgcgaccgtaaaacgcagactcaaacatttaaaatcgtagcattcgatcgttttcgatcgtccaacagattccctcattcccccacatcaacaacaacaacagaatgataaaaaaaaaagaaaaaacaaaaaactgatagtcgtcgtctcttcattatttatttaacgaatacccattaacatgacaattgcaagcacgtaaaatttaagttataacgtagaaaactagtaagaaaaatacgctaagactcgaacaacgtcaaaccaaaatctagaagtacgcaattttaataaaggaaatgcggaacagtttctcgtatacat

SEQ ID NO: 11913 - protein, 200 aa, DROSOPHILA
MSSMGDQRGTRVYVGNLTDKVKKDDLEGEFTKYGKLNSVWIAFNPPGFAFVEFEHRDDAEKACDILNGSELLGSQLRVEISKGRPRQGRRGGPMDRGGRRGDFGRHSITSGGSGGGGFRQRGSSGSSSRHTERGYSSGRSGASSYNGREGGGSGFNRREVYGGGRDSSRYSSGSSASYGRTGGQSAGRFRSRSPVGNHRF

SEQ ID NO: 11914 - DNA, 9120 bp, DROSOPHILA
aaactttaagtgaaatcgaataaggcgcccattgccagtgcaactctgtatcaaccgatacagtatcgataaggtatcgatatggcatcgatacatcgatgttacaacagagtggcaatttaccattgaatttgattaacggtacttgtgaaacaatgaaaattgggacagtaaagtttaaaataattttattcaaatatatttttagctcgtgcgaagttttagcaattttatattgttcgccactttaaagattaaactctaaccgcaaacaaccggaggttgcagttaaaaacatgagaaaacgtttgagtataatatcttgacagtcgaataaaagatctcaataatagatcaagacgcctagttatcctgatcaagaatatgtgtactttatgaagtcggaagcgcttttcaacgaatctagtataccctttaattccaagaataattaataatgtttaaataacaatatttatttcaaacaggtttatgtctcggattggaatttgacactgtggttcgtgcctttgaatggatcccttcaagtcttgttctgtaaagggattttctcaaaaactgtttctgtaaattaagcgcatgtctcatttttaagataatctcttttgatgaatacactgagaatcaagaaaacgttcattggaagctcacttgtttttgaatctactgtttcccagccgtcgataagtcactattgcttttttggcacccatcgataagcagatgttgttaaacatacgatttaacggaacggtatgaaacaggcggcaatcggaacgaaagtaaatgggaaaaaagcgcaaacatgcgcacacactttcacgcacacttgactccactgtgcgagcgcgtgtgtgtgtgtgttattttttgagaaaagcaaagagagcaagtgagaaccaacaccgatgcaaatcattttgttggctttacggttagtttttcgtgaaaattccatttaatttgtgcattgcaaccgaacttcgcgacgaaggcgagcacgattagtgcaataagctagtgttttttctttggaaaagtgcatagaaaaacaacaaaaagtcataagcttttcgactgtgcctttgtgtacgtgtgtgtggcaatacacacgtaatgtgcgcatgtgtgtgcgcagtgtgctggtgtgtgccattaccttgaaaacaaaataatctgccctaaagaaaaatgcatttgtgtacataatttcgttgtttttttttgtttgtcccatcgacgttcggtcgattttacatgattttacacacacatgcacacatttaacatagtgttgttcgctgttaaatcagcagttcggccctgttaagcgcacgggccagtgtgaccgttcttcttaaaaataccgaaccagtatgactgcgctgcgaccgtgcagggtctcgtattgtcattagaaaatctcacatattcatttttcatttacaaataaaaatagccagcacgcagcctacaaattagcagcgcacaaaataagttagtgtgaaaaagggaatagaagctgtgcaccaagtgcagcgaccaaacacaactggccacgccactgcgagggcagcaataataacaactggcgaaaagggctgcgcaaaaacgtaaacaaaagcaagtggaaaacgaggcaaaggaaaacgaaaagacagaaacaaacgcaaatgcaaatgcaaaagtaaaatactggaagtaaacgctggaaaacaaagcctcgaaagctgaaaacaaagaggaacggaagtggtgcgggaggcgcaagaggaacaggaagaggaagagagcagaaggagcaccagcagctgaagcagaagcagtaacgcaaaacagaaaccgaaaaatggactcggacaatgacaatgatttctgcgataatgtcgattcgggcaacgtctcctcgggcgacgacggcgatgatgactttggcatggaggtggacctgccaagctccgcggaccgccagatggaccaagatgactaccagtacaaggtgctcaccaccgatgagattgtgcaacaccagcgcgagatcatcgacgaagccaatctgctgctgaaggtatggccaagcgcaagtacagtgaacacccgctagtataactatccatccgcaacttaactatcagtcctagggcagccatagaggtacattcttcacccagtccagacaacaaagataggcaagcagtcacctttgattgctctacagtcaggccttcctagcaggaacatgtttgtttcgactttcgttagcgctgcgatttgcagtgaaagccaaatggcttgacatagtttagtggcgtatagctgccaagaatatctgatctgttcgccgctcggaggcatcactgtgtgcagcacagtgcatttgggcatgtgtatccgtgaatcgctttccccacccctcgctcttgccgcccaccgccctgcctgggatctgggataagctgaaggtcgtccgctgatgactgccagtgccagtgaaatcggaacacaagcacccaggcgcacccaaggtcgccagatccgcatcccatatccgcatcagcagctgacttgcccgaagttcactagcacagttttcactttcccagatttcgggggattcccttaaaatggtattatagattccatttcaaatgaatacattaggatcaatgtagaatccatgtaatacttttttgtttcattgacatttaaacatcagaaaatctttcattgcaataataagcgaaattcacttagcttgagtgttaactttcagtattgatacagatcatgtatgtagctatctaattgttagttaaacaaagcacctttgagtaactcttccctctaaaattgaattgtacatacatacgtactttttctcgatttccaaacaaatcgattagttattaggaatgccaagaaatgttatatatcctaaaaattatactgtttagatagaccaattgccagtggtagttatagtggttccacatcacaaccccatccacgattatacataggtactgctgatcatactgctgctgatcgcaaatgatttggcattgatttcgatgccaactgggatgcagcccccgctcttttaccccatatatgtacatatgtgccatcatccactgacattcgatttgttttgttgtctatggccacagctacccacacccaccacacggatactgctaaatcacttcaagtgggacaaggagaagctattggagaagtacttcgacgacaacactgatgagttcttcaaatgcgcacatgtcataaatcctttcaacgccaccgaagcgatcaaacaaaaggtgagcccagtgctaaggctccatttgatgtctcatctaatgcgtttcccttcattttcagacctcacgcagtcagtgcgaagagtgcgaaatatgcttttcacagctcccgccagatgtaagttgtcatggagaagggatgagtaactccgtgacctaattgcggtgtagaatatattttcccgctgattaaccacgaatattttggggggaaacatgattttttaactggtcaatggtgccttatctgatgacctgataataatgttagggcgttgctttgctatacaaatctaaaatattctaaaaagacttgatttgtattttatcaattatttttattggcttacgttatcactaatttacttgcttgatttacaattgttgattgttagcctgaatttggttatgtaagcagttcagcagtaattcgctggaatccaactgtcttgtggaatcaaacatttaataatgtagtttaaaaagtaaaatttagtatcacgttttaaaagagtagattgcaatgggcaactttgggttataacagcaaagtaaacttaaatatattatagacaagctaactaacaaatactcagagcgtaaaacacctatgaaaagtttaaaattaccatacgctatgtaggtggttttaatttgctgtatgcttcatcattaagctctcatagttcgcgtgatctttaagtatatattatagaatacgattataatatatttataatattgtatactcttttgctccacaagcaacaacttcaagaatatctacaatgtatactaatagctactttctcttcgttccatttagtccatggccgggctggaatgcggacaccgattctgcatgccctgttggcacgagtatctgtcaacgaagatcgtggcggagggtctgggccagaccatttcgtgcgcggcgcacggctgtgatatcctggtggacgacgtgaccgtcgccaacctagtgacggacgcacgggtgcgggtcaagtaccagcagctgatcaccaatagctttgtggagtgcaaccagctgctgcgctggtgtccgtccgtcgactgcacctatgcggtgaaggtgccgtacgcggagccacgtcgcgtccattgcaaatgcggccatgtcttctgctttgcctgcggcgagaactggcacgatccggtcaagtgccgttggctaaagaagtggatcaagaagtgtgacgacgactcggagacgtccaactggatcgcggccaataccaaagagtgtcccaggtgcagcgtgaccatcgagaaggacggcggctgcaaccacatggtgtgcaagaaccagaactgcaaaaacgagttctgctgggtgtgcctcggttcttgggagccgcacggctcctcctggtacaactgcaatcgctatgacgaggacgaggccaagacggcccgcgatgctcaggagaagctgcgctcctcgctggccaggtgggtcattcgactgtgaacgatgtcacaggataggaaccccttttgtttttttttttttttaagtgatacttgttgtgtattattttcgcagttcgctgataatgacggttagcggtttattttatctgctaatttcttttaagaaaagataacgattgaaagccgtagaaaggaatgaatcagctataattcgtaattaaattttatcgctgattaaacctgtagaattagaaatgctaaaactaatcaaggaaacacgaaagtatctaggcagaaatgtgaaagtcattatggaataaaactcaactgatatattatcttctgccaaatctacagatatctccactactacaatcgctacatgaaccacatgcagtcgatgaagtttgagaacaaattgtatgcatctgtgaagcaaaagatggaggagatgcaacagcacaacatgtcatggattgaggtaagtggtgaaaactcgtgaccataacaatgcgaattcagcacactcattgcaattgcaggtgcagtttctgaaaaaggctgtcgacatactttgccagtgccgtcagactctcatgtacacgtacgtgtttgcatattacttgaaaaagaacaatcaatccatgatattcgaggataatcaaaaggacttggagtcggcaaccgagatgttgtcggagtatttggaacgtgatattacatccgagaatttggctgatattaagcagaaagtgcaagataaatacaggtgagcgagcgagccatgtccgtgtccccaacatacaaacgactcattatccaaacattgattggtctctccattcgattaggtattgtgaaaagcggtgctctgttctgctgaagcacgtgcacgaggggtacgacaaggagtggtgggagtacacagaatgacgcgagtcatggctggataactaagctaagccgagcggcaggcaatcggaatgtagtgcccgctaagcgccaccccatccagcatccgaaatgcagcaaacactgtccccatccacataccgaccaacatccgccaagccacgcaacacacacacacacacacacacacacactcacgcacgcacgcactcacgcagaaatcgaagccgaaggagttgaacagaagttaaggataatgcagaagctacacagaaacgcaagagaaaggagactcgaaattcccagaaacgcaggataaatccccatacaagagttgcaaagcaaaattgaagccatttcagaacacagaagccagaaggaaatcaccataaaatcgtaatatatataaatatatatattgaattatatatatttttcttcgtactaagcaagagcagcagcaggacacgaagaaggacaggatcaaatagacactaccaaacacatactcacacactcccacacacacacacacacacacacagaaccagtcacaaggctcagaagcagaatagatatatagtaaataatcaacagttaaaaacttatttgatgttaaccgattgcaaagaaatcttcatgttataaaaacctaatgaaaaacgaaacaaaatgcaaaaattagtgaattcaaagctacacgcatgatgagaagccaacaatagaacctaaacttatgtgaaataaacaaactacacatgtaagcagaaacactcgcccagcttcctttccacctgcccaacttccttcgaccaaagacaatagaataacaagatgcgtaacgcaacgcgattttttagcacacatttttttggcaatggatctagaaggtggctccaggctctctcgaatttttgagagagagcgagagagtggagagcgctacagcaaatagctcttttctacgtatacagtgatagcagacaattgtatgtgtgcacacgtatgcttatgcattgtaaatttgacccccttcttagactttaaatctttattatttttgatcaattggcaccatgctaaaaattcttgttttgcattgccttaacgttattattatttgaaaatagattagaaatagccaaatctatgtacatattatcacaaaataaatttcaaaaattactttattagaatatttgtcattagagtattcagcttgcggcgtgtgaaaaattaaatttttgtaaaatttatgttttaaattacggtagttaatataatttgctttgtattgagtatatttattaagtcatttgacttaatatgatgtatgtaaatgtaccatttcaattatttaaaatgcacattagattcagttgtttttcagtttttgttttttttttttttttgtattccaatttgatattttttcatcatattgctagtgccaaaccaatgtaaggccgttgcgcatcttgttattctagtgtctttgcttcgaccttctacgtcccttttttttaacccgtttaggcttgaggttagcgttattgttctttagtttcaatctcagacccagtatgattttcgatttcgaatttcttccagtttgttaagcctttatttacaaaaaaaaaaaaacaaaaaaggaaaatgatttcttcttttttttccgttggttttctgttcaataaacaattgtgcctagcatatacggaatgaaaatgtttgcaattcgatcggataagccttgttttcgtggcgggagcagagctacgcccccattcttagttcatatgtaatggcctctcgaatgttgcaaatccttaatggagatcagtgctcccagcacaaatcgaagaacatgccgatgccggaaacacacacactgagttatatacgagtagacgaggaatgtatagttgatggggagggaggcggtgtccttggacccttgcagagtcctcctcctcgaatcgttgtatataagagtacagttttgtccatggtttcctagcccgcccacaaacacacacacacacacacacacacaaaatgacgcacgtatgtatgtacataacgtgcggcaacataactggacatgccacgcccccgctacgaaggcgtcggcccttaatcttgtttccgttttaagcattctctttatattctaaataccaataaatgaagaaacaattatatttataaacaaactgaatccaaatggaaaactcattgacattaaattgatgtaaaaagttaaaagttgttcgaattgaaagaaaaggaaaaaattaccataatgtggaatacaaaaagatatataaaaaaaagctgtaaaaattatgagaaactatgtatgtataattaagaagaaatgttgcaaaaattagtgaaaataaaaatttaaaaaaatctatacaactgttttgattactgtagcagcagtatatacacatatgtacatatttatagtatacccaatactttcgtgcaatacttttcactgggccatatcgcgcgggtcactttccaggaattcatacacttttatacatatttgtttttttttttttactttttctggggcgaaaaaacaaacgtataagaatggttcacaatcttcttttcgagatcagttgaagtcggcacagcagcactacaatacatgtagcaatgaagagtgagacatttttggtcaaaacatagtacgaatatttatttatttattcgcagttatcggttgtgtaacctttttggtcatttgcgcatgtgcgtttggattgccccagatagcaagtattttgtgggcgaataagtatcctcctggttatggcccagtagtcaccggaataaaggcagtcatcgccctcactccatgcacccccgagcgaactcccacatccttaagtttcagatctagtgacgaatgctccgataggtgccccggtcattgtgctagctgcaattccacctgtatctttggccaccgatgcgtctgcggagctggtatctactgcacatggaatcccgattcatctaaggttcagccaggggccagaatcccagaaatatgcgagcccattgagaatttcattgaacgcgattaaggtacacccttatctatatcataaattaagtgaaattgaatgcgtataaaatgtaaaactattgaataataattctgtttcacctcctttgtaatagtagatatacatacatatatattatttgattttatttgaaacttcactcgtcgctaaataatctgctacgtggagagtgtcgactattagatacccgttactcagctaatgcggttgttaccaagacttcacacgagctccacctagcggcagttataataacatacaaatacaaaaccccatatatatacacttga

SEQ ID NO: 11915 - DNA, 4383 bp, DROSOPHILA
aacttcgcgacgaaggcgagcacgattagtgcaataagctagtgttttttctttggaaaagtgcatagaaaaacaacaaaaagtcataagcttttcgactgtgcctttgttcattagaaaatctcacatattcatttttcatttacaaataaaaatagccagcacgcagcctacaaattagcagcgcacaaaataagttagtgtgaaaaagggaatagaagctgtgcaccaagtgcagcgaccaaacacaactggccacgccactgcgagggcagcaataataacaactggcgaaaagggctgcgcaaaaacgtaaacaaaagcaagtggaaaacgaggcaaaggaaaacgaaaagacagaaacaaacgcaaatgcaaatgcaaaagtaaaatactggaagtaaacgctggaaaacaaagcctcgaaagctgaaaacaaagaggaacggaagtggtgcgggaggcgcaagaggaacaggaagaggaagagagcagaaggagcaccagcagctgaagcagaagcagtaacgcaaaacagaaaccgaaaaatggactcggacaatgacaatgatttctgcgataatgtcgattcgggcaacgtctcctcgggcgacgacggcgatgatgactttggcatggaggtggacctgccaagctccgcggaccgccagatggaccaagatgactaccagtacaaggtgctcaccaccgatgagattgtgcaacaccagcgcgagatcatcgacgaagccaatctgctgctgaagctacccacacccaccacacggatactgctaaatcacttcaagtgggacaaggagaagctattggagaagtacttcgacgacaacactgatgagttcttcaaatgcgcacatgtcataaatcctttcaacgccaccgaagcgatcaaacaaaagacctcacgcagtcagtgcgaagagtgcgaaatatgcttttcacagctcccgccagattccatggccgggctggaatgcggacaccgattctgcatgccctgttggcacgagtatctgtcaacgaagatcgtggcggagggtctgggccagaccatttcgtgcgcggcgcacggctgtgatatcctggtggacgacgtgaccgtcgccaacctagtgacggacgcacgggtgcgggtcaagtaccagcagctgatcaccaatagctttgtggagtgcaaccagctgctgcgctggtgtccgtccgtcgactgcacctatgcggtgaaggtgccgtacgcggagccacgtcgcgtccattgcaaatgcggccatgtcttctgctttgcctgcggcgagaactggcacgatccggtcaagtgccgttggctaaagaagtggatcaagaagtgtgacgacgactcggagacgtccaactggatcgcggccaataccaaagagtgtcccaggtgcagcgtgaccatcgagaaggacggcggctgcaaccacatggtgtgcaagaaccagaactgcaaaaacgagttctgctgggtgtgcctcggttcttgggagccgcacggctcctcctggtacaactgcaatcgctatgacgaggacgaggccaagacggcccgcgatgctcaggagaagctgcgctcctcgctggccagatatctccactactacaatcgctacatgaaccacatgcagtcgatgaagtttgagaacaaattgtatgcatctgtgaagcaaaagatggaggagatgcaacagcacaacatgtcatggattgaggtgcagtttctgaaaaaggctgtcgacatactttgccagtgccgtcagactctcatgtacacgtacgtgtttgcatattacttgaaaaagaacaatcaatccatgatattcgaggataatcaaaaggacttggagtcggcaaccgagatgttgtcggagtatttggaacgtgatattacatccgagaatttggctgatattaagcagaaagtgcaagataaatacaggtattgtgaaaagcggtgctctgttctgctgaagcacgtgcacgaggggtacgacaaggagtggtgggagtacacagaatgacgcgagtcatggctggataactaagctaagccgagcggcaggcaatcggaatgtagtgcccgctaagcgccaccccatccagcatccgaaatgcagcaaacactgtccccatccacataccgaccaacatccgccaagccacgcaacacacacacacacacacacacacacactcacgcacgcacgcactcacgcagaaatcgaagccgaaggagttgaacagaagttaaggataatgcagaagctacacagaaacgcaagagaaaggagactcgaaattcccagaaacgcaggataaatccccatacaagagttgcaaagcaaaattgaagccatttcagaacacagaagccagaaggaaatcaccataaaatcgtaatatatataaatatatatattgaattatatatatttttcttcgtactaagcaagagcagcagcaggacacgaagaaggacaggatcaaatagacactaccaaacacatactcacacactcccacacacacacacacacacacacagaaccagtcacaaggctcagaagcagaatagatatatagtaaataatcaacagttaaaaacttatttgatgttaaccgattgcaaagaaatcttcatgttataaaaacctaatgaaaaacgaaacaaaatgcaaaaattagtgaattcaaagctacacgcatgatgagaagccaacaatagaacctaaacttatgtgaaataaacaaactacacatgtaagcagaaacactcgcccagcttcctttccacctgcccaacttccttcgaccaaagacaatagaataacaagatgcgtaacgcaacgcgattttttagcacacatttttttggcaatggatctagaaggtggctccaggctctctcgaatttttgagagagagcgagagagtggagagcgctacagcaaatagctcttttctacgtatacagtgatagcagacaattgtatgtgtgcacacgtatgcttatgcattgtaaatttgacccccttcttagactttaaatctttattatttttgatcaattggcaccatgctaaaaattcttgttttgcattgccttaacgttattattatttgaaaatagattagaaatagccaaatctatgtacatattatcacaaaataaatttcaaaaattactttattagaatatttgtcattagagtattcagcttgcggcgtgtgaaaaattaaatttttgtaaaatttatgttttaaattacggtagttaatataatttgctttgtattgagtatatttattaagtcatttgacttaatatgatgtatgtaaatgtaccatttcaattatttaaaatgcacattagattcagttgtttttcagtttttgttttttttttttttttgtattccaatttgatattttttcatcatattgctagtgccaaaccaatgtaaggccgttgcgcatcttgttattctagtgtctttgcttcgaccttctacgtcccttttttttaacccgtttaggcttgaggttagcgttattgttctttagtttcaatctcagacccagtatgattttcgatttcgaatttcttccagtttgttaagcctttatttacaaaaaaaaaaaaacaaaaaaggaaaatgatttcttcttttttttccgttggttttctgttcaataaacaattgtgcctagcatatacggaatgaaaatgtttgcaattcgatcggataagccttgttttcgtggcgggagcagagctacgccctcccagcacaaatcgaagaacatgccgatgccggaaacacacacactgagttatatacgagtagacgaggaatgtatagttgatggggagggaggcggtgtccttggacccttgcagagtcctcctcctcgaatcgttgtatataagagtacagttttgtccatggtttcctagcccgcccacaaacacacacacacacacacacacacaaaatgacgcacgtatgtatgtacataacgtgcggcaacataactggacatgccacgcccccgctacgaaggcgtcggcccttaatcttgtttccgttttaagcattctctttatattctaaataccaataaatgaagaaacaattatatttataaacaaactgaatccaaatggaaaactcattgacattaaattgatgtaaaaagttaaaagttgttcgaattgaaagaaaaggaaaaaattaccataatgtggaatacaaaaagatatataaaaaaaagctgtaaaaattatgagaaactatgtatgtataattaagaagaaatgttgcaaaaattagtgaaaataaa

SEQ ID NO: 11916 - protein, 503 aa, DROSOPHILA
MDSDNDNDFCDNVDSGNVSSGDDGDDDFGMEVDLPSSADRQMDQDDYQYKVLTTDEIVQHQREIIDEANLLLKLPTPTTRILLNHFKWDKEKLLEKYFDDNTDEFFKCAHVINPFNATEAIKQKTSRSQCEECEICFSQLPPDSMAGLECGHRFCMPCWHEYLSTKIVAEGLGQTISCAAHGCDILVDDVTVANLVTDARVRVKYQQLITNSFVECNQLLRWCPSVDCTYAVKVPYAEPRRVHCKCGHVFCFACGENWHDPVKCRWLKKWIKKCDDDSETSNWIAANTKECPRCSVTIEKDGGCNHMVCKNQNCKNEFCWVCLGSWEPHGSSWYNCNRYDEDEAKTARDAQEKLRSSLARYLHYYNRYMNHMQSMKFENKLYASVKQKMEEMQQHNMSWIEVQFLKKAVDILCQCRQTLMYTYVFAYYLKKNNQSMIFEDNQKDLESATEMLSEYLERDITSENLADIKQKVQDKYRYCEKRCSVLLKHVHEGYDKEWWEYTE

SEQ ID NO: 11917 - DNA, 5227 bp, DROSOPHILA
gccaggatggggattacttcgaggcggaccacgtcatctgcaccgtttccctgggagtcctgcaggagcagcacgagaaactgttcgtcccgccgctgcccgcagccaaggtgaatgccattcgcagcctcaccctgggcactgtgaacaaactgtatttggagtatgagaagcaacctcttcctgacggctgggtgggtttcttctgcttttggctggaagaggatctgatagagctgcgaaagacggaatatttctgggtggagggtataaccggtgtacacatgatcacttgtcagccccgaatgttgatggcctgggtgaatggtccgcatggacgccacatggagaccctgtccgatgagaaagtccttgagggcttgtactggcttttccgaaagttcctcactttcgaaattccgccgccaaagcgtttcgttcgcagctcgtggttttcgaatccgaatttccgtggcagttggagttatcgtggagttatggccgatgaaaggaatacgggcccctgggatctagagtctcctgtgttgggcgaagatggtcatttaggcctcctttttgccggagaagcgtctagcaggaatcacttttccaccgttcacggagctgtggaggcgggctatcgggaggcagaccggctcattgatcattacacctcatgcagtgtcagtgcctgaaaaatatatttttttatcgtacttttctttatggtttcttaataaaattgttctcttttataaattaaaaaaaattacattggatcctgatattcacatacgtaccctctgagatgttttatgtttctcttttgacaaatcaaataaataatgaagtttgaaaaaaaattgaggaggaaagctctaccgtttctcgtttgaaattggcgcccataagccgtatatcgattatctcctcagctgtttttataccatcaccaataagattacaattttttttgacataacataacacaacattaaaaatgcaaataattgggaattgtagcagtaaactgctcagacacaagtacctgtgccagccaagggtgtactctctatactacagtacccttaaaggtgcgttacctccagtttcattcaaaaccccagtgccggctaaagaactcacttttttccacttttagatgcggctaatgagcttcccttggcagcaggataccagccacaaccagtggaaaatgcttactgggagcgggagcatcgccaggcaaatttgcccaaggcttcagccagcagttgcaagcgggggacctatcgcatgcttctaccgccaccaaatgtaaccgggaatctacatttgggccatgcactgatggccaccgtgcaggatgtgattgcccgccagcgcgaacagcttggctaccaggtggactgggtaccaggcacagatcacgcgggtatcgccacccaggtggtcgtagagcgcacgattgccgcttctcaggcgaaaacccgtcatgaattgggacgttctgcttttctggacgaagtatggcgctggaaggcggaaaagggtgctggtatcgtacaggatctccgccaactcggctgtaaactgaattggcaacgagaatacttcacaatggatgagcagcaggcgcatgcggtcaacgtagctttcgagcgactctttgaagaaggcctaattcagcggcgcaactcggttgtcaactggtgcaccgctctacgttccgcgatatctgatatcgaggtggacagtgtagagatcacggagccggtagagatatccgttccaggctacgatcacaaagtactctttggcagaatgtacgatttcgcctatcacgtagtggatggtgaagcactgcccgatggttcggttgaagagattgtggtgtctaccactagaccagagacaattttgggtgatgtagctgtcgcagtacatccgctggatccgcgctacgccaagtaccgaaacattgatcaggttaagctcaagcatcctttccgtgacgacaccattccactcgttttcgatatcaccgtggaccaggagtttggcaccggggcagtgaaaatcacaccagcccatgacaaatttgatttcgagctggccactcgccataagcttgaacctcgccaggtctttactgaaacgggtcttgtggtggatgcctattctgagtacaagggtattccgcgcttcgaggcgcgagatctcatcgtcaatcgcctggaagagatggatttgctgcgacaggtgcgctctcataccatgcagttgcccatctgctcgcgttccaaggacgtcatagagtacatgatattgccgcaatggtttcttaagtgcaaagacttggcaaaggatgccttatctgaacttcatagtggacgtctgcaaatcctgcctccgaacttcgaaacggagtgggaacgctggctacaggatagccgcgactggtgcatttcccggcagttgtggtgggggcatcaggtgcccgcatacgaggtcatcgactcccagggaaacagtcaatgggtggctgcccttgacgagaagacagctaggcagaaagccatgagacttattggtagcgaagaatttacattgaaacgtgatccggatgtactggacacttggttttcatcatcgctgctgcctttctccacagccggttggccagaggagagctacaaagaaagatatcctttggacataatgcagactggccatgatattatcttcttttgggtggcgcgcatgatgatgttgggtctgaagctgaccggcgaggcaccctttcagagaattttgctaaacggcattgtgtgcgatgctcatggccggaagatgtccaagagtatcggcaacatcgtggccccacagcaggtggttcagggcgccagtttagaggtaagttaggccattcttgccaagaataaaatttaacgatatattacatctgcagagcctgaaggctggcttagagcaatcgtgcgaggcgggcattattacgccttcagagttaaaggcctccacgattggaatgacgcaaatgttccccaatggcattcaagagtgcggcaccgatgctctacgcttcaccctgatgagccacaacatcaagagtcacttcattagcttcgatgtgaacgcctgccacaccaataagcttttcctaaacaaagtatggcaagctatgcgatttaccctcggctcagccaagggactgggaatctcgctgcatcagtttgagactcttgaaggtgtgaatctgggcctttgggatcgctggatcgtcggacgcctcgcggagaccttgtctgtctgctcgcagagctacagcaactacaatttccacttggccacagcagccctgaagaccttcttctatcaatatctctgtgatacttacttggtaagttggttgtcattcaattgttactcagcatcaacaaaagctgctgaaatcgacaggaaacaaccaaacctgcgataggaaatcgcagtgctgatgcctacatccatgtgggcaccctgaccgcttgccttagctggggactgcaggccatggccccgtatgctccctttgtggcttccgaattactgcagcatgtgccccttaatatagagcttaaactgtccgactacaaggatgaaaagttggaggaagaggtcaacgaaatagtgaacatctgccataatgtgcgacaggttaagagtcgcaatgagattagcaagcgccatcatccgcaactcagtttgtttgcccagaatacggactcggaaggagtgcttcgtcgtcatttgccgcagatcaaggtgttatctcgctgcgaagacgtggaactggaattgtttgacgagagctcaaagatttcgaagcaactcagctacttctcaacggcaggagcactctgctcctttggcttgaaattgagcgatggattggatctgacgccggaaaaacgagacgaaatgcagaaggccaatgccaaaaaactgaagaagttggtcaccgaattgcagcggtatcgcatgcgcctggataacgaagccttccaactgatggccgacaagaaagttaagtcacatttcgaaaataaggtaatgtgctataaagttttgattccatgcgacattatttttattggttttttattgtaggtcaaagagttggaggcggaaatcaacagtctcactcggctggcagtattgtcctaatgcactgcataacaattagcttagataatgccattgttattgacttacatccgcctaagtcatctgtttgtttagaattaaagactgcaatatttattaaatgcgcaacgtaccttataaaggcactaagcataaaaatactcaactacttgtcactgatctaattcaaatatcaatttctgttcggaaaatttagacatttccgttttaaaccgctaactcttttgtcaccaaaaccgcaaaatactacagatattttttttgaatttgttttaaattcctattagatcatttttgctaattgctaagttcacgaaatcaaacgaatattggtttaaatcggaaatggttattgtttttacactttcgtatgttaattaatgtttaaatttaccagatgcttcgtccaaattcctcgaaaggatccccaatttctcttctccagatatgtatcacggttttttgttatgctatgattatcaagtcttttattgtataccatatttacagaattggacacgcgttctgcgaatacgacaagtagaagccgcgattcgatatgtccatatcctcattaccatcggtgactgtgtagacaacgaatggcttcgccgatgtggtcgtggataccagacccaatccacaaaaccgatcgctgggcatcgcaactccgccctgcgttggcgacggaatgatgatatagtccgttgtacattcctgactctgaacagatgaggtggccagcagagtcggatccacggcacccacatcgttggtcagcgtaaaggaatacgtatcggagccaacctggctgtaggtaatggagcacattcccgctgctttgcgtatgcaaataccgtacttggtgttcgccaactgtctcgtgccctgcacaccaatggaattgagggcggaggccgccgccgaattgtaattaaaactggccagggtgccgctgctgggcatatagtattgcaggcaaccggccggagccaaagtg

SEQ ID NO: 11918 - DNA, 2985 bp, DROSOPHILA
atgcaaataattgggaattgtagcagtaaactgctcagacacaagtacctgtgccagccaagggtgtactctctatactacagtacccttaaagatgcggctaatgagcttcccttggcagcaggataccagccacaaccagtggaaaatgcttactgggagcgggagcatcgccaggcaaatttgcccaaggcttcagccagcagttgcaagcgggggacctatcgcatgcttctaccgccaccaaatgtaaccgggaatctacatttgggccatgcactgatggccaccgtgcaggatgtgattgcccgccagcgcgaacagcttggctaccaggtggactgggtaccaggcacagatcacgcgggtatcgccacccaggtggtcgtagagcgcacgattgccgcttctcaggcgaaaacccgtcatgaattgggacgttctgcttttctggacgaagtatggcgctggaaggcggaaaagggtgctggtatcgtacaggatctccgccaactcggctgtaaactgaattggcaacgagaatacttcacaatggatgagcagcaggcgcatgcggtcaacgtagctttcgagcgactctttgaagaaggcctaattcagcggcgcaactcggttgtcaactggtgcaccgctctacgttccgcgatatctgatatcgaggtggacagtgtagagatcacggagccggtagagatatccgttccaggctacgatcacaaagtactctttggcagaatgtacgatttcgcctatcacgtagtggatggtgaagcactgcccgatggttcggttgaagagattgtggtgtctaccactagaccagagacaattttgggtgatgtagctgtcgcagtacatccgctggatccgcgctacgccaagtaccgaaacattgatcaggttaagctcaagcatcctttccgtgacgacaccattccactcgttttcgatatcaccgtggaccaggagtttggcaccggggcagtgaaaatcacaccagcccatgacaaatttgatttcgagctggccactcgccataagcttgaacctcgccaggtctttactgaaacgggtcttgtggtggatgcctattctgagtacaagggtattccgcgcttcgaggcgcgagatctcatcgtcaatcgcctggaagagatggatttgctgcgacaggtgcgctctcataccatgcagttgcccatctgctcgcgttccaaggacgtcatagagtacatgatattgccgcaatggtttcttaagtgcaaagacttggcaaaggatgccttatctgaacttcatagtggacgtctgcaaatcctgcctccgaacttcgaaacggagtgggaacgctggctacaggatagccgcgactggtgcatttcccggcagttgtggtgggggcatcaggtgcccgcatacgaggtcatcgactcccagggaaacagtcaatgggtggctgcccttgacgagaagacagctaggcagaaagccatgagacttattggtagcgaagaatttacattgaaacgtgatccggatgtactggacacttggttttcatcatcgctgctgcctttctccacagccggttggccagaggagagctacaaagaaagatatcctttggacataatgcagactggccatgatattatcttcttttgggtggcgcgcatgatgatgttgggtctgaagctgaccggcgaggcaccctttcagagaattttgctaaacggcattgtgtgcgatgctcatggccggaagatgtccaagagtatcggcaacatcgtggccccacagcaggtggttcagggcgccagtttagagagcctgaaggctggcttagagcaatcgtgcgaggcgggcattattacgccttcagagttaaaggcctccacgattggaatgacgcaaatgttccccaatggcattcaagagtgcggcaccgatgctctacgcttcaccctgatgagccacaacatcaagagtcacttcattagcttcgatgtgaacgcctgccacaccaataagcttttcctaaacaaagtatggcaagctatgcgatttaccctcggctcagccaagggactgggaatctcgctgcatcagtttgagactcttgaaggtgtgaatctgggcctttgggatcgctggatcgtcggacgcctcgcggagaccttgtctgtctgctcgcagagctacagcaactacaatttccacttggccacagcagccctgaagaccttcttctatcaatatctctgtgatacttacttggaaacaaccaaacctgcgataggaaatcgcagtgctgatgcctacatccatgtgggcaccctgaccgcttgccttagctggggactgcaggccatggccccgtatgctccctttgtggcttccgaattactgcagcatgtgccccttaatatagagcttaaactgtccgactacaaggatgaaaagttggaggaagaggtcaacgaaatagtgaacatctgccataatgtgcgacaggttaagagtcgcaatgagattagcaagcgccatcatccgcaactcagtttgtttgcccagaatacggactcggaaggagtgcttcgtcgtcatttgccgcagatcaaggtgttatctcgctgcgaagacgtggaactggaattgtttgacgagagctcaaagatttcgaagcaactcagctacttctcaacggcaggagcactctgctcctttggcttgaaattgagcgatggattggatctgacgccggaaaaacgagacgaaatgcagaaggccaatgccaaaaaactgaagaagttggtcaccgaattgcagcggtatcgcatgcgcctggataacgaagccttccaactgatggccgacaagaaagttaagtcacatttcgaaaataaggtcaaagagttggaggcggaaatcaacagtctcactcggctggcagtattgtcctaa

SEQ ID NO: 11919 - protein, 994 aa, DROSOPHILA
MQIIGNCSSKLLRHKYLCQPRVYSLYYSTLKDAANELPLAAGYQPQPVENAYWEREHRQANLPKASASSCKRGTYRMLLPPPNVTGNLHLGHALMATVQDVIARQREQLGYQVDWVPGTDHAGIATQVVVERTIAASQAKTRHELGRSAFLDEVWRWKAEKGAGIVQDLRQLGCKLNWQREYFTMDEQQAHAVNVAFERLFEEGLIQRRNSVVNWCTALRSAISDIEVDSVEITEPVEISVPGYDHKVLFGRMYDFAYHVVDGEALPDGSVEEIVVSTTRPETILGDVAVAVHPLDPRYAKYRNIDQVKLKHPFRDDTIPLVFDITVDQEFGTGAVKITPAHDKFDFELATRHKLEPRQVFTETGLVVDAYSEYKGIPRFEARDLIVNRLEEMDLLRQVRSHTMQLPICSRSKDVIEYMILPQWFLKCKDLAKDALSELHSGRLQILPPNFETEWERWLQDSRDWCISRQLWWGHQVPAYEVIDSQGNSQWVAALDEKTARQKAMRLIGSEEFTLKRDPDVLDTWFSSSLLPFSTAGWPEESYKERYPLDIMQTGHDIIFFWVARMMMLGLKLTGEAPFQRILLNGIVCDAHGRKMSKSIGNIVAPQQVVQGASLESLKAGLEQSCEAGIITPSELKASTIGMTQMFPNGIQECGTDALRFTLMSHNIKSHFISFDVNACHTNKLFLNKVWQAMRFTLGSAKGLGISLHQFETLEGVNLGLWDRWIVGRLAETLSVCSQSYSNYNFHLATAALKTFFYQYLCDTYLETTKPAIGNRSADAYIHVGTLTACLSWGLQAMAPYAPFVASELLQHVPLNIELKLSDYKDEKLEEEVNEIVNICHNVRQVKSRNEISKRHHPQLSLFAQNTDSEGVLRRHLPQIKVLSRCEDVELELFDESSKISKQLSYFSTAGALCSFGLKLSDGLDLTPEKRDEMQKANAKKLKKLVTELQRYRMRLDNEAFQLMADKKVKSHFENKVKELEAEINSLTRLAVLS

SEQ ID NO: 11920 - DNA, 16275 bp, DROSOPHILA
ctcgtctggaggaatatatcacgtgtcctcgaaccgcgacgtcggcaatactaatgtcaatttgtcaggctaccaaatcgaagcacagcaagtgcccgtcccaccctccaagtggcttctctatacctcttcgcggagctgcacatcccgatcccgatcccggagattcagattctgattctgaagagtcgttctcgttgtcgttgtcgcatgatatatgagcgccctgcccagttgctgcttcggctgccgtagccgcgcctcttaactcccaagcagacactgagagaaattcgtacttacttttgtgggatgacttgaaaaataaatttggattgctattactatctaagagacttgcccttaaattattcgatttaacaaacagttcagttaaaataataaattacaaagatgaaaataaggtcttttaattattttattattattttttatttttatttttacagttgaattatattatatatagtttttaattcattggattatttcataggtaaggacctcaaaactatgctacacttctgtgtacttataaattttatgaattaaggcttgaaaagtctttaacatttaagatactagcagaaaatcattaaaaacgaatacacataattctgaaaaatatttcttgaataaattatgtaaaatatattttcgtttttaaattttgaatcaaaggaaagcgaattttaaatatttttttccttgttgtattgcacattttttccgagtgcattcttcaagccgaaattgagccggttatcttcgtcggcgttttagcctgttctctcttgtttgcctcggcgttttttttttgttttgcgttcgtgcttcgttttcacgtttttgttttcgttccattcgcttctctgtctcactctcttctctctctatcgactgactatggatccgaatccgaatccatggtgggttcagtttcttgcgactctttgcgcggtcaacttcgccgatcggtcgggcatgcgcgtccgtataactcgtatctgaataatcataagagtaggaaatcgaggcagaagtaaaaacccgtctcgctatattcgtcgaccgtgttgttggtgtctatctgtgtcttttgtcaatgtttttaacccaactccacttgagggggagccaatccgcctttcttctgaaaatttctttcaaataatacgaaaatcgtatggaaaattgaaaaattgtgagtgttgtgtgcaaagtgaaccacggtgatcgtagttacggtcagatcatctgaagaatcagaaacacgcgccttgctcgattcccctgcttatcaggcacatgcctatattatacaatttaccaacagtcttttacaatctgttcgccgcaaaagttgaatggaataaattttagtcttttattttgcacgaaacgtgacactaaatgaagtaagtttcgactatctcatctgtataatcgacgttttttgctgtttacaatttttgtaatattttttgaggaagtgtaaagtgctgcaacaaaaacttattactaatcttcaggacagattaaggggtttctgttaaatagtgaaacataattcaaaatgaaatataatttaaacttatttaaaagctagtgtttaaggaattattgaagacaattttaatttaaaaaatttaagaactgttatttctgagttgaaaagaggataaataacatttaagaagaaattgagttagcgtttgttgaacgtcgataattagttaaaaatgtatgaaaaactatattatatccacaacacacattacaacttcatttcttttctttttgcagcatgttaatactgaaacttcccaaaatgtttagccaactgtggcttcttctgattctatcgctcttaaccctagaaggcccacagccttcgacgggcagtggttatacgacaaaatcaagtgtggatttgctggaaaacgattcgcgatacatctcatatcaaggtgagttctcgaggtgggcggattatcaaaaattactcgaaactgtgtcaattgcacggcaatcaatcaagttggccacttgaagcggtggaactgtaaattgggttgatgtctgtcaaagttctaagtgattccgagagtctgctgcaatcgattgcacaaatgttcggttcgatcgaacaggtgccatttcgaatacaacgaatacacccatctgcccaactgtttgtatttgcacggaatgtcaacaatgatctcgatttaaccgagttccccaacaaaccgcttttatgacaccccaatacattcgtgtatctgctgcttttaatcagaaaaagtttcgcattttgttaaaatatttgttctttttttgtgatttttgcactgaaatgtatctcgaagtccgtcttaaaatgcgaactcagcccaacgttgtgttgacaatgattttaatttttgtttagcgcttttttattttatttcgcacttaaatattgaaaagtatatgttttaccaatgaatcagtgaatcttttaaaaaccttgaaaaatatgggttaaataaaattgagcttaattgtgccaagatgccaaaatgttttaataaatttgcaatataattgctgagataataattgcttatataataattgctaatataattgctaataaaacttcaattaaattgcttagtatttgtttttacgattttgtgcaatctttttcttacaaaaatgtttttattttcttaacagatttaatgtcgacggccaaacgattttacgatcccgaaacgacctggtattcggaaatgctattcgacgtggccaggaaccaagtgattgtcggcgccaggtaaaaaccgggaggctattgttattagttattatagattttgtttccggccaattgagtcacggctaagccgtgtacctagtcattatgactgtttttatttttcctgttgcgtcaaaaccccaaagatatgtactgtttgaaggacttgctttttaattagtctcaccgataagtgggtcattattttgggcattgatagcgataagaaatgaaaagggaaaacacccccgaaaataaatcgtcacttaagcatttgttaactttgggttatcagcagagaggcattacgtaaaattcgacgatcagaagaaaataaacagatgcattgcgtacgtaaaacgggtactgattatattcgtcttctgtgtttttttagcgtattacgcaagttacaaaaaaatacacaaaagtgtataaaaatgaaagtgcacgcactggtataccaaagattttttacatatcaaccaagatcgaccaaaaacaaaaaaaacccctcgtcgagaacttatctcaagtacctgctgtgcgcaagtgaataaataaagataattgagtgtaaaaaaaagaataaaaaaattaagaaaagagggaaagggaacaaaaccgaaaaggtaaccaaataataatattgcagcgccgagggagaagtggtatactccgtttatttgttgagcaatttaatatacgcgtttcgagatacaaaagtatctgtcgctttagccgggttactcggttcttgtagtttacttttcatttacgcgtcttgaagtttgtttgtttctgcttcgcatagatatggatgcgatactactccacctctgtcggaaaaaaaaacacgataagatacacacatggacgcatgtgtctatagtgtcgtcatgttgataaacccaccttaacccattgctgcccgggaagggaagtcgtttatcatgttcccttgtcgtcaatcatttgtcatacttttcagtttcagttttagttgccttttctattctttattgcctacgattttcacttcgaccataactccactctgccatattttttgttgctctcttatttaccaacctctgaattatggcataatgataagagcccgatattaaaaaaaaaaaaaaagaaaaccgtttgtagcgaagggcagttgctccatatagagggaattatggtgctgcctgtaagtaggcggccagataggcaagtgggctttattaaccacataaaacgtaatttatttttataatgtgtgggcttagttgatagagccaactaagcaaagggactagacgggtttttagatagcaccagcctctgggatttcttttaactttttgccttgagactgtgctcaatactttgagctgcttcgatgagagataaacttttattttgtgaaagttgaggaggtcttgattagatatataggttaaagactttacttcgattgacacaagtcttacttagtgactgctatgaatcagtaatgtttgcttacatttttgcaaagaaatatcaagtagtctgaactttatgaagtaaatattgtaactacctttttgttattcaatttttggaatatacactatggatcattacaatctcaaatcaaaatcaactgaagattgcacgtagcgatttaatttggtacgagataagtgccaccacttttggtgcactaccaatttcagtcctaatctctagtaaaccacctgaggttaactatcattcttgttaaagcagtttcgataaggcttccttcgaataaaatagaagtatggtgctcgctttgaagacccgcaaaagtcgaaacccaccgaatgaccctcgaagtaaacccccaacgtaaaccatctctaatcgcagaccgcattttaattgtggcaatccggccgatcacatcaaaactacacagtcgaacaatagtttttatgatttctgtggtttagatgggcaattgccaatgaactggtagtggtactatgcacatactacatagtatctgtaaatgtatctgtatctgtgcggtgtatttgctgtgcagatgtgctggtgagtgcatgctccttgtatctggactgcagcacacttgacacgactgcaagatcggattactgccagccgcctgttgacgggctcggctctggaaaatgggaatggaatcgagagtggtggaatgggcatggaatcgggactggaatgggcatggatatgggactccttcagtcttttgcccgtgttccatgacgagtgacgaggcaacttgctcggttggtaaccgtcgcgtaattttctgtcatgaacaggaaaatggagcggcatgttggtacactgagagaaattagctacttaggtttcaaaaaattttattattgagacaaattatattttctttttaatacttagctcgaattaatgttcactggcatgttgttttcaaattattataaaagtctttcttgtacatcgcagtgcatttggctcgcagtgtcccatgcaactggccgaaatttgatatagactgcattaaaataatattgctttttgttttcgctttcgttcgcttgccttcgagcctttttttttgtgtgagttcagttcctacattaccagtacattattttcatatgtaggtattatttttcggaggggtcgcataagcgttgtattttatgttgtggcctgtcgcaaatggagcatgcaaatgacctgctgggaaccatttcaaatgtttatacatatggccaaacaaaatgttatataaacaaggaaattattttcgtgtgttgtgcattacccgtaatattgtttttccactcgaaaatcttggagtggacaatgccacgtcagggattttatttcaatgggagcgcagtgtctgactgtacaatattaaatatgtttttctcatagcaatccagcttaaactaaacatttgtgtaataaatcattatggttgttggctaggaaccacccaaactgcccaaattacttgaaactcaatctctgaactacaagatacaaaaatgcacctgtgacagtcgcgtcaactcgacggctactggagcacacggatgccgaaattgaaatccaaattaatcaaaccgtgttgcaccagaaacccggcacccccctcgcaaacaggggcgtttgcaaaaggagaggggggtggggtcagggcgttttgcgaactgttggcaagcattttgcatatttctattaaaaaccccttgagtggctccagactgacacaaagctattcgaacgcggattgatattgagagcctggaatgcggtagcgtaggcagagctcataaaagtggcacagtcataactgcctatgaagaaacatgctgagcaagttaaacatttcagttcctagcttacaagtttacccaagagaatgtattataaatccagattatgactttagctataagaaagctacaagctggacttttactcattttggaattactatttactacctagatttaccctttaataacacagttaaatgtcgaatcaaattttcctttagtcaagtgaaaaattcgcttttcgaagcttgcctgtaaatgctgcagtttcagccgagattagtggcggccagtgcgacggcaattttaattacaagtaacccatttaagcccggccagagcgtgatttgccgccagtggagcggcggacaggacgcccacgcacctggcgcaccggcggccacttggccaacatggtggcatggtgctatatagtatagttagtacctggccaaatccaaatgactggcaataggcgacaggcggcgacaccgcatttttaatagccccagtctcggtcgcagtctcagatcgaaagagagtcgaatactcgtatgtatccgtatctggtatctggtatctatggggccgcaacttcaactccaactccaaactccacttgctccactgcgcttacaaagaggcctttttgttatcttgtcgcgcttgtcgttcaaataaaagttgacggcggcgcaaggtgtgcgaaataagcgaattgcgaatgctcaggggtgcacacacactcgaccatatcgatacgaaaatacttccagatacagatacattacatgtagatcatttttgtggtctgttgtgcggataagtgggtggtgtggtgcaaatgggtcatggcgagtttaacagcgttacggtttacccaatttttatgggttttttttttaaatatttatattttatttcttttcgcccgagtattgcacaagtttaagctgcacagctggcatgattttattgatcttcatattacgtttttgcaacaaaaggcaaatatttaccttattgtaagccgctttataacaagtttagattaacttatagatatcagaataaagttttatagaatgttttttgtttagtttaataatctcaagagctttcgaagctaaagactcgttagagatcagaaaatatgtaaagaatttctaagtgcagcaggaaagctttgagcaggtacagaagataacccatatgatgatcgattgggcaaacatccgaccatttccatgtgcgaatttggcatatttgcacgcacgcgctccgttgagatagcaaatggcaaagaatgaagaaacaaataaacattaaacaactaagcaaacaaaccaaaacagcacacaataaaaaaaaatagaaaacagaaagaaaagcggtacatgtgtatcgcccttttttcacacctaagcggaattttcgctgtcgccaggtgaaacgaatgataaaatcaggtgaggcggctgatgatgagtgcgcaagagggggaggggggggttagctattcgaaagccaatgctaattgacaaggccgttgcttatcgctcactgggcgtagttttgttggtctcactcagaaataaaaatataaaaaaacagcgcattgaacttgacaggcacgcataaaaaattgaatagtttctaaagccattgaagaactaagaaagcagaaacgttgcatctttgaagtttttaaaaacttttatttatagcttattttactgtgtatgaaattaacagaacgttttgggaatttgctacgcttgtttagaatttgttgcggtttgttttggattttagaacataaatacaaatgtgtagaatatacatataatgcttattttctatgaaaatacatatttatcgtctttagtaatttatatcgaggctgtaagataatatttcatatatttttgctgtcttcatttctaagtacaaaagcattaaaaatacggctttattcttcgtcatagttgtttttacgaattgatatgatttcctaagtattattttgattcaagtgataaagcagttggccacttagaaaacctggtggactttaaaatgccggctgcttaaattgctcacttgtgatttattgatttttttttttgaattgatagcaggaaccgctatgtcaactttttgacttcagactgtgacgagcacaatcagcagtaattaattttcgcagccgttaagtctaggcgagattttacacacgacatgccagtaaatgtactttttttttatttattattatgatggtttttttttgttattttcattcacattccccggcttttgtcgtgtcattttcacatggatattcgaatgaattagtgtcgctaggtgttggttatacgatttccggtaacgcctcactaaatggcttgcaaatgctgcacgaacacttgagatacacccatcgagtgatataggagctttttaggggctaagaaccctgagttataatcttggactctcaatgcactttgcgacttatatgggcctataaacttattcgtatttatgagtgtttttatattgacacaatttcagctatcacatccttactcaactatcctatcaatggtcaataatctcaagttcctagaaatgtcaatatttgaaaggcaataagtactcaacaagtagtaaacaaagatcaaataatataagtctaggataaaccgaaaaaggaaggaatctgacgaaatatacgattacatgccaaattaaaattatgaatagtcttaaataggtttgatcattttcatggtatcttttcaatttattttgcagtagatatcatgacagatcaattaattaacacttaatcaaaggcagtaattcaagcgtgtagcaaccatggtagtcatataatatttgcatctgccaacaccttaaatacaccttttcacttagcccataatatccagagatattgacagctgccttctagggtcccactttgaatgtttgggaagggcgatgatgtttgccgatggctgagctgcgtttttcgcaagagttggcgtgtttattacctcatcacgtaccgcttaagacgcacaagcatcgcgtggagctcgagttacacctgagcggtatacatatatacgcacatatatttgtatagatacatattcacctgagttacaactgcacgggggctgatgtgccacgcgccttgcgccagctgcaatccaaatgattgatattgggcgatctggctgacgatcaagtatctgcactgagaaaaaaattaacgaatggctattcagagttgtttattttgcaagaatataagcaagttcatatttagtttcttgtatagtcatacgattcgtgtttaaatgcctgcagttaagttacagcattcgagagttattttttgcagattaatatgctaatttcttcgagtgtacttgctctgcgcaactcagcattcaatttatatcctaaggccgctaaacagccgcaagtgaccattagatggccggactgtgggcagtgatctctttttttttcgctcggatctttggcgacgtctggtcggcggcattccttctaaagcccaagcacggcggcattctccgattccgatctctgttcacagttctccattccattccaaactgaatcccaatcgccatccaaagccacctcttagctggaaaaaatgcggctgtccaagtcgagatgtaaccatttagcaattgcttctcgagcattcgaaatggttgcacttgatctattgatcttcgtgttcgtttcgccaaaagcgcgtagcacagtggttgtgttagaataattggtaaaattagcgggctacagtagtaacttacaaaattacttaaatgaaaaaaattagtaatatatagaaaatactgcaaattacacaaatacatattgcgaataaaatacgtttgttagaaaaacaatgatataaaatattattcttatacttgctaaatttattaccattttatgaattcagctcatatgtaatgtttagtgctcagccttcgcccacaatagttttgcatgagttttagaatgctaaaatccactgcatgtgggtaccactgtggcggagccaagttttgttacctgtttgccttgcagttcaatgcactggcggccaaccagttcaaaattatgacagctgttggtcaggggggagtgcggaggggtggcaattgaagctggagccggagtcagccttatttgtaaacaattgtgggccgcctctctaactgttattgctggccaatcggtcgcctttcaacggtcatacactgcaatcaaatcggaaaaaaatctgagtcctttttggattttaagtgcaatagtatttgctagaaagtgtagttcaatttgtgctataagaatcatatcataatattacttgatgttaaagagaagagaattgatctaataagtatgctccacttacttcaacatagtaatatgcacattgaactgatttgactgaataattgaatacattcgattttccttgcagggacaccctgtaccgcatgtctttcgacctggagccgctggagcgggccagctggggggccacgccatcggagatcgccatgtgccaggcaaaaggccagtcggagcgatggtgtcgcaactatgtgcgcgtgctccacagctacggtgagaaccagctgtacgcgtgtgggacgaacgccttccagccgagctgttcgtggcgccaggtgagtggtcgtccaagtcgcccatgtcgaccaattcgtgtccaattctttggagtcgccagtctgacgcgccatttaccccaacccttggtgcttcttgcagatggagaacctcacagtcaccggcgtggacagcggcgtggtcaagtgtccatttcatccgcaggcgaacagcaccagtctgctgcagtccaatgggcaactctttgtgggcaccgccactgatttctcgggcagcgatgtggccatcctgcgaacaggagtggagtccaataaggtgggtatctgaaacgatcacacactgcggatgagtaatatttgtaaaaaatatataaaaaattatcacttaagcagagttttacaattttccttatttatataaccaaattcgtagttattttctataaattcaacgtaaaagtttattttaaagaatctgattttttgtaagcccacacggcgtatgagttatgtgcatttttaaagcaccgaaacaaatgtaactggacaaaatcattgttaacttgactgtttttttttaacaaatagacatgctgattcttaattcattttaacaataaaatgcatttgagtaagatccatatgctggcgtagttaggccacacccctgcccacacttctaatggttctattatccaattttcagcgtttcctccgcaccaagcaatataataacaactggctgagtggagcccaattcgtgggaagcttcgaggctggccactttgtatattttctgctacgcgaatcggccgccgagcacatgagttgtggcaaggtgagtgattacattaaattcatacaaattctatttcaagctaagagattaatgcactttcaggtgatatactccagagttgctagggtgtgcaagaatgatgtgggcggtggtggtcagttgctaagggacaattggacatcgtttctgaaggctcgtctcaattgctcactgcctggcgaatatccttattatttcgatgagatccaaggcatgacgtatgccgaatccgaatccattctctatgccaccttcagaacgtcggggtaagtattctgcaacttctatatcttttaacttgactaaaactcatcattttccttatttcgtaaacctatagatccagcatatttggatcagctgtttgtgcctacaacctgagctccattaacgcagccttcgatggaccctttaagcagcaggagcactcggatgcggcctggaaaacggtcaacacgaatcagcggagtcagttccagtgcggaacgagtagtattggccactggctggagagctcacgttaccaactgatggatgaggcagtgcagccaattggagcagagccattgtaccactccaaactggaacaattcggccgcctggcgttggacatcataaacacaaagacggagcaagtgcacgtgctcttcgtggccagcagtgggaatcacataaagaaattgtccgtaaagtacgatggcgatggagttcagacatgtctggtggaactttggcaggcggacgatactggtactagtagcctactgaatatggcctatctgaaagtcagtgattccctctatctgggcaccgatctggcgctcacccggattcccgcccagcactgcagtcgccatgtgtcgcagtcaagttgtctgaactccatggatccctactgcggctggaacgaactggtggagcgctgcatgccacagccacaggattcctctgtactgcaacactggcatcaggcgccacagatcacctgtcctgtactaaatgcccccatcgatggcggttggtctacctggagtccatgggccgtttgccagcagcacgagcagccggatagcaattgccagtgccgacagcgcagttgcaacaatcctcagccacaacatggaggtgccacctgcgagggcatcaggtgtgtacaatttgtataatttgttaaaccaatatagcagtatacaaattaatttaattataaagaggcagtaaggaacctattgtaattatatttcctttatttcagcacccaagtgacgaactgcacgcagcacggaggatggacggagtggtcagcatggtcgccctgctcccagacctgcggcattgccgtgaagatccgacgacgcacctgtggaaatccgcgtccggcattcggcggtcgcacctgtgtgggatcggagcagtcggagatgtactgccgccacttgccaccgtgcccggtggccaagccgcagtccgtggatggcggatggggaccgtggggcgagtggagtgagtgcagtgcccagtgcggcggtggtttccgaatgcgacgacgtgagtgcaacgatccggctccactcaatggcggaatggagtgcccgggctgtcggctggactatgaggagtgcaacatgcagagctgtcaggaggtgcgcaaactcagtgcctggacaccgtggctaacggtgaccgggagcggaaattcaagtgaaccgcacatggagaggcgattcaggttcgtctgtcgtgccaccagtccagatccgagttccgtccgaattggcctgcccaaggaggagtcgcgcaattgtcatgctgatggcagctgccagcggcaggttgatcacgactccgcggactccgatgctgcggactggtcaccatgcagcgtcagttgcggtggtggtgtccagcaacgtcaccgcggtcgtggaagccagagtcgggtatgcaatatacacgcctgcccggcggaagaacagctaagtagtaatagcctggataacgagttggaacacggcgaatggggctgctggtccgagtggtctgcctgctcggtgacctgcggattgggactacggcggaggacacgtcgttgcctagcgggtcacgaccggctatgtcagggtcgtgcactcgaagaacagaagtgtgaaatggtgccatgcgaaggtgggtcatcattatacataacattttccatagaaaaccaactatgtaattgatttctccttagatttcctaggttggagcgcttggagcgagtggtcgagctgctccagcgatggcatccgactgagacatcgccgctgcctggtggagcagcccggttcgatggagtgccgtggtgcggagttcgagaagaccgcctgtgtgcccaatgagtgcgagggtaagtcaagctttgattcatttgaatggaaaaacattttcttatccatatgtaatacacttgcagaaacccaaactgcttcgactgccacgctacccatcgtgatcttcgttggcctgcttttcacagtggcctgttgcctggccacctacagattcaccaagaaacgattcatgttaagtgctgaggaggcattaaacaaaaccacgacgacaacagccagtttcgacacctatcccaatcagtactccagtctgcccaccaaggatgtaagttaaaatacttttataatttattaaatataaaatattatatttgtttgcagtactacgatcagcgacccaaacggcagtccagcttccggatgccggccaagaccagtaatttgggcaacggcaatggcaccctcaatcggaacaacatgcaccaaaataatacgcccaaagttctggccaaaacgtatatcgactgcgaatccggaacgatcaaacgacaatcggcactgaacaattgccgcagtaatatcgacgacgagaagttctaaggaaacccgcgatcttcgatatccaaaagtgccatctaatgactatggaaatgttacaacgagagagacaagttttatttttgcgccaaagcgatgcagatgcaaaatgttccttgattgactcacattgagtcgtttattgaagctaatttagctggttatcgaattaagtagttatagcatgtaatatgtagcacactaaatttccccacagctatgttcaaaaagtattttagttggttccctaaatttcagagtgcagataacgtatctctatttttgcttttagtattgtagatactgccatcaaaaattgttgtataaatcgcgtaagcttatgatatggcccaaccagcgagactgaccgtttatgattgtctaaacaaatttgttaaatttcacaaaattaaagcaagcagcattgctttaactaaattaaatatacttattttcagaacatatctttaacttatcatattttatagaattcgaactgacatagtcgatcatgttaagaatagtccttaagatatgtaattgaataaatacagttttactaaccgacacagttgcttggattcccattgaaattaacgatgaatgctaaattttagttatccagctggtaagaatacgattcatacggactaacggacggacaggcatacggacggacagaaggacatacggacaaactgacatggttagatagactcggctagtgtcctgataacgcttcgcgttacatggttttcaagaaagctagcatacccttttacttaaagcacaaattgtgttataaatttgttgtatgcattaatttttattggagtggccagaacccaggacactttccaggatacaagttctgtgtgcgctctaaatcatgcccctacataatgcggctcattttgcttaacagctctacgttcgcttattgatcaaatagacaatcttaagctaaacttaaatatccaagctgactcactttttaaaaattaccattgattggaaaatagcgaacgtccgcaggaagatctaaagaaatggatggaaatggttataccgttcatggcgtagagtttatcgagcatacaaagtagagtcaagtttataacagaatactgtgtatgggcataaaaatgttaataaatatacaattagctctattaagaatacacaatacaaataagattaaaccaccctcgtttttagtccacgtcagccaaaacacaaccctttattagccaggtcagcaaccaatggtcgtagttccataaacgaacagaatacacactttaatggcgccacatacgatatcgcaagtctgcttatgttccacatcatatcaataatatccaaatttaaaatttacttaaacgatattgaagtttagcactgcgcttttatatctacattagaaaggcatattctctatgcattccgatcaaaaagcgatcaattgccgcaaatcctcatgaactctaaaatttatgtgaggttcccacaataatttatcagtacgtggagtgctcgagtaatcttccaagattaagaggatttcttgagcaggccgaccatttgtcacaaatcattcaaacaccaaggggacgagaacgaatgg

SEQ ID NO: 11921 - DNA, 4340 bp, DROSOPHILA
cgggcatgcgcgtccgtataactcgtatctgaataatcataagagtaggaaatcgaggcagaagtaaaaacccgtctcgctatattcgtcgaccgtgttgttggtgtctatctgtgtcttttgtcaatgtttttaacccaactccacttgagggggagccaatccgcctttcttctgaaaatttctttcaaataatacgaaaatcgtatggaaaattgaaaaattgtgagtgttgtgtgcaaagtgaaccacggtgatcgtagttacggtcagatcatctgaagaatcagaaacacgcgccttgctcgattcccctgcttatcaggcacatgcctatattatacaatttaccaacagtcttttacaatctgttcgccgcaaaagttgaatggaataaattttagtcttttattttgcacgaaacgtgacactaaatgaacatgttaatactgaaacttcccaaaatgtttagccaactgtggcttcttctgattctatcgctcttaaccctagaaggcccacagccttcgacgggcagtggttatacgacaaaatcaagtgtggatttgctggaaaacgattcgcgatacatctcatatcaagatttaatgtcgacggccaaacgattttacgatcccgaaacgacctggtattcggaaatgctattcgacgtggccaggaaccaagtgattgtcggcgccagggacaccctgtaccgcatgtctttcgacctggagccgctggagcgggccagctggggggccacgccatcggagatcgccatgtgccaggcaaaaggccagtcggagcgatggtgtcgcaactatgtgcgcgtgctccacagctacggtgagaaccagctgtacgcgtgtgggacgaacgccttccagccgagctgttcgtggcgccagatggagaacctcacagtcaccggcgtggacagcggcgtggtcaagtgtccatttcatccgcaggcgaacagcaccagtctgctgcagtccaatgggcaactctttgtgggcaccgccactgatttctcgggcagcgatgtggccatcctgcgaacaggagtggagtccaataagcgtttcctccgcaccaagcaatataataacaactggctgagtggagcccaattcgtgggaagcttcgaggctggccactttgtatattttctgctacgcgaatcggccgccgagcacatgagttgtggcaaggtgatatactccagagttgctagggtgtgcaagaatgatgtgggcggtggtggtcagttgctaagggacaattggacatcgtttctgaaggctcgtctcaattgctcactgcctggcgaatatccttattatttcgatgagatccaaggcatgacgtatgccgaatccgaatccattctctatgccaccttcagaacgtcgggatccagcatatttggatcagctgtttgtgcctacaacctgagctccattaacgcagccttcgatggaccctttaagcagcaggagcactcggatgcggcctggaaaacggtcaacacgaatcagcggagtcagttccagtgcggaacgagtagtattggccactggctggagagctcacgttaccaactgatggatgaggcagtgcagccaattggagcagagccattgtaccactccaaactggaacaattcggccgcctggcgttggacatcataaacacaaagacggagcaagtgcacgtgctcttcgtggccagcagtgggaatcacataaagaaattgtccgtaaagtacgatggcgatggagttcagacatgtctggtggaactttggcaggcggacgatactggtactagtagcctactgaatatggcctatctgaaagtcagtgattccctctatctgggcaccgatctggcgctcacccggattcccgcccagcactgcagtcgccatgtgtcgcagtcaagttgtctgaactccatggatccctactgcggctggaacgaactggtggagcgctgcatgccacagccacaggattcctctgtactgcaacactggcatcaggcgccacagatcacctgtcctgtactaaatgcccccatcgatggcggttggtctacctggagtccatgggccgtttgccagcagcacgagcagccggatagcaattgccagtgccgacagcgcagttgcaacaatcctcagccacaacatggaggtgccacctgcgagggcatcagcacccaagtgacgaactgcacgcagcacggaggatggacggagtggtcagcatggtcgccctgctcccagacctgcggcattgccgtgaagatccgacgacgcacctgtggaaatccgcgtccggcattcggcggtcgcacctgtgtgggatcggagcagtcggagatgtactgccgccacttgccaccgtgcccggtggccaagccgcagtccgtggatggcggatggggaccgtggggcgagtggagtgagtgcagtgcccagtgcggcggtggtttccgaatgcgacgacgtgagtgcaacgatccggctccactcaatggcggaatggagtgcccgggctgtcggctggactatgaggagtgcaacatgcagagctgtcaggaggtgcgcaaactcagtgcctggacaccgtggctaacggtgaccgggagcggaaattcaagtgaaccgcacatggagaggcgattcaggttcgtctgtcgtgccaccagtccagatccgagttccgtccgaattggcctgcccaaggaggagtcgcgcaattgtcatgctgatggcagctgccagcggcaggttgatcacgactccgcggactccgatgctgcggactggtcaccatgcagcgtcagttgcggtggtggtgtccagcaacgtcaccgcggtcgtggaagccagagtcgggtatgcaatatacacgcctgcccggcggaagaacagctaagtagtaatagcctggataacgagttggaacacggcgaatggggctgctggtccgagtggtctgcctgctcggtgacctgcggattgggactacggcggaggacacgtcgttgcctagcgggtcacgaccggctatgtcagggtcgtgcactcgaagaacagaagtgtgaaatggtgccatgcgaagatttcctaggttggagcgcttggagcgagtggtcgagctgctccagcgatggcatccgactgagacatcgccgctgcctggtggagcagcccggttcgatggagtgccgtggtgcggagttcgagaagaccgcctgtgtgcccaatgagtgcgaggaaacccaaactgcttcgactgccacgctacccatcgtgatcttcgttggcctgcttttcacagtggcctgttgcctggccacctacagattcaccaagaaacgattcatgttaagtgctgaggaggcattaaacaaaaccacgacgacaacagccagtttcgacacctatcccaatcagtactccagtctgcccaccaaggattactacgatcagcgacccaaacggcagtccagcttccggatgccggccaagaccagtaatttgggcaacggcaatggcaccctcaatcggaacaacatgcaccaaaataatacgcccaaagttctggccaaaacgtatatcgactgcgaatccggaacgatcaaacgacaatcggcactgaacaattgccgcagtaatatcgacgacgagaagttctaaggaaacccgcgatcttcgatatccaaaagtgccatctaatgactatggaaatgttacaacgagagagacaagttttatttttgcgccaaagcgatgcagatgcaaaatgttccttgattgactcacattgagtcgtttattgaagctaatttagctggttatcgaattaagtagttatagcatgtaatatgtagcacactaaatttccccacagctatgttcaaaaagtattttagttggttccctaaatttcagagtgcagataacgtatctctatttttgcttttagtattgtagatactgccatcaaaaattgttgtataaatcgcgtaagcttatgatatggcccaaccagcgagactgaccgtttatgattgtctaaacaaatttgttaaatttcacaaaattaaagcaagcagcattgctttaactaaattaaatatacttattttcagaacatatctttaacttatcatattttatagaattcgaactgacatagtcgatcatgttaagaatagtccttaagatatgtaattgaataaatacagttttactaaccgacacagttgcttggattcccattgaaattaacgatgaatgctaaattttagttatccagct

SEQ ID NO: 11922 - protein, 1083 aa, DROSOPHILA
MFSQLWLLLILSLLTLEGPQPSTGSGYTTKSSVDLLENDSRYISYQDLMSTAKRFYDPETTWYSEMLFDVARNQVIVGARDTLYRMSFDLEPLERASWGATPSEIAMCQAKGQSERWCRNYVRVLHSYGENQLYACGTNAFQPSCSWRQMENLTVTGVDSGVVKCPFHPQANSTSLLQSNGQLFVGTATDFSGSDVAILRTGVESNKRFLRTKQYNNNWLSGAQFVGSFEAGHFVYFLLRESAAEHMSCGKVIYSRVARVCKNDVGGGGQLLRDNWTSFLKARLNCSLPGEYPYYFDEIQGMTYAESESILYATFRTSGSSIFGSAVCAYNLSSINAAFDGPFKQQEHSDAAWKTVNTNQRSQFQCGTSSIGHWLESSRYQLMDEAVQPIGAEPLYHSKLEQFGRLALDIINTKTEQVHVLFVASSGNHIKKLSVKYDGDGVQTCLVELWQADDTGTSSLLNMAYLKVSDSLYLGTDLALTRIPAQHCSRHVSQSSCLNSMDPYCGWNELVERCMPQPQDSSVLQHWHQAPQITCPVLNAPIDGGWSTWSPWAVCQQHEQPDSNCQCRQRSCNNPQPQHGGATCEGISTQVTNCTQHGGWTEWSAWSPCSQTCGIAVKIRRRTCGNPRPAFGGRTCVGSEQSEMYCRHLPPCPVAKPQSVDGGWGPWGEWSECSAQCGGGFRMRRRECNDPAPLNGGMECPGCRLDYEECNMQSCQEVRKLSAWTPWLTVTGSGNSSEPHMERRFRFVCRATSPDPSSVRIGLPKEESRNCHADGSCQRQVDHDSADSDAADWSPCSVSCGGGVQQRHRGRGSQSRVCNIHACPAEEQLSSNSLDNELEHGEWGCWSEWSACSVTCGLGLRRRTRRCLAGHDRLCQGRALEEQKCEMVPCEDFLGWSAWSEWSSCSSDGIRLRHRRCLVEQPGSMECRGAEFEKTACVPNECEETQTASTATLPIVIFVGLLFTVACCLATYRFTKKRFMLSAEEALNKTTTTTASFDTYPNQYSSLPTKDYYDQRPKRQSSFRMPAKTSNLGNGNGTLNRNNMHQNNTPKVLAKTYIDCESGTIKRQSALNNCRSNIDDEKF

SEQ ID NO: 11923 - DNA, 5673 bp, DROSOPHILA
tatggatttccttaaatttgcaactcatcatttggcgcatatacatgtatagtaaattgccgagttatctagcttatcttgtgcaaattatatcagttttatctgattaataactcattttattacactatttagttcttttcctttttagggaggtcctatatttctgtatcccgcaaacaaacaacattcatttatacacgtatttagaagtacatatttgcaatagatggagcggctaagcattcagttgtatattttaattaaaaacgtattctgcagttatctaccagctattaccgaaagtatgcaaaaaatcaatttacttcaaattccaaagacaatcggcattgctaaaaatttaagtgatgcgccgcaatgatataaccacataccatcctgatgaaacgccaataagcatctgcgaatatgctgaacgttggccaatatcgttaaaaactttcttaaaaatttccgaataattagtcatttttaaaattagatgtcgacgttaagatgcgaaattctgaccgcccagtttacgtcaatttaacacaataatatatgcccgtcaagatagcgtcaatttggacaacatttttgtgttgggtttattggaactcggaagtggaacatatgttaggggaattatgggaaaaagagtaagaaaaataactggtagcacttaacgtagaaactggaataatcatactttgaatatttattattaatctgataattacctttgtgaatcctgtatgctttgcacaacaattggcaaatttcaagaacctcttattatttatttatcttagctattgcctcatttgaaactattagttaaattccaataaaatatgagatatccatttaatcgctgcacttttcgtgtcgaaaactagtttcgagatcaaaactataaatttaagtatttttttctaaacgtcaattatttctccccccttactttagacaaaaacccaaagttcgaatgaaatctacaatacaaaatgtacatgagtttatttaaaataattgttaaaactacttaaataaatatcatacagtatatttacaaattcgaatagattagccaattacttagcaattttaattactttgctaaatcaccaagaattataagtccgtaataagcattgattacaggtatgttgattcacctggaaataaagaaaaatattcatttattagtttagatttttttgctcaaacaagcttaatgaatttattaactaaaactcaacgagaatacgataaaaatcaaaatagcatgaatgaattaaaagcagaagacttttgatgatgatgaaacacacaaaagacacattctgcttcaggatatttagttttcaacagcaacagtgaaatagtcgaattagtcgaagttcgacagttcggtgctagttttgttaaatgaattgagtagaaggacaatggcagtgcccagagtcacatacttatgaagcggtgagggatgtgtgatgaaaatcgatgcggatactgattaaggattgccggttagttgaccattcgagccgcaggcatgggctcccactcactcacctatgtacattaaattctaaacagatgtgcagagcgcagctgtaatcgatcgtttccccgtgaaaggaagtggatctgtgtaagcctgtctctgctagtatactcgtaaaagtcttggggacatataaatccagttctggtggcttcgttttatacatcaaaattaagagatcgttcagccagaagtcttttaaatcgtctcgggtgattattctggcgaattcaataagtcaataagaatataaatgtgtggacgatagcatatgtcgataaaggctatctcttttaacaaatcttaatttgaatactcatacaatacaattaattacaaaatcaaaccgataatggtccagaaatcaattgaatcgaaactcttagtattaaataaatgtgaaattagaacaattgttcggtattactcgattaaaacggatagatttttagtgagatctggtcattgagagtatagtgtgcagcaaactcaccggattcccaatcttcctcgccatcttcggtaccacagttgaattttggagaggattgtttacatgtgatgtatgaattgtaattgatgttcttattttcgtttatacttcgagtgtcagaggtgatatgaacttcactattctgccatttgattaaatcagttttcttaatggacggttgattaaatatatgatttcgttttatttcctcttttgtggaatcattcaagcttggtaaaagagttttgctattaggctgtttgcgtttgcacgcagtcgaagtattttttgaattggttgatgtgtcgtattgaattttagtctacgaatattagatttatagattaagcatattgatcggcgcaaaacgtgttttcacttacaactatatccttatgatccaacgtttctattgtttgacttttcgttgtattatcattgacgatcgcagttaagacttttttttcggcatagcagtttggagacaaactgtcatagtctgatctttcgaaatttaaaacattttcgtttctctctttttcggacgcttcagcttgaacatcattgctaaaattctctgcctcaaaaacgattgaaatctgaaaagagagcaagcacatttatttggtaatttcgcagcatctattaaaatgcttcgaaatatcctaccttgaattcttctgaaaatcttttatgttcactgtctttatgtacatcatcgatttctgatttgcttaaagtgtgtatatatttgttaactgttccatcggactcgcaagctaaagagaatgtttaattaaatcgtttatttaatgcatgtgcgatattaagtatacttacgtgaatagtttcgtacaaaaaacgtatttagccaaaagtgacaaatgattttatctggggatttttttgtgagttcaaattttacatcgccggaaactggtattgatggtttaatggtcaaaacaaatgatttttgaaaatcaatcggcaaggttttcagtctctgcaattataaaaaaaagaagaatgttactgctggttagaaaggtattcgaaaaggaacactttactgcactgaaatcgtgtgaaatatacatttttaaaatgctgtctatagtctatcaatgatgtatctatatactttatatacttacatctggctttgcattttctgtggctgagtcgtgtaatacagatattgaacattctaccatgcctaagttttgcacacaactggactccgagaagcgtatttcacatacctgagatacaaaaaatgcatatttagattttgtacggcgctgaatgtggcgctgctgctggaaatactcacgttaaggcttactttcgaatatggaacacttgaacaaactagtttggaaaaatactgaacatatcgacgctgagatgggattgtcacaccttttcggtcctttgtacgcttctcatcataccacgctaatgcctcgtcggcggattttttaattccactgaacactaaatatgcgcagatcatggtacctgaaatgaaaaaaaactgggttagttttttagccctacaaatatcgaaacaagatcatagtgtgccatgatatttatgaactttcgcacaaaatgttgaacacatttcctaccggttctgccctttccagctttacagtgcacggctacaacattggacgaatcttccttgagccacatatcaacatcactgcaaaatcgttgtattaactcaatcgttggagggttatgatcatcgaacggataaacagctactctctgtaatgcgaaatagtatattttacatattttacgccgacaaatagaaaaagttcaacaaaattaccccgcgaaatttagcaacgtcgtaactacgctccgagcataggttatagattttgtaatgctgggcatgattctcttccaatagcttaaagacatcttccagacggtttctgaataggccctctagtttatccggtgctggatagcccatggcaattatgttatcattaatgtctgtgggtaaatagataatttaatttaatattccaatgattgcggttgattcaataacttacatgttaaatccaaatcgtatcctttttctttgtatcgtatacgttttttactcactacattgcgtatcacgttggacattaacgaaatagtgttggccatatttttaaggtttaaagacttgtcttttttatttaaattagattagctgcatccattcaaatgtatttgggaaccagtgcttgtcttctatttactccattgcaaagtgtacgttctgaaaggaatgtaaagcatattaattaatatgcatatgattctaactaatctgtttattttccacagcaagttagaaaagtattgactcaattcagcttagttttctactgcgaattcaaacctaaatcctttaacagcagacaagtttctaatatggtcaatagaaactgcttaattatactgtgccaaggcattctaaagggatatatggaactaatataatgggcttgttttctcccgatccacttaggttgttctatataaactaatacttcttactcggctaagatatattcctgtttgcagttcttgcttggatacatatttaagcacgtacatacacatacagacagaggtgcactctctataggaatagttccctacttgttttcccaggaacaggtaaagagttaacttcagttcggtttatatatccacaaatatccttagcacaaacatgcacacactcacacacactcgcacatgcacacgcacatatgtacatacacacacacacacacacaggcaggcatttgcggcacacacgtgaaacatacttacatgtatcggcatattatcaaagataaacaatataacaatcttccgcttggcataatacattcagattggttgtcaaatggtcctggttttaattgtaactggctaacagaacagagttcttttattgaagcccaacgcacggcgatttcgatacgaattcgagcaattaaatgggttcgttggctgagggggcgattttcgaggggtgaaaatcaaaatcaaaatccgttttagaaacaccgagcagtaatttcgaattacttaacatagcgactgatttggcaactgttttttgttttatctcgccgagtagacacacttttttgacaaactgtttgcgaatggtggtatgtattgtagttagagcacatatgcatgtacagaaatatgcagatatggatgatgggcatgtgcacatatatgcaccgatttttgtgcatttatgtacatatttgtttaaacaaaaacatatttacaattccacagacattttacacatttacactatcagcaccacacgaatatatgtgcccactgtttaatacatatgtatgtatgtgcatatgggtatgtttaagtcaataagctaaatgttccaaccgagcaggttctggctactgcatttcaaaaagctatcacatgttttgctctaagccacgaaatttcaaataaaacttttcaattatgtgtaaaagttaaacagtagcgctcatgctctattaaatgtattattaatttatcaagc

SEQ ID NO: 11924 - DNA, 2342 bp, DROSOPHILA
ctgcaaacaggaatatatcttagccgagtaagaagtattagtttatatagaacaacctaagtggatcgggagaaaacaagcccattatattagttccatatatccctttagaatgccttggcacagtataattaagcagtttctattgaccatattagaaacttgtctgctgttaaaggatttaggtttgaattcgcagtagaaaactaagctgaattgagtcaatacttttctaacttgctgtggaaaataaacagattagttagaatcatatgcatattaattaatatgctttacattcctttcagaacgtacactttgcaatggagtaaatagaagacaagcactggttcccaaatacatttgaatggatgcagctaatctaatttaaataaaaaagacaagtctttaaaccttaaaaatatggccaacactatttcgttaatgtccaacgtgatacgcaatgtagtgagtaaaaaacgtatacgatacaaagaaaaaggatacgatttggatttaacatacattaatgataacataattgccatgggctatccagcaccggataaactagagggcctattcagaaaccgtctggaagatgtctttaagctattggaagagaatcatgcccagcattacaaaatctataacctatgctcggagcgtagttacgacgttgctaaatttcgcgggagagtagctgtttatccgttcgatgatcataaccctccaacgattgagttaatacaacgattttgcagtgatgttgatatgtggctcaaggaagattcgtccaatgttgtagccgtgcactgtaaagctggaaagggcagaaccggtaccatgatctgcgcatatttagtgttcagtggaattaaaaaatccgccgacgaggcattagcgtggtatgatgagaagcgtacaaaggaccgaaaaggtgtgacaatcccatctcagcgtcgatatgttcagtatttttccaaactagtttgttcaagtgttccatattcgaaagtaagccttaacgtatgtgaaatacgcttctcggagtccagttgtgtgcaaaacttaggcatggtagaatgttcaatatctgtattacacgactcagccacagaaaatgcaaagccagatagactgaaaaccttgccgattgattttcaaaaatcatttgttttgaccattaaaccatcaataccagtttccggcgatgtaaaatttgaactcacaaaaaaatccccagataaaatcatttgtcacttttggctaaatacgttttttgtacgaaactattcaccttgcgagtccgatggaacagttaacaaatatatacacactttaagcaaatcagaaatcgatgatgtacataaagacagtgaacataaaagattttcagaagaattcaagatttcaatcgtttttgaggcagagaattttagcaatgatgttcaagctgaagcgtccgaaaaagagagaaacgaaaatgttttaaatttcgaaagatcagactatgacagtttgtctccaaactgctatgccgaaaaaaaagtcttaactgcgatcgtcaatgataatacaacgaaaagtcaaacaatagaaacgttggatcataaggatatagttactaaaattcaatacgacacatcaaccaattcaaaaaatacttcgactgcgtgcaaacgcaaacagcctaatagcaaaactcttttaccaagcttgaatgattccacaaaagaggaaataaaacgaaatcatatatttaatcaaccgtccattaagaaaactgatttaatcaaatggcagaatagtgaagttcatatcacctctgacactcgaagtataaacgaaaataagaacatcaattacaattcatacatcacatgtaaacaatcctctccaaaattcaactgtggtaccgaagatggcgaggaagattgggaatccgaataatcacccgagacgatttaaaagacttctggctgaacgatctcttaattttgatgtataaaacgaagccaccagaactggatttatatgtccccaagacttttacgagtatactagcagagacaggcttacacagatccacttcctttcacggggaaacgatcgattacagctgcgctctgcacatctgtttagaatttaatgtacataggtgaatcaacatacctgtaatcaatgcttattacggacttataattcttggtgatttagcaaagtaattaaaattgctaagtaattggctaatctattcgaatttgtaaatatactgtatgatatttatttaagtagttttaacaattattttaaataaactcatgtacattttgtattgt

SEQ ID NO: 11925 - protein, 509 aa, DROSOPHILA
MANTISLMSNVIRNVVSKKRIRYKEKGYDLDLTYINDNIIAMGYPAPDKLEGLFRNRLEDVFKLLEENHAQHYKIYNLCSERSYDVAKFRGRVAVYPFDDHNPPTIELIQRFCSDVDMWLKEDSSNVVAVHCKAGKGRTGTMICAYLVFSGIKKSADEALAWYDEKRTKDRKGVTIPSQRRYVQYFSKLVCSSVPYSKVSLNVCEIRFSESSCVQNLGMVECSISVLHDSATENAKPDRLKTLPIDFQKSFVLTIKPSIPVSGDVKFELTKKSPDKIICHFWLNTFFVRNYSPCESDGTVNKYIHTLSKSEIDDVHKDSEHKRFSEEFKISIVFEAENFSNDVQAEASEKERNENVLNFERSDYDSLSPNCYAEKKVLTAIVNDNTTKSQTIETLDHKDIVTKIQYDTSTNSKNTSTACKRKQPNSKTLLPSLNDSTKEEIKRNHIFNQPSIKKTDLIKWQNSEVHITSDTRSINENKNINYNSYITCKQSSPKFNCGTEDGEEDWESE

SEQ ID NO: 11926 - DNA, 2879 bp, DROSOPHILA
aacttttgcctcatttccggaagcactcgagtcctggatcagaggagccacaaaactgtgcataatgctccgcccgagcaatttatcatcctcagttccagttcccgcgaggctgtcggccaaaaaccagcgggcggtagtagaaaaaaaatttggcggcgagtgggccgaaacctttttggtgggggtgccaatggaatgtggaagggcggtggccgatgattaattgcttgaatgtccagtcgagcagaaaattcacaaaacatttccatcatcaaagcacacaactgatttttctgtggaaaagtgaatcctgtcaacgatgaaacgaaggcagacagctctttaagtccaatgtaggaatattgctctctgtcagtttgatttcaagttatttgcctaattgcgagtatagtttatttgctttcacatttattcgttgctaattgcacatttcaagtttcaatgcctttcattgcagactaattaaatgcttaaatgccatatatttgctttcacttaacaactgcttgtacgcatgaacaaaaaacaatcaatggatagacataactgaaagtaaacaagttcaagggaaatttctggaaatataaaattatgaaataaatcagacacgaaaattaggtaagtttcgtcaataattgttggctcctgtcatattaattaggtgggaattacagcgtttattattgaaatttataaagtcatatatgtaagtttacaatgcattacttttattttatttgaattgtggaagaatttgcttttaagattctttattttttatttaacatttatttgcaacccatttataatattccgaattctagcagtaatgtactcaaaagttgactgatgaaacgtaaacaaaaattctttctcacaatatatgaaaatattaatatagccatcactgccacaattgtcacttcaacaattccataaaaagaaacccacagtcaaaattttcggcactttaagcatggagttggaacaaaacttgaccgccgccctgatgcagtcgtcggcggaggagggcaagtcggaggaggcgtggccggcggacgcccacctgcatcagccggccgaggcgaatcagctcctgttgccggagcgctccagctgcctggcggtgaagacgtttttgcgcatgtgcaacctaccatttacggagcacatcagcgacaatgcagagtttatgtcaccaggtggccggttgacccacctgccgctgctccgtttgggccctgtcaagacttttgcggaattcgagccaatagtggcccaagtggaggccgtgcaaggcggcaattgcctggacagttggatgtccgaggatcagcgcgataacatccgctgtctggttagctatgtggagaatgtcttcaccctggcggagattcatatgagttttgtggatgaggtaaactatcaactttacacggcaacgcgctgtgcagccgctcatccgtggccgttgagtacgattcgccggtttgccaagcagaaggacgcacagaagatactgaaggtctaccggtggcaggatttggacaacgaccaggtaatccaggaggtgagcatctgtgccgatgcgttgatcgctgaactggaggaggaccaggcgaagagctatttcggcggctcacgaccttgcaaattggacgccctggtctttggccatgtggtagccataatgaccaccaagcttcccaacatggaactggccgcggttctggccacatatccacgtctattggcccactgtcgccgcatcgatcagagcctgtttgatggcaaactcctgaccagcgcggtggaggagcaggaggacgagatggagttggaaaaaatagaataaaggaaagggcaggactcggaatccctctgccccggaacaaaggattcttattgtttttttatttggccagggtcgggaaggcaatcaaaaatatgcaaagcatttacaataaaaacggcagacaagtcggaggaagagtgggttttgcatggggtgtggcacggggaaacttgaaccagagttaagccagcgcacaatgccataaaatacagcaacagacaaggcatttaacactgaaaaaataaagtaaagaaatcaaacaaatagaaagcaagtaaatccaaaataaatgattgttgcaatttttaaattagatattcattttagaataatcccggtaataatgaagtttacacttacaaatttgcaattatagtttctaaatgtggagtcattactggcgagtcataaaaatctaatttttttattgcgaaaaaattggcctcttttatatttcgagtgtactaggcagtattttcggcgcgggctggcattcaatttaagttcgccctcgacttgtaggttcgattttatgactggcccaaagtcaccaatctcaatgcagagttccctgggagaagagtttacgggtctgcgggacttcagtactccggctaacccgtgtgacatggccgcatcgttcggacaatcagggaaccatcatcgacatcgactaggtccgctgtcagccagctccccatgttttcctaccattttggctccctttttgtgtttcgcaatcagaaactcatcatggcctattgatgattttttccgttgttcctttttttttgtgcattttgcctttgctacgactcccagaggataatcttcgttgtccttgatggctgtccctggacttggtaatttattggaatttaccaaaaggattaagtacgccaataagcgttgctcaacgtcaatgagcgcgtgagctccatctccattcctatctccattattttgaaacccgttttcgttctgctatcggagtgggagg

SEQ ID NO: 11927 - DNA, 879 bp, DROSOPHILA
atggagttggaacaaaacttgaccgccgccctgatgcagtcgtcggcggaggagggcaagtcggaggaggcgtggccggcggacgcccacctgcatcagccggccgaggcgaatcagctcctgttgccggagcgctccagctgcctggcggtgaagacgtttttgcgcatgtgcaacctaccatttacggagcacatcagcgacaatgcagagtttatgtcaccaggtggccggttgacccacctgccgctgctccgtttgggccctgtcaagacttttgcggaattcgagccaatagtggcccaagtggaggccgtgcaaggcggcaattgcctggacagttggatgtccgaggatcagcgcgataacatccgctgtctggttagctatgtggagaatgtcttcaccctggcggagattcatatgagttttgtggatgaggtaaactatcaactttacacggcaacgcgctgtgcagccgctcatccgtggccgttgagtacgattcgccggtttgccaagcagaaggacgcacagaagatactgaaggtctaccggtggcaggatttggacaacgaccaggtaatccaggaggtgagcatctgtgccgatgcgttgatcgctgaactggaggaggaccaggcgaagagctatttcggcggctcacgaccttgcaaattggacgccctggtctttggccatgtggtagccataatgaccaccaagcttcccaacatggaactggccgcggttctggccacatatccacgtctattggcccactgtcgccgcatcgatcagagcctgtttgatggcaaactcctgaccagcgcggtggaggagcaggaggacgagatggagttggaaaaaatagaataa

SEQ ID NO: 11928 - protein, 281 aa, DROSOPHILA
MQSSAEEGKSEEAWPADAHLHQPAEANQLLLPERSSCLAVKTFLRMCNLPFTEHISDNAEFMSPGGRLTHLPLLRLGPVKTFAEFEPIVAQVEAVQGGNCLDSWMSEDQRDNIRCLVSYVENVFTLAEIHMSFVDEVNYQLYTATRCAAAHPWPLSTIRRFAKQKDAQKILKVYRWQDLDNDQVIQEVSICADALIAELEEDQAKSYFGGSRPCKLDALVFGHVVAIMTTKLPNMELAAVLATYPRLLAHCRRIDQSLFDGKLLTSAVEEQEDEMELEKIE

SEQ ID NO: 11929 - DNA, 11961 bp, DROSOPHILA
tgagacatatggaaatcaattagctcttcagagtctaagtcctcgccttaaatgtttaatggcccatttttatgtttgcctttggctgcctaattgttagttgtttaaatatttacttagaattagttgggacccaaatgacagcgtgtcaagggtaggaaactaatgttaaaagagtttcgtttggtttttatttaatatttgcgaaggtgaattgctattcaagtgtcagtccaacacattcttcgcttctctacatatatatttgaaatatattggtataaaataatattgagtggtgtttaataatcttcgactattagcgctgttccggccaagagaatttgttccgcagttccggtcacaatatcaacatttaggtggcaaatcaatttgtcgcgactgctccgagaatataatgggagtttgggcttcgattcagcattttgcgtggaatatagcgaatttttgccgtattttgaggaactagtagtcgtatgactgacattttgtacttcgtcttttattttgtacttgatgtagaaggggttcgattttcccattccactctgggcgccatcaatctgtaatggaaaatgaatagtgccaagtttagttactaatgaaatacttagatatattccacattacatatattcacaattgctaaaaacaaaaaaaaaggcgaaaagcgggtagatgatttgcaaagtttattctccaagtcctaaaatgtatatacaaaaaaatagttatttgtttttttacagtgttagttctagcaggtacacccatcagggcatagcggatgcactccccatagtcagcttccaaaccgattatcgattggcatcgaatacgtagatatacaaacgagaagggaaagtaaaatgtaagtttgtgctcagaactgcttatcgataggcatcggacaaggtgccatctctaattccccctcttgtaccggaatgtcaatcaaatgaaaacaaaaaaagcggcgtgagaaaactgaaaagaacgggcatccagtgcacatttcaagcttaatttcgatgcattgaacggcggcggcgcaccgaaaacaggaggcgcaggattacggatacggaagctatggaaacggccagaatggagacggcgatggagacacattttatggccaaaatggggaaggtgaggaacaaagacaagaagcaaacgggcaagagggagagaagatgtcatcagtcttcgtcccaaaagataaataagtatcttttgggattttggattgggggaatcaatttggactatggatgtatgcatatctactatccaggtaatccgtaacagagtattgttactgttactactactacgtgtgcatccaattgtatctgatatagcaacctggcaaaatgtatcccaaaattatttctcaatgtttattgtatttactgtaacgcttctcgagggcttatgatatttaatggttatccccaacttaaccaatgcgccatctaccgcgaatattatagttatggcaatttcttggctgattatcctgcgattagttaaatttccttttatggcttcgaaatatattcttagtcgctaaagaagaagacatagaagacataaccccttgaatcatgagtaagtggcttgctgaatttgatttcacaacttgatgtcaaaacattatcggttaaagatactaattcttactcacctttagcggcgccagcttgagtattatgtccgaagaatcactttccaagtttgaggagccgcaagtttgcaactccaggcgttcggtggaaactgccagttttcgagactgcagcagctttaaacaggacaacaggttctcacagttaaacacctggacgaaattgatatcctctacaaaatccagatgcatttgctcccggaatcgaagttcggcagcctgggctcgaacgattagggctcttaaaaagtccacggcactgttgctgccaggtccaggccatagtttaagccaactggcaggaatctatgaatttcagtttattatgcattttcaagttacgttactgtaccccagtttcttacctgctgttctgccagagttctcagagtgctgccatccacctcctgcgactccttaagccaggcatgcatctgcgacaaagtctggtgaactatgccgtagagatccgcccctagtttcagttcagccagcacaaaaagtgcccagggagattcacccacatcagtttttgcctccttcatagtctggattatggtacacgaagccgccaactttctccatagattcagtaggggtttaatttgctgttccagcttctgacgaccagtgagctgatcgtttcccttagactctcctgctcctccagaatccttagccaagcctcttccgtaatgcaatcccctgagttcctttatcactcttttggcctgttcaatttcgcgttgctgttgtgcctgattggccaaaccatacatactgggctcatctgtgtcaggaagtttctccaatgcagcgtagtagtcctgcagttgaccgctagttggtatggatagagataatccaagaggtgaccaacgattgcttaagacgtccgctgaacaaaactggttcagataggttgtgagtatctccagatccctctgattatttactcttccgccataagcgagggcttcactgagacgttgcatcagcaaccaatcgcattttcctgaattaagttgctgatccatcattcttaggatacccagagccgcttttagatctgcctcaccgaattcatagtattttgaccaaccttgtggtataaactgtcgcctttgttgaagcacagctgttaggacaaaataaaccagtctcatcttgaggctctttggttggtttttaagcttttgatcctgttcagcagcgaagttctggagcaaacgcatcacaatctgctttagtcccttaggctgctcataacgtactttaaggcatttataaatggcagcttcggaaaatccctcggttgattcgcacaatagccacaatcgaaagtctttcgatttttgaatttcacttaattccctttccatttgagttagaaattccggcaccaaatggacattcttaacgcataaccagtggccatctatggcagcctgacgcatttcggagagaactcttttctcaacaccttttccaatagccatttctctatacttttgattggcccactttctcaattcagttgttggatcattttccgcatgactaaccatcaaaatcgggcgatcacagctgctctgctgcagcaactgctccacagaaggttgggtggaggcatctggggaaattcccagcagatcgctactcacttttcgcagttggtgaagcatcaagtcgggtcggaaaatctgagcaataagcacacgctggaagctggaccccaacgcagctgtaagttcgaaaataaatctgaataagatgaaattaactaaattatttctacaacttacgtagcacatcatccgcttgagcctcaatgaatccgcgccagatatagtccttctccaactggagcttgcttcgcaaatctgggaacaattggagtaacatagccagctttaattgcgcttccttgggcatgcagtcgggcagttttccaagctgacttagcaccatactgccatcagaactacccatgaaattgttcacaaacagctcccactccttggggtttaatctatcgggatatgcctgatgacaaacccacaaggataaggatagctggctatctctagaagtagctctagctaaattcatataaacacttcgtacaagacaatcatagaccttggactcatctcgttgacttttggaaagagcccccaaaaatagttcaatgtaaacaagaggggataattcatagccctggatgaggcctgcataaaatgttgctgccctggaactaagttctctcaaggaaccaaactgagctagtaaagtatccctaatttgtccactctgcttaagggcctcatctatttgggtactgccttgtttgatttcgtttaagctttccaaaagctgctcgttcttcagaatgtcgccctctgatttcgatagttgctccagtagtttatcttgcatttccattcgctgcttcagaagatgtccttctttttgtagcaactctatcctttgctgctccaactcgccattttttaagacaatggctttggacattaattgatcggctaagccagctgctgtgacagtgaatttcagaacattaagttgacttctttgctcttctggcaaatccaaacgatgcgatttgcttatcaaaaccaactggaaactctcgtgaagatccaccaactttgagcctatggcaagttgccgcttattgaacctcacaaaaacatgaccctgcagaagttgtagaacaggaggtcgtagttgttcgcaatcagtgaccaaaagagtctttccaaaacgaacagcaagctctagctgatagggcagcctgtcgtttccgtgtgtggtcaactcgcatggtcttccacttcctttgagatgggccattaaccacgcggcagctgtttgtgtgggatccagaagcaatggaattggacaggctccatagggcagagaaagcatttccctgagtagggcagcgctctcaatgatttgggcatcccgcgccaatccctgactctcccaaataatctgttgctgctccgtgagcagtgatccccggagatcgaaatcggagggtaaatgaaaatctgccgccagacgtttgagggaggagctgtgagtaagagaacataataacatctaaaagttaaaggagataaaagctcgccgttaacttaccatctctgttccaggcctaagcccgcacagtaattgatagctatggctattaatagagtctttgcgtccagtgttttgtgggcctttttgagctccgtcaactgaaggctccaggtggtgtattctgcactaagtttttccaccaacagctctgcagcctgcaaggttccacttgcctcttggagtttcagctccagaactgctgcttcttgtgtgtacgtctgcaatttggccgacaactgcttgactcgcttatccacatcatccagtccgctggccaactcttgcatttcatcctcagctgcattgagatttttctgcaattcattctgttccctttcgaggggcttgatgctctggatcaccctggaataacgtacactagcctgtacccaagcagccaaaggagcagctgctgcagaagcgcgcttggcgtttttggcctcgtatgaatcgcctttggccaggagcagcctttcaacagcttcacaattttcgggactaatccgagctggatccaaagatcggatgtcctccttaacacctctcttggcgagaaaagtcttcatgctgttccatgaagtatctcggatgcccattagtcggaggacgccctccaaaatatcccttacagcttccggtggagctctcagggatctgatttctgataaggcttccgatttgatttggcccactgcgttactggcctcagccaaaattggttctacttctgccagttcctgttggatttccttttgtcgaatctttaattgctcgctgctcttttgtgtttgttgtttgagttccaacatgctggacttctgttcattggcatttcgcatcgtgaaggaaatcatctctagtgcttcgttggctagttgtcgcttttcacccaaagcctgttcctgagctgctgcatttgatttgagggtatcaaccaaggcgtgggcagaggccaatttatcaactcccatttgcaatttgcccaatctctgatcgatttcattggctgcattgttatacatgtggaagtacgtacggataagttggtaatatctttgcgacgtttcctctgaaggcagttcatctgatatatctgcaaagtgactgcaagtcggtaccttgccacgtccacttcctccgccagcaatcgactcatttagcaactcaataaattgtttgggcagaatggcaatagtttctcgggattctcctctcacatagagcaaatccatctgacgatgcaaagcaggaaaattgttgaagtagtcctgcaccttggcactattgggatccaagactataataatgtggagatagtcacgggcaccttaaaagggattatattgcaatcacatctagaacagggtatttcaattgaagtgctgaagaatgtacttacgctttagaaagtatgttcccatggattcctggtatccctcgagctgtgccgcctgttttagagtgctcgccaccgtctccagatcatcgccaaaaagctctaggatctcacttccttcgagtagagcttcgatgggtttcaatatatcgggaacataacttagccaacattgctctatcagcagataactcatttgctgctccagggcagccgtctgcattgccactttaaggtcattgtagaagtcggtgagatcgtaggacggtcctccttgcagagtaaccaccttggcctcctgaaaagttgcggctgtgaatatggcatccagatgacgtccaccagattgccccaaaatgagcatgtgggcatcggttcgtgatagaacccgtgttattcgagctacgtgacttaaaagttcctccgtaatgggtgccgtgatgctgtagttttcggtatctaacggagttaaaacacaatggttttctgtagctcagccattcataatgcaattttagttagaagctttaatatttaacagaacaaatgttgtatttctaagctctcttattagacatacttgacgttgaattgctgctaaattactttttgtatagaactgattctcagacgaattgcgatgattctgtactttcagtggatgacccctgaggaggaggcgcgtcaaaagttcatcatgagggagcgggaccgcgagcggaaacggatcaagcgcatgaatcccgagtacaggcagatggaacgagagcgggatcggttccgcaagctgacacccaggcccagtgtagttatccccgattaacccaaactatcacccatttcctcctcttgtcttgaaaccgtggaattaccagcaggcaactccaactgatgcgtgagcagaacttaggctaacaatctctagataacaagcaaggatatcaaataatttgtactcactgcaaatagtaacctgccgttgaacctcttccatccattcgtcatgggttagacagtgtagatgaccccgcgactttggagatttaggcacgaaaaagaccttctgaatgaattcagtgaattagcttgattttcatttggcgaaatccaactgtgacttacctccttgccatagtatttgcgcatcgtttgcttaagtatgccctcgaattgctggacatgctcttcgctaatcaatctgtcgcgaaacatgcctaatagctcgcagtacagagcctgaaagcggacagaagttttcaatctcattagccttaaactgagaaaaatgttttatgtgaagaaatgttcggactataaatgttctagtttaagtttgatagatacaagtagtaagatttcagatttaaaagccttaatcaacttctaggagtttacaaaataatgtattttaatgaattagttttttctgtttttctcactacaaaacatacctcattaaaatcactggcaggataaaagacaagggcatccagcagcttcatgatgcatttggggctgaactggtagtgtgcctgtctgcctcccacgttggtgaacgtcgcttgcagctaaaagagggcaaagtcaattagcaggtcctgcgatgatgaattcccaaatggatagaaagtgggggtgcaaaccttctcaaagcagtccattagactctcgctgacgtgctgcaaattgaccccggaccttcctcgattttccgatcccctgaagtgctcttccaaaagaggttccaatcgccgctggacgatttctagcatgtcctggctggtgggtcgggaaactcgcacaaactgattgatggcaaagtagcgcggtgcgattttgccggtgtttccgccaatagaggcgcataattgcagaccgcttacaccaatccattcaaggttttcggcgtaaaagcctcctcgttgagctagttggaatagcagttccacaacttcgcaagctccccaggaatcctgctggcagaggtccaagttcttcatgaagagcaccagtctcgcttgctttggtcggtactctcttcccttgattccactcactgtgacgcagtgcgtcttcaatgtgtgcaaaatatacctaggagtcagttgagtagagcaattgatggtggccaactgatagccagagttctccagcacggctctttgaaggagcagggttttgcccgacccacttggaccaatgagcataaagggcggtaatcgagtgccctgagttttcagcagggtttctaaaatgtccaaataggatttcatgtacgatgttattattagctgcgatcctttttctggtgtctctattgcatccaccgcatattgctctaacgaatttctgctgctttcatagtgagtcaattcagcgtagttaggattggccacataaagattcgcgtgttttagaatcagttgggcaaactcccgctgtcgatcgttgggcatgtaaccgaaaagtgctcgaagagtggctgctccatattcctctaaagactgagtaccatgaagttgaagtagcagggagcgcagaaggtgggcccgatttataccaggcagatgactgcagaaaatgctaatttgtaactcaagaatttttaatatgaactgagcaactcacgtcaataaaagttggctttcgatccagttcacagcatattggaagttgccgtccacgtaactttgcaataggtcgccatagggttcttttgacagctcatgtttaagaatcccatcagccggatagtagtcgtaactatcatatatcggcaaagaaattacaaacagttcttcataagttaaaaatcaaaacccacctcatattgacaatacccattcttgaaatcgttgctggtgacgcatgcctcacatcatctgtttcgaaaataaagttaacattgctcccgaactgaatcctccaacccgatggcaaagttagtagcctgcgggacaaaaattttaattcaagaagttagtttcatgtggattgccctggtttcaagacaaaatgagaggagatcatactatcgcataagaccacgcttagccacacaagaacactgcccgagattcagattcagactcagatcgagacacgaccccttctgctgactgccgtttgccaaccaaccactctctctgtaatttcagctgatgacccccgaggaggaggcccgccacaagttcatcatgcgggagcgggatcgcgagaggaagcggatcaagcgcctcaatcccgagtaccggcgaatggaacgcgagcgcgatcgattccgcaagaaggcacgacgtgctaacgtagcatttttccaatattctatattatctataaacataatcccacactcgaacactcgattcacacgacacacacacacacactcacatggcttgagagattagggggtaggggcttagaagatcccaggaccgttgacacttcttgaaccctccaaaccagacaaactcccacagtttctgtgacctaaaacactatgctttaatatgttttcccccattctgtttctgtatgcgcctacagttgacccccgatgaggagctgcgactgaaaatgatccaaagggagcgggatcgagaaaggaaacgaatcaagcgaatgaatccggagtacagaaggctggagcaggaacgtgacagggataggaaaaaggctcgtagggccaacgaggccttcaggcagctggaaaagctaagggataagatccgaaaggatcgaaagaagggcttgcttgtcacggatccgacgcagctgccgccggaattcgcagccatgataccgccagtgcctgtggttaagcccgaagtaggtgtgtcaccagccccgcccccaggccagcagcaacccacgccacagctgcagcaacagcagcagcaacagttgcagcaacaccagcaggtgccacagcaacagcagcagcatcagcagcctccgcccacgcatctgcaggagcagcagttgagtcaccagctcgcgcatcagcggaaccgaatgatgtctagccaactcacccaactggccacgccccccgcccatgcctcgcacctacagcagctgaataagttgcagcaactctacccgccacgcagctttggccaccccgctttacctatcgctggtgtgacgctgatgccgcagctttgtcatcccatcctgcatcagaacctcagcgctactctgtatgcaggtccaccgaatggcatcaagcaggagtatggacaggatatctccgcctcggctatggctgctgcgcaggcggcggcactggcctcgctgaggaatccgcaacagcagcagcaacaggatgattcagaaatggtcattagtctcgaaccggagatagttctccagacaggtcccgatgtaaatcccgcccagccacctccgcagcaacagcatcttttcagcgcccatcagcaccagcagcagcaacagcagcagcagcagcagcaacatcatctgcagcagcaacagcactgcaacatgttccagcatatggcccctcaggcgcacatgcaacacatgcgctcactgccgcctccgccgccgcccccctcgctgaccttgccacccctgccgcccccgccacctacaactcaccagcaacaacagcaacctgcgccgccacagcaactgcaacatgctccgcagtgagcgattctcgcctgtagttctaagctcaaccctctagccagctaaacgcatccgaaagtttgagggcacacacacctggagttgtgatcgaattagctatgtgatttacaattccatttgcctaaatgtattacgttgccataattgctcgagtacgaaatggtatttgtaattacaaatctaacaagcattcaagcagagagctatgtggtgctgaaaatgcaatagaaactattcttattatacccgttactcgtagagtaaaaaggtatactagaatcgtttaaaagtatgtaacaggcgttttcgaccatataaagtatatatattattgatcaggatcaattgccgagttatctgaccatgtccgtctgtccgcattaacgtcgagatctgaggaactataaaagctaaaaagttgagattcagcacacacattctagggatatttttggatatttttccataatttttcattagtcttgtaaatgtctatcgatttgacaaaaaacctttttcccacgcccactctaacggcgccgaacctttcacgcccacacttttaaacaatttgtaatttttttctcattttatccctcccaatacctaacgatatcctagaaaaattatatttcgcgttcgcattcacactagctgagtaatgggtatctgatagtcgggaaactcgactatttcattctctcttgttttttttttaagaaatttttacttccaaagtgaaacttgttaggttattttttagtgtagaaagggaattatttttctcaaaacaattcagttttatcaataggacacagcaaatcttccctactttttgttcgaattatatgcaaaaacaattgccattttaaatcctatttacattgtcgtcaaaaatagtttattttgtatctttggactaaaaacacattgtgataaaatgcaccatgagctttagagcaggtgccaaaacataaaattttcctgtaattcctcattc

SEQ ID NO: 11930 - DNA, 1598 bp, DROSOPHILA
tgagaaaactgaaaagaacgggcatccagtgcacatttcaagcttaatttcgatgcattgaacggcggcggcgcaccgaaaacaggaggcgcaggattacggatacggaagctatggaaacggccagaatggagacggcgatggagacacattttatggccaaaatggggaagtggatgacccctgaggaggaggcgcgtcaaaagttcatcatgagggagcgggaccgcgagcggaaacggatcaagcgcatgaatcccgagtacaggcagatggaacgagagcgggatcggttccgcaagctgacacccaggcccagtctgatgacccccgaggaggaggcccgccacaagttcatcatgcgggagcgggatcgcgagaggaagcggatcaagcgcctcaatcccgagtaccggcgaatggaacgcgagcgcgatcgattccgcaagaaggcacgacgtgctaacttgacccccgatgaggagctgcgactgaaaatgatccaaagggagcgggatcgagaaaggaaacgaatcaagcgaatgaatccggagtacagaaggctggagcaggaacgtgacagggataggaaaaaggctcgtagggccaacgaggccttcaggcagctggaaaagctaagggataagatccgaaaggatcgaaagaagggcttgcttgtcacggatccgacgcagctgccgccggaattcgcagccatgataccgccagtgcctgtggttaagcccgaagtaggtgtgtcaccagccccgcccccaggccagcagcaacccacgccacagctgcagcaacagcagcagcaacagttgcagcaacaccagcaggtgccacagcaacagcagcagcatcagcagcctccgcccacgcatctgcaggagcagcagttgagtcaccagctcgcgcatcagcggaaccgaatgatgtctagccaactcacccaactggccacgccccccgcccatgcctcgcacctacagcagctgaataagttgcagcaactctacccgccacgcagctttggccaccccgctttacctatcgctggtgtgacgctgatgccgcagctttgtcatcccatcctgcatcagaacctcagcgctactctgtatgcaggtccaccgaatggcatcaagcaggagtatggacaggatatctccgcctcggctatggctgctgcgcaggcggcggcactggcctcgctgaggaatccgcaacagcagcagcaacaggatgattcagaaatggtcattagtctcgaaccggagatagttctccagacaggtcccgatgtaaatcccgcccagccacctccgcagcaacagcatcttttcagcgcccatcagcaccagcagcagcaacagcagcagcagcagcagcaacatcatctgcagcagcaacagcactgcaacatgttccagcatatggcccctcaggcgcacatgcaacacatgcgctcactgccgcctccgccgccgcccccctcgctgaccttgccacccctgccgcccccgccacctacaactcaccagcaacaacagcaacctgcgccgccacagcaactgcaacatgctccgcagtga

SEQ ID NO: 11931 - protein, 494 aa, DROSOPHILA
METARMETAMETHFMAKMGKWMTPEEEARQKFIMRERDRERKRIKRMNPEYRQMERERDRFRKLTPRPSLMTPEEEARHKFIMRERDRERKRIKRLNPEYRRMERERDRFRKKARRANLTPDEELRLKMIQRERDRERKRIKRMNPEYRRLEQERDRDRKKARRANEAFRQLEKLRDKIRKDRKKGLLVTDPTQLPPEFAAMIPPVPVVKPEVGVSPAPPPGQQQPTPQLQQQQQQQLQQHQQVPQQQQQHQQPPPTHLQEQQLSHQLAHQRNRMMSSQLTQLATPPAHASHLQQLNKLQQLYPPRSFGHPALPIAGVTLMPQLCHPILHQNLSATLYAGPPNGIKQEYGQDISASAMAAAQAAALASLRNPQQQQQQDDSEMVISLEPEIVLQTGPDVNPAQPPPQQQHLFSAHQHQQQQQQQQQQQHHLQQQQHCNMFQHMAPQAHMQHMRSLPPPPPPPSLTLPPLPPPPPTTHQQQQQPAPPQQLQHAPQ

SEQ ID NO: 11932 - DNA, 5045 bp, DROSOPHILA
aatcaattagcatgaacgtgtcaaagcatcaacactcacacacttaaacacacacccaagtattggccaacagtatgcgacggcagcagcagcagcagcaacaacaacaacaaacataaacgtaacgaattgatacacatttgaactatacacatagtttagttttctattagcggacatgtgtactcgttacctcgtattaaccccttgccgcccactgtgccgcgcgactatttttggttggctttcagttgttacttttttctagaccaatgattgtccttttttcggttttcgtttgtttctctgggcaaattttttgactgcctcgaaacgtttgttgtggtgctaagtgttggatattttccctttcgtattgaaaatcatcaaaatcaaaaaggatacatacatacatatgtatataaagcaatcgatcgttcgcgggcacagtgctaaaaccgaactaacaaatccaaaaatatactcaactgctgtgccgatataactgcgcctctttcaaaaagataatatgctaaaccttcgccaaaaacaaacaaaaataaaccacaaagcgccagcgtaacttgaaattttcattttgattggatgtgtcgccaaagccaaagccaccaagccaccacaaaaagaaaagaaaaaaaaaagaaaaccaccaagacaaaactcgttccaccaccaccaccaccaccaaatgccacccacactatttaccacagcaacagtaatcctacaccacaaccgccaacaacaacaacaaaaatcgggaaaattatatatataacaaataataccaaagcaacgtcgagcataaagttaaattaaaaaggagcaatttaggatatgagaagataagttaggatagttcggatggtttaggaatttaaacaaataaataaattttacaatatttcattgcgtttcttgttaaactgacatcatagcagtaggctttaagaataatgtagtatattatagtagcttgtctcatattcgcataagtcatttctagttaatgtttcgacaaaacaatacccaaaattttgtgtgtgattgtgagtgtccgtaaaaatgtacaacaaatttgttaatttcatgtaagttccgccacgattactttcagtttttcactgttttcgtttacaatacttttaattttcgaacgccgggcggcaatgggttaagcctacacctacacctacactaaaccgaaccgaaacaaatccgaatccgaagcaaatccttgaacaaattgctcctttttcataatgcaacaaactatacagacctgaatcaatcagaatcacaatatcagtccaaaattcaaaaatcatccactaaaaattgccaatgttgtaaaagcctcttcatcttgttgtcccttcttcctgcagttgcggtggcctgccgaatctcaatctcaacaagccgccccagctccaccagcaacagcatcaacaacagcatcagcagcaccagcaacatcaacagcagcaacagctccatcagcaccaacagcaactgtcgccgaatctgagtgccctgcaccatcatcaccagcagcagcagcagcttcgggaaagcggaggatcacatagcccctcgtcgccgggtggaggaggcggaggatcgccgtacaacggctctcaggcgggctgcagcagcggcggcatctcgcccattcctccccagatgggcgtgtcgcccaaataccgtcgcagcatatcctttcccatcaagggcaactcgcccacagctatctatggcaatatgcacatggacggcatgggtagtgggcacatgaatataccgacactttcgattggaaacggtggtggtggcggatctactggcatggtctcagccggagcaactggtggcggagatgcgccctatttgggcaacagctatggcaacatgatgacgtccaatggacaaatgcaccacggtggcggcttggataactcactgtgcgattatatgcgcaacatgtcgctgggtggaaatggtggtggcgatggcagcaacagcatgtctttaatgcaggacaggatgcgtgtgatgggcggtccgaagcatctgagcgaggccgatgctatggccatagcagccagtggaaatgatccatccgtctacttaaatgccctcaaaatgggttcgccatcgaggctctctccacactcgccgcactcacccatccagggcggaaatggaggaaacgtcggcgatggcacggctcgcttctcccggaaggtattcgttggcggtctgccaccggacatcgatgaggatgagattaccacttcgtttcggcgcttcgggccattggtcgtcgattggccacacaaggcggaatccaagtcgtattttccgcccaagggatatgccttcctgctgttccaggacgagagcagtgtgcagcagctaattgactcgtgcatcacggatgaggacaagctgtatctatgcgtttcttcgccgacgatcaaggataaggcagtgcagattcgtccttggcgcctggccgatgcggactatgtgcttgatgctaccatgtcactggacccacgcaaaacggtgtttgtgggcggcgtgccacgtcctctgaaggccttcgaactggcaatgatcatggatagattgtacggtggagtatgctatgctggaattgacaccgatccggaattaaagtatccaaagggcgctggacgtgtggccttctcgaatcagcagagctacatagcggccatctcagccagatttgtgcagctgcagcatggcgatatagacaagcgggtggaggtcaagccctatgtcctggacgatcagatgtgcgacgagtgcgagggtcagcgttgtggtggcaagtttgcgcccttcttttgcgccaatgtcacctgtctgcagtactattgcgaacactgttgggccgtcatccattcgcgacctggacgcgaatatcacaagccgctggtcaaggagggagccgaccggccgcgtgcggtcccctttcgctggtgttaacggcggcgctggtaggccgcgctgcacgacgagagacgccaacagagggagcaacgacaccggttgttaaacgcagcgctggcagtgcccagaatcataacagaatcatcaggatcgggaggagtcgcagaaggagcgggagtggcagcactagatgccgctggcggagatgcggatcgaaggcgaagaatctagtagataaccattagagacaacacacgcaccaccaacacccactcacacacaacagtcggatactattctcataagcaaaagacaattgcccgggggaatcacccattccgaagggcaaggtgcaaatacaacgggagctggacaaaggtgtccctttgaatagccaccagagtctacagttttagaggcgagaaacgaaagcaacatagtttttagttcttatttattcggcaatcagttttttttttttgtttcgcgcttgctagttttacatttgcttaaccgaaattttagttttgattttgcgttcgatgcctgcacagtattttttgtactttatatttttagcaacatttatgtttgctaatatgttatttaatctcacaaaagaaaaaaaaaaggaaccctcgtagtcagccaatttcctcgcaaagggccgtttacatatattataatctttttgtaactagataacttagtagccatcatcttgtatgccaatcgaggctagtcctaaaattattagtgagctgctcaccctctctcgaaaaggctttttgcttgagtgtgcaggggctgtccttaagttcctaaattgtgacaaaatcaaaactacatcggtttttgtattagccctttccgaaattagatcaatttataaaattcttacaaaagactttagaaaagacaatatgcaaaatgtctgacatttgtatgctagccatttcttacgacacaattggtaagagatcgcttaatcatatcatatctgcatacagttataatccctatttatttttgtttaatccttacataatacggtctattagcattcccactgaagaatcgtatatattatctgtgcaatatattcgattgcttctccgttacatgctgctaattcttgcttatctaacacttatataattattgtatgtgaaaatcgtacaaagcttataaaacacacaaaaccaataggtggcgattgcttccccgttacatgctacttattcctgcttatctaattatataattagggtatgtgaaaatcgtacaaagcttatacacttactaaacgattcttaacttgttaccactcctgccaataggtggctttcactacgattttcacacgactccgttttatgttttgctggcacattgaaatcacactaattaatgagtttaaaccccacactctgagataggttcttctttcctaatattgatggctcatttttaattataatctagtccacactcatacatacacgtacgtacacagacaacaacaacaacacatttacactgaaagtctgtttgcatttgttgccatttggcttaatgaagaaaaaataataataaaaatatacatataattagaactaaaatgtagaaaaaaacaaaacagtcaaattgcttgtgttcagtattatgatttatttatgattttccactgaaatgtcatattttgtttatttattaaccaattgtttttgttatttaatttacggcgtgttgctaactaagggacagcgggctcacctcccgaagctatagaagaacgtatatattattgcaaatatataaatatatctgtaatgtaaaaagtaatttttatatacgacatacatctattaacactatgaatacttgtattagacaactttttatatagaaacttttgtataaacttttttttattactcttatgattattcagaagttagtttagtccaaacaactgaatacaaaaataaaaccaaaaacgcgaagataaatagacatgctaaaacatttaaagaaaattt

SEQ ID NO: 11933 - DNA, 2748 bp, DROSOPHILA
tctcatattcgcataagtcatttctagttaatgtttcgacaaaacaatacccaaaattttgtgtgtgattgtgagtgtccgtaaaaatgtacaacaaatttgttaatttcatttgcggtggcctgccgaatctcaatctcaacaagccgccccagctccaccagcaacagcatcaacaacagcatcagcagcaccagcaacatcaacagcagcaacagctccatcagcaccaacagcaactgtcgccgaatctgagtgccctgcaccatcatcaccagcagcagcagcagcttcgggaaagcggaggatcacatagcccctcgtcgccgggtggaggaggcggaggatcgccgtacaacggctctcaggcgggctgcagcagcggcggcatctcgcccattcctccccagatgggcgtgtcgcccaaataccgtcgcagcatatcctttcccatcaagggcaactcgcccacagctatctatggcaatatgcacatggacggcatgggtagtgggcacatgaatataccgacactttcgattggaaacggtggtggtggcggatctactggcatggtctcagccggagcaactggtggcggagatgcgccctatttgggcaacagctatggcaacatgatgacgtccaatggacaaatgcaccacggtggcggcttggataactcactgtgcgattatatgcgcaacatgtcgctgggtggaaatggtggtggcgatggcagcaacagcatgtctttaatgcaggacaggatgcgtgtgatgggcggtccgaagcatctgagcgaggccgatgctatggccatagcagccagtggaaatgatccatccgtctacttaaatgccctcaaaatgggttcgccatcgaggctctctccacactcgccgcactcacccatccagggcggaaatggaggaaacgtcggcgatggcacggctcgcttctcccggaaggtattcgttggcggtctgccaccggacatcgatgaggatgagattaccacttcgtttcggcgcttcgggccattggtcgtcgattggccacacaaggcggaatccaagtcgtattttccgcccaagggatatgccttcctgctgttccaggacgagagcagtgtgcagcagctaattgactcgtgcatcacggatgaggacaagctgtatctatgcgtttcttcgccgacgatcaaggataaggcagtgcagattcgtccttggcgcctggccgatgcggactatgtgcttgatgctaccatgtcactggacccacgcaaaacggtgtttgtgggcggcgtgccacgtcctctgaaggccttcgaactggcaatgatcatggatagattgtacggtggagtatgctatgctggaattgacaccgatccggaattaaagtatccaaagggcgctggacgtgtggccttctcgaatcagcagagctacatagcggccatctcagccagatttgtgcagctgcagcatggcgatatagacaagcgggtggaggtcaagccctatgtcctggacgatcagatgtgcgacgagtgcgagggtcagcgttgtggtggcaagtttgcgcccttcttttgcgccaatgtcacctgtctgcagtactattgcgaacactgttgggccgtcatccattcgcgacctggacgcgaatatcacaagccgctggtcaaggagggagccgaccggccgcgtgcggtcccctttcgctggtgttaacggcggcgctggtaggccgcgctgcacgacgagagacgccaacagagggagcaacgacaccggttgttaaacgcagcgctggcagtgcccagaatcataacagaatcatcaggatcgggaggagtcgcagaaggagcgggagtggcagcactagatgccgctggcggagatgcggatcgaaggcgaagaatctagtagataaccattagagacaacacacgcaccaccaacacccactcacacacaacagtcggatactattctcataagcaaaagacaattgcccgggggaatcacccattccgaagggcaaggtgcaaatacaacgggagctggacaaaggtgtccctttgaatagccaccagagtctacagttttagaggcgagaaacgaaagcaacatagtttttagttcttatttattcggcaatcagttttttttttttgtttcgcgcttgctagttttacatttgcttaaccgaaattttagttttgattttgcgttcgatgcctgcacagtattttttgtactttatatttttagcaacatttatgtttgctaatatgttatttaatctcacaaaagaaaaaaaaaaggaaccctcgtagtcagccaatttcctcgcaaagggccgtttacatatattataatctttttgtaactagataacttagtagccatcatcttgtatgccaatcgaggctagtcctaaaattattagtgagctgctcaccctctctcgaaaaggctttttgcttgagtgtgcaggggctgtccttaagttcctaaattgtgacaaaatcaaaactacatcggtttttgtattagccctttccgaaattagatcaatttataaaattcttacaaaagactttagaaaagacaatatgcaaaatgtctgacatttgtatgctagccatttcttacgacacaattggtaagagatcgcttaatcatatcatatctgcatacagttataatccctatttatttttgtttaatcctt

SEQ ID NO: 11934 - protein, 551 aa, DROSOPHILA
MYNKFVNFICGGLPNLNLNKPPQLHQQQHQQQHQQHQQHQQQQQLHQHQQQLSPNLSALHHHHQQQQQLRESGGSHSPSSPGGGGGGSPYNGSQAGCSSGGISPIPPQMGVSPKYRRSISFPIKGNSPTAIYGNMHMDGMGSGHMNIPTLSIGNGGGGGSTGMVSAGATGGGDAPYLGNSYGNMMTSNGQMHHGGGLDNSLCDYMRNMSLGGNGGGDGSNSMSLMQDRMRVMGGPKHLSEADAMAIAASGNDPSVYLNALKMGSPSRLSPHSPHSPIQGGNGGNVGDGTARFSRKVFVGGLPPDIDEDEITTSFRRFGPLVVDWPHKAESKSYFPPKGYAFLLFQDESSVQQLIDSCITDEDKLYLCVSSPTIKDKAVQIRPWRLADADYVLDATMSLDPRKTVFVGGVPRPLKAFELAMIMDRLYGGVCYAGIDTDPELKYPKGAGRVAFSNQQSYIAAISARFVQLQHGDIDKRVEVKPYVLDDQMCDECEGQRCGGKFAPFFCANVTCLQYYCEHCWAVIHSRPGREYHKPLVKEGADRPRAVPFRWC

SEQ ID NO: 11935 - DNA, 4126 bp, DROSOPHILA
ggagcataatgatattgagctgtacattgattcgaatagccgaagcagcggcgatttggcggacaccgaactggaggcaaatctgcgccgacactcccgaaactttaccctgtctcccgagacgacggattacgattcgaattgcggtgatttggacagtctgtctaacgacattaactgccccacggattttggtaaactgtatacgagcatgcctgtcctagaagatggcctgagcagtggccacgcctccgacacggagaacaacgtatccgtggtgtgtgacaagcagcaatcgtcccaatctcagcccgtccacgagcacaacggtaatggcgagcggctggagaacgactacaatgtgatgagcgccagcttggccacattgaccacagatgcctcgcaatcggcgctgataagcgacttcgcctcactgcccatgcccccggctccgcctccatcatcgccgccccaaatcgagatcgccgatgcaagtgaatccatgaccatggtcccagatgctgataatccactggacagtcactacggtgcggtttatgcagcagctttgggaggtactcacacagagaagtcagcgggatcaggactgggggtgacaccagtaactgcgggaggatctttgccatcgcaggctgcttcggaaatccaggaggccatgaaggagatacgttccgccttgcagcgtgctaaaacgcagcctgaaaaactaaaattctgtgacgaagtgctgcccacggatccagattcaccggtttgggttccacgcaaagggacgacgatctcgacggcccaaggtgcggcggcggatgaggaaccagacaccgaccttgaaacagatcgtctattgggtcagcagaggcacgatgagcaggatttcttcgccgatcaggtgaggaatgcaaacttacagagatatcagctcaaaataattacgaaataataattttacagagcctggctgataacaatgccaatgagggcacggatattgccagcaatgggcatctaaatggcacgtcggacaacaacaatccgaatcctatgaataatagcaagccgcaaacctactcgacggccaccattcgacaaggcatcggcacctcgttgacacccaattcgccggacatctgtcagattgtgggcacgaccgacatctccataagctcgccggaaaaactgcagttcaccaaaagtcccacgggctctattaaatccctgaaggactctgccaactcggacaagaaggccaaatcgcggaacaaagagggtaagttagcacagttgtcaacgccccttgttgttcgtttactgatatggaaaccgattcaacatttcacgctgcaattcaaatctatttaatgctgacatcacgtaagtctctgttacccagcagatgtttaggtttattaaactacccttatgtgtattaacaatcagaaatgaagaccattaacgcacttcgtaactaatttaaataatgttcgttcttaggtctcttggaacccaaagttctcattgagggcgtgttgtttcgggccagataccttggatccactcaacttgtctgcgagggtcagccgaccaagtcgaccagaatgatgcaggccgaggaggccgtttccaggatcaaggtaagtgaagtgaaaacctggtgatgcacacgaaagcacatccattcaaggaaaccccgctaggttatgctctatgtgtgtgtctaaaaactttctcgttcgcttttctcgttccctgctgcgcattcctctcgataggctttggtaagcgttcgttagcccctttcagtcgtcaaatgatagcattaagaattaaatgcattatataatatatgatttgctatttttttaccaggctcccgagggcgaaagtcagccgagcactgaagtggacctgttcatatcaaccgaaaagataatggtgcttaacacggatctcaaggagatcatgatggaccatgcgctgcgtactatatcctatatagctgacattggcgatctggttgtgctgatggctcgtcgtcgattcgtaccgaatagtgttgtggatccatcgatcaccagtccattaggtgatgttcccactccgggcataggcgaggaggagtcgccccccaaagagccactcagcaagcacaatcgcacgcccaaaatgatctgccacgtgttcgaaagcgatgaggcgcagttcatagctcagtccattggacaggccttccaggtacgcgaatattaataatattattggcacgtataattaacaatcaaaacctaaccaggtggcctacatggagttcctgaaggcgaacggcatcgaaaacgagagtctggccaaagagatggactaccaggaggtgctcaacagtcaggagattttcggtgatgagctggagatctttgccaaaaaggagctgcaaaaggaggtagttgtgccgaaggcgaaaggcgagatcctaggcgtggtgatcgtagagagtggctggggatccatgctgcccaccgtggtgattgccaacctgatgagttcaggagcagctgcccgctgcggccagctgaacatcggtgaccagctgatcgccattaacggcatgagcctggtgggactgccgctgtccacctgccagagctacatacgcaatgccaagaaccaaactgccgtcaagttcaccgttgtgccctgtccgcctgtcgtcgaggttaagatcctgcgtcccaaggcgctgttccagttgggttttagtgttcaaaatggcgtggtaattataaaatgctgaatttattcttcttattctaatccttctaatcatatgtatttatttaatgcagatctgcagtcttttgcgtggaggaatcgctgagcggggtggagtacgcgtaggccaccgcatcattgagattaacaaccagagcgttgtggccgtgccacacgataccattgtcaagctgttgtcatcctcagtgggcgaggtatgacgcgtttttaaattcgttattcttatattaacaatacctttccaatcagatcctgatgaagacaatgcccacgtccatgtttcgtttgctcaccggtcaagagacgccaatctatatataaatatatatgcaactgttcacacgcctacgctggaatcgaaaaactataaattcgtcaactgcaacttgaccagcttaaagttacatcgattcgcaaagagaccttaaattggaatttgtttagtcttaaattgttcattgattatttgtctttatgtattcacattgcaagcataattgtagttaatttaaatgaattgcaaatgtattaagtctacaatgagattaattgttcgtcgtcaaatcgttcaggtgtccacagcgaccacaactgcaatagagagattactattactggagttacagaaaatgctactttttggttcattttgtccatctgtgtacatgaaaaagactgaatttaaagccagtgcgagtgtatgtgagcagtcattgtaaagtatttaaaaaattgtaaacgcattgtcccgaaaataccaaccttcccaaattccctcgcatccattagcttaagcattcgattgaatttacttgcaagcaaatttttatgatatgatctaatccattatttgtcatgtaaattaaccgtattttagttcattaactacatttataattttcgataaaaagaaacaaaaagcaacacaccttatgccaaaaaagattagatttcgttaaacttattattgtatagagccattgcggataattattgcaataccattaccgatatttattattaaaaatagccttagaaaaacgaagccatgcctgcaaaaaccaacaaaacaacaaacaaaataaatgcatttaaaagcgtcagaaaaacataaaacgaagcgcatattgattctaattgtatatgtaatgtttgtacaagaaatctgcacatttctcgatcgattattgccatatacataacgatatatactcgtacgataattatgatatatctaaagcgaaaacaataagcaaaacagcaaaagtaatacgaagaacaataatttcagcattgtctagtttctgttaagcaaaggcat

SEQ ID NO: 11936 - DNA, 1484 bp, DROSOPHILA
gcacggatattgccagcaatgggcatctaaatggcacgtcggacaacaacaatccgaatcctatgaataatagcaagccgcaaacctactcgacggccaccattcgacaaggcatcggcacctcgttgacacccaattcgccggacatctgtcagattgtgggcacgaccgacatctccataagctcgccggaaaaactgcagttcaccaaaagtcccacgggctctattaaatccctgaaggactctgccaactcggacaagaaggccaaatcgcggaacaaagagggtctcttggaacccaaagttctcattgagggcgtgttgtttcgggccagataccttggatccactcaacttgtctgcgagggtcagccgaccaagtcgaccagaatgatgcaggccgaggaggccgtttccaggatcaaggctcccgagggcgaaagtcagccgagcactgaagtggacctgttcatatcaaccgaaaagataatggtgcttaacacggatctcaaggagatcatgatggaccatgcgctgcgtactatatcctatatagctgacattggcgatctggttgtgctgatggctcgtcgtcgattcgtaccgaatagtgttgtggatccatcgatcaccagtccattaggtgatgttcccactccgggcataggcgaggaggagtcgccccccaaagagccactcagcaagcacaatcgcacgcccaaaatgatctgccacgtgttcgaaagcgatgaggcgcagttcatagctcagtccattggacaggccttccaggtggcctacatggagttcctgaaggcgaacggcatcgaaaacgagagtctggccaaagagatggactaccaggaggtgctcaacagtcaggagattttcggtgatgagctggagatctttgccaaaaaggagctgcaaaaggaggtagttgtgccgaaggcgaaaggcgagatcctaggcgtggtgatcgtagagagtggctggggatccatgctgcccaccgtggtgattgccaacctgatgagttcaggagcagctgcccgctgcggccagctgaacatcggtgaccagctgatcgccattaacggcatgagcctggtgggactgccgctgtccacctgccagagctacatacgcaatgccaagaaccaaactgccgtcaagttcaccgttgtgccctgtccgcctgtcgtcgaggttaagatcctgcgtcccaaggcgctgttccagttgggttttagtgttcaaaatggcgtgatctgcagtcttttgcgtggaggaatcgctgagcggggtggagtacgcgtaggccaccgcatcattgagattaacaaccagagcgttgtggccgtgccacacgataccattgtcaagctgttgtcatcctcagtgggcgagatcctgatgaagacaatgcccacgtccatgtttcgtttgctcaccggtcaagagacgccaatctatatataa

SEQ ID NO: 11937 - protein, 473 aa, DROSOPHILA
MNNSKPQTYSTATIRQGIGTSLTPNSPDICQIVGTTDISISSPEKLQFTKSPTGSIKSLKDSANSDKKAKSRNKEGLLEPKVLIEGVLFRARYLGSTQLVCEGQPTKSTRMMQAEEAVSRIKAPEGESQPSTEVDLFISTEKIMVLNTDLKEIMMDHALRTISYIADIGDLVVLMARRRFVPNSVVDPSITSPLGDVPTPGIGEEESPPKEPLSKHNRTPKMICHVFESDEAQFIAQSIGQAFQVAYMEFLKANGIENESLAKEMDYQEVLNSQEIFGDELEIFAKKELQKEVVVPKAKGEILGVVIVESGWGSMLPTVVIANLMSSGAAARCGQLNIGDQLIAINGMSLVGLPLSTCQSYIRNAKNQTAVKFTVVPCPPVVEVKILRPKALFQLGFSVQNGVICSLLRGGIAERGGVRVGHRIIEINNQSVVAVPHDTIVKLLSSSVGEILMKTMPTSMFRLLTGQETPIYI

SEQ ID NO: 11938 - DNA, 7370 bp, DROSOPHILA
tggaagttgtcagacggttgacagtgggcagactggatcccccagcggaagtgggcgactcgtagtcgtgactgaaagatcaagaacttgcagacatccacatatccgctggaggaagagaaccagagcactcagacatccgcgggcgttccaacttgtcagttaggtgacttgtccaaatcacaatcatctagcggcccaaattgaaaagcaccaaaatcggcactcttttttgctaaccaaaccataatttcagcaagtttgttaaacctctaatcgatgatctgagaaaagttcgatcccttgagattctttgctttcaattaatatcctaaccatcgattgcagacccttttggtccgtttggctggctccaaagtccaaagctcgtccctgggtcccagccacctgcccgtcaattaatggcctccgactccgtcttcgtcttagtctccgtctggcggaggcatgcaataccaaattcatcttattatcccacacagaacccagaaactggttctcaggttctgtttctgtttctgctacccattccggcctggaaatcacgtttctgaacatttctgtgccatgtccagtctctcggcctacccgaaaaaaaaaaaaacaaagtatatcggaggcgaaaaccaacgcagacagaaaatgatttgcagttcattaagacgaaaccccccgatccaaaaggagccagagactagacgatgactaagacctcgatggaggtgcctttgtggcgcatgtgaatgaaattggttttggtttgagtcccgacacgatcggaggacaacgttcacaagctggacagcaagtaggcttcaaaaggcggagctgcactgagaaaaaatatgcgtaaactctcaagcaatcttttgtttgccccttttgaactttcatttcacaattttcacagcaaatttgggtattttgcttcaggctttctatcaggttaatagcataatttcttcaagtgcactccccaatggaaatttttcaaagtgtgcgcaccaatccaggctgatcttgacatgataattatgtctggatcgggtggtaatgctatccacttgataagtctgacaattccttggcataggtccacaacgaggaggggtttttgtgcctaggagcagcacctcgttggctctaaatctgtggccatttgaacgctttcatcttgggatggcccacacatgtgaccaatgaaaactaacgcctttgctttggggtctgatcaactttgacgaacgccgttcgaaatgtgcacagagagaaaagccatacacattattacaaattttacagtttatcagtctaatacagaattaaatactcttaggcaattgattgcaaagcaaccccaacataatattttctctgcatattaactttcatcgttgataagtctgaactctattggcatacatttactttcttgcagcagcaccgccaggagtcgcagtcgccagattaccaccatcgctatgcgagcaatggcaaactgccccgggcggcggcactgtctaccaatggcaatggatttaccaccggcaccacgcaaacggtcacagtggatgtgcatcaccagctcggcggaggaggaggaggtgctgccgccgcggccaagcagttgatggccaacggcatcagtggccatagtcgcagcagcagcatgagccacaacatccatgcggcagcctacagcgaactgagtgccgcaccaccggccttcgccacaccgccgacgcgtaggcggttctttaaccacaagaatctgcgcagtgccctcactggaggaagtggcggtggatcgggagtcggcggtggtgtaggaggagctggcggtgtgggcggcggtcatcgacgcactgcctccaatgggggttgtcccattgacacagcatcgatcctgtcgggaggtaagtttagaatgaagttcaagtgtgggtcaggttgaaaaggtgacactaaaagcttgaaaagcagtgggaaaagccaatgtcagacctggaaaggatgggcattcccataatctaaagatcacctcatttatataaaaagcttaggagcacaaaacaatctcgataaagaaattctcacccagcgcatctatcactagatcatactcatcagcatcatcaccgcgacaatcagccggagggcaaggagtccaatgcccttaacacatccacctgctcggactcggcggtcactaggaggcggaggaagaacgtgagcaatcacaacctgaagacctctgcccgccatggagcaagtagcgagaatcgtctgaacaggctcagtttggccggaacgtccgtctatgcgggtcatctgtcctctttggtctttggcaagatcaagtccctgtggagcgtgaactcctccaattccagcgaggcgggactgaatcaattagcaggcatggatccgatcctcttacgtgcatcctcataatttcgacgtttctgtttgcacgctgcatcctcgttgtcgatcatcattaatccagtttttgttctaactcttttaaagattttgcatgttttgtatttcaacttaaataatttcctaattccacacatctaatatttatttcgttgtctttcttctcaaaggaagcgacgctattgaccaccactcctccttcctgaatgagaaactgcagaaggatcagctccacgcccgtctcggtctgctgctcaacgatcccggcagcaatggaaacagcagcagcagcggaagtggttgtgaacccatctcggcccattccaccaccagcaccacgagcagcagcggcgtgggagcggccagcaccaccacgagcggttcctcgcagaatgtcagtccggagcaaacgctggccagcggagccggaatgctcagtggcagtcagctgtcggtggccaccagtcatggggtcaaggaggatgcactgagtctgtgcggcaagttcaaggctggctgctccatgctgcacgtctacgaagcattgcccagcaagagtcgcaaaggaaatgtacggagatcgacgcgtggtcagcagggatccagttcgagcgcatcggcggcatcagcagtgggatccagggtgacagcctccagtttggcggctgtgcagttggccctgaagccactgttctttgaggtgccgctgcaggaaccggatccaccatatgtgggtcgccagtggctggtgcagcagttgtccaacatcctgcttggcaccgagacacgggtggtgctcattaacggacagccgggcactggaaagacggcgttttgtctgcagctggtggagtactcctgctttggccgccggcagatgcaggatgatcccgatggcatatacagtcagctacagttgggcgcccactgtgagcgcatgcgcggactggcctcccacatggttggctatcacttctgccaggcggacgccaatctcacctgccaggtgcccgatttcgtgcattctctggccgcccaactgtgtcaggcgccgcagttaaccgcctacagggattacctgctctcggagccgcatcttcaggacattctcagtgtgcgagagtgcatcgcggatgcggagagagtaatgaagctggctatactggaaccactggctcaccttcaccgggcgggaaagatacccgccaaagtggccgtcatcgtggtggatgccttgtgcgaagcggagtaccatcgtcccgatcatggtcacaccattgctagtttcttggcacagcttacgccacattttccagcttggctcaagctggtggccactgtgaggacccagatgttggagctggtgaaggcacccagctacacacaacttaccctggacagttgggccagcagccaggcgttgcagcaggatatgcttgattacataggcgctcggcttgcagatagtccggaaattcgaatgaacatcggcggcggaggaggccagaactcgcagtcgggcagccagccgcagacgaagttcgtgtcccatcttcagtccctgagcaggggctccatgctgtacgctaagctcatcctggatctcattgcacgcggccagttggttatcaagtcatccagctacaaggtgctgccggtctctcttgctcagatctttctgctgcacttcaacctgcgctttcccaccgcccgtagctttgagcaggctgctccgatcctcaatatatgcctggctgctctgtatcctctgacgctggacgagatctactacagtatggaggcactgagtcacggacgggaggcactaagctggccggacttcatgcaacgctttaagctgctggatggatttttaatcaagaggttggacaacacgtacatgttctttcatagctccttgagggagtggctcatgcgaagggatgagggggagtccaacaagttcctctgcgacgcccgtttgggtcatgctggaatcgctttccgattatcccgactgcaggctccattgtcacctcagctcacattggaactgggtcaccacatgctgaaagcacatttatacggaggaactagtctgacgctgctttctccgcgggatttgcaatcttattggttggcgggagcggcggataacatttcatcctcgctgggcgccctgcgaaatgtctacagtccgaacctaaaggtttcccgactagttctcttggcaggagcttcaccgaatcaccgcacggattacatgggtggagctccgatcctttgcatagctgcgcatgagggaatccttcccatggttagcctgctcctagaattcggtgccgatgtcggtctgaccaacagccagggctgtactccattaatactggccgccatgcgtggccactgcgacgtagtgcgtccattggtagccgccggcagcagcctcggtcagttggacatcacgcagcgctgtgccctagttcatgccgcccgcatgggtcacctcagtgtggtcaagtacttgctcgcctgcgactggtcaccacgaccgcactcccaagatgtcaccagatcggttgccttgcaacaggcgctcattggagctgccgcacaggcgcactgcaagatccttgaggatcttctggatctcaatgagaccgagtttgacctggacgtgaatggcatggagccaagcagtggtgaactggcgctaaccgccgccgcacggcacggatgcattgatgttgtaggaatcttgctctcccgtggcgctcagatcgatgcaagaaatcggcagggatactcggcgctttggttggctgtcaaggagggtcactggagtgtggtggagcatctgctgcaacgtggtgccctgttggatgaaccattgggacagacacgcaagacgccgctaatgattgcggcggaggagggacacctggagctggtcgatctgctgctggcgcggggagcgcaacgagaagctcaggatcacgagggattcactgcactcagctgggcctgtttacgtggccacttggcggcggccaagacgctcatagaacatggctgtaatcgccaccacgaggatcacaatggacgcacagccctggatctggcagcctatcagggagccgctagcctggtgatctatatcctggagcagggcggcaatctggaacacattgatgttcatggaatgcgtcccctggatcgggccattgcctgccgtaacatccaggccgtacaggtgttcctgcgcaagggggccaaactgggaccgaccacttggagcatggccatgggcaagccggagattctggtcatactactgaacaagctgctcgaggacggtaatgtgctgtaccggaaaaaccgcttccaggaggctgctcatcgctatcagtatgccctacgcaagatctccggactggagcagttgctcgaaaggaatgccatcttcgcccagctgcggaccaatcttctgctgaatctgtcgcgctgcaagcgaaaactgaatgtaagtacccaaaaatatgagttgacatctggatatttgactaaccatatctgtaattcgcaggaacttgacgcctccatagatttggccacgcaagcgattgcccagaagccgcacagctacgaaggatactacgccagggcaaaggcgcgcatggaacttggtgcattgaatgaagcacttgtggacgccaatgaggcgatgcagcaggccgcccaaagcggtgtgctctgcgaagtggtcgaggtgctgaagcgcatccagaccgagctgctcacgcggatcagcatcagcagcgaggatcagaccggcaggatgtcgaatatcggcggcggggcatccgtcgcatacgaatctcatcatgagatcaccgatttgtaaatgtcgattgttgtgtattgttgtactcgtcgtatacccttcgaattaatcgctattcctacttaagagctaccctagaccttaatttttgctatttattgccttcgaatgtttttaatttaaaccaactgaaactatcattgtaatttgtttttaaattttctttttaattgtgtctgcgcatgtaaaaattagttttatactctgatttagcataggcatcagttcttatccataacgaatattaaataaatgcgaattcttttaagatttaataaacacattattattttgatattcgatgcagacttttgggggtaggctcgggcactctgggctaagattataaaacattctttaacttattagtgcatagttttgagctgtttttaaataaaacattgttgaacaacggcaagggagttgaaataactgggaaacattttaacgtttgcagaatatattacaaattttcacatttaagagtatttaaatttatgaacaaaatttaaaacaattatgtgaacttatatatatgtgtgtgtatgtacaattaaagcttaaacatttcgggggagaataaaacataggaatgaaatagtttgaaatgaaatgtgggcgtatttaagattaataaataggaagtttagagagctttaaatgctaatttgtatactagcatgagagtgaactttccataaataagttgtgtgttccaacgtatacttaagtacatataaaattaacaatggtagttctcttttatctacgaagattttccattaagtttactcagttcagttggttcgccactatcgccatgtaccaagcgggactcgacgagcggtgctgaaatctgcaaatgcagaacgtagtcggcagctggaagaacaaagtttcagttacgccaagagcttaaagtgggaagactacatggaaataaataaatagaaatgtgctagatgtggcatgttgttttgggagtaatcaaacatgggaa

SEQ ID NO: 11939 - DNA, 4491 bp, DROSOPHILA
atggaaatttttcaaagtcagcaccgccaggagtcgcagtcgccagattaccaccatcgctatgcgagcaatggcaaactgccccgggcggcggcactgtctaccaatggcaatggatttaccaccggcaccacgcaaacggtcacagtggatgtgcatcaccagctcggcggaggaggaggaggtgctgccgccgcggccaagcagttgatggccaacggcatcagtggccatagtcgcagcagcagcatgagccacaacatccatgcggcagcctacagcgaactgagtgccgcaccaccggccttcgccacaccgccgacgcgtaggcggttctttaaccacaagaatctgcgcagtgccctcactggaggaagtggcggtggatcgggagtcggcggtggtgtaggaggagctggcggtgtgggcggcggtcatcgacgcactgcctccaatgggggttgtcccattgacacagcatcgatcctgtcgggagatcatactcatcagcatcatcaccgcgacaatcagccggagggcaaggagtccaatgcccttaacacatccacctgctcggactcggcggtcactaggaggcggaggaagaacgtgagcaatcacaacctgaagacctctgcccgccatggagcaagtagcgagaatcgtctgaacaggctcagtttggccggaacgtccgtctatgcgggtcatctgtcctctttggtctttggcaagatcaagtccctgtggagcgtgaactcctccaattccagcgaggcgggactgaatcaattagcaggcatggatccgatcctcttacgaagcgacgctattgaccaccactcctccttcctgaatgagaaactgcagaaggatcagctccacgcccgtctcggtctgctgctcaacgatcccggcagcaatggaaacagcagcagcagcggaagtggttgtgaacccatctcggcccattccaccaccagcaccacgagcagcagcggcgtgggagcggccagcaccaccacgagcggttcctcgcagaatgtcagtccggagcaaacgctggccagcggagccggaatgctcagtggcagtcagctgtcggtggccaccagtcatggggtcaaggaggatgcactgagtctgtgcggcaagttcaaggctggctgctccatgctgcacgtctacgaagcattgcccagcaagagtcgcaaaggaaatgtacggagatcgacgcgtggtcagcagggatccagttcgagcgcatcggcggcatcagcagtgggatccagggtgacagcctccagtttggcggctgtgcagttggccctgaagccactgttctttgaggtgccgctgcaggaaccggatccaccatatgtgggtcgccagtggctggtgcagcagttgtccaacatcctgcttggcaccgagacacgggtggtgctcattaacggacagccgggcactggaaagacggcgttttgtctgcagctggtggagtactcctgctttggccgccggcagatgcaggatgatcccgatggcatatacagtcagctacagttgggcgcccactgtgagcgcatgcgcggactggcctcccacatggttggctatcacttctgccaggcggacgccaatctcacctgccaggtgcccgatttcgtgcattctctggccgcccaactgtgtcaggcgccgcagttaaccgcctacagggattacctgctctcggagccgcatcttcaggacattctcagtgtgcgagagtgcatcgcggatgcggagagagtaatgaagctggctatactggaaccactggctcaccttcaccgggcgggaaagatacccgccaaagtggccgtcatcgtggtggatgccttgtgcgaagcggagtaccatcgtcccgatcatggtcacaccattgctagtttcttggcacagcttacgccacattttccagcttggctcaagctggtggccactgtgaggacccagatgttggagctggtgaaggcacccagctacacacaacttaccctggacagttgggccagcagccaggcgttgcagcaggatatgcttgattacataggcgctcggcttgcagatagtccggaaattcgaatgaacatcggcggcggaggaggccagaactcgcagtcgggcagccagccgcagacgaagttcgtgtcccatcttcagtccctgagcaggggctccatgctgtacgctaagctcatcctggatctcattgcacgcggccagttggttatcaagtcatccagctacaaggtgctgccggtctctcttgctcagatctttctgctgcacttcaacctgcgctttcccaccgcccgtagctttgagcaggctgctccgatcctcaatatatgcctggctgctctgtatcctctgacgctggacgagatctactacagtatggaggcactgagtcacggacgggaggcactaagctggccggacttcatgcaacgctttaagctgctggatggatttttaatcaagaggttggacaacacgtacatgttctttcatagctccttgagggagtggctcatgcgaagggatgagggggagtccaacaagttcctctgcgacgcccgtttgggtcatgctggaatcgctttccgattatcccgactgcaggctccattgtcacctcagctcacattggaactgggtcaccacatgctgaaagcacatttatacggaggaactagtctgacgctgctttctccgcgggatttgcaatcttattggttggcgggagcggcggataacatttcatcctcgctgggcgccctgcgaaatgtctacagtccgaacctaaaggtttcccgactagttctcttggcaggagcttcaccgaatcaccgcacggattacatgggtggagctccgatcctttgcatagctgcgcatgagggaatccttcccatggttagcctgctcctagaattcggtgccgatgtcggtctgaccaacagccagggctgtactccattaatactggccgccatgcgtggccactgcgacgtagtgcgtccattggtagccgccggcagcagcctcggtcagttggacatcacgcagcgctgtgccctagttcatgccgcccgcatgggtcacctcagtgtggtcaagtacttgctcgcctgcgactggtcaccacgaccgcactcccaagatgtcaccagatcggttgccttgcaacaggcgctcattggagctgccgcacaggcgcactgcaagatccttgaggatcttctggatctcaatgagaccgagtttgacctggacgtgaatggcatggagccaagcagtggtgaactggcgctaaccgccgccgcacggcacggatgcattgatgttgtaggaatcttgctctcccgtggcgctcagatcgatgcaagaaatcggcagggatactcggcgctttggttggctgtcaaggagggtcactggagtgtggtggagcatctgctgcaacgtggtgccctgttggatgaaccattgggacagacacgcaagacgccgctaatgattgcggcggaggagggacacctggagctggtcgatctgctgctggcgcggggagcgcaacgagaagctcaggatcacgagggattcactgcactcagctgggcctgtttacgtggccacttggcggcggccaagacgctcatagaacatggctgtaatcgccaccacgaggatcacaatggacgcacagccctggatctggcagcctatcagggagccgctagcctggtgatctatatcctggagcagggcggcaatctggaacacattgatgttcatggaatgcgtcccctggatcgggccattgcctgccgtaacatccaggccgtacaggtgttcctgcgcaagggggccaaactgggaccgaccacttggagcatggccatgggcaagccggagattctggtcatactactgaacaagctgctcgaggacggtaatgtgctgtaccggaaaaaccgcttccaggaggctgctcatcgctatcagtatgccctacgcaagatctccggactggagcagttgctcgaaaggaatgccatcttcgcccagctgcggaccaatcttctgctgaatctgtcgcgctgcaagcgaaaactgaatgaacttgacgcctccatagatttggccacgcaagcgattgcccagaagccgcacagctacgaaggatactacgccagggcaaaggcgcgcatggaacttggtgcattgaatgaagcacttgtggacgccaatgaggcgatgcagcaggccgcccaaagcggtgtgctctgcgaagtggtcgaggtgctgaagcgcatccagaccgagctgctcacgcggatcagcatcagcagcgaggatcagaccggcaggatgtcgaatatcggcggcggggcatccgtcgcatacgaatctcatcatgagatcaccgatttgtaa

SEQ ID NO: 11940 - protein, 1496 aa, DROSOPHILA
MEIFQSQHRQESQSPDYHHRYASNGKLPRAAALSTNGNGFTTGTTQTVTVDVHHQLGGGGGGAAAAAKQLMANGISGHSRSSSMSHNIHAAAYSELSAAPPAFATPPTRRRFFNHKNLRSALTGGSGGGSGVGGGVGGAGGVGGGHRRTASNGGCPIDTASILSGDHTHQHHHRDNQPEGKESNALNTSTCSDSAVTRRRRKNVSNHNLKTSARHGASSENRLNRLSLAGTSVYAGHLSSLVFGKIKSLWSVNSSNSSEAGLNQLAGMDPILLRSDAIDHHSSFLNEKLQKDQLHARLGLLLNDPGSNGNSSSSGSGCEPISAHSTTSTTSSSGVGAASTTTSGSSQNVSPEQTLASGAGMLSGSQLSVATSHGVKEDALSLCGKFKAGCSMLHVYEALPSKSRKGNVRRSTRGQQGSSSSASAASAVGSRVTASSLAAVQLALKPLFFEVPLQEPDPPYVGRQWLVQQLSNILLGTETRVVLINGQPGTGKTAFCLQLVEYSCFGRRQMQDDPDGIYSQLQLGAHCERMRGLASHMVGYHFCQADANLTCQVPDFVHSLAAQLCQAPQLTAYRDYLLSEPHLQDILSVRECIADAERVMKLAILEPLAHLHRAGKIPAKVAVIVVDALCEAEYHRPDHGHTIASFLAQLTPHFPAWLKLVATVRTQMLELVKAPSYTQLTLDSWASSQALQQDMLDYIGARLADSPEIRMNIGGGGGQNSQSGSQPQTKFVSHLQSLSRGSMLYAKLILDLIARGQLVIKSSSYKVLPVSLAQIFLLHFNLRFPTARSFEQAAPILNICLAALYPLTLDEIYYSMEALSHGREALSWPDFMQRFKLLDGFLIKRLDNTYMFFHSSLREWLMRRDEGESNKFLCDARLGHAGIAFRLSRLQAPLSPQLTLELGHHMLKAHLYGGTSLTLLSPRDLQSYWLAGAADNISSSLGALRNVYSPNLKVSRLVLLAGASPNHRTDYMGGAPILCIAAHEGILPMVSLLLEFGADVGLTNSQGCTPLILAAMRGHCDVVRPLVAAGSSLGQLDITQRCALVHAARMGHLSVVKYLLACDWSPRPHSQDVTRSVALQQALIGAAAQAHCKILEDLLDLNETEFDLDVNGMEPSSGELALTAAARHGCIDVVGILLSRGAQIDARNRQGYSALWLAVKEGHWSVVEHLLQRGALLDEPLGQTRKTPLMIAAEEGHLELVDLLLARGAQREAQDHEGFTALSWACLRGHLAAAKTLIEHGCNRHHEDHNGRTALDLAAYQGAASLVIYILEQGGNLEHIDVHGMRPLDRAIACRNIQAVQVFLRKGAKLGPTTWSMAMGKPEILVILLNKLLEDGNVLYRKNRFQEAAHRYQYALRKISGLEQLLERNAIFAQLRTNLLLNLSRCKRKLNELDASIDLATQAIAQKPHSYEGYYARAKARMELGALNEALVDANEAMQQAAQSGVLCEVVEVLKRIQTELLTRISISSEDQTGRMSNIGGGASVAYESHHEITDL

SEQ ID NO: 11941 - DNA, 4510 bp, DROSOPHILA
gtgacgaaagagttgtgcttcacttcacatatttcgatatcgagggcattggaaggtaagatctttatctaaactatcacctaaaaatgtttaatccccttttctgtgcagttgtgaccaccaaaccgccagcgattacatcgagttttccaatttcatgagcacggatcgaaagttcagcagatactgcggaaagcttcccgattttgaaatgcgttctgatggacgtttctttcgagtcaccttgcattccaatgatcgctttgtggccatcggattccgcgccctgtacacctttgaaaccgtttcagtgaataattccatcaccgatcttcgggataatgcctccatgcagagtttcgtctcaacagcgtcaactcagccggttgcaaatgtaaacaaattaattgcatgtatcttatgcacttataaagcataccaatcttatgtttaaaatatagagacaaaatatttcgaaattttgttttctaattctttaataaattttaataatttttttctattttaatggcacacaacttcattaaatttaaatatttaatcttggccaaattatcgttttaaaagcaatcgatttcatgttggctatcgaagtttatgcgtagtagttcaagaactaacaatttaagttgagggattttaagtattaggatgtaaattaaacgtgatatcatcgataaaaactccgccaagcattttcattttcaatagtttctggtaaaaattatttatttaatttcaacttcattatcagagttaccgtgtaaacgagccactcgttgttatctgcaatcgatctttacctgttcgattcagttttgtagagtcacgacataagtatatgctatctttttatcatttttggtataaattaaaaacaaagaaacaaattaccattaattgtttaaatttaataatgtcaacttctttaaaacataacattcaacaaaacatattattattttgatcgtttataagattagttcctttgaacaagtttaatccaaaagccgcctttgggtgacaactgaaaaccggaagtaatgagctctagtggaatgcaggatttcttggcaggggcaaagcggtagtccttcaaaagatagtagataacagcctttgcttcaagtagagcgaatcgggaacctataataaatacattttacattttttcgaagaacaattttgaatcaatcaacttaccaatgcagttgcgttgacccaggccaaaggggaagtatgtgaatggctgaatagactccttgttctcatcgctaaaacgttccggatcgaacttcatagggttctcaaagtacttgggatcacgatggaagccgcatgtaggcagccagatgacatcgcccttcttgacctcgactttctggccatccacatcgaaggtgatatccttgttgcattctcgatcgacggcaattgccgccggccactttcgcagaacctcgttgacgacctgatccagatacttcatgcccataattgcctcataggtcagttctttgccctccaggtcttggtccacttgctgtacctcctcgtatagcctctgctgcacatcctggttctccattagctcgtgagcggtgaagcacatcagcaccgccgaagtctcgaagccagcaaagaagaacacgaaacactgggcgacaatgtcgcgatcgctccactcgcgaacggcagatgccttggtcttctccgtctggatgataccacgagcctccatcagcatgtttatcatgtcgggacgtacaatattgtgctcctgtcggtatttcatagcatcgagcaccagacgcacgaaatactgagtgcttttcctatcgaaaagctcgaccttaaggatctacaaggattattaaaattaaggaatatatttttttgatatgtgtgtatgctgtgccaaccttattaagacccttcaatgcgaagaacaacatgaacttcatgctctgcaggaatgtaaatgtggtcaacttttttcccatctgatagaaggtattttcgcgatccttgaacgagttcacttgcagtccaaaggctgtcgaggcgatcacatcattggtgaatcgtgtgcagtagtccttcatgtccagttcattctcctgaacccttgaatcatcctgcttaagacagtccacggcctccttggccacctggttcatcagctggaacatctgacgcattttgctgcctgtaaatgccggactcagagtgcttcgcatatccttccaccgagcatctcgcatggagaacagcgagctgccgaaaaggttactcatgtcatgtggatcatcatcgctgctggtggcaaacacattgcgatgattgataaagtgatcgaagtcctttatggttatctgcttgataagatctgggtcgcgcaccattaaaagtggttgtcgctgctcaaagataccaaaaaatctaaaaaaaataataatgttaatgaccgataagctttttgtgagtcacacactgataaatcaaatcagaaattattaatcgtgcgctcaacaagtttagaaaacgataacagaaattcgagtttatgcatggctagcgttgttcattacctatccgacgaattttcaattaacccatctcgatttctttttggaaaactataaatttataaagcggatttctcgtattggtctataaataaatcatatgtacattaaatccaattgaaaaggctgagtacaataatgattgcatgtttataaagtaacaaaaagggtaaagtcatacaaagagttgccccaatatgaagttaattaataaattagataaccttatcgttatagcacttttcaggagctttatcaattatttttcctatcaagtttgccgtccgagacaaacaacatttaaagctgtcgtataatcgataagattatggcaaactaaactaatagaaccaagcatttcgccaattatcttggcagttacacactgctttagataaaagacttaacaaaatataatagagtatttctgaatttctgtaattgtatattcaaaacgtagtcgaacgcagccgcacccactaaatgtgtgtatagatagatcactgattgcctgaccttgacatacgattttatataggcttgtacgcaatgctggaggccagtagatacacacttgttccaaacgtgttttaagtgcaagtgcaagtgagccggatgcatattaggtaatcaacttattaaatccggatcaatgaatttaactcacttcttacttccgcctttggtgtagagatcacagactatgtcaaacatggccctcttccgcaggaacatgccggccatgttgccaaagtagagcactggcttttcataggcgatgcccctatccttgaagaaatcattgttggcggacgcccaacggtagaacaaggcggcagcgatcgcaaatagggcgaagaactcccacaacatgttgaccctagcttggcgatctaagcgtccagaatataactaactacgccacaaacaatcgggagcgttttgttgtccccacgcagagctttctaacaaagcttcgtgtactgcatttgataaaatacttgttgtctgtaatacacacaagtatgtacaaatttctgagcgcaaatgatttagaatatcactcatcatttcattatcacggcgtgttggagaaaatgctgacgactctgagcataccaatattatgtttaaaatatagaaacagaatatttcgaaattctgttttctaattctttaatatatattttttctattttaatggcacacaacttcattaaattcatatatttaaacttggccaatttatcgttttaaaattcatcgatttcttgttggctatcgaagtttatgcgtagtagttcgagaactaacaatttgatctgagggattttaagtattaggatgtaaattaaaccatcatcaccataaattaaattatcatcgataaaaaaggacgcaaagcattttcattttcaatagtttctagtaaaaatattttatttcatttcaacttcattatccgagttactagccacttgttgctatctgcaatcgatctttacctgttcgattcagttttgtacagtcacgacgctactatcttcaataaatacagctcttatacggtgcgattagcattattaacatttcgccagtcggccgaagcagacgaattacctttcggtctggaagtgataagacatttctagtcaaatcattatagtcgcatatctgtggactctggaatggcggctaagaaactggatgccataatcttcggtgcctccgggtttaccggaaagtacaccgtcttcgaggctgtcagcgtgctgaagggcctgcaatggggcatcgccggacgcaaccaggagaagctgcagtcggtgctgcgggagatgggtgcaaagtccaagacagacctctcccaaacgccgatcgtcatcgcggacgtgaacaac

SEQ ID NO: 11942 - DNA, 1579 bp, DROSOPHILA
acgcttagatcgccaagctagggtcaacatgttgtgggagttcttcgccctatttgcgatcgctgccgccttgttctaccgttgggcgtccgccaacaatgatttcttcaaggataggggcatcgcctatgaaaagccagtgctctactttggcaacatggccggcatgttcctgcggaagagggccatgtttgacatagtctgtgatctctacaccaaaggcggaagtaagaaattttttggtatctttgagcagcgacaaccacttttaatggtgcgcgacccagatcttatcaagcagataaccataaaggacttcgatcactttatcaatcatcgcaatgtgtttgccaccagcagcgatgatgatccacatgacatgagtaaccttttcggcagctcgctgttctccatgcgagatgctcggtggaaggatatgcgaagcactctgagtccggcatttacaggcagcaaaatgcgtcagatgttccagctgatgaaccaggtggccaaggaggccgtggactgtcttaagcaggatgattcaagggttcaggagaatgaactggacatgaaggactactgcacacgattcaccaatgatgtgatcgcctcgacagcctttggactgcaagtgaactcgttcaaggatcgcgaaaataccttctatcagatgggaaaaaagttgaccacatttacattcctgcagagcatgaagttcatgttgttcttcgcattgaagggtcttaataagatccttaaggtcgagcttttcgataggaaaagcactcagtatttcgtgcgtctggtgctcgatgctatgaaataccgacaggagcacaatattgtacgtcccgacatgataaacatgctgatggaggctcgtggtatcatccagacggagaagaccaaggcatctgccgttcgcgagtggagcgatcgcgacattgtcgcccagtgtttcgtgttcttctttgctggcttcgagacttcggcggtgctgatgtgcttcaccgctcacgagctaatggagaaccaggatgtgcagcagaggctatacgaggaggtacagcaagtggaccaagacctggagggcaaagaactgacctatgaggcaattatgggcatgaagtatctggatcaggtcgtcaacgaggttctgcgaaagtggccggcggcaattgccgtcgatcgagaatgcaacaaggatatcaccttcgatgtggatggccagaaagtcgaggtcaagaagggcgatgtcatctggctgcctacatgcggcttccatcgtgatcccaagtactttgagaaccctatgaagttcgatccggaacgttttagcgatgagaacaaggagtctattcagccattcacatacttcccctttggcctgggtcaacgcaactgcattggttcccgattcgctctacttgaagcaaaggctgttatctactatcttttgaaggactaccgctttgcccctgccaagaaatcctgcattccactagagctcattacttccggttttcagttgtcacccaaaggcggcttttggattaaacttgttcaaaggaactaa

SEQ ID NO: 11943 - protein, 516 aa, DROSOPHILA
MLWEFFALFAIAAALFYRWASANNDFFKDRGIAYEKPVLYFGNMAGMFLRKRAMFDIVCDLYTKGGSKKFFGIFEQRQPLLMVRDPDLIKQITIKDFDHFINHRNVFATSSDDDPHDMSNLFGSSLFSMRDARWKDMRSTLSPAFTGSKMRQMFQLMNQVAKEAVDCLKQDDSRVQENELDMKDYCTRFTNDVIASTAFGLQVNSFKDRENTFYQMGKKLTTFTFLQSMKFMLFFALKGLNKILKVELFDRKSTQYFVRLVLDAMKYRQEHNIVRPDMINMLMEARGIIQTEKTKASAVREWSDRDIVAQCFVFFFAGFETSAVLMCFTAHELMENQDVQQRLYEEVQQVDQDLEGKELTYEAIMGMKYLDQVVNEVLRKWPAAIAVDRECNKDITFDVDGQKVEVKKGDVIWLPTCGFHRDPKYFENPMKFDPERFSDENKESIQPFTYFPFGLGQRNCIGSRFALLEAKAVIYYLLKDYRFAPAKKSCIPLELITSGFQLSPKGGFWIKLVQRN

SEQ ID NO: 11944 - DNA, 3133 bp, DROSOPHILA
gaaggaaaacgcctcggtgaaaacgcagcaggactttaagcgcgaaatcgaactaatctcggatctaaagcatcagaatatagtgtgcatattgggcgtagtgctcaataaggagccctactgcatgctgttcgagtacatggccaatggtgatctgcacgaattcctaatctcaaactcacccaccgaaggcaagtcgctgtcgcagttggaattcctgcaaatagctctacaaatcagcgaaggaatgcagtatctgtcggcccatcattacgtacatcgcgacttggcagctcggaattgcctggtaaacgagggtctggttgtgaagatatccgattttggactatccagagacatttacagctcagattattatcggtaagactttggatatacatatatatatcaagattgcagctacaaagagcaaacatttttgctggtttttattgcagagttcagtcaaagtcgctattgcctgtaaggtggatgccctcggaatcgatattgtatggaaagtttacgaccgagagcgatgtttggtcctttggagtcgttctttgggaaatatacagctatggaatgcaggcaagtatcttaaacttgatttaaatgcgcaatatctaattccaatgctatccctttagccatactacggttttagcaatcaggaagtaatcaatctcatccgttcacggcaactgctctccgctccggaaaactgtcccactgctgtctactcgctaatgatcgagtgctggcatgagcagtcagtaaaacgtccaacattcacagatatttcgaaccgtctcaaaacttggcacgagggccactttaaggccagtaatccagaaatgtaaacataagattttacacatacatatgtattttcaacgaaatggactgtaaaataagtaggtttaagaatttaataaaacgaatgatatcgaaaacccgaagagtgttgagatgttttgggaaagaaccaattgattttcgattaaattaccttttttgtaactttattaagtgagatttgttcgtaataaccatatggtatttaaatgttttgttgtgccaatcggaaaattcttttatccagtagcaatgcccagggcaacgccaccgaaaaatgatgccaaaaatatgtgcagatcgttgacttttggaccctcttcatcgccaatcagtttggtgtaccatttcgccactttcttgccgtttcgggttaggaggctttcagctctgtctaattgattgtcgacatatctttcggtctgcaaattgagttcagcataaatatagtaagcatatagataaacggtttaaatgaattataccttatccttccagttcttctcacgacccagcgaggcttccactttatcggcgagcttatccacgctcttatccaacttagaccaatttatttttataagtccttcttggtgggcgatttcgagcaagattatgctgccgccaactgcaaaggcagcaaatttgcctattttcattgtcgtatatcctgtgaccctgaaaaaattgttatatttttagtaagataagatacacaaattccagcaaattctatggatttccttaaatttgcaactcatcatttggcgcatatacatgtatagtaaattgccgagttatctagcttatcttgtgcaaattatatcagttttatctgattaataactcattttattacactatttagttcttttcctttttagggaggtcctatatttctgtatcccgcaaacaaacaacattcatttatacacgtatttagaagtacatatttgcaatagatggagcggctaagcattcagttgtatattttaattaaaaacgtattctgcagttatctaccagctattaccgaaagtatgcaaaaaatcaatttacttcaaattccaaagacaatcggcattgctaaaaatttaagtgatgcgccgcaatgatataaccacataccatcctgatgaaacgccaataagcatctgcgaatatgctgaacgttggccaatatcgttaaaaactttcttaaaaatttccgaataattagtcatttttaaaattagatgtcgacgttaagatgcgaaattctgaccgcccagtttacgtcaatttaacacaataatatatgcccgtcaagatagcgtcaatttggacaacatttttgtgttgggtttattggaactcggaagtggaacatatgttaggggaattatgggaaaaagagtaagaaaaataactggtagcacttaacgtagaaactggaataatcatactttgaatatttattattaatctgataattacctttgtgaatcctgtatgctttgcacaacaattggcaaatttcaagaacctcttattatttatttatcttagctattgcctcatttgaaactattagttaaattccaataaaatatgagatatccatttaatcgctgcacttttcgtgtcgaaaactagtttcgagatcaaaactataaatttaagtatttttttctaaacgtcaattatttctccccccttactttagacaaaaacccaaagttcgaatgaaatctacaatacaaaatgtacatgagtttatttaaaataattgttaaaactacttaaataaatatcatacagtatatttacaaattcgaatagattagccaattacttagcaattttaattactttgctaaatcaccaagaattataagtccgtaataagcattgattacaggtatgttgattcacctggaaataaagaaaaatattcatttattagtttagatttttttgctcaaacaagcttaatgaatttattaactaaaactcaacgagaatacgataaaaatcaaaatagcatgaatgaattaaaagcagaagacttttgatgatgatgaaacacacaaaagacacattctgcttcaggatatttagttttcaacagcaacagtgaaatagtcgaattagtcgaagttcgacagttcggtgctagttttgttaaatgaattgagtagaaggacaatggcagtgcccagagtcacatacttatgaagcggtgagggatgtgtgatgaaaatcgatgcggatactgattaaggattgccggtta

SEQ ID NO: 11945 - DNA, 620 bp, DROSOPHILA
taaactgggcggtcagaatttcgcatcttaacgtcgacatctaattttaaaaatgactaattattcggaaatttttaagaaagtttttaacgatattggccaacgttcagcatattcgcagatgcttattggcgtttcatcaggatgggtcacaggatatacgacaatgaaaataggcaaatttgctgcctttgcagttggcggcagcataatcttgctcgaaatcgcccaccaagaaggacttataaaaataaattggtctaagttggataagagcgtggataagctcgccgataaagtggaagcctcgctgggtcgtgagaagaactggaaggataagaccgaaagatatgtcgacaatcaattagacagagctgaaagcctcctaacccgaaacggcaagaaagtggcgaaatggtacaccaaactgattggcgatgaagagggtccaaaagtcaacgatctgcacatatttttggcatcatttttcggtggcgttgccctgggcattgctactggataaaagaattttccgattggcacaacaaaacatttaaataccatatggttattacgaacaaatctcacttaataaagttacaaaaaaggtaatttaatcg

SEQ ID NO: 11946 - protein, 156 aa, DROSOPHILA
MTNYSEIFKKVFNDIGQRSAYSQMLIGVSSGWVTGYTTMKIGKFAAFAVGGSIILLEIAHQEGLIKINWSKLDKSVDKLADKVEASLGREKNWKDKTERYVDNQLDRAESLLTRNGKKVAKWYTKLIGDEEGPKVNDLHIFLASFFGGVALGIATG

SEQ ID NO: 11947 - DNA, 2696 bp, DROSOPHILA
ttttttttttttgtttaattattataaatatagaccaaagaatatttaaacaagatacgctcgcacgtccccagtgggaaaacataccaaggctaaaatatgtaatcagataaataatcataaaactgcgaactcctgaatgcatttacgcaagtttgtattacgaatgtctgtcatacgttgccatattaaaacttaaccgatcttataaataaacatttttgatgtgcatctattatgtttatgttctacaactaggtcaaggacaactgtgttatcgcatgtcagatgctgcagcattaatagacattaaaaaaaaaaccccgactgtaaaataagtaatctaatgaatgcttctatttaggaagtttgaaataaaaataatcttccgaatgcaaaatcctttccttttcgtattagttgtgaattgatcgaataagtattttcatatgttgggttcatcatcttcgtcttaaggattacattttcaaaggtcaattagtctttttcattgcgtaagccttgtaaaaaatgttaacgaatttgattcagttttaaattttgaaacgaacccattcgatgcggccttgaataccagtcatatatatattggagatcttttacacatttttagtatagttttcgatttctttagcggatatcaacatggcctcagtaaaattggtgtgttggtactaatcatatctgcgttccaaaatctaatattttttaaaattttcgcacagttctttattgctattttggttgtagctctatcccttaacacctcagctgcagtgttgaaccctagttcgactgccaaacccagatttgagacgaaagaccgaaaactaagtgctggcgctctgcagtcactcgctggttaattactatagaaagctatagataaaattgtcattataaaaatggaccaaaaataaattattttcaacgaatttctcttaagtttctttcgtttgggatacagttcgaaatctttacaaagatattttatttggggttttattagatagacactacaagctagggaacccgggcggaaccagctgtatttagcattagccctaagctctaaatggacgaggtggcatagtcggccgggaacttgaacaggtgctttccagtggcctgaacggagggaaggagtcccgcgttcggaatgatgttccacgagaggtatagcgatacgttgcggttgtccttcaggccattcccgtcgtcccagaagtagtacttggtgttcatgttcttgaagtccaatacggcattgtcgccgcgcaggataatcttgtcccacagtaccacctggttgagttgattggccggtgtctggtactcggcggtgagatacaggaacagctgcttcacgttccagttgaagatgcctgtgagattcgtttgcagatcgaaggtcacgaagcccaagtcgtgcttctcccgggacgctccgtaatccgggacattcttcaccagcactctgaccgtgttgatgtttgcatcggtacggtagtcaagaaagacggtggacaggaagcagctgaaggtgaggcaagctagaacgctcagcgtgtatgccaccgtggcgtttcctcgggttaacaccgtgtgcattttaatatcgttttattcctgcgattccggcaaatgacacgtcgtgttgttagtttggaaaaaaattagagctgggacgataatcggatgaacgcgatactatcgatgactttcccggttcggcccgaaagaacaacgcgaataacccgatttccttttgatggttaaaaatcaaaatatttcgcgttaaatcatttctatagtcgtaatcgtaaatatcaggtcatcatttcaaaaactattcgaataataattaataatttaagcattgcacaatttttcctacatgggcacacttgcagcagagaaaatttgttttatattaaaaaccgaaacatggcaaagtcgtgtatgtaaccgcaaaatcaaaatcaaacaatttctaatttgcaagattcttaaagaagattaaaaatatctccatattatgaactctctcatatataacaagagagaagttagtaaacaaattcaaaactaatgggaccacagccagactattcaaaaatatcaccctgccggaaacaaaagtgaagggagaaatatcgatgtgaatttatatcgcgagccgcagtatggtcctaccttttctttcaatatccgggaataatatggcgatccgaaactctgacgatagacagagaatttaacactgctgaaaaattgattaatttgctaaaaattttaaacggtaatacgcgcaaatattaccaaattgttgggcatcggttggggcgtgaattgtgctagttttttgtccagcaaacgtcacttaattggtgaaaatcgacatcggaatagtggcaaaaaaattttccctcagtcgctcagctattttctggcttcgtctgcgcgtgtgagcgggatggtgacagcggtccgactggccgcgtcagggcatcgcgtgtgcgggagagagacgaggctatcgaccaagcgagaaacgcatacgccaaagtcgaaaagtgattttttcttcgttcgttcgggcgaagtcgaaactgctgcgaaaagttttataaataaagtattgcaattccaagttctcgaatgttagtaaactt

SEQ ID NO: 11948 - DNA, 696 bp, DROSOPHILA
ttttttccaaactaacaacacgacgtgtcatttgccggaatcgcaggaataaaacgatattaaaatgcacacggtgttaacccgaggaaacgccacggtggcatacacgctgagcgttctagcttgcctcaccttcagctgcttcctgtccaccgtctttcttgactaccgtaccgatgcaaacatcaacacggtcagagtgctggtgaagaatgtcccggattacggagcgtcccgggagaagcacgacttgggcttcgtgaccttcgatctgcaaacgaatctcacaggcatcttcaactggaacgtgaagcagctgttcctgtatctcaccgccgagtaccagacaccggccaatcaactcaaccaggtggtactgtgggacaagattatcctgcgcggcgacaatgccgtattggacttcaagaacatgaacaccaagtactacttctgggacgacgggaatggcctgaaggacaaccgcaacgtatcgctatacctctcgtggaacatcattccgaacgcgggactccttccctccgttcaggccactggaaagcacctgttcaagttcccggccgactatgccacctcgtccatttagagcttagggctaatgctaaatacagctggttccgcccgggttccctagcttgtagtgtctatctaataaaaccccaaataaaatatctttgt

SEQ ID NO: 11949 - protein, 179 aa, DROSOPHILA
MHTVLTRGNATVAYTLSVLACLTFSCFLSTVFLDYRTDANINTVRVLVKNVPDYGASREKHDLGFVTFDLQTNLTGIFNWNVKQLFLYLTAEYQTPANQLNQVVLWDKIILRGDNAVLDFKNMNTKYYFWDDGNGLKDNRNVSLYLSWNIIPNAGLLPSVQATGKHLFKFPADYATSSI

SEQ ID NO: 11950 - DNA, 28860 bp, DROSOPHILA
ctcaaatttgtgttttggagagttgcgctctcaaacttggagacctgcggctctccggcacttttctggcttttgcgctcagtttcgaaacgaacttcaaagctcgcgcaagcgtaccgcacgcgaatcggaaaacgcattctacgatcggcaaatcatcgcgatacacgatctttcttcagccggcattttcttgttcgccactctggatacggtttcaaatcgcaaaacgtgccaagttccttaaaaagtgtgcgaaaattgcaaatattttgagtttccatgtgacgtatgcgtaatgtgaccacagtgcggattaaagtaatatatttacctgtatataaatgcgactatatatatgcgtgtgtgtgtgtgtcattgtctaggaattttgtttcgtctgcaaaatgtgcaaagttttttaatgtttacatcgcgaaattccaagagtcccagttgactcacgattaagacaaaaagagattagataaagagtgaccaacttatctatacattggtgttcaccttagtttcgcaaatttatgaaaatgttttgatttgagattataaggcttaaaaaatcgaatacaacgttgacttaatttgaaatctaggctcttaaaactgaagattgatctaacaaattattgttttgctttaaaagcttaaaatattattcgacaggtgtaaatgtgacaaatccaattagtaaacaagtaattctctttgcacaaaaacgcagaaaactaaacaaaaacctacacaaactacattggtcgtaatgtgtgaagaaattaaaaattataaatttaaataagtgtggtttttctcgttttgtaaagcgctctttagatgtatttcgaaaacgaatttaacgaataggtgtaaaggaaaaatccacaaaagtacgtgccaccaaaaagtgcaaaagaagggcaaatcgaacgagaaattcggctcgaaaagctggacaaaatcgacttgaaaggattcgcagctggaactgcatccatccagatacagatccagatacatgtgtatataccgtataccagtgccgatacagatacagatacatacatacatgaggcagcctgcgaaccacaaaagatacatgccatgttcccactaaccaaccgctcttcgagtggcaatcgcaccaacaacaatccgagcaacaacaacaacaaccagaccacaagcttcataatcggaggtaccaccaatattaacaacaacaacaatcagcttggtggcacaaacagcgctaaggataaaggaaattttgaaaataattggagctgcaataaaacaaccggtcgtcgatctggcagtggaaatagttgcagttttttaggtaaattttaattgtagcacttaaagatgccgttgactgaatatttcgaatatttgggcagtcttagctcgttaggtaacaacaacaaaagccttgctatttttatagccaactatgtgaaggataatattaagattccgttttataaaatttaactcaatacccaagtaatttctcttgaattaaatcccattagtaagactcggcccattgcactaaaaacttattcgtacgatctcgattaaggcggcctctttgatcacttgaggtttatcttatgaccatcgcatctctttcattggaatgactgcaatttcacagatcgcatttacctttttccgtattgtcgctcttgtgtcgcgaacctttaaagggttactgttttttttttagcaacaatttacaatgcaaattgcattaattgcaattttctgttcgaattgagttggttggttgtttggttcccgtttgcggcattgttgttgtctttacattaaaatgcaaatactttgcactaatttacatgtcgcgccgccgattgcagtggaaaatgtagacccctccgcccgttcgtcattccttcgaccacaaaatcgcctggggagacaatggaaatcttttgtgatgatcacacacgactcggcagcggctttgtatctgtgtgtgttgtgtgtgctttgggggaggaagtgtaagtgtgagcttgaaccatgagaaatgtcataaaaattcctctgtctaccagtctgtcttcctctttgtgggctaacggggtactcgcttttttattttgaaaaatgttacttatattaaaaagagctgaaatttcaactttttggtaatttcaggatttattagattaatctgcatctgaaaattttaccaaatgtatttaagtgcagctactatcaaaagacttacatatttgtataggttacgttctgaattacttatactgtaacatgtttctcttaattcccttgtaaggtaaaacattatagggtatttctagttcgaaatgctcaattttaccttccttgttctgcttctgatgttgcgcttgcgcaatcccaaaaagcatcttcgcgttttctgcgctcttttcactgcgcatgcgcaaatacacaaacacatgtggagaaggagattgttggggcagaggtttttggggatgtcggcacatgcgctttgtttgtctgttgccaaaacactgagagaaattaagcatttgtacctatacgtataagttttagcttataccactttaacgatgctttacctcaacgagataatataccttttgataagcaatcttgttctctaattcccatgtttctaattcacaatgtcctaaacatttttctccgtgtagtgggttcattgctgctgtgcgcttgcaagaattcccagaaatattttacttcgaaatttgttaacaagcagacaacaagagcaacaaccacagaagcgatccaaccgaagacatagggaacattgtgtgtttttgtttgttgtttggcctgggccatgaagtgtatcaagtgtttgctggcttagctccctttcttctccatcggctttgttcgcagccagagacttcaagttgaaggttaaagttgagcggagctgaggagctcaagcctttcgattgaattagaattagagttctcttgttagagtgaatttcgcagaggtttaccggtcaggataacgtttgagtcatagaaattgaatggaagtgttcttcaatttgacagccgttggcggatttcaaagtctcaaggatgggaacaggatttgcattccaataattgcgcttcatttcagatcactttagccttagaagtttcgaagaaatgtctaaaatgaaccaattgtaaaacttataacactgacaagcgatgagcatttaaaatctcaactcagataagcctggctttgcacactttagagctgataaaatgatttataaagcccctagaaccagttaactcctcatacagcacagcactaaccaataactcattcaatcccattcgatgtggtaaacagccttcacagttagccccattgaatccgatttcgagtccattccgaatctcgacgcgtgtggtgtaccagactccgcaaatcgcttccaattccattttacactgccacacggatccgtggaatcactcggctgcatagtttttaattgcaaattgcaaaacggaccgaccagccagtcagtcagtcataacgagtctaattaaggcgatgtctgaggctgaggaacaaatatcttgcatatttttagatccaccagctggacatttgcattcgcagacggtcgtattcaatgtcagatgtacactgtgccaatagttcgattgatttgaaatcgattatccggacagttccacctttcactatcaattggtttttgcttgatatttgaaaaatgtattttatgcttgctcaaatcagctaataaaacttgcaatatgttgattttcttgatttcaattagaaatttaatatttgatcttaagaaattgacttgcaagctatatattgcaaagtgcaaacttgtatacttcgtgagttacttggtttctccatgtgcactccgtcaaattagaaagggagatcggcgaggaagatgaggaactgcgagctgtgagtggcaatgagttaatttgctgccaaaacacaccctcgggcctcattagctgcactccgagtgagatttatagacgagccgcgagctgccggcggattagttggaaatgcaaaaccctgggggtcaaaatacacgggctgaacgggtcaaaagggggcgaagggggcgaaaggggctgacggggcggcaacagcagtcgcactgcgggttgccctgccaaatgagcgcctaaggtgtcgaccaagctggtcaagattgcaatgggtatgtgcggccaaatggcagggccgatgggcatgaataatgagcaggaggccaacaaaaagtggctagcttagttccaatcccataaaaatgccagaccgctgtcgtattttacaaactgtgctaaatagttgttctcatttcaaattgggtgctagaagaggcattatttacttcatttttgttaacttttgttaataacataaaaaaatgtgtcaaatgtacagtgaaacattaggtttacgcttgatgcctaagtttatatatcttttcacacattaatggttccgtttgtcttaagcatctcacatcattttgtaattgataagtcccaaaaaaaaaaaacgaaggagtttattactcaccaagtgcaatgagccaacttgggctgctccctaacagcataaacatgtccgcagttggtggagaaaaatgtaaaaaaatgagtttccatttgcttttgcatttgctgtgacattttgagttatttgacactttgctggcgcatatcatctttccccttctgagtgtttcgccatcgctctttcgctctttcttccagcagtttattaactcattattttgaaatcaacttggcccggcaggcaaaacgtgttgcagaagtttctgcaacctgacaagttgcctgcaccgccagcagtaaatgcatggatgttgctgctgccggtgttgcacatgttgcagatgttgctgctgttgcaagtgcacagcttgcacaactcattccctcagttgttgattaagtacttgggcactctttcacccattagcaagcgtatattatgcattaaaattttaaacgaattgttggctaccgcaattgggcacaagaagccgttttgccgctcttaattgatgcaatcaataattgcggccacatctttcattttcataaggaaaccacatttcagatactactcacaccacagacaaaccgcacatatcaatcgaattcacacccataaacacaaaattagcaaattcataaaaaaatcagtagtcttaagccgctttttgcataaaactgttcataaaattgcaatccgcttattcggatctaaggttaagtctctgaaacttttatcttaaatgctaaagaaatcattcacaaaaaatacaaaaccaattaattatttgcccatttaactgtggtggcggtttggctgttattttttattttgttgattgcaaaattcagggaacaacaaaaacaattgccactgcctttagctgcgtaacattttgttgtagtgaggcgaccaaaacattgagataaaaaacgcggcagttaaaaactattcacatcgcatctgtagtgggtacagtgaatattgtttgataatgatttctaagaaaataaaaaaaattttaaaagtgccaaaacatgcctctatatctatatcatttgaaatgatttaagatatctttaaaatgcattatatattttaaatggcattgctttaagcttaattttagctaccctcttagttgattttcactgtactcgcggactatgagaagttgtaggcgtgagtagtttgccgatgtcttcggcactggcggtatctttttctgatgtttcgaaaagagacgtgaacaagtagccgaggacatggccgccgaattcaaatggagtggcaaaaaagaagtagcgaggagatacaaaattgtgtatctcgtggcgatctgttcaatggattcgcaattacattcatgaaatttaattggcgatgggaaagaaccttgaatggattaagcatgtggagacaatgtgtttgagaggaatagtgttgatttatggataataattccaattcattgaggagtttcatggaatttggcctcaacttcggcctaataaagtagtatatctgatttttgcatcgagcacatagccctatcagaccttgcgatcttcatttagcttggcccatatcttgcacatttaaaaactcttgccacaaaagtcacgttttctacgaagactcccccctcctccgctccatcaaagttaagatcaacatgcggatagatcgtctgaatagaaaaccagcgtacaaataaagagacgtgcaaaaaagcgcttaactaacatttgttgacttttgtttacaaatgcaaatttacctataatatttgcactgcaaacccaagccatcatctatagtatttccaagcagctctacttcaacttcaactatttatttcggtttgttttatttcgagcgccgcgacaatttgccaagcaaacttttttgcgttcagatagcggcgaaaattgtttgtttagagcttagcggggcaacgacaacaacaggcaaagccaattaccgtttttaattatttgtaaatatttcaaatgtccgaccgacttttggcgcccgcaggaaaaaaaaaacaacctaaaaaaagaaaccaaaactaaataaccttatcgatatggcaacaggtgcgccatccagcggacaaggtgcgaaccactccacgtaaccgttccacatgcgatgtacttattatatattatatcactgctatatcttatctcagaggtcctcatgtttcgcgtgccaaattccatttcaatgagaacttaaagctaatagtattcgaataggtactttctacaaataccacattggttaattgtttaaattgataagatctgcatgaagttctcaactttggactaccatctttccaatttttgtataataaaatacgaaaaaagcgcaaaatgttaagtgcactcgtataaaagttaagattttttccgcatttacacgtaagctcgttgctgtcataatatcaatgattgttttttcagcttatttcgagttgaaaaaacctggctgactaatttttggcaaatgagtatgggatttgagtgttgtcattcattcacttattgtttcctcttgtcagaaaaaaaaactcaagcttggtttttacaaagtgggcgtgtcgcattgcggtaatttattaagtgttttttctcactctctttaattgccgcacagatgatttagagtcttttactttctgcctttcctccgattgtcctcttcttcttatgactttcacctcgccaaagtgaaattacggcctaatgactaaacatttcatttaattagaagattcatcgctcagttgaagccgagacaataacaaaagggcggaacaagaaaagttttgtgaactcagtgaatctgtaatctcagatcttagcccattaaaaaaatttttggcaatcagagtaaatgatctgacacctgaaacctcaaaagcggattacggcagtttaattttgattttgatggatgtgaagatttctgggaaggcagtgagtgcactttcctcaaccgaaaatttcttacctttttagctttacaaaaactctgttttaataagaaacccctgccgttattttgacatattcgggatgccctgttgtcgaacccttttcgaggttggctgactcaccgcaggaacctgcaaaagttgcaacattgcagcgaattaatttatcaacatttaccgctacaatgtcaacgccacaagagaaaagtttgctgcattaaaaggccgtaaattcgtcgggacaactttgggcccaaagtctggaccattcgacttccaagaagctggcaacttgatacagccgaagtgagctccaaacatttttgaatacccacaatttctggcgaggaaaacctcgatgccgcaaccaaagtttgatttatgcgttgcgatgctcaatgggcgatacgaccgggccaaaaggaagtatagccgcagtcaaatttccaggtccaaacggcacgactaccaaatgcgctcgctggccaaactggctgctctgcctggcggttaaacgcagccgaacataaattataggccatggctaagtaggaaaactgttggcccaaacagccaggcacagtggaaaacctagggaaattgaagataacataggctcttacgcagaatttcctgcgcgcaaatgagtcacatgaaatttgggaatataactctatatttacagatctagatatgctcgttttgattttgatgccactaatctggataaacacgattaatcattcgcatttgacgttctagaaaattggcctctcaaatgttaactcataatatcagatcaagttttaatttctgttatctggaagatacattgaataatggtacttttatataacctttcaatatcttaaaaaatgagcaagttttatatgacttatttaaatgtagatcctgtgaatgatcggtttattttccacaattttcccatcgtattttgcatttcccagcagcagcagcttcactggcagcacttttcgcctttcccactactttcataatgttggcaaacatttaacgaaagcccataagtacaatacacatgcccaggaacttcggcagccatataatgcaaaatttccctgcactgcggatgttggatgttggggcttttggtatctgctgttgttttccctcccctcaattcgatgccataagatgcgatgcggagtggaagtggttggattcagattcagatacatgttgccgccgtcaatgtttcgcctttgtctcgtaaatttgaacatttttattataaaaaccaagcggcatggctgctgatttctcacacaatgcgcgcgatttattttgtatgcattgcattgaggctgaaattgattaattacaaagcggaagacttgctgatccaaccgggctaagaccaacaacaacaacaacaacagcaacagccattttgttacgattgttcactgcttcatttttcaagcttaattttctgtattattttgaatttgtttttattgccgcaatcaagttggcttcgtgattggctgtaaccacgattcttcagttgttgttctattattttattagtctgaaggtttctgcattatttaaatgacactgacaccactgacatttgaaaattacattcctctaatgcaaatgtgtgaatcaataaaaatgtctaatcgcttaggaaacaatttttatggttgtaacttgaatccaataagtgacacagacgagataagaattcacaatgcacattaaatatatacatatgtaataagattgtgaccatgaaatatataaaagcttgaaataaactagggtaggtttgtagtctaataccttaagaattacaagtacttcagagtgctttgtatatatgtaaacctatattgtataattaccagatctggcgccttcttcggtctggcgccctttaagtatctcatggattgcaagtcgtagctaaaatctcaagtgacaatgggggccagtaaagtcagttgtacttacacttaattgctgtcaagtgttttgcaaaaccctaaattgccatagaattcgtaaagaagaaggggttatccagtaaaatgtcaagacaattaattccaatcgacttgcaatagatacaaatttgtatctctttatagccgcgatgccgcaagaagttgagacattatgtttttgatgtcacatgtgtgtttgctttttaatgattctgtgtgccacttaaatttcacggaactgccgctgttctcgtgttgccgctgttttaatgagctattaaaatgtttggggaattgtagtacatgtgtaagagcaaattgccgcggaagaaaaccactaacaggattctatacaagtttatttttatgaagaggatttgttatatgccgcttcctactaattactataagatcagttctatttatatacatttttgtaatcccatatccaatcgttaaaaaatcatattttcaaccaaactaacagtgtttttctttttctttccaggtaagttttgatgttaattgccgtctaaggtcacacaactttgattagcacatttgtaagtaaatgttattaataaacacacatgaaatagttcgctataacaatggattatctattttcgagcactgatctcacttgtataagctttacttaatatgttgtaaaacctttttcgacacactccattagacaaaacccaagcataaacgcttcatttgccaaatcatttaacataattagacggcaaacgtgatatgatctcataaccagtttccatggctggcaaatcctttcggttaattggcgagccgagtgaagaacaaaggagttctacctgtgtcagttcaaattcataattcaaacatcaattccgagaagcgagtgtgtggacacaatatttcataagtgtctggcaaaaggtctggcgactgaaaaacgaagctcaagtcaaactcacttccttttggctgaagtttcgttattgtttcgactttatttgcaatcaaacagaaaagtgcacgaggcatggaagaagctacaccaccattaaccttcaagtcgggttcgctggtattacttttggtttttttttttgacaattttctgagatgtattttgtcgtttggttgcgcaaataaaacgactacaacgcctgacagcagcgacaacgaggcgagtttgtatctaaaatcaacaagttcacgacgacatcgcaagccaaacagcccaacagccaaaatacaaaagataaaaacttttaagcgtcgggcaaatacagatagatactgaataacaccaagaccactagcaccaatacacatgctacccattcattgccagacctttgctcagaaggtaaatagaactccaaacaaaaccccaaaactgaacctctcactcgtttacccaatgagtttggttttgtgggtggcaataaccaaatcgggccgaaagtttccattgtaaagtgttggatttcgtcagaaaactaatagatacttcaccaacgattagattgtgataataattttccaaaattgtattaaaaagtttctaaaacactagtcgatacaattgcgagggttaaccaaatgggctgatgtgcttagaactgctaagaacttcatagatattatacagggtattcactgtaactatgtaaaaagtttccttagccctcggaagagtatgcatccatttttgatagctcgcccgtctaagatcctcactttcagtaacctattcgttcacttcacttcattttgaaaaatatgttttcataggtatgttggcagcctcttcatagcaatcccctgcgggttagattctcgtaaatgtcactttcaagacttctgagttcattcttggttctggccagttgagttccgacgcgaaccagtctctcggccaacaattgatgccgcagggttagccttcttcttaggttatcaaggaaattgtagtccttttcgctaatttggtcctcattcatctcgtcgtccagttggatgagacggtgaagcgttttgttcagtttcaaatggatgcattcacgttcgactttcaactgatcctcgtcggttttcttttgctccaatacctcgatttgggcaggagaaactattttcctcagatcattgatgttcagtgtaagaacgctagatgccattacttttgcaatttagttttatttccttcagtggtatttttaaaaacttctgtctgttaagaaaagtttgtaattttgtatgtgtgggctttttttttgtggaattatctacagcgactagctactcttacgatttctagaaaactgaatgctgaaaatgttttctccaagcatactgcctatggaaatgggatcactttgattttcataccatcattatcatacaaaagtaagatttaaaaaactgaatttggccgcccggtgactaatggcactggaaatcgatcggcagtgaattaaatttcgcacctttaattgcaattcaatacttttgatgaaaagttgccagttgccattgtaatggatatcttacgaatactttgtcttcgagttacagcctacaaatttgaccacaattgatgtcaagttaggggtttttagtttcaacgatttcggtttaagtttgctgcagtttatgtttactcagggttaagtcaaaaactaaagttgtagtttttatttaaaagctcaagagactaatcctagctcatttcttttgatcatctttgtccttgccctcctgtaaaactaacgcctcgattttcttgagattctcatcgattttctgtctcaaaagtttctcctctttgctcaacttctcggaattgggttcctgtttgtccgatggtttttcctttccctccgcttggctatctccttgagttctcctgcccatgggcaatcgagtgatcatgtgacgaggaatccgtatctctgctcctatccgattatcgtttttgtactgacccacagcgcgaataaatggttttagcggacatcccttggcttgggcttcatccatcagctgacgggcgtaatcgaagaagaaggcatcctcgcggagttcctccaattgggcctccctgttgtagttggtacctggacgggtctcctcctcgatgcgtttcttaacctgttcgtcgagatcctggcggagtttccttatcctttgaatatgctcctcccgttgctgccgcttaaactgaacattagtttgatggttttgaagccgctgttcctctgccagcctgcgatcctcctctgctttttgtctgctctttttggccagcccctcctcctctctttgcacagctaaacgggcgttcttggcctgttccttcgactttctccatttggcctgctcggcactgtgaacttttcgcatctcttccagctggcgcttatggcgctcctcatcctcccgtgcactgtagtgcaggcgaggagccagttccttggccagtttttcgtttcgccggatacgttgatccactcgctccttggctctgtctcgtttcaactgctccaaatctcccttggccttgttgtggatatcacaccgcacctgctccatctcctccagcatctggagtcgcttctggcgctgatcggacatgaccaaggaggccaatgcctcatccttttttttgcgctgcttggccgcctgcagctccttctccttggcctgctgatccttcatcatgcgctcattgcgttcccgctccttaagcgcctcctccaattccttggctttggtggcctagtggattggtggtacagttatatatattaatttcaataaaaatatgtacaaaactcacctggcgttccctttccctctctgcaattaggtgcaataactcctttttatgctcacttagctgttgacattgctccttgtgacgctgttgtgcctcctcaaaaccccgaagcacttgctcctgaaagatcttcctgtccagctccttctgttgctggttgaccctggcgaactccgcctgcacttctctttggacattgacacttcgcataacttcgctctgaagacgcgcgcactgcaattcccggggaccaggacgcagttgctccaggagtttttgggcagcctcgatgcgtttcttcctgtttttctgatgctccaggcgagcagccttgctttcctcctccgccaggcgcttggcctccagttgctcggcctgcaattgcttcagttcccgggcgcactcctcctcccgcgtgatgcagagatttcgaccagcaaatttccggaggagttcctcgcctccgattcgaagtttctcatccgcctcttcgcgaagctgctgctgatgcagttgctcctgtttggcggcctgcgtggcatgggcacggatgcgctggaatcgcttatttgagataaccactggtggtttttcacgcaaaatgggttcacgtcgctcttgtggaagccagcaatactgcatggtttaagttttatccattgactgaattatttggttgggtattattctgtcgatgagttgttgggtttccatggatcttcgtattgtttggtagttaaaggaaaagccttgtggtagccatggatccccagcgatgacctgggtacaaaattataataagccacagcaactctctttatcagttttgaattgaatgttatggcatcaattcaaataagttacctatgaatgtcttaaaaactgtaaacaaattcataagaaagtaatcaaaaagtcttaccatgatcagataaaaattgtatttaaccgtaaaaccgccaaatgaatttggtaatgcttgattttatcgcttaattccgcctaaatcatccaaactcatcacaccacaagtgtcgtaaccaaaaatgccaaaaccaaaattgccgagtgttaccaacattttgagtagttcattttaattaattagttttgcgagccgtgttcgcagtgcgcactgttgtccaacacagcgacaagttactgtcaacgcaaatggcaaagattttggtttgatggcttaattatgtccaaaagttatgttgaggccatttggcagagtcggcggcgcaagtgacaggttttgtgataaaagttgttgatgtgcttttggcaattacatttggccaaaatttttgtgggcgctttggccatccaagccgaaccgatccaatccgttgtggttagttttctggttttggggctccctctcgaattgtcatactgaaagccaagccccaaaagggcaaatccatttgggcacgcttcatttggctcgtatcattgcattgaaatcgtagattttgttcaagagggtttaaataaatttgattaacacctgactgcgaatccgtacaatcacgccggcacaatgctccgtttacaagccttaggaatattcatttcaattttgaattgggtcagtgctccgcttttgtcgctcgttgttggggtctcttttttttttatttagactcacatatctaacccaggccacagaaagtacacaaacccatgacgaggcgataaaaggagggggcatgcccaactatttacaccaaaatccaggttatatgagtacaaactttatcgctgggcaagtcacttcaaactttaaaggtgttacaatgcggtcagttactatagccaagttcttagaagtatgaaacttcattgggccattaagtttggtgctcgagctggtgcgctatggatattaaaatactttcgggcttttagtatggtattataatcctattgtagagattaaattaaattctaaacttccaattggaatatctaaatgctttcaatataatatttacatttgttatacttaatacactcctttgacccctttttcttaccactttagatcactgtgttagtcaacctctttgtagcatttagagcacttcacagtttcccaatgcctgtgacgtgaagtggtctataacttgctcacttacaccatctgaacatctgaatagcaacacatacaacaccttacagaggacagaagactgagactgagacagcgagtgcgtcaagtacccgattcttatctaatcgaaacttattggctccccatagactttgcctgataccgtgtaaatatacgactgccagtgattctacttggtacatactcacatacgtcgcatataggcagacagccagacatatatcacttgatcttcaagtgcgaatgacagcccggagtagaaaagacaagagaccgaagactgaagaccgaagaccggagaccacaagcctttcgcctgtccacgactaccgtccagttcgttgcttttgcttccacttgaatgacttcatgtgcccccgtcgtcggaaaacttgaaaaacttgtctttgtctctgtttcaccagaggctggggccaagaagacaacggggggtacgggcacaagtgggtacttacttgcactcgggaacttgagaactcgaaagctgggcaactggagaactggagaactggggaacagaagaactgaagaaccacaacggaagatcaagagcagccagaacgactgggccaacaaatgagtgcaactgttttagcccgaacctgcagtccagtttacacagaactactgaaaagaacagcacagaaaagaaaagaatacaactgaactgaactgaactgaactgaaaatacataacaatccccagtgacttcttcgtagactgtgtctgtgtctgaatcttccgtcgatctgcaagttcttggctctttctttctggtggttagagcaattaacatgcaattaagagacgtttcaatcttaagagccatggccaagaagacatcgtaaacactttatccggtggctgggtacaacttttgatgagccgatcggacttctcttgaagcttctaattataaagttccaatcgttaagcagcatagtatcgattctatagaaagtttggacaggaaattgattggatgcttatgccaaaggaattgcgcacagaagcggtgaaaaatgtgagggttctttgtaatttaaaaaacttcagcatacgcgtagtcatcaatcagatattcattcattttacataaatgttccccactaaattatctattaaattctcaagttctacttccagacattatcatttcgccttgtcatatgcttctttttttaagcaactgatttacggtttcgttagaaatcttatataagaaaacattgccatttcttgtctatgatcttgagagccaaaatcagttcataacggagcatttatagccatgttaaaagttggaattgtggtttttgatttattaacctgtcggtcaaacgatttacaaacaaagtcaagaacaataagtgccaaatactttcgagtcttatgtcatcttgtggttataactagaaaaatatgtatacacctaacttatgagattgtgcccgattttcagctgttcgaaaaaaaaaacgaattcaattgaaacgagacttttcaattttcggtggggttaaatcagttgaactcttaattgtgtagtttcattatcaattgaagcgttccgttcttttcactttaaatacgcctgacagtccaattcagtttggttcattatagtatagctgatttcatagggcgatatgtgtggcgaagctattaagttttccatgccagtttgccagcaaaacaacatttcaatgtcagctcgatcacgtttttggaggcaatttgttggtggattatttttatttttttttttttgaatttgatacactctaaagagcgtggcaaattgcccaagtcgttggatgggcggagtggcaagtatcggacttacatggggctttacactggttttgtcatccattgacaaacggaacacctgagactgcgattgggtaactaatataaccactcgatgttgttcgcgtaagttgagctattagatcttctttttagcgcacttagtgctcatgttcgctgataatctgaggtttatttggttgggtttggttgagtttcagtgtcatatcaagtgattcaagtgatccatagatgctgctccattaatcatgtgggtattatgactatgtgcagctaatatttcagatttttacagacgagctaaccgtgtaattattgggttgttcgttggcaaggtcagttattagagggaattacattttagctcaataatacgttttaagtaccatgatctctgaccagcggcccatctgttcaaccaacaattaatgattcatttacaacattcacagtatcttagaattcttgttttgctttgtcaattttgtttggtcaaaccagccaattcaatctgtcaatcaaacaattacgaaagtgtaaccgaatattttatcttagggattgatttcccataaaaagcacaaagcgtgctgattcttttcgattcttacaaataaaaagcgaaatcaatcaatcaaaaggcattaaaaactctattttgagatacaaaaactgaaaaaaaaaaaaaacgttgaaatcaagtcgaacttcgacggcggggccaatcacacgctctatttacagcaaattaaaaattcagaaactacaaaaacaaaagccgaacgagaaataacaaaaaacgataaaactgctacaaatattggtcaaaatatttaccagccccgcccaaagaaaaatttgattaatgatcttcagaacgaagctgagaaagtgccttaaacgccacaataaacggcagtcgatcgaagggggaaattaaatcttacacacattaaaaacaccagtaaaggagaaagatacaaatagggtatgtgctatgatgcacagagagaaaagggtcataagaacagagcagacttgagacctgattaaaaatatgcaatgtaaatgctttaaaattagttgtatgctgtgaaagataggacttctaagttgaagtatgatttttaattttgttattttctgaatttcttgactaatttttatgcccagtgtgtggcatccactccatgtggcgcccacacgtgatggccatcctcatttggtatgctgccttcgcagtctttgtggcagattaccatcgatggcgtcgcgtaacgcgccagacaaatgctgaaaacttgtcaattcctggagggggatatatatatgtatgtagggttacccagttgggtaatttatgcagatgtatgccgaatccagttgagagaaatattttataattttttttatacacttctgcaagtcgcttgtggcccattagcataatggaccaatgttggccagaagtaggatcttagatcagtagccaaaaccagaaatggccagaagtagcaacatacatatatcgctaatgatgtgctaatgtcgccaacaatgtttgacaaccaaaacagaaatattgtttttacaaattatggtgatagactcaaaatagaagacttatgccaagggggctcttaattttaagtatctgccagtataataatcagaatatgctaccttgttattggttttatattacaaaaagtttatttatttattaaggaaaatataattatacttatatattatagtaaactggtatctacgcaagcttctttgataatttcatatttatatcttctctttttttctcacgttattgcgaatttaccatagacaaaattggttttagcacattagcaacttttataaactattaagatagcatcttaaatgtatgtttaaacatatcattagcaaagcaaatttctgcagatttattgccaaacaaaatacccaaaaaagttctagagttaagcgaactaatatattaatatatttcctatttgtatgttgcaagtttgttattcttctactgtcatcatgttcactaaattaatacgctttcgatgaaaatgcttaattaatttgggcggcttgtttggtttatttttttctactcttaaagaaattcgaattccaaattagccacttaatttcagtctaattattaaccccaaaggggcaatacaaatccaaagccgagcgactagttagtcagatataagaagagatttttgggcagatgatatttcatctgcataattatgcattttagacccaccgattatgcataagactaatgctccaaggtcggattattgaggtggtcttttgttgatggaaagttaatctgaatcgattgaaatgaatttttaagcgatgacttgcctttgtatcgaattggaatgttttggttttctatatgaaatgcgtttaaaaaaagatcttggcttgcagatatcagtggtttatggatttagtggaacggaatgtgaaactaagagttttaacgattgtttaataaatggaattaaatgatgcttatgctaatagttcattttcatttaaatttaaagtgaaataaataatcagtcattagaaagcaaagaaagtggggttttgaaatttgcgaaccaaaaaactctgctatacagttggtggaaacattgaaagtggatcttataatatcactcacacatcaatcttttcagaaccgaaagcttaagagtccataaaaatgtaaattcaagatttattagctcttatcacctgtttttcactcccacctcgaacccgcataatgctggcaattatagcctaacaaattgcccaactcctcgacttggccatataaaccaaagcgaaggcgatgcactaaatctttgtgaactcgaatccattggctggcctaatgctaaatgctaaatgcagcctacaagcccgcattagtgagtgcgactgatcgatcgatggtcgctgccaattatggtcagcgatctctggaccatggctaaaaccgctgcattcgatacgaccacgatgaatgcgacgacccacaaaagcgccagagactccaaaagactgtttgtcaaaaagcaaaaatgtcttatgaatgggaacgtaaacggaatgatcgagtgaatgaatcagctgtgagtgttgtgcagctggggcgtattggaaatgaatgagttagccagccgacagacggggctggtggccaacttgtctgggcccgatacattcgtgcgtgggcttcccccaaaattgaaattgcaaaaaaaaaaaaaaaaaaatggaaaaattgtttacaagtacgaaatgccggcgcggcattgacttgatactcgacgtctcttccacaatgaaattgtcacttttcatttcgactcgaattgggctctgaggcactataaaaattatattgccttactgcccacgttgcagcggaagtggcatttgatttattcgcattgggtgatttttatatctgtgtttatgtgcgtgtgtgttggcaaatttccggcctgcttgacacacattcgaatttgcatgtgtcgcacaacttggaagtgccataaatattcacttaccgccgccatattcatttgattcggttttgactaatggtgacatttcactcaacgatccaactcaagatgccaccttatacatatggttccatatggcctgaacttgttgtcttttgccgcctttccaggaatgtgggtcaatgctaaatggtagataaaagaaaagacatatgagtttgaagtggagtgcagagaagtagagagttgaggcttaacacttgtgaaaactggaaattattgcagggaaggtgcttaaaatggagttctaagggagctaagaactatgctcttatacaaaagaaaatctgtatctctattggcaattatatttccagatactaatggtttgaaccacatttaattgaggtgggaatagttctctgagatatgtatctatttaaaatttcaatttaataagctcttacttaacttacttacttaaaatgaattgaaacttaagataatattaaatctgtctatgatataatatttttagatgggttggtatatctatatatataatatccaattgagtttcttcttgtgttcgtcatgaggttttacctgaaaagtgagcacagccctcagtgcaatggtccatagatttttccgctggccagttggcaacgcctcgtttttcctgcccaactttttcgtttttccttgtttttctttctttttttttgattttcccgcaggctacgcttaggtaactcttctcagtcgaactcaactcacgttttcacgaactaccagtgagcgcatcaaagtgcagaatctcacgaaatttgccattcgagcggctatttgggttatttatggtcgccgatttgtttgcgacttatttaagcggacagctctcgcggttttatgacacatttagcagttcgtttctgggtttacttaacaattcgctggacaagcctttcgaaataaagagggttaactgaaaacgttaaatgcataactgctagcaacgagaaacgaataagaagaaacatccaatttcgcgcttaatttgatttgtttttgtttgttttatcattttgttgttccagcagcacctttcacttcccgaatttgttttcctttattttgtcatctttttcaaaagacccctaagaacatgtacatacacttttatataaccactaattccgcagaataatgcaaatttgagtgcacaggaataccggtgtaattatagatcgcttcgattcgattcacttccgactgccgggaagctgactcatttaaaaaaaaccaacgatgacaaacactatccacacatcaacataacaacaatgccaaccatgacccacgcaaattgttaacaacaaaaggcgaaaataaactaccaatcagaaaaaaaatatatatttaacacaacactttctacccacacagtgaacttgaaaatgttttatcgaaacaaagcccttcaaaacgatcaaatttaaaacacaatgcagaatttatgataaaagcaattaaacataaacaaaaccaaaaccaaatccaaagtcaaagcaatttactgaacaaatattttgctcaaactttgaacaatgaaaaaccgccgtgctggaaagataatgtttcatataactgaaaaatcatctctagtgcactcggagaaatattttaaatatatttaagtgatatatacgtataaggctgagtaataatataaatatatatatatatatattttataattaataataagatctttgttattgctattattgaaaagtaacaacatattttagctataacaatacaatatcttttttttcgaattttgagctagagatatgtaaaatcgtatctgaaagatacaaattttaagccaagtgtggactctattctggctctattttgctgaaatctaattgaggctgcaaaaagttgtcgattgtggtcgtattggtggtggtcagtggtgcttggcctttttttctttggtggccaatggtaaatggtaaatggtccatggtccgttgggcgctcacttcaggcatgaattgatttggtctgggtccgcgtccagttggtctgtcaatcaattgtaatgaatacgcatttttctattggagctcccccccgctgggtcagttgtttctccacttaaccctgagctgtccaatcgatgtggcaaaagcccatttagaaaaatcctgacctgccctgccaaacagaagattacttttactacaattgtatataaatatttcgaaaaatcatacttttaaaaatacctaaaattaagaggttcattcatttcattttatttttaatgcagcattttataattgcaaatttttaactgacactaaaatctaccacttattcgacttttttaaagatagttttctcttctacatggagtgctacttttacgtttttaactaattcgcagacacacgtttttgaataatcgtttgtgaatagcctttgttttactgaagaacaagagaagcgcgtgcccttttgttttgactttatttattttattggcccataaaatgagaaacctgtttctcatttattgtagctaaatttaagtttagggcgtcacggttagtgttttgaatacggaatcttcttttcgtattgcgtagtatggcagcatttccatggttttggacaggtatcaatgtcacctttgtcaagttccatccattccatgcaaatgatattccaatgtgtgtcgtttcgccatttctcatccacgcaggatccaccataattgcaacctaagagatttaatattcaaaagagtggtgatgagtgctctgaatggatttaccctttagaaaagaacattctgtggtatttatgaggagcactaagcttagtacaaagcgtaacagaatcatttctgaatgaaatgcactaaggtgatgtagaaagcatgagtgtaggatattgaattaaatagaattcgatacagtttaatcagaattgccattaaaaaagatttagaaacttgaagtacatcattttacaaagtttatatggtgttcaaagcagcttaaggatgcattttcgcattctttcttcaattgttttcttctgaactttgagcactcgcattctaaggttcccacattcctctgagaactcaaccactttactacttatgcacttagaaatttgaatttgtggttaacccgccataactacggctatcatcgttccgcattccaaaaaggcattccgctgggaacgtttcgtttgggtcgaagaaaccacaaattgaattaggcccgagttcggtattaagaaaataatttgcaaagaaattacataaaggaaaacaagtgccaacacaaccccgcagatgcagacacgcagatacacatatcgcccacacgccgactatatagtcgtacgatccgtgcgatgcggtttgccaatttagcagaaataaaacgcccacatgcgacgcagaaacttggtagctttgagggggcaaaccggcatgccaccagcatttatttgcgaccaaaaaaaagagagagagaggaaaatgcggcggaaaattcaaatcaatttagcgcagaccgcaatggataaatccaatgaagcccagaattgtgctgcgcatgcgtagagaaaaaaaaaatggaaaaatagggaaaaattgcgagagggggcggcgatctcagtagctaagctcgcataatttagcaatttagatttggtttttccattgttgcattcaaatgcgagccagagagttcattgaacccaaaaacaggctccataaatcagcagcagctgagatctttcccatttgggccatgatttacgagccaagaattgcgaaactgcatccacgcaattaatttgtttaatacccatgaaattaagtatattaccacgctctatagaacaacgtgcgtgtctaagcctgataaatgcatataaaaatgtaaatgtttttacaagtaagtaccttcgggcagcccacactttatatcagatcaagtccgaataatcagctgccttttcttgctgaagttaagagcgtagaatacattgtagccaacaggaaaccattacatattctatattatagcaggatgtcatcaatttgaaatcatatagctgaagctaaacgcattgtttaatctatattgtatatcctatgtgagacatatttatatttttataaatagtactgatacatgctatatgcccctgattcccatgaccaaaataaatcgtatgcctcggtaaaactggaattcgatggccttttactattgatagccccaaaagcccacacataaaactgtaacctgggaggacagccaacaaatcatcatgtccagcaggtgacttgacttggactgcaagataatactttatcgattgcataagtacaaatggtcgtctttcagtctgctttctgctggccaagatggctcgacatgtccaaaaagcccagaccaagtggaaggctttgcgattcctgttcggggatttggagagtgggaaacaacgactgcgacaaaacaaccgccaacgagaaccacgtccggtcggcgggcaaagtggattacaagcgcatgggcttcgacttctactccaacttccatttccatatccacagccattcaagcccacttgacaaaaacgggaaagagcgtgaataacgaacgattcgactagggaatgccctatacttttatgatacataagccataacttcttgcttaaagcaatctcaattggttgtgatacctaatataagaagtgaaaatcttcttttctagataatgaatatttgtaagatcatttccaaaagttgcatttaccctttcgccttgggttaacagggtagcaaagcaggcaaccattttctccattatttattgcaaatcaaaagccgcagtttgattttttttttcgccagttctttgcttttcccgcgtgggacgtcgcagctgccagtcctccgaatcgaagaggattctgctaggagactgttggaaaaagaaggatgatgaggcggagtaggtaatcacagagcacagcccacatggactggcctatctgtgaactttgctggcaaagtcagcgtgttggatgatggcatacatcgtacaaaattgaccatcccccattccagccagcacatggcagcacttttgaacaactgttccgaatcaacaagtgcaccccatctgacatttgtttggccgcagacaaaaggcaatttacaattcgcaatttgcatagtgcagaaaatgccagtgaaaatgcggtggcatgtcgtgtgcgcaggcgcaacagcagccaatgcgccagatgccacaaaagcgagggaaacctcatctcaggggtggcaaactgcatgttggggttgcaactgcaactgccactgacgtcctcaaattgtgcaactaattggggagcgtagtatgcaaaacatcagatgacagcaaaaacattcgctttttaaagccacaaattggatgagagggttgtttctctagcacatgtgatggatataaaatatatataaaattatatactgacattttgtttttccttaaatattagttgtttaactatatagaattaatattcttaagaatattgcttaaacaattaagaaatcatttattcacgttgcttctgcttccgacgaatccaattgaacgtcagcagttttttactccaaatttgtaaacaaaattcgagaaaaaaaacacaagcatattaaaacgctgacgttcgttggccggcatttttacataatattgacacagaaagacaaagtgctaatagaaataataaaccaggcaggcggcgtagattaaatcaattacgagtacgatgccagtgcagtcgagtaaagaattccgctgattggcattggtttaaatggccagtttgtggggcaaaaaattcgaaggaggagagcaggtgcagttggaaaaaacaaaaaccaaacaaacgataaacgatcctaaaaaccaaaaaaaaaaaaaaaagagctgaactgagattgggtccaagacaattgacagttgcacaaacgagatttaattgacagaatcaatttatgcaaactgtggccataagacaagtgcagcgagatttgtgtatttagattcgaattttactacttttttggcagtttaatctggtaaggagtggaaactataaaattgcattcaaagcgaacgaccaagaagggaactgaaactttgctgtttcggtgctataaaaatctagctaattaaaatagttaaatgcactcgagttattttcttaaaatatctttcctgttattatgtatctacatatataccaaatgttattatcattataaaattacttttatagcctccatttaagtacactataaagtggtaatgataatctgtcggactaatcctgattccaggaatcataaataaacacctggttgtgaagccctttgaagggcttctcgtaatttgctcattaccatttcgaaacgctttaaactgtttcgcttttttatggatgccaactttatggactaacctgtttgccaatctccctttgcagatctccagtccatccgacgactcctggagcacgatgccagtggatccgtttgcccctcctgccgcatatccttcgacaagggcaagagacggaaactgatcgacacctgcggccacgagcggtgctattcctgcatgttccgcaacgaccagtgccccatgtgcatgaacagctcgctgaaaggtgagtccatccagtactcaatatccagtattcaacagccaacagtagtattcagtattcaatatccagtattcagtatccagatatgctgttgcgctgtgtatctcgtcgctgtttgcgcatatctctcggatatgccatatgtggcaggcaaatattttgttacatgttgagtgcaaaatgccgatgaaattgcacagccaccataataatgttcggtgttttgtttcttgtgttgtggaaaaaaaaaattgaaaattccgaaacaaatggctatttaagtggtcaaagatgcatctttaaagtggagcgaaaaagggtataaaaaaatgcaataatgatagccaattggtttcaagagtttatgcgtcattttattaaaatgtgtgctaaataaattgcaaggaacaaaataatattctgcagcggaagtgaaagccttcctctaaataaaatgtctctccagtctttttaaaatatttagttttaaatttggcaagggcctgaagatacatgggtacaaaatgaacactcaagaatttgcatagcctggcaatttattgtgtcattcaaatagcggttcagtttgcaaatgcagcactgaatatgagatacctggtctgggcatattcaccattcatttctggtaaattaatattcaaattgagtacaagttgcttagcatgcagagttcgtattgtcggttaacttcataaaaatcagaagctcgcggtacagtagtctggacaaagtggagactttaactcctactggttacatgcccatgaaaaccgaaagttatggccgtacttagccaacttagccaactgctgacacgattccatgggccaacttccaacttccaactcccatcttaccactggatttattagctgccaatcgtacacgatcgtgtcacctgttttggggcctctggctgtgagaatttacgatctcgccgggaacttcggtggattgcgctttatttatgatgagggctctgct

SEQ ID NO: 11951 - DNA, 552 bp, DROSOPHILA
gaactgcatccatccagatacagatccagatacatgtgtatataccgtataccagtgccgatacagatacagatacatacatacatgaggcagcctgcgaaccacaaaagatacatgccatgttcccactaaccaaccgctcttcgagtggcaatcgcaccaacaacaatccgagcaacaacaacaacaaccagaccacaagcttcataatcggaggtaccaccaatattaacaacaacaacaatcagcttggtggcacaaacagcgctaaggataaaggaaattttgaaaataattggagctgcaataaaacaaccggtcgtcgatctggcagtggaaatagttgcagttttttagtttgcagatctccagtccatccgacgactcctggagcacgatgccagtggatccgtttgcccctcctgccgcatatccttcgacaagggcaagagacggaaactgatcgacacctgcggccacgagcggtgctattcctgcatgttccgcaacgaccagtgccccatgtgcatgaacagctcgctgaaaggtgag

SEQ ID NO: 11952 - protein, 143 aa, DROSOPHILA
MFPLTNRSSSGNRTNNNPSNNNNNQTTSFIIGGTTNINNNNNQLGGTNSAKDKGNFENNWSCNKTTGRRSGSGNSCSFLVCRSPVHPTTPGARCQWIRLPLLPHILRQGQETETDRHLRPRAVLFLHVPQRPVPHVHEQLAER

SEQ ID NO: 11953 - DNA, 24221 bp, DROSOPHILA
attgccatccaaacgttaatgctctgggttctgtttctagttcccggtattgacattggcgaaatatctgcaaacatatgtgtatatagaatatcgatcttggtcagtcccgtttctcggcattttccgctctcgttcggcttgcaattcaatttgcaacaaactttctgcagctgaaattcatctcggtctgtttttgatttcctcggaaaattaactttgtttgcctgtagtcttgcgtctgctctgccagattttatagctgcacttttgtttatgttttatgctgtctatttacgcatttaatttcgttttcgtgtaaatacacaaaacagctgaatagagaatgtctggcaaggctcaaagaaaagctgcacccgcctccacggaaaatacggactctaattaattttagtttccaacactatagaagattgtttcgtgagtacgagaattttgtaaattttgaatatttttacacttttctgttgatatggtggtattaaaaacgtttacagcgctctaaaattgattttacttttcttttaatttatttccagtactaatagtcatgttgtatttcccttaacttgaaattgtagaagatacattaattagattttgtatttataactacaatatttcaaaatattgtattttctacagtttgtaaactagtaaaagtgcgtcttaggggacgactactcatttgtagagcttttttaaggggtaatttattgagataccaatgcacatccaaatagacaccaacccgatgaggcatcccgcttggcgatctgggcgggctcttctgttctagcgactatttgcgggctttcgcaaccttcgcagtggcattgcgctccgctcggcgacacactcgtgatgcaattcacccgaaataaattcccaagaataggaataggaaccgcactgttagtggccgccagtcaactaccaactaactaataagtcccttcccttccgtttctatcccccaggtgcagcggcccaactgcgtcagagtgttgaacgtgccattgcgagaatgccttctcgcggtcccacgtcatagtcaccatcattagcaccgggccataacgacattggcaacttgcaactagcaacactcccattagcaacactaattgcaactgcagcagcaacaagcgacagcaacagcaacaagcagcagcaactagcaactgcaacagcacaaatcacagccaaatcgaacgcaacaaagcttccagagacaggccaacgggacagcgagtgccccaatcacttccaggataaggagaagccatcccagttagtaaccagccatgcagttgctccttaaatcgatattcacctgcgcactattcgtgatctttgtgtatgccaccgcccagtcgctgctcaaagtccaggagacagaagcgcggcaggcgtaccttaatgttacctcctccagcagtagtaatctcagccaggacgatggccacttcctcagccggcgactaaggcaggtcagccatggcgaggagggcgacgagggcgcgccgtcccaaatggacgacgagttggaacagatgaccaaggtgcatggagaagcaccggacgcggaggagctgcgcgaatgtagcgagggtcttgtcctgccactctggatgccgcaacgcaacatttcggtgggtgaccgcctcgtccgcggctttgtttacttcgtcctactgatctacctgtttgtgggtgtgtccatcattgcggatcgcttcatggccgccatcgaggcaatcacatcgattgaacgggcggtggtggtcaagggacccaacaacaccaagcaggtgatgcacgtgcgcatctggaacgaaacggtggcgaatctaacgctaatggccctgggatcgagtgcccccgagatcctgctctcggttattgagatttatgcgaaggacttcgagagcggtgacttgggacctggcacaatcgtgggatcagctgcctacaacctgtttatgattatcgccgtatgcatgatctggataccggcgggcgaggtacggaggatccggcatctgcgagtcttcttcgttaccgccctcttctcggtcttcgcctatgtgtggctgtggctcatcctatccgtgttcacgcccggcgtgatcctggtctgggaggcgatcgtgacgttgctattcttcccgctgaccgtgctgtgggcctacatcgccgagcggcgtcttctggtctacaaatacatggacaagaactaccgggtcaataagcgcggcaccgtggtggccggcgagcacgaccaggtggagatggatgcggagaagggccccaaacaaccaatggtcacatccgctcgcggaaacgacgccgaggccttcgacgaggcccgtcgcgagtacataactttgctgacggagctacgccagaagtaccccgacgccgatctcgaacagctggagatgatggcccaggagcaggtgctggcgcggagcagcaagtcgcgcgccttttatcgcatccaggccacccgcaagatggtcggcagcggcaacctgatgcgcaagatccaggaacgcgctcacagcgatctcaccgaggttaaagcccagctgcatgcgggcgatgacgaggaggcggacgatcccatccgaatgtacttcgagccgggtcactacaccgtcatggagaactgcggcgagtttgaggtgcgcgtggtgcgccgtggcgacatctccacctacgccagcgtggagtacgaaacgcaggacggcaccgcctccgccggcaccgatttcgtcggacggaagggactgcttagcttcccgccgggggtcgacgagcagcgcttccgcatcgaggtgatcgacgatgacgtatttgaggaggacgagtgcttctacattcgactcttcaatccctccgagggcgtgaagctagccgtgccaatgatcgccaccgtcatgatcctggacgacgaccacgcgggcatctttgccttcacagactcggtattcgagatcacggagtccgtcggccggttcgagctgaaggtaatgcgctactccggcgcccgcggcaccgtcatagtgccctactggacagagaacgacacggccaccgaatccaaggactacgagggggcccgcggcgaacttgtcttcgaaaacaatgaatccgagtgagttgcattgttttattaattatttacaaatttgtatatttatgcatcaactaatttatttctgaataggcctttatggcctaacgtaaattgtgatacgatatttcctgattcaatttcatagtattgaatatttcatatatttatcatttatgctggcttccgagaaactcacagcattgaacgaaagtgaaaccgatatatctatcttaatatgttgcatattgccacagaactaatcagtttataaactaattggtattggattgcagctacaaagggagtttagatatcagtcaaaatttgtataaaatcagataaataattaaagcctgatttagctgacttaaagcatgttatgagcaatttaaaagtcagaactaaacacacacaaattatcctgttgggacaaaacaggacaaagtttctcgccccctttgttattgtgtttgacccacataaggctaaaccacctagataacattagttttcgctcgaaacgccgggttaagttttgcctacacttccatgccttgagtcctggatagcttcacccgccattccggcatatcccgacgcccgatgtcacgcaatgcgatctcccggcggagtttttcgacaaactcgcaatttccgctctgggaatagacaggcggctggatgtgcgtgagacagtgcgccgcgagtcgattaaagtcggtttgattggggcttttaattgccgcaccagctggcggataatgacattggcattgccattggccagcagcgagtttcagtcggtatcaacttcgaaaaatggcaaacatcgagcgcctgggaactcccatccccaaactcctaccgcgaatccattatgaaccggtgaatgtgtgtatcctgctgtgtgcccctggcccaattgtcctggccgcgtgctagatgacaacgccagacacccacaacacccttcccctccagacattaacaccctgctcgcagcccaagcaagctgtaattaattttgcaaaatttattcatttcgacaaacatttggcagacgacagccgcagtcagttaactgcgtttgcatatgtttttgcggctttcatggccatgtccgaaatgtcggccgacacgcaacatggccacatccacatcaaaatccgcatgtgggtcaccagttatggttcgagggtggctttttaagatgatttatggcccgagaaattgggcagcatatgccgggaattaggctggccgagaatctgggaacatggcttcaatttgatgggtactaatcatgacttacttgctgacttaattaacgcaacaactattcacactggcatataagatatatatcgaaagggtatttctaatttaaagatttagctaacgccatattaaccagtctttaataatattaaacaataaattttggttatctatggaacaagtttatactctcaaagatataagctgtttagcaactaaaattgtacagtagctatacagcataaacttatttctaattgtctgccaattgtttgctatagaatagtatctatgtagatatggatggtaattttcgttcactgtacttaatgtttattatgtgaagcacttacccaggggcacttgtcgtctgttgttgttccttagactccgctgcacaaagcctcatttatggctgtcccaggccgtcctggttttctgcactcccctgggcggtttcgcgtaaaattgtttcaaacacgtcgccacagacacaacatgaatttttgagggttttgcattattaagtggcaacgaaagcgggcagacaattagggggcgaggcacgttgaatgtcagcgagggaaaacttacaggaattaagtggcaacaacgatgacgtgcaacgtgcgaggatgtacaatgatgtgccctggtgtcctggtgcccgtgtgaaacgctcccaaagtgctcgttagactgctccggagttggctagtcagtgctcaagccgttttcccatttgccacgccagttggaatactttttaatgtttgtgttccgattggatggatgcaattgccgggaccccactttattcgcaattatttgccaacttttaaagcgcttcattgtcgccagagcccgaataaattctctgagcactgagtgcacgtcctggcgatccttgcggcccttttgcggcatttacagccactcaagttgaatgcctcgcggtgccgttggtaataatgtttgttttaatgttgccagtttcgctggcaacttgccagccaagtaaccccaacaatcctggccgactggcagctcaacttctcctacacatcgatgacgatctcaggggcatcttcttcgttcatgcctctcaaatgaaaagttgtcgtaaactagctgccacaattaaggcggtttttatgtatttttaaatgaccattaaagagcggttcgtttaaagttacccgaaataagtgaaaaacaaagcgggcaggcaaattacattgctggaaaatctactttgaagtcgatgcgtgcggctctgtggctgcaataaattttagttttttccctgctctctctctcaatttaatgaaaatcaaattccccccttgcgaacctcacagccgcagatgtacatattgtatatatgtacatgttgatatagccatactatccagacttttgccagctttcaggcagcggaaatgcgcaacagcagcagccacgtcgagccgctcgtcataaaaaacagcagcagaaacagcaggagcagtcagtaatgccataaaatttcccaacgaaactgaaaaaaaaaaccgaagaaaaagtaagtgggccgggctacaaagtgccaacactgttgcataaatttgtataatctcctgggctacgaagtgggcacatttggattgagttataggaccttaaataaccgacaatgggcaaatgggcggctttgagcacataaaagtcaaacattaagtatgcgaaaggcaacggagctaagagaaaatattttattaagcacacataatctaaaattgaaatttatgctattgtggtagctggaatccaaccaacttacaagctatcatcgtcctgtgcggcttttgctctcacttttcgtgtagcattctctgtggccggcggggaatttcccgtaacgggccatctgcctaacagactgacaagaaagcggagtctgccttcaagtggttgtcttcgtccatccacatccacatcctcatcccagccagcatccacccgtctccctttcctttgtggcaagctgcctaactacccatccatgtgggcacacaaccgcagtgccctcgacttagcccatttggaggcactcaggcactgaatcccgtgtaggttgtcaggagtctgccaacctgggagctcgataccttggggagctcataccttgttggtatatcgctaggtaaggttgccagttagcagttgatacatatctctattaaggaataagcttggttttaaaaatgttaaattgctttggaaacatatttattttaaaatatttactgtatggtcagtttaacataacaaaaatttagctctacatttctaatcggttcaggaaagcggataaaagtagctgaaaaaagtgaaggcaagttgcttgtaacaaacaaatacaggatgtggttccctttaattcccacataatatccgaaagggtatttacaattcgggtatcgggctgagtgagtggtccaaagtttcttatttgccattcaatttgctttggtttctgtgtttctatgttacaggcgatccctgctcctcctgcctgggcatataaattgccgaaggagggaacagacagcaagtcctccgtcctgtcgtcctgtccaatgtcaattggttgtttgtgctattgccgctgattcttgggtagcccgggcatctcatgtttatctggatgtcgttagcatgagctgagccttctggggtcgtcgtccccagatcccctccttcattttggttacttctgttttcatttgcctcgttgttgttcttgttattattgttattatgacatcaatgggagcaacaggggctggctaacttaatcatcaccatgggcagaatgaacgttctccagggccatctgttgctcaaaggggtatatagggttactccaaagtagacccttcatcatcccaaccactcaccttggtaacgccgatttgagcccgatacaaaactctttaaaccgccaagagaaagtaataaaatttcgctttgctacggtaattgcagcccaaattaaatagacccacctcgcgcctaggaaaagttttctaataagagaaagtaacgcctaagcgacgttaaatttggaaagcaatttcgctgacttaagtgctttcgccagcgtcaattttaaaatgtttatttttgtcaaataccagatgaaggttaagcaagtttatgttctgagttgaattggaagatcttagtactggaaattccagggaaaatctggactatagacttcatcgctttacatttgcaaatgtcagctaaaccaggtgctgcatgcaactcattgtgttttgtgacatctaaatctgcgcctgatttatgtttgccagcaaacaactcaataaagccgaagtcagctgaaagtgacagagcatctggcacaaatgatgaaaagcgcacaaagcacacaggcaatgtcaaaggtcacacacatactcccaaccggtggaaaaccacccacatatgtcacgaccgattgttggatatgtttacaggcactttgatctcttactcgtcggtttcttcattaaaacgtcacctaaatttgactcatggcgggaaaacgaagaaaatgtcggggaaatttggtgggcgaaaggcacgtttgaagactcaaggcgacctgtcgcccagctaattatgaattccaaggactgtggggtcattaaaaattacccatcgcgaagaagaggagtatccttcctgcaaagaactcaattaacgctgctcctttctaaagtgcaacgtgtagcccgtaatggtggggaaatacatttgttttaattatgcttagtatgccaaacaaattcacctgatacctaggtaaaaaggttcagtactctacgggattagggaaaggtgaaagttgaatttattaatctgactcggaaacatggaggtaataccatactttaaaggtgaattgaaaaatgtacttgcacatgctgggatatgagttatttgtgaatgtattgaatatgaattgtgaatgttattttgtgaatgctgctataaaaccccattggccttgagttatttatattgatagctgtaaacgcaaattgtttcgataaaagaatgtgctctgtattcacaacttattcaattacaattcaagtgacgaattttcgtgcattcatggactgtggctgcagcttaggctttcactcgatttgcattcagcatattttccgagagctttcgaacaaaagaagcgattttccctcgttgccaggaatgtggtagctcctttttaattaattgctcgttgagcggtcgtctttgtttcgctctcagccaggcaattggaccaagttttcaccaactctggaagctaatgaatgcgcctgggactcgtgggaagtgggaacttttagctgaggtccgttcagcttggcaattactccaacttttacaattacaactcaataagtaggtgtttttatgacggtcagtgcggctcggttgggtctctttaattttcgacatttccgtcgaatgttttcccccaaaagccaactatgtgtttacggccttttaatgaatgaattattactcatacgacatggctgcgcagcggaattgtctaaacaaaaacatgaaaaaacataaatacgagatgtggtttttcagtggtttacagcgaaatctgaggaaaaacccacacgtgccgaccaaatagggggaacaacttgtggggctgcggccaattaaacggcaattaaaaattccagaaaaacatctcacgtttatttactgtgtgcaaacttttgtcatggtcagcggcatttcgttgaatccttggcgaaaggaaaagcggcgaaacaacaactacgtgattttactgggcaccatatccgagattgattcacttaacttggctggaaagtcaattaggggtaacaaattgctatttttatagccgttacacattgagtaaaagggtataatagattcgttgaatgacatgtaacaagtataagaaagcccagcaactggacttaaatgctgaaaatgatgcgaaaattatattattattatattatttttcaatggaaaattcactgatcaaaaactcagtattataaaaaacattttcccctgtggctgaaagttgtgcagctttacttgagaacaaagaagcgcaacatggaattacatagttatcccacatgacacgaaaccaggacacacgacacgtgactggtgtgtctattccaaagagaagtatctttttctgtcccatggaccacccactgtgcaccccccactccgcccactccacctgcatgtgacatggctcgcgtagcccgcatttagctggcgggttattatttacccgatacgattgtgggcccaaagatagtgttgttgttaatttcgcgcctcaacaagtgtaatttgttgtctttgcggcgacacccgcgccaaaggcaaaggtaactctttgttccgcactccgttcaccagtcgccattcaccagtcactagtcaccagtcacgctcatttgtcgaacatgcattcaatttgccgctatcggaatgttcagatcgcccctttgccgtgcatttcatgtgacaagccggagataagtaggtcctatgtgtttaccagggtaaatattgtttaaagggcatttgtggtgccagcatgaaggaaataatgaattaaacacaaaggtcattactgaaaattattatagaattatttaatgaagagctgcccatgaatggttttactattataccaaattaccatcacaagttggattatatagtactgtagataaggctatcataaatcgataacattaccagataggttcggaattaatccgtgtatttatttgatagtttttatgattgcaatcactgcttattttgccattttattatgtcaaacataaactgaaggtgaggagataatcacgtataatttgtactccattttcactgaaatttaggaccttgtaaacttgtgaacttgtaaatgcggtgaatgataagcaggaactaatgttggtaataacacataagtatggtatagttaagggtttctattcatatatagttcaccccaatgaaatgtttgtgcacgttagccgaccgagacgtttttgatagactgttcaaattagggtcaatttaactgccagtctaaaatccatagaactcattacgaaccctcgctatccagtcaaaagtaaaagcgctcaaaatgaacggtcaacatttcacggaactcggatattttcgataaattttaaatgaatctcgcgtttacttcgtcaatattggacagcctgatagaccgatgtatcaacaacggtgactcgatgattaactttcggggaataaacacaatttcgttttaaatttattaaattaccagccttgacctttcacccgtcccagaggtggtctctcgcccaccaatagtcagcacttcataactttatagctcacattcagggataagccactcaaaatcactcgaaaatcgaatatgcatgtttgacattcacaataattgaaatatcgagccagcagcttgaggaatcttctggctttgtcattagcatataaggatatatgtattccccaaatgtaggtatactatctgtctagtctacatttatcgcaatatgtcgaaagcatggtacctggtaattgaaccgacaaacttacttaaccttaaccttaaccttaaccttaacctatactgcccattactgaacactggttacacttgttgaggagaaaacttctgggaattgttgaccaccaattattattcaatttaaaaaggcagcacgttaatttctacgtgtcaaactatttatggtcgtttcattgccctttaattcccaacgggctcaactcgaggaaggtcaggtgcagttaattgaatttcccgaagtcgcaatcaatctgacgctgaagttccctctcgaaattcagtccgcacgtccggcagttttcctggaaattccattaaaacgccggctggcaaatacattaataattatcgagatatcatgaataattgaccgtctgcccggggctgcatattgcaatcaacaccatcgatgacctacgctggcgtagccatcggcttccagggatttctgccaaggatttttagcacccaggtgatttgcacattttgccttgagttgaaatttaaaattcaaaacctcaaaagccacactgcgtccgcaataatatgatatgcagccgcaacgtcatttcaaaaagaaaactcccaactggaaacgacgttttccccccgcaaaattgggtggttctactgggattggggcagatacgtgggatacgaccagcgagcaaaagggaaaagtttgccagagttggcaattggggtttaatggttagtcccaacccgaaggtaggccccaacctccccccttcttgtgcaccgctcattgctatgcaaattgctgtatttttctttaattttattttcaagcacaaaacccacctcctcatctacccaccccgcattttcccgttttcattcccagttttccgagggtggcctcgcccttgcgttgactaagtaatgctattatgtgtgcttgaccatacgggcattgcaggggatttgtggggagataggggacagtttagccaccgagtttgcatgccggacaggagctagtctcgaagctcggtcaggtaattgaagcgctttccaggagccgtgaaatcaggctcacaggacgaggattgggtgaaccgaacaggacctctcggccggattattagcctgagctctggcatcaatcagttgagacgttgagtgtgtgggatgtgcgccagctgccggatgctaaaacatatccggaatccagaggtgcggtctgtaatcttcagcttacaggctcatccaaccaaattgtccgattttcgacttggacttggagttggccatgtgggaatatgattcactgctcttttgtttaacttttaccgagctttccccattccttcccatcttggcattgttcagtttaggatcctaattgtttttttttttgtcctgattaaagctagctttacggggtttctgcttaactaaaaggtgagtctgtccctaaacttctagttaagtggaaaagttttactatgctataaaagctcaggagatttaacaaattaaataatactttgggtaccgtttccttgaacttaaccaatgtgaaatgccaagagaggtaaagaaggtttttctctggttatctgcttttagaaaatgcttcatatctatgctctatactcatagaaccatcttaattccattgattagcgtcctatttaaactagtgacgaactgaattcctccaactgttcaactttgtgatattgacctcctcaaaccgcacttgttggccaagtgcaaacggtgaccgcaagcgagtccagaccagaccagtccggaatgacatgaccgcagaccaagagtccggccttccggttgggcatacgtctaaccagctgtcttcggccatgtctctttcgctggccaccattttccgcctctggtcagagaagcccacttgatagttttgcaaaatcaatagacgcgtcgcataccccttcgcttggattagtaatgggtgcgggtgggtgagaacgggcgacgacgacgtggtggttgccattgaaatcaaacggcggatgtggttccgggcattggcaatacaacaaaattagcattgaatgccagggcaaccgagtgctggcggctctgggctgtgggcttcccattttccgagctcggagctttgccgttgttggtttaatagctgtcatatggggaaatgaggtcttcgccaagcactcacactcgtgcggatataatttggcgcggaatggaatcggaaatcgaggtggaaacgggcatagagttattggaatcccagttagctggcaatttgcgtgcaatttttcaaattagtcaggccggtgatgacgcatgttctttaatgattttaattaccctcgccctttttatggaaccctgaaaattagtattgcaagtatgcaattacaaaactctcactacacggagtctgcccgctaatctctctaatggcatcgcagcacgacccaaaacgtggcaatttgcacatttccaagggctccaaactattggcgtgcacacgcaacggaacccgatccccaatcccgcaatcccggagccaagaagttggccaagaagtcggatgaggagcgcaagcacatcaaagtcctgatgagtttcaaactgtgaattacgagggcgctgatgggagaaaggcgcccagcacgaaaggcgaacacttggcgccgaataacccagttaagaattttcctggaaagcgctttaattcaatttgcagtttgcgttcgcataataaactcaagtgcaggcaaatgcaaatgcagcttactggatttaatgaccttcaaacttaattgttacaaccaggcggcatggcaaccttgcaccatctgcgtttccatcctacttgcacatggtatgaccgtcgcccaagcaggatgcgtaggccatcatatgcggaatggtgctctgttcgtagactccggtgaacaggtgcgcccagggacccaacgcgtagacgggcacatcgtcgcctccgtgcgagtccatgtcgatggggacacccgagggaaactcatcgtcgtggtctcccttcaccaccgtggtgggatccttgcgctccatcgtctccgcgtcgtagaaattctcgtaactcggtccgttggcgtagcttagaaccatgtatggtttgccatcgtgtccatttactggggtctttccaaatacatcagatccacggtactgaaaggaaataatttatttataccacggctagactactgcacaacttgtgaattcaatttaaatttctctactttgtaacaagtttgaggttgccagtccttataacaagttccacctaaccagatagttcttaactcatgattcctgcacttaccgagtatcctgcgtaggtgaacacatgtgagtgatcggcggtgaccaccagcaaggtgtcatcctcgctggtcagctcctgggcagcggcgatggccttggagaactcaatagtttcattcagagccatacgcgcctggttgatgtggtgggcctggtcgatgcgaccgccctcgatgaagaggaagtagccctgctcgttctggctcatgtactcgatggccttgcgggtcatctgctccaaagtgggctggctgctctctgttgtggtctccatgaggtactgcagatggtcgtcgttgaagagaccgaggaggcgatccgttttggtgacatccacggcggccaactctgcggcggtggtcacatagacattattttcgcttgctgatttaaattcatcgataaggttaagtccatcggtacgcttgccccaggattccagactggagtcgacaaagtgcttgcgtccgccgcccatgatcaccttcagcttgctgcccacctcgccgcgggccagttgataggcaatgtcattgattccggagcctgctccacagtcggtagccacctccgcatcgttctcccagtcgcgctcagctatgtgggcgtacactccagaaggcgaggcgtgagtgacgcgggtggtggtcaccagacccgcccacttgcccgcctccatggcccacttggcaatggagtcgacgtgggtgctctcgtccagcatgaccttgcagtcggtgcggggcacctggccattcacgccaatagttccctcctgacctttcacgccacacaaataggcagtggccgtgcaggcggagtcgggcacaatcttatccacggaataggtcttcgagaggcccgtgaaggggaagttttcgaaggacagggacttctcctcgccgcccaagagattgcgagccgctgacgtggtggtcacacccattccatcgccgagaaagaggatcacattcttggcctggcgcttattcggttcagaagccaacttctgctggacaaactgcactccctgttggcgccagtaggcgttggtatcctcgccatcaaccacccggaatgccttgccatgtcgttccggttccggcatatccggatgcatcctgtgctccctgcactcctccggagtacggccgcattccggagcggaccaagcgggatgggctaccagcacgatggcgatcagtagtgcgttcaacaggcggaacatcttgcacaagactgaccctggctagtggttactccgactttggcctatcgagagattcggctcgaaccgattgcgataagattcgataaggcagagacgtgttgctcccataaacgcgaaatcgcatcaaatctaatacgccacctaattcccttagtccgaaccgtgcttttatttacgacggccagctacaaattttatagatttatagcacgtgagtatggggacttgttgccgaccgtgtggatcatcagtggttccattgaaatgtcccggaaaatggctctcacattgggccattggccatcacgtaatcaggctggaaaatctcgcggaggcacgtgaatgaatggcattataaccagttaacgaaggcaatggtatgtgggtgggtatgccgcatttcacatttatttggagccataaaaagcgggtcataaacaggtgactgttttcgcctggtggttttcccttttaatatcaagctgagaaatgcaaaggcattggaatggaagaaaggcagctgcctgccaaccgccggaaaggttaaagttgaccatggcaaaagaaagtgggggagtacgttggggtggcttgaccttggcttgaccttagtttgcacttggcagcaaggaaattagcaagcaaaaggaaaatgagtggcaagcagctaagctgcaactgttgaatacgcaaatcttaaagtttgccatcgtgtttggccacttgaacttatcgctatcgctcgcaaaaccgcattgaaggtaaacaaactctgaacttaattgctaagcataatagtaataaattctttaaagcaattataaattgaatcacctttgagcacatttataatgtaaatatttatgttcgtaaaatgtctaatcgggcgtatacgttatgtgctgcttatttacaaaatacgcttaaaaattgattggaaatggatgggcggggcaaaaatgccgcagcacaaagttgcgcatttaatgctgcctaataaatttagattcccgtttcgagtgtcaagattgtggccattttagccaagtcaatgacattaatcaatggggccaaggctctcgtcttgtgtgcagtcaattcccacttcacaccacaacccattttgttgtcctggatttaagattaatccctgcgccctaatctcttgcaggaaattcatcgatctgttcatcctggaggagagcagctacgagaaggatgtcagcttcaaggtgcacatcggagaacctcgattggcgccaggtgagttttggccacacggcggcaaaagatacgtacccaaagaacccagaaaccccatccgcaatccgaaagtcctccgaatcccacccacccgaaatgctaaccaattacgtgaaagcagcccggcatcagtgcaccgaagacggcacaagttcttatctgtcctgttgagaagttcaacctgcgacacccgggacaccaacacttcagcacccaaactcttagccccatatccccatttaccccgcccccaactccaaccccttctgactctttcgctttgaccccgaatattaaaaacaggtggaaaagcccagaaatgaacgagaacagaaaaaagaaacgaaaactttattaattggaaattccaatttgaattgaaccaaattgttacctggtttcgtatgtcatttcgcatcctatcgcctcatgggttcttttatactttttggtctttaatttgtgttctttatgcttctagattccactcactaccgtaagccttgaattgtgcattaattaattttatttgaattgaacacgaagcgtaagcgtagagcgctgaaatgtggaacgaaaaaggggaaaagcgaaaaatctctttcgggtttcggatttttgagagtaacattttctttctgctccatttgtttccttcaccgagtgcggaaaatgcgggcaaaaaagtgcaaattcattttattcgtttggttttggttaaccccgaaaattctgccatttcacgagaataagaattatacatatatataatttaattgcgtaatttttaggtgttgtgtatgtttcagccttagaagataccccttcctgtttatgttttctcttaaatatttatttccccattcccttctgtgtacaattatttgtttcctttggatatacctaccacatatattttttggcaatgggcagaaaatatatattttgtgttgtttctgtgatgcctcatcgaagttagagcaattagaaaaactcactcgcatctccgtagccccaaatcgaatgctagtcgtctcagtccacaaagatcagatcctatccacttaaatcccctactccgcagcaacaccacatcccaataggtcccccgtactaaccatcgacatttgcttgtgaccataacatgaactagattaaacattcctcatacttgtctctctaatccaatcaaaccactcgcctccgtaaatgacacatgatcgatcctcacgcagatgacactaataaggaatcatttttcaatcgattttttggtatgtaaacgtctgttcttttgccacatatttgcatattgcgtgatcgatcgaccatttcaagtgttcagttaatagtgaatatgccagtaaaggtgatcaatggagagagatgctagtaagcaactaaccaccattagcccactcgtcgtgtacataaaatatatcggtgtcgtattcataaatgtatctgaatgtttgggcattgagtatctgtgtttgtttgtgtatctgcatctgcatttatcccaaacaattgcgcttttttcgacgcagcagccacgcacttgataaatgcgagcttcaagcttctgtaaagtaatacttaaaaaatcaaagcaaacaaagcaccaagccaccaagcaagtaagccgggttcgtcttcaattgaaataaagttagaccaggtcacagtttttggtaatgttttggttatctctatgctcggcggacatttgtaaacgcgcttgtgcccgctcctcccacattgttgtgtgcctgtgccccgacttgctgctcgaattcgatccgatctgatccgatctgatatgatatgatatgatccgatcccgatttataccgatccatatcatcggtaccactcaaacatgcctctctgcatcgccaaatcgatttgtaagtaatacacgtaaccgctgatgagtaaccgatatttggcttttgtttccgtaatttgtgttctttcttgatttccgtttaccgtgtattatctgtgtgttctagacctaaggcaatatagtttaagtgtgaacggcttctgaactaagttaagtccatgtcgatgtattcagttctgtcttgtcaagtatctacatatatgtatatgtatctgtgtgctttgatcctctggagatttaaaaccaaagctaaatgtaacaacccgattaaagaccaaccaccacagtcatcgcatattggttaactgaatatttagaaagtgattgttgaagcaatatccaacatgttcgagaccttttaacaacgattctctgaactctacccccaaaaacacaccatccattctcgattcgccattgtcgatgtctgtagaaaaacacgaacattccggagaacccactcgtgagtcattcaaatggggggtcctaatgtcaagatgtgaccttttgcatgcctggttctgtcaatccttcaatccttaaacctgtcaatctgcaaatctgtcctttgcttatgtctctgtctgtctaatatgcagttattaaatttctattttccacccaattgcatcctgatggcactaacatacacatacatttcgcaagctcattgaagtaactggtctgaaacgttaagtgcttttaaagcgtttttattttcaagacgatatgtttggtccttcaatgagtttttgattttgctatcctccccttcggttgacttgacccctcttcaattaaagcccgcatcccattaccgccatatgtttctaattagtttcgaactaattggggcgtatgtgtgctttagtttgaagtgcatatatttatctatatatttgtaaaacccccgctttaatctctgttctttatctatttcccgtcaccacttcgtttgtatgccaccacaaactatgtctgtctagttataccctctattttactccatctaatcttaagatattccgttgtgggggtgtggctgcatgcaatacggtgtttactaatctaaatcataatcagttgattaactatttgatcacctccctggcagacgatgaattggcagccaaaatcaaggaggtcgagaaaaaacccgttcaggatctgaccgaactggatcgcatcctgctgctgagtaagccgagaaacggagaactgaccaccgcatatgtgcgcattcgagagagccaggaattcaaggtgagtggattacccttgattagattgcacttggattggccaccaagcatacatatacaatacatatatatgtatagcccaatagtttcaaaatgctaatgaaagacaatcacattcacttgacggccagtaaatcccagctcacatttacatccgcgcggtaaagtgaatgcgagacagtcacacccattatgaatcccaggtggaaagccacgtccttatccgagcgccatatcgagttaccgtaaagcgctcaggtgcacggcaaataagcacctaattgtgtgcaaatctccaaatgacacgttgagtgctctgtttgttttcggtctgtgtgtgcttattgtctgtcggtggcgtatacgtaatgtgagctgggtaaaagtttgccatcaatcctgtgttttgactttgccttgtctaaagggtgtttcatatcagttctttttgaaggtatataaggttgttagcttcagtttattatcattattcttttataaaatattcaggctacagtcgacaagctggtggcaaaagcgaacgtttctgccgtccttggcacttcatcgtggaaggaacagttcaaagatgccctcaccgttatcccaggtacaccaactcggttttttcaatttgcaatcaatccattttcatgacgcaaacaaacttttgcagccgatgaaagtgagtttgataacgatgatgaggaggaggaggtgcccagttgcttcagctacgtgagccacttcgtctgcctcttttggaaggttctctttgcatttgtgccgcccactggtaagtatccttttcctgtccaaggattcactctataaccatcgtcccgattgcagacatttgcggcggctatgttacctttgtggtatccatattcgtgattggcgtcatcactgccatcatcggagatgccgcctcctatttcggctgcgccctcaacatcaaggactcggtaacggccatcctgtttgtcgccctgggcacaagcataccaggtgagtgatccgaaaccgccggctgaaatgtaaccttcacaaacaccggactcccatctgccctccagatacattcgccagcatgattgccgccaagcatgacgagggtgccgataattgcatcggcaatgtcacgggcagcaatgcggtcaacgtgttcctgggcatcggcctggcctggaccatcgccgccgtctaccacagctcccatggcatgaccttcaacgtggagccgggaacgtgagtagtcctttagtacatttaatgtgcttgccttaaagttagtatttaaatatctttaaatgaaatacttatgttcttgaaacttgggcaagtagtagacggttagcagagtgaatttgttttttgagtaaatttaatttaagaaataagaaaataatttcagtattttaacttcagtttctaagtatagtatcccttattctaataaatttataattctagcattggattcgccgtggcgctcttctgcggcgaggccctgattgccataatgctcatcatgttccggcgctggcacaagggcattggcgccgagctgggcggtccgaaagtatcgaagtacatcagcgcagcgatcctggtattcctgtgggtgttctacgtggttatatgcatactggaagcctacgacgtcatccgggtttaaggagttcgcagccgcgttggtttggctttggcttgattattcgcaatggcgttggacttttccgtcaaattgaagaggatcgttacggcggaaaacagagctaaccgatacttagaagctattgaaagatgctgtagatgcagtttttatatgtaaacttatgaaattgatttatatatatatgtgctcggcgcgatatataaatatttcttgtgtaaaatttatgttaatactaaaagtaaaatttaaaagtttaactaggtttaagccaggcttatatacaaaccatttttacgattattgtctctattcatatatgaattgtaaatacagaaaggctgccacggctcagcaatcttgtaaccgtaacgagatcatttactgttatgccatatatacttaatttactttctaaagaatactattatatttattatatcattctgtgtataacttaagtcattgttgttgtttgttaaagctgtacttaatcgaccccataaaatcaaaacgggaaaatcggaatcgatttagagtttaaatcgtgttccgtactccaaactcgatattgtctctccatttgccgaaaaccattgttaatttaatacatgtgtaagttttaggaaagatctaaaggttttagccaagaagaaacgcagtccctctagccatctactacaaatactacaattataactactactactgattaggggcctccttgacaactagttctagtcacctcacactatcgacacaagtccaactagcaacactttcattaactctgaccaaagcaaaaggcggcactacttactagcgattagctgttagcgattagccagaaagaccatcagtgtgtccacactgcactatgaagaactacacgtactaccagtgagcactaatcaatttacttaaaaaaagactttctattcgcttacgtcgctggtatcgaagtagacaaaactggatattaaggcaaacaccaaaacaatagcgaaataataaggagaattactagaattgattgtaaaccaaatgtaacgagcaggtacatattttttgtataatgtactatttttcatataacaaaattgtagcaaattaatggtgagaagagaagcctaatgatatttatagccacatgcataaatttgtattatatatttggggtcacacaactgtacggggaactcgttgagaaaactgcgccaaatttagacgtaattgattattaattactgcatatacgaactattaaacaatttaataaatatacaaacatgaataaataataatgtactaagttatactgtcaacgtttactgctagatattataattaaatttctttttaaatttatttctataattgcctttttatttcccttactaaaacgaacttcagacaatatctgaatactcctacgtttttcatagatcgcgatatataaatgcagttaacagacggttacaaaaaatcgaccagggtcagggtaagaaatccgtggcaaggaaatcaatatattgcgaataaagcgaatagtatatgaaatcgaggggcaagtgctgaggagcagtgaatgtaacaatacgacacagaggataaccagatatataagcagacatgcaaataaattacccatagacgattatctttaatggcaaaggcaaataaaacgatttaagtgcttccgacatagggtttaggtacttctagagaactaggagtagaaagcgtatctgaatgaagagaaagagcatgttactttagcaaattataggttccactttactatgattgcgttctttaacattatgtattgatttaaactattttaaaatcagttgcacaactaaatgatagggttcgaatttacatatatgtctaattttgtatgattaacattgcgttgtttatataattccctattcatttgacgagtttcaaaatcaataacatatgtgtaccatagtagataccatagatagtattcgaatctatgtatatctatatgttttgagggcaggccaagcagttaatatgtatgtgtattgtacaatattaatcatttgctgtttgttatcatgttttttcgaattcaaattatacctgcatttttaaatgtatacttatgaatgtgattttacccaaaaacaaaagcaactacaaaaatatactcgtatttactaaaccgataaagtatgcaaatagtcgaatagatcgaataccacatacatatgtagttttatatagcatatgcttggggtgacgatccaccgatctcactaaccgtatctcttctcactttaacacgctataagaaaataccaaatcgaaagctacatatttgaatatatat

SEQ ID NO: 11954 - DNA, 4546 bp, DROSOPHILA
ggtgcagcggcccaactgcgtcagagtgttgaacgtgccattgcgagaatgccttctcgcggtcccacgtcatagtcaccatcattagcaccgggccataacgacattggcaacttgcaactagcaacactcccattagcaacactaattgcaactgcagcagcaacaagcgacagcaacagcaacaagcagcagcaactagcaactgcaacagcacaaatcacagccaaatcgaacgcaacaaagcttccagagacaggccaacgggacagcgagtgccccaatcacttccaggataaggagaagccatcccagttagtaaccagccatgcagttgctccttaaatcgatattcacctgcgcactattcgtgatctttgtgtatgccaccgcccagtcgctgctcaaagtccaggagacagaagcgcggcaggcgtaccttaatgttacctcctccagcagtagtaatctcagccaggacgatggccacttcctcagccggcgactaaggcaggtcagccatggcgaggagggcgacgagggcgcgccgtcccaaatggacgacgagttggaacagatgaccaaggtgcatggagaagcaccggacgcggaggagctgcgcgaatgtagcgagggtcttgtcctgccactctggatgccgcaacgcaacatttcggtgggtgaccgcctcgtccgcggctttgtttacttcgtcctactgatctacctgtttgtgggtgtgtccatcattgcggatcgcttcatggccgccatcgaggcaatcacatcgattgaacgggcggtggtggtcaagggacccaacaacaccaagcaggtgatgcacgtgcgcatctggaacgaaacggtggcgaatctaacgctaatggccctgggatcgagtgcccccgagatcctgctctcggttattgagatttatgcgaaggacttcgagagcggtgacttgggacctggcacaatcgtgggatcagctgcctacaacctgtttatgattatcgccgtatgcatgatctggataccggcgggcgaggtacggaggatccggcatctgcgagtcttcttcgttaccgccctcttctcggtcttcgcctatgtgtggctgtggctcatcctatccgtgttcacgcccggcgtgatcctggtctgggaggcgatcgtgacgttgctattcttcccgctgaccgtgctgtgggcctacatcgccgagcggcgtcttctggtctacaaatacatggacaagaactaccgggtcaataagcgcggcaccgtggtggccggcgagcacgaccaggtggagatggatgcggagaagggccccaaacaaccaatggtcacatccgctcgcggaaacgacgccgaggccttcgacgaggcccgtcgcgagtacataactttgctgacggagctacgccagaagtaccccgacgccgatctcgaacagctggagatgatggcccaggagcaggtgctggcgcggagcagcaagtcgcgcgccttttatcgcatccaggccacccgcaagatggtcggcagcggcaacctgatgcgcaagatccaggaacgcgctcacagcgatctcaccgaggttaaagcccagctgcatgcgggcgatgacgaggaggcggacgatcccatccgaatgtacttcgagccgggtcactacaccgtcatggagaactgcggcgagtttgaggtgcgcgtggtgcgccgtggcgacatctccacctacgccagcgtggagtacgaaacgcaggacggcaccgcctccgccggcaccgatttcgtcggacggaagggactgcttagcttcccgccgggggtcgacgagcagcgcttccgcatcgaggtgatcgacgatgacgtatttgaggaggacgagtgcttctacattcgactcttcaatccctccgagggcgtgaagctagccgtgccaatgatcgccaccgtcatgatcctggacgacgaccacgcgggcatctttgccttcacagactcggtattcgagatcacggagtccgtcggccggttcgagctgaaggtaatgcgctactccggcgcccgcggcaccgtcatagtgccctactggacagagaacgacacggccaccgaatccaaggactacgagggggcccgcggcgaacttgtcttcgaaaacaatgaatccgagaaattcatcgatctgttcatcctggaggagagcagctacgagaaggatgtcagcttcaaggtgcacatcggagaacctcgattggcgccagacgatgaattggcagccaaaatcaaggaggtcgagaaaaaacccgttcaggatctgaccgaactggatcgcatcctgctgctgagtaagccgagaaacggagaactgaccaccgcatatgtgcgcattcgagagagccaggaattcaaggctacagtcgacaagctggtggcaaaagcgaacgtttctgccgtccttggcacttcatcgtggaaggaacagttcaaagatgccctcaccgttatcccagccgatgaaagtgagtttgataacgatgatgaggaggaggaggtgcccagttgcttcagctacgtgagccacttcgtctgcctcttttggaaggttctctttgcatttgtgccgcccactgacatttgcggcggctatgttacctttgtggtatccatattcgtgattggcgtcatcactgccatcatcggagatgccgcctcctatttcggctgcgccctcaacatcaaggactcggtaacggccatcctgtttgtcgccctgggcacaagcataccagatacattcgccagcatgattgccgccaagcatgacgagggtgccgataattgcatcggcaatgtcacgggcagcaatgcggtcaacgtgttcctgggcatcggcctggcctggaccatcgccgccgtctaccacagctcccatggcatgaccttcaacgtggagccgggaaccattggattcgccgtggcgctcttctgcggcgaggccctgattgccataatgctcatcatgttccggcgctggcacaagggcattggcgccgagctgggcggtccgaaagtatcgaagtacatcagcgcagcgatcctggtattcctgtgggtgttctacgtggttatatgcatactggaagcctacgacgtcatccgggtttaaggagttcgcagccgcgttggtttggctttggcttgattattcgcaatggcgttggacttttccgtcaaattgaagaggatcgttacggcggaaaacagagctaaccgatacttagaagctattgaaagatgctgtagatgcagtttttatatgtaaacttatgaaattgatttatatatatatgtgctcggcgcgatatataaatatttcttgtgtaaaatttatgttaatactaaaagtaaaatttaaaagtttaactaggtttaagccaggcttatatacaaaccatttttacgattattgtctctattcatatatgaattgtaaatacagaaaggctgccacggctcagcaatcttgtaaccgtaacgagatcatttactgttatgccatatatacttaatttactttctaaagaatactattatatttattatatcattctgtgtataacttaagtcattgttgttgtttgttaaagctgtacttaatcgaccccataaaatcaaaacgggaaaatcggaatcgatttagagtttaaatcgtgttccgtactccaaactcgatattgtctctccatttgccgaaaaccattgttaatttaatacatgtgtaagttttaggaaagatctaaaggttttagccaagaagaaacgcagtccctctagccatctactacaaatactacaattataactactactactgattaggggcctccttgacaactagttctagtcacctcacactatcgacacaagtccaactagcaacactttcattaactctgaccaaagcaaaaggcggcactacttactagcgattagctgttagcgattagccagaaagaccatcagtgtgtccacactgcactatgaagaactacacgtactaccagtgagcactaatcaatttacttaaaaaaagactttctattcgcttacgtcgctggtatcgaagtagacaaaactggatattaaggcaaacaccaaaacaatagcgaaataataaggagaattactagaattgattgtaaaccaaatgtaacgagcaggtacatattttttgtataatgtactatttttcatataacaaaattgtagcaaattaatggtgagaagagaagcctaatgatatttatagccacatgcataaatttgtattatatatttggggtcacacaactgtacggggaactcgttgagaaaactgcgccaaatttagacgtaattgattattaattactgcatatacgaactattaaacaatttaataaatatacaaacatgaataaataataatgtactaagttatactgtcaacgtttactgctagatattataattaaatttctttttaaattta

SEQ ID NO: 11955 - protein, 950 aa, DROSOPHILA
MQLLLKSIFTCALFVIFVYATAQSLLKVQETEARQAYLNVTSSSSSNLSQDDGHFLSRRLRQVSHGEEGDEGAPSQMDDELEQMTKVHGEAPDAEELRECSEGLVLPLWMPQRNISVGDRLVRGFVYFVLLIYLFVGVSIIADRFMAAIEAITSIERAVVVKGPNNTKQVMHVRIWNETVANLTLMALGSSAPEILLSVIEIYAKDFESGDLGPGTIVGSAAYNLFMIIAVCMIWIPAGEVRRIRHLRVFFVTALFSVFAYVWLWLILSVFTPGVILVWEAIVTLLFFPLTVLWAYIAERRLLVYKYMDKNYRVNKRGTVVAGEHDQVEMDAEKGPKQPMVTSARGNDAEAFDEARREYITLLTELRQKYPDADLEQLEMMAQEQVLARSSKSRAFYRIQATRKMVGSGNLMRKIQERAHSDLTEVKAQLHAGDDEEADDPIRMYFEPGHYTVMENCGEFEVRVVRRGDISTYASVEYETQDGTASAGTDFVGRKGLLSFPPGVDEQRFRIEVIDDDVFEEDECFYIRLFNPSEGVKLAVPMIATVMILDDDHAGIFAFTDSVFEITESVGRFELKVMRYSGARGTVIVPYWTENDTATESKDYEGARGELVFENNESEKFIDLFILEESSYEKDVSFKVHIGEPRLAPDDELAAKIKEVEKKPVQDLTELDRILLLSKPRNGELTTAYVRIRESQEFKATVDKLVAKANVSAVLGTSSWKEQFKDALTVIPADESEFDNDDEEEEVPSCFSYVSHFVCLFWKVLFAFVPPTDICGGYVTFVVSIFVIGVITAIIGDAASYFGCALNIKDSVTAILFVALGTSIPDTFASMIAAKHDEGADNCIGNVTGSNAVNVFLGIGLAWTIAAVYHSSHGMTFNVEPGTIGFAVALFCGEALIAIMLIMFRRWHKGIGAELGGPKVSKYISAAILVFLWVFYVVICILEAYDVIRV

SEQ ID NO: 11956 - DNA, 4241 bp, DROSOPHILA
tgtgaattcataattggctcactgtgctggcgctgtaaagattgtttatttcgttttcaggtttctgcgcattgcattaagataaccgcagctagatgctcattttattatacatatatgtacgtacatatgtacatacataagtacgtgcgcgcgtatgtttgtacatattttgttttatagatgagcatcataaatatatatatatatttatatgtacatatatctgtggaattctaatacatcttacatacatatgtatctgcgagttatttttccccgtaggcatgtatgtacaaacaacgatacatatggcacactctggtggtatcatttacaaacgcacatggatatgggaaataatacctcaacgccaatgtggctgggaaatgtgttacctaagacgtctagctgcccgtatgcccgatatgcgcgaaatcagtgtttactagttatccgcgcgatacatttagcatttgtattattattgttcaccaacgcaattctttattatcaaacccacatttattcgcgatgacactttgctgttatcgttatcgcagcataggaataacagtacgaagttgccatcccgatctctacaccggtgagagttgccagcccgatttacacgccggcttattcgatactaattgagttatcgaatgaccgtttgtttcgtttaaatttagtataacagttttttatttaatcatcattttaaattttttgtattttagaaatgtttttatcggtaactaaattatctactttccatattcttgtatgaaacaaaattttaaaagtatgtatcgactttatataccgaaataatttatatggttaaacttttccatttaaattttatgaatttatacaaagattaaaatgtaattagctcctgaaatcaggacaatgaaatgattaaactggtattttaacgatttaacttaagaaagcgggctcaaaaaacaaggatgagtaagaaattacaaagtttcgcatattgattttattttttaatggttactatatttttaaatacaatttgaatattttatttgttgtaataatttaacaatacacgccgtattgttggtaagctttagttttcttgtgactgactaaggaggaaaaagtcgttctctaccgcgttctattatttgtattgtgtgcttcgtagtccatgacttcctcatagattagctccttccactgctccacagtgtgttccctttcgtccacgctgtgatcatatggctccggagcgggctgcaagagatgcatgcaattaagcgattaaaaacattcaacattcctagaaatccagtttatgccagaatcacttacagcatccacttcctcagcatcataccacacgttgatatattcatgcttcaaagcctcgtccacagatatccgctgctctggatcaatgactagcattttactaagaagatttctagcgtcagaagccttccggcggctattctgattattatcatttggaaacaagccatcggggaaaagtctatcaaatgagtatccagtgtatctaggacgattttccacatagtttcggacggttggctgtaaccgttgcataaacgagggtgatggtgtacctaattgctctgaaaaaacgtaaaagttgacaatcataacgagaatcaagttatttaagcagcaacataccaataattttattccactgatctatatgatccgttccaggaaacagcacaccgccccgtatcatttcgcccataatgcaaccgacggaccatatgtccacgttctctgtgtatcccatgcccaaaatgacctctggagccctgtaatatcgggtgaccacatagggagtcatcataaaggtagttcctgcagtacgtgccagaccgaaatccaaaatttttagagtgcagtcggcctttacaactatattggatggctttaagtcctgcaaatgaagtatttcatatatttcatactcattttaaagatgtattcatactgtacgtactctgtgaataattcctgctgagtgtaaatgttttattccgcacaacatttgataaagcaaataggacattctgtcgtgatccaagtccatttggatgacctggcagagattagcgtccatcagctccatgaccaggtagacatcctgaaactcttccaagttcctttgcggcgtaaaagcattaagtaagccaattatctacggattaaatacctatgtttagtagaaatttgttaaagttaaaggtgcaagtttcatacgtttttatggttaacaagcttcattagcttgaattccctatatgctcgcttggcatgggttacattttggaatggtcgagatagtttcttaatcgccacattttgctgggtgatagtatcgtaagcggcgctgaaatgcattaaatttgttatttttttttttcatattccagctaatcccatctaatctaatctaatatacaatggagcgttacaaatatgacttcatactcatgcgaaatatcttaattgtttaagccaaaaaattgttaaatgtattatatgtaataacatattgataaccacttaccatactattccttgggcacctgatcctatgggccgtagattaatgtaccgactgtggatggtgaagttggtgtcccccacctcgacggtgtagtgttggtgctgagctgtcgtcattgttcactgattttatttattactagttgagagcaaggagcatatcggccttttcaagagggtaaataagataaatcaatacggttttacagtgtgattctgttttatataaggagcaaagacgtccgtatgtatggctccattctgaatgggtggaggcagttttcagacaacttcgtctggaattagggggtaggaaaacattaactttgcctggccttatttcggcagaatgttatggccattaagtgggtctctgttgtcgcgaggggtgaaatttactggctagtgtgtggcgagtttgttgccaaaccacgagcaaaaaatatcgagttccttcaaaaagatacaattgcataacgcagtcacttatttgagccgacttcgaatgccgaacccccttttctattgataagcatttaaatgtttgccgaacacatgtcgaatatggttggaaaaacacccaacagaaataaccgagcgtttcgttctttgagcaaagtgtttagcggcacgcacaggaaaaaaaaccgatttaaaatcgatatgtccggcttaaacataaaagtacggaatgttggaccacagcgatgtacatagcgttcatgtgtatgcatgccgttgcctgtgtaaatatgtacatacacacgatttgtatgcggatgaaaactgtaaacttctactggtatacatatgtgtaagatgtaagccacatacatacatatgcacatacagccacacaaatgtgggtcgataatttagtaacttttcaaactatctctcagataaaagatattccccgtattcgtacatcgaaaaagcgctcgtttgcgctgcagataataaagcggtctacgcttcgggtagtgtcgatatgtaaacgttagacatttgcgcatacataggtacatacactctttgggcagttgacattttatgttaaatatcaataatttttttcataaccggcacaactataattgctttcaatcgattatggcacgttttgcaggagtgtttcggtgattcgatatttgatgtgaatggaacgtaatagaatatttatttaccatttaacgaagaagtacagaatttcttgtgaaaatataaaatcgattttttttctattttattctacacactgggcactcaaagtggcgagcattttaaactatgttaatgttattgaaatttaagaatcaactatctgcggcactttcgcatgagaataattgtacatggatacaatacaatatacgaaaatctattggaatattcgatcacaacaaagttacttaaatcgatgtgaccagattgcagtaggaccaaaaccagaaacggctaaagtcagccaatcgacttttgattaaaattaggtttaattaggggtttaaaacctaataagtgttaataacttacaaataaacatatacaaatgcaatttatttaataaagaccaaaaactaagttggcgcagtgtttcatttcaccgttccggtcattagatattcctttgctcgacttatcgagta

SEQ ID NO: 11957 - DNA, 1797 bp, DROSOPHILA
ggttttttttcctgtgcgtgccgctaaacactttgctcaaagaacgaaacgctcggttatttctgttgggtgtttttccaaccatattcgacatgtgttcggcaaacatttaaatgcttatcaatagaaaagggggttcggcattcgaagtcggctcaaataagtgactgcgttatgcaattgtatctttttgaaggaactcgatattttttgctcgtggtttggcaacaaactcgccacacactagccagtaaatttcacccctcgcgacaacagagacccacttaatggccataacattctgccgaaataaggccaggcaaagttaatgttttcctaccccctaattccagacgaagttgtctgaaaactgcctccacccattcagaatggagccatacatacggacgtctttgctccttatataaaacagaatcacactgtaaaaccgtattgatttatcttatttaccctcttgaaaaggccgatatgctccttgctctcaactagtaataaataaaatcagtgaacaatgacgacagctcagcaccaacactacaccgtcgaggtgggggacaccaacttcaccatccacagtcggtacattaatctacggcccataggatcaggtgcccaaggaatagtatgcgccgcttacgatactatcacccagcaaaatgtggcgattaagaaactatctcgaccattccaaaatgtaacccatgccaagcgagcatatagggaattcaagctaatgaagcttgttaaccataaaaacataattggcttacttaatgcttttacgccgcaaaggaacttggaagagtttcaggatgtctacctggtcatggagctgatggacgctaatctctgccaggtcatccaaatggacttggatcacgacagaatgtcctatttgctttatcaaatgttgtgcggaataaaacatttacactcagcaggaattattcacagagacttaaagccatccaatatagttgtaaaggccgactgcactctaaaaattttggatttcggtctggcacgtactgcaggaactacctttatgatgactccctatgtggtcacccgatattacagggctccagaggtcattttgggcatgggatacacagagaacgtggacatatggtccgtcggttgcattatgggcgaaatgatacggggcggtgtgctgtttcctggaacggatcatatagatcagtggaataaaattattgagcaattaggtacaccatcaccctcgtttatgcaacggttacagccaaccgtccgaaactatgtggaaaatcgtcctagatacactggatactcatttgatagacttttccccgatggcttgtttccaaatgataataatcagaatagccgccggaaggcttctgacgctagaaatcttcttagtaaaatgctagtcattgatccagagcagcggatatctgtggacgaggctttgaagcatgaatatatcaacgtgtggtatgatgctgaggaagtggatgctcccgctccggagccatatgatcacagcgtggacgaaagggaacacactgtggagcagtggaaggagctaatctatgaggaagtcatggactacgaagcacacaatacaaataatagaacgcggtagagaacgactttttcctccttagtcagtcacaagaaaactaaagcttaccaacaatacggcgtgtattgttaaattattacaacaaataaaatattcaaattgtatttaaaaatatagtaaccattaaaaaataaaatcaatatgcg

SEQ ID NO: 11958 - protein, 372 aa, DROSOPHILA
MTTAQHQHYTVEVGDTNFTIHSRYINLRPIGSGAQGIVCAAYDTITQQNVAIKKLSRPFQNVTHAKRAYREFKLMKLVNHKNIIGLLNAFTPQRNLEEFQDVYLVMELMDANLCQVIQMDLDHDRMSYLLYQMLCGIKHLHSAGIIHRDLKPSNIVVKADCTLKILDFGLARTAGTTFMMTPYVVTRYYRAPEVILGMGYTENVDIWSVGCIMGEMIRGGVLFPGTDHIDQWNKIIEQLGTPSPSFMQRLQPTVRNYVENRPRYTGYSFDRLFPDGLFPNDNNQNSRRKASDARNLLSKMLVIDPEQRISVDEALKHEYINVWYDAEEVDAPAPEPYDHSVDEREHTVEQWKELIYEEVMDYEAHNTNNRTR

SEQ ID NO: 11959 - DNA, 13332 bp, DROSOPHILA
aaaaacatgaacatatttttgtaaaatatttaattagcgagaaggacacagcgtacacgtatattttgtggtttcgcatgttgttcgtcagtgtttttgtgcaattatttgaaagatttggccaaacgcgaaacgcaacagaaagaggagaacacaataagacaataacaaattcgcagcgcgtgtgtcgttgaatgtgcgtggttgtgtgcgtttgtgctgctgccaaaagaacgcggatataaacaaatatccatttggatcgttggagctgttttgttattgtaagtaatgcagatttatgtaattcacttgtgtgtgtgctctttttgaccagtctttgttgttgtttctgcgctatgaaaacagctgtggcgttgccagacaacatagcgctttatataattttctatagggctgaattacacataattgctgtgcttagcttaattattacaacattggggccattatttattttccttgctaattacgagtgacatgtaaagttatcgataaatcgattggctcgttggatggtttgttatggcagaaggggttccaaacaacgcactataggctgaatggtacctttttgtggccaaaactccattctgtaattgagtgttgtaaatagcgcttttaggtatattagctgaaacaaaaacttatgtttaacttgagatttaaactgaaaatagagaaatctcaataaaaaaacgagttaatttaatataaggggcggtgccacgaccagaatttttggtactataaaagatatgggctagtgtcacccaatgcaaataacataaacaaaatatctctccgatttaaagttattaattttggccacaaaaaggtaccattaagcctacagtgcatcgcacgaaagcaaaacaagcgagaatgattgatttttcgtcgtgcgtcttcgggcgagtggcagcttcgtggaaaagcgggcagcagtgaaaacttttggcatcacagtcgttgctgacgagcggaagggaccgcagctcgggaaaatcaggaaagaaaacaacgcgtcagggcgctcttcttaaatttgaaaattaaatgcaactaaatagcgtaaattagtcaaaagtgtaaatagttaaaatcgttttataaccaaaaattaccagtgtaaatcgcttattagtgctgtgttaaaaatagttaccgttgtacggaaagagagaatcgagtgcaaaggaattttcctacgtcacaggctgtgcgtttgtgtgagtgtgcacccccggaaatgtaacacgcacactggcgcaggaaaaacttgcacctgaaagttttcgtcgtgttttccatcttcgtgcgctctcggcattcgacataacacaaaaaaaaataaattgaataacgcagcaaaaggttagttatccgctattcagtgcacctgtcaaaaatcctatttaaaattcggacttatttgccccagtttttatccagggctggcattatctaccgtcagcgcgtgtgtatattaagtgagtgtgcgtgcgagtgtgtgtgtgtgagagagtgtgtacgtaaccaattggaactggggcaactggcaaatacggcaacgaatcggtggagcaaagcaaacgccgcaataaacccctaaaaaatctccaaccccgtgaagcaagcacgagaaaagctggctgaaagctgcaacttggcccagttactttggctctaattgcagacgtgataatagaagtgcacacaaagcataatatttccagaggggtgggtgtgggaccaaaaccaaaaaggggagaataaaaaacagcagcagcagcatgacaaacaaaaacaaacttcatttgccaagagcctttcaaccaaatttgtttgcacactcatagctacagatagagatacaaagatacaattgcatttcagttgaagatgagcggctcttccacttttctcggtttctgagctctcgagttggtaaacaaaatttcgaattttttggggtggcaggtagaataactggttttataaattaacacttggccacattcaggggtagttttttaatgggtttcttcgtatcactttaaagcattatcaacaaatacgagttaagatttactattcgctgctgcacaccctaaatggaaaaactaaataaattttgaaaacgatacaataaagaaatgttaaattcaataccaactaaaaaatacagaaaaccaaagatgtaaaaaaaaagaaaaactgatctagaaaataactccttaactactgccaagtatattttgtagaagaagctgtgaaacttgggaaagtacccctaaaataatgccccaatcctaagccgccgctctttttgaagctgagccaagcagtctgtgcttttggcggcacattacacttgtttacttttgaagtgtgcgtgtgatacgcctgtgtgtatgtgagtgcttcgtggtgtgtgtgtgtgtgtgcgctccatgggggcgttactgtctttgttgttgttattgctgtacgtcgtcgtcgttccttcttcggctattttttgggggtcgctctcgtctcgtttgtagggcaaaattgtgtattgattatgccagttttattttccttttgtctacatccccagcccagtttcaaaaactggaaaagtgtggggcacctgcggtctgtttttcatgcccgactgagccatttcattggcacagcgatttcgttgtctctccgcatttaactaattaagagcctctgtctgcccatctcccccctttttcagaacaatagacgttttccggtcgctcagcccaaaatgaagtgcgtgtccagggacagacgaaaagctttagaaattggatagtttagtgcactcaacgaaattttcagatactttgcatatcttatttttggacttaaaatgtaagaagcttaagaagaaaacaatacatatcatatgtaaatgctcctttaagtaggcaatattttgttcaaaaacagttttttttcgagtattttggaacaatactttatttatgattaaaatattttattgaattatttataataatactttgaccacattataatagtttaattttgatttaaattgcatattttgagaaactaaacatagcaatgtgtggcacctatttccctcagtgtttctatatgctgcgcgtattatatgcaaaacgggtagcatatttgaccgacatcgggaacagcgggctctgaaaatcgtttgcctccgggggtggcttttgtaattggaaaagcgatcaattgtaatccccccaccaggcgggttttcacttgactagcgctaccaatttagaactcgctataccccattatcaggccatatctacacacttttattactcatgcacaaaatacgaaaggcaaaagtttagaatagcacttgtttatttgttatttttggcccgtcgcttgccaagtttgcttttatcaataatatgattgattgctgttcggttccattgtttttttctttcacttttttcccacaacacgcattgcacattttgtgacccattttatctttggcttttcgttgttagcccgattaaagaacgtgaatagatagggaatttcttgttggccataaaaatagctcagtcacatcgaaacgcaattaccaatgcgctctgtgcaaaccgtcagtttctaatagccaatttagaatttaaagttcaatgggatatatacatttatcccagttttttaagcatatgcttatttagttgaatatattagtattttaatatacaatgttttgtcagcatattggagtgaaactattcacccaatttgtaacttatattttcttataaattttcctttcatcgttaaatggtaaaatgctctgcgaaaataaattttctttgaaatgattttctgatgagctggcgaagatcgtccaaacggtcactggtaaaaatgtattaagggttttaaaaatagcaaaataaaaattaatgtcaaatagctattgctgctgctttggtcgctttgttgttgctgccactgctgctttttttttcgccttttccccgtacgatttatttatttttaaacgcaattacgtgcggctctagtgctgcgatggcaaatgagaaagggggggggggggggtgttgtgcggcgaaaagtgggcgtgtggaggaggtggaggggctcgtttccccctaacaacacacgcatgacgttgacatttcgaaaacagcaagtgttcaggccaaaatatgatcaacatatcgcctgtctacctacctacctatatacccgcctaacgtttcgtctttctacttcactatcttttcatgtgccgctgattgatgtttgggacactcggattccgattgcgcggctccacaacgattccgatttccacgtgctccaattttcacattttcccatttcccccatttcccatgaagggcatctagggcagcagcggaactgaggcgcagcggagccgcccaagtgcagctgtagaaagtgttggtgcgggcgccatggactcgctcaagttaccaaagggtaagtgtccacacccggagatctcggcggaatttaacctgctcaagtggaaatcccttggtgtcacacagttaacttaatgtgaagataaataaatcaatgcccggtttgatttctcacgtttgcaaattgaactttttcaaatgtcaactaatcatttgttacttattatattgtctaatcgtatctttgattatatgtattgtattatttcgctttttgatcaaactgattaaaagtaattgaatttttttttataacaaaatggcactcaaaatgattttaaatgagcaagttatccaattccaagacacgaccccttcctgtgaattgctttcgattgctgacaacttaacccgtattttccattcaacagccaacagtgccaccagcagtgccagcggcagcaacagcaacctgtccggttcgacttccgcgtccgcatccgcagccacatcgcctacatcgtcaggaactgcagtgggtggcattctatccggtgccccaaaatcgccacctggcctgggcagcagcaccccgatctcggtgcgattcaatgccaacgaggagtccctggacgacatcctacagtccttccatcacagcaagcatagtcccagtggaggagcgagtggcggcggagatgcctcgcccacatcgaatctgctcgggatgaagaacaacgggctgggattggtcgtgggcaactgtgactccctctccagcagtccatcgcagccccagatgcatgccggatccgcatccctcttcggcgtaagtaaaaagtgcagcaatagtgaaatgctgtccaagaaataggaaaacgcctatctaagttatagatattatctttaattaacgcagcatggcaattattattagtttcgttgggagtccgctttaataggttacacgtgttggtatagtcacaactaaacatatctatccagctatcaaatatgcttattttgcaaattatttacggctagcagtttcaaacatgcttaaatagccatgactatagaaatttcattaagtacttaaatacaaaatgattttaggtttatagaaatttaatgagggaaagaattctaggtgtattctttggacacttcaaagcccatttatgtcgctgtataaaatccaactggaatggataggaaattgtctaatctagagccgttggcagtgaactcaatactttgtttattttccgcaccgttcgccctccctgggccccccttatcatttatcgaaacaggccgccacaaattatgattcatattcattcgtcgcgagtccaagtttgtcgcaattaaacataaattgtacagaacgcgccgcgtttgttcactgatcgttgtcggtcgccaattagcattcgcctggccaaattagtggaacacttatcttttgatttctgtgtacggccacaaatagtttcactttttggctgtccgatttcggattcgtattcagattcggattcacattcagatacaacgggtacggatgcgttggcttcgcagcgaacgtcgcgtgtggctatttcggtggtttcggggcgacataagtatgtgacttttgctgcaagcgcagaacatttgccaaaatttgcaacagatgtgccgctggcgattgcaaaattcatttggcattattactcactattgcaaaatgttcttttcgtttcatctctgccaatgacgatgcccccccccccaacaactgcaatgatgacgatgtggatgcttgatatgaacacagaacgacgaagttagtctgcgcaataatttcatgcaagccggtggtttcttcaatcgaaaaaggtgagtgccgaaattgtataacactttcctgggcggatgatgtgtgtccaagtgtgtagagttaacaaggaaccatcgtaacactaatgttgttgttgttgtcatgcgagctaatacatatcccacacaagatatatccatagttccatccacacaaaacaccggaaatacatgcattcgacacatttgcttagtgactcacagagcttagtgatcgcctcgaaagccaatcctacgagttagttgtatctatctatagggatgttttaattttaaatctccttgaaatgaaatctttgctcgtatggaaactttaaatttgcgcgcaaaaatctttgttctgtgatatgattttattttctagagttgccgctttgaaaactgcaagttatctggaatatagacgtaaaagattttagattgctacacatttaaaagccttattttgctgcaacccactttccttgaagtttttttttggccccaagttcgttgaccgttgacaacaacaaattacttggctgcagttttgtgactttgattttgtttatgcgcgcatatacacacatgaacatacatacatacatatgtatgtatgtatatcctgcaccattcgtgcatttttaatgcactccggctgcagccggcgtgtgccaatggccgtaaacttgcccgtccgtcggtctacgcttttgttgcttttgtcactgcacaactgcatttgttgttgctactgctgttgttgttcttgtttggagcatctgtggagtgcactagctaaaggatctgaatcagcagcggtggtgggtgcgctttgtttatgctgccttgcaatatgcaacatatatatacgtgtgtacctttttccttctttttttttattttgtatcctctgcccgtctgcaactttcagctcaagtgccgccccgtctggcccagtgggcggtggtttgttgtgggtgggtttgtcgtcaacgggacatcaacgtcaccaacgttccgctcaagttctgtttctgtctgctctccatttccatttgcttttttaccatttccctcgctcgcttttaaatattgaaaaaggcaagtctagctgggattttgctacctgagaagaagctattgccaccttcaaccgtttgacgtcattgcgcttgcctgattcgctttattgatttccgtgagctgatatcgtatgcaaacacgtctatagcgtctattggcggtcttgaagagcatttggctgtccgattttcaatttggccatcaatcagagttgactattttgtgtcgcctcgctttcgcagcacactgtattcattcatttccgttgcctttttaattaagtttccgggggctaattgcattttataattgcatttttcagcactgcctggtgccgttattatcgtatccaaacctctcgtttcgatgatggtgctactgactagttgtcgttgctttttgcctttccgttgctcttgttacgcgtgcccttatcattcagcttcacaccaccaccatccaaccatccatccagttagccacccacgcaaccacccaccgcctttccatgttgttgccgcttttttatctatttacacttgtacacgtttctacatgtttgttatacacacatttcatcatcgtcatcagcacccgcagcatcatcatcatctgcaacagcagcagcaacatcgggctgtggatgccaccttaagccacccacttcaccgcccccccccctacattttcgctatcgccccaccccatccaccagagacaccgcaggcccccagcaacgcaagttgtctcgtcggcgacgttttaaattaaaaatttccatgcaatttcatgtctcggtggccttacagttgggcatgcactgcacttggcccaatcaattagcatgaacgtgtcaaagcatcaacactcacacacttaaacacacacccaagtattggccaacagtatgcgacggcagcagcagcagcagcaacaacaacaacaaacataaacgtaacgaattgatacacatttgaactatacacatagtttagttttctattagcggacatgtgtactcgttacctcgtattaaccccttgccgcccactgtgccgcgcgactatttttggttggctttcagttgttacttttttctagaccaatgattgtccttttttcggttttcgtttgtttctctgggcaaattttttgactgcctcgaaacgtttgttgtggtgctaagtgttggatattttccctttcgtattgaaaatcatcaaaatcaaaaaggatacatacatacatatgtatataaagcaatcgatcgttcgcgggcacagtgctaaaaccgaactaacaaatccaaaaatatactcaactgctgtgccgatataactgcgcctctttcaaaaagataatatgctaaaccttcgccaaaaacaaacaaaaataaaccacaaagcgccagcgtaacttgaaattttcattttgattggatgtgtcgccaaagccaaagccaccaagccaccacaaaaagaaaagaaaaaaaaaagaaaaccaccaagacaaaactcgttccaccaccaccaccaccaccaaatgccacccacactatttaccacagcaacagtaatcctacaccacaaccgccaacaacaacaacaaaaatcgggaaaattatatatataacaaataataccaaagcaacgtcgagcataaagttaaattaaaaaggagcaatttaggatatgagaagataagttaggatagttcggatggtttaggaatttaaacaaataaataaattttacaatatttcattgcgtttcttgttaaactgacatcatagcagtaggctttaagaataatgtagtatattatagtagcttgtctcatattcgcataagtcatttctagttaatgtttcgacaaaacaatacccaaaattttgtgtgtgattgtgagtgtccgtaaaaatgtacaacaaatttgttaatttcatgtaagttccgccacgattactttcagtttttcactgttttcgtttacaatacttttaattttcgaacgccgggcggcaatgggttaagcctacacctacacctacactaaaccgaaccgaaacaaatccgaatccgaagcaaatccttgaacaaattgctcctttttcataatgcaacaaactatacagacctgaatcaatcagaatcacaatatcagtccaaaattcaaaaatcatccactaaaaattgccaatgttgtaaaagcctcttcatcttgttgtcccttcttcctgcagttgcggtggcctgccgaatctcaatctcaacaagccgccccagctccaccagcaacagcatcaacaacagcatcagcagcaccagcaacatcaacagcagcaacagctccatcagcaccaacagcaactgtcgccgaatctgagtgccctgcaccatcatcaccagcagcagcagcagcttcgggaaagcggaggatcacatagcccctcgtcgccgggtggaggaggcggaggatcgccgtacaacggctctcaggcgggctgcagcagcggcggcatctcgcccattcctccccagatgggcgtgtcgcccaaataccgtcgcagcatatcctttcccatcaagggcaactcgcccacagctatctatggcaatatgcacatggacggcatgggtagtgggcacatgaatataccgacactttcgattggaaacggtggtggtggcggatctactggcatggtctcagccggagcaactggtggcggagatgcgccctatttgggcaacagctatggcaacatgatgacgtccaatggacaaatgcaccacggtggcggcttggataactcactgtgcgattatatgcgcaacatgtcgctgggtggaaatggtggtggcgatggcagcaacagcatgtctttaatgcaggacaggatgcgtgtgatgggcggtccgaagcatctgagcgaggccgatgctatggccatagcagccagtggaaatgatccatccgtctacttaaatgccctcaaaatgggttcgccatcgaggctctctccacactcgccgcactcacccatccagggcggaaatggaggaaacgtcggcgatggcacggctcgcttctcccggaaggtattcgttggcggtctgccaccggacatcgatgaggatgagattaccacttcgtttcggcgcttcgggccattggtcgtcgattggccacacaaggcggaatccaagtcgtattttccgcccaagggatatgccttcctgctgttccaggacgagagcagtgtgcagcagctaattgactcgtgcatcacggatgaggacaagctgtatctatgcgtttcttcgccgacgatcaaggataaggcagtgcagattcgtccttggcgcctggccgatgcggactatgtgcttgatgctaccatgtcactggacccacgcaaaacggtgtttgtgggcggcgtgccacgtcctctgaaggccttcgaactggcaatgatcatggatagattgtacggtggagtatgctatgctggaattgacaccgatccggaattaaagtatccaaagggcgctggacgtgtggccttctcgaatcagcagagctacatagcggccatctcagccagatttgtgcagctgcagcatggcgatatagacaagcgggtggaggtcaagccctatgtcctggacgatcagatgtgcgacgagtgcgagggtcagcgttgtggtggcaagtttgcgcccttcttttgcgccaatgtcacctgtctgcagtactattgcgaacactgttgggccgtcatccattcgcgacctggacgcgaatatcacaagccgctggtcaaggagggagccgaccggccgcgtgcggtcccctttcgctggtgttaacggcggcgctggtaggccgcgctgcacgacgagagacgccaacagagggagcaacgacaccggttgttaaacgcagcgctggcagtgcccagaatcataacagaatcatcaggatcgggaggagtcgcagaaggagcgggagtggcagcactagatgccgctggcggagatgcggatcgaaggcgaagaatctagtagataaccattagagacaacacacgcaccaccaacacccactcacacacaacagtcggatactattctcataagcaaaagacaattgcccgggggaatcacccattccgaagggcaaggtgcaaatacaacgggagctggacaaaggtgtccctttgaatagccaccagagtctacagttttagaggcgagaaacgaaagcaacatagtttttagttcttatttattcggcaatcagttttttttttttgtttcgcgcttgctagttttacatttgcttaaccgaaattttagttttgattttgcgttcgatgcctgcacagtattttttgtactttatatttttagcaacatttatgtttgctaatatgttatttaatctcacaaaagaaaaaaaaaaggaaccctcgtagtcagccaatttcctcgcaaagggccgtttacatatattataatctttttgtaactagataacttagtagccatcatcttgtatgccaatcgaggctagtcctaaaattattagtgagctgctcaccctctctcgaaaaggctttttgcttgagtgtgcaggggctgtccttaagttcctaaattgtgacaaaatcaaaactacatcggtttttgtattagccctttccgaaattagatcaatttataaaattcttacaaaagactttagaaaagacaatatgcaaaatgtctgacatttgtatgctagccatttcttacgacacaattggtaagagatcgcttaatcatatcatatctgcatacagttataatccctatttatttttgtttaatccttacataatacggtctattagcattcccactgaagaatcgtatatattatctgtgcaatatattcgattgcttctccgttacatgctgctaattcttgcttatctaacacttatataattattgtatgtgaaaatcgtacaaagcttataaaacacacaaaaccaataggtggcgattgcttccccgttacatgctacttattcctgcttatctaattatataattagggtatgtgaaaatcgtacaaagcttatacacttactaaacgattcttaacttgttaccactcctgccaataggtggctttcactacgattttcacacgactccgttttatgttttgctggcacattgaaatcacactaattaatgagtttaaaccccacactctgagataggttcttctttcctaatattgatggctcatttttaattataatctagtccacactcatacatacacgtacgtacacagacaacaacaacaacacatttacactgaaagtctgtttgcatttgttgccatttggcttaatgaagaaaaaataataataaaaatatacatataattagaactaaaatgtagaaaaaaacaaaacagtcaaattgcttgtgttcagtattatgatttatttatgattttccactgaaatgtcatattttgtttatttattaaccaattgtttttgttatttaatttacggcgtgttgctaactaagggacagcgggctcacctcccgaagctatagaagaacgtatatattattgcaaatatataaatatatctgtaatgtaaaaagtaatttttatatacgacatacatctattaacactatgaatacttgtattagacaactttttatatagaaacttttgtataaacttttttttattactcttatgattattcagaagttagtttagtccaaacaactgaatacaaaaataaaaccaaaaacgcgaagataaatagacatgctaaaacatttaaagaaaattt

SEQ ID NO: 11960 - DNA, 3597 bp, DROSOPHILA
cgagcggaagggaccgcagctcgggaaaatcaggaaagaaaacaacgcgtcagggcgctcttcttaaatttgaaaattaaatgcaactaaatagcgtaaattagtcaaaagtgtaaatagttaaaatcgttttataaccaaaaattaccagtgtaaatcgcttattagtgctgtgttaaaaatagttaccgttgtacggaaagagagaatcgagtgcaaaggaattttcctacgtcacaggctgtgcgtttgtgtgagtgtgcacccccggaaatgtaacacgcacactggcgcaggaaaaacttgcacctgaaagttttcgtcgtgttttccatcttcgtgcgctctcggcattcgacataacacaaaaaaaaataaattgaataacgcagcaaaagggcatctagggcagcagcggaactgaggcgcagcggagccgcccaagtgcagctgtagaaagtgttggtgcgggcgccatggactcgctcaagttaccaaaggccaacagtgccaccagcagtgccagcggcagcaacagcaacctgtccggttcgacttccgcgtccgcatccgcagccacatcgcctacatcgtcaggaactgcagtgggtggcattctatccggtgccccaaaatcgccacctggcctgggcagcagcaccccgatctcggtgcgattcaatgccaacgaggagtccctggacgacatcctacagtccttccatcacagcaagcatagtcccagtggaggagcgagtggcggcggagatgcctcgcccacatcgaatctgctcgggatgaagaacaacgggctgggattggtcgtgggcaactgtgactccctctccagcagtccatcgcagccccagatgcatgccggatccgcatccctcttcggcaacgacgaagttagtctgcgcaataatttcatgcaagccggtggtttcttcaatcgaaaaagttgcggtggcctgccgaatctcaatctcaacaagccgccccagctccaccagcaacagcatcaacaacagcatcagcagcaccagcaacatcaacagcagcaacagctccatcagcaccaacagcaactgtcgccgaatctgagtgccctgcaccatcatcaccagcagcagcagcagcttcgggaaagcggaggatcacatagcccctcgtcgccgggtggaggaggcggaggatcgccgtacaacggctctcaggcgggctgcagcagcggcggcatctcgcccattcctccccagatgggcgtgtcgcccaaataccgtcgcagcatatcctttcccatcaagggcaactcgcccacagctatctatggcaatatgcacatggacggcatgggtagtgggcacatgaatataccgacactttcgattggaaacggtggtggtggcggatctactggcatggtctcagccggagcaactggtggcggagatgcgccctatttgggcaacagctatggcaacatgatgacgtccaatggacaaatgcaccacggtggcggcttggataactcactgtgcgattatatgcgcaacatgtcgctgggtggaaatggtggtggcgatggcagcaacagcatgtctttaatgcaggacaggatgcgtgtgatgggcggtccgaagcatctgagcgaggccgatgctatggccatagcagccagtggaaatgatccatccgtctacttaaatgccctcaaaatgggttcgccatcgaggctctctccacactcgccgcactcacccatccagggcggaaatggaggaaacgtcggcgatggcacggctcgcttctcccggaaggtattcgttggcggtctgccaccggacatcgatgaggatgagattaccacttcgtttcggcgcttcgggccattggtcgtcgattggccacacaaggcggaatccaagtcgtattttccgcccaagggatatgccttcctgctgttccaggacgagagcagtgtgcagcagctaattgactcgtgcatcacggatgaggacaagctgtatctatgcgtttcttcgccgacgatcaaggataaggcagtgcagattcgtccttggcgcctggccgatgcggactatgtgcttgatgctaccatgtcactggacccacgcaaaacggtgtttgtgggcggcgtgccacgtcctctgaaggccttcgaactggcaatgatcatggatagattgtacggtggagtatgctatgctggaattgacaccgatccggaattaaagtatccaaagggcgctggacgtgtggccttctcgaatcagcagagctacatagcggccatctcagccagatttgtgcagctgcagcatggcgatatagacaagcgggtggaggtcaagccctatgtcctggacgatcagatgtgcgacgagtgcgagggtcagcgttgtggtggcaagtttgcgcccttcttttgcgccaatgtcacctgtctgcagtactattgcgaacactgttgggccgtcatccattcgcgacctggacgcgaatatcacaagccgctggtcaaggagggagccgaccggccgcgtgcggtcccctttcgctggtgttaacggcggcgctggtaggccgcgctgcacgacgagagacgccaacagagggagcaacgacaccggttgttaaacgcagcgctggcagtgcccagaatcataacagaatcatcaggatcgggaggagtcgcagaaggagcgggagtggcagcactagatgccgctggcggagatgcggatcgaaggcgaagaatctagtagataaccattagagacaacacacgcaccaccaacacccactcacacacaacagtcggatactattctcataagcaaaagacaattgcccgggggaatcacccattccgaagggcaaggtgcaaatacaacgggagctggacaaaggtgtccctttgaatagccaccagagtctacagttttagaggcgagaaacgaaagcaacatagtttttagttcttatttattcggcaatcagttttttttttttgtttcgcgcttgctagttttacatttgcttaaccgaaattttagttttgattttgcgttcgatgcctgcacagtattttttgtactttatatttttagcaacatttatgtttgctaatatgttatttaatctcacaaaagaaaaaaaaaaggaaccctcgtagtcagccaatttcctcgcaaagggccgtttacatatattataatctttttgtaactagataacttagtagccatcatcttgtatgccaatcgaggctagtcctaaaattattagtgagctgctcaccctctctcgaaaaggctttttgcttgagtgtgcaggggctgtccttaagttcctaaattgtgacaaaatcaaaactacatcggtttttgtattagccctttccgaaattagatcaatttataaaattcttacaaaagactttagaaaagacaatatgcaaaatgtctgacatttgtatgctagccatttcttacgacacaattggtaagagatcgcttaatcatatcatatctgcatacagttataatccctatttatttttgtttaatcctt

SEQ ID NO: 11961 - protein, 704 aa, DROSOPHILA
MDSLKLPKANSATSSASGSNSNLSGSTSASASAATSPTSSGTAVGGILSGAPKSPPGLGSSTPISVRFNANEESLDDILQSFHHSKHSPSGGASGGGDASPTSNLLGMKNNGLGLVVGNCDSLSSSPSQPQMHAGSASLFGNDEVSLRNNFMQAGGFFNRKSCGGLPNLNLNKPPQLHQQQHQQQHQQHQQHQQQQQLHQHQQQLSPNLSALHHHHQQQQQLRESGGSHSPSSPGGGGGGSPYNGSQAGCSSGGISPIPPQMGVSPKYRRSISFPIKGNSPTAIYGNMHMDGMGSGHMNIPTLSIGNGGGGGSTGMVSAGATGGGDAPYLGNSYGNMMTSNGQMHHGGGLDNSLCDYMRNMSLGGNGGGDGSNSMSLMQDRMRVMGGPKHLSEADAMAIAASGNDPSVYLNALKMGSPSRLSPHSPHSPIQGGNGGNVGDGTARFSRKVFVGGLPPDIDEDEITTSFRRFGPLVVDWPHKAESKSYFPPKGYAFLLFQDESSVQQLIDSCITDEDKLYLCVSSPTIKDKAVQIRPWRLADADYVLDATMSLDPRKTVFVGGVPRPLKAFELAMIMDRLYGGVCYAGIDTDPELKYPKGAGRVAFSNQQSYIAAISARFVQLQHGDIDKRVEVKPYVLDDQMCDECEGQRCGGKFAPFFCANVTCLQYYCEHCWAVIHSRPGREYHKPLVKEGADRPRAVPFRWC

SEQ ID NO: 11962 - DNA, 3608 bp, DROSOPHILA
ggcaacttcaatttgcgaaagtgatattctggtcggaagaaaaaaggagcaaaatgccagcgagcattagaaagagatggctggcacacttcttgattgacatgcataacgttgattaattaatgccgtcgatatgccgatgacagatgctgtatttcctccgctcgagcggaaatagaactaagtcgagtttcctggctctactatcttcggcaggaaagtgaagagcggcttaacccgtttcatttgcgagatgtttgccattcagtttacacaaatgagagtttttcgattgaggaatgcatttcgagtccttgcatcttcacgagggtcttcagccgtataatccggcaattagtaaatgtcaaattccatgctctcattgaaagtcaaaatttacagcctgcgaatcgcagttatatattatcgggcggtccaaggagacggcccctgtaaatatgcaacggaaatggcagctacgcatgtgattatgtttcctctgtctccgaagagcgcatatatgtgcaggaagatgttaacattcatgtgctacatacaaactcgcctgtaagcgaggctaagtccttggcttgattaaaagccttgttctggcgatgaattgttgccgcatactttggagcgttcttgtggaacatacctcgtatttaaaggtgggcaaactatcaagtttctgataccgtggtggagatgttaaagttcagaagtttttcacaagttgtctattggaattcatacgtgatgataagtttgtatacttatcgataagtgttaagtaggcctttttccaaatttcaaacatatacaaaaaaaaaaaaacaaacagataagcatttgagttgtacgtttaacaagcaagttgaagtgctcagtcaagatttatagcctatcagaacatatttaattcgagaaaaaaaaggtatatttggtaagaaatatcaataccaatgaattttaaagtgtattttacagccagaataagatgaatctaaccttgaaatcagaaaaggagtcaagtgctagcactgcagataaagtctcgaagctctacagcgagatagcaaatatgaaaagggactatgatgactgggcgaaaattatggaaaagagccacttaaaagaacaaaacgagattaagctttgggaaagggctattgaaaaagttaaagaaacggtgaaagacaacagtgccgagacaacttttgatgtcaggaatgacgaaaatgatatttttttgactatcgcgtacacgcccacccaatcaaagtgcatagaaataaaaaacagcggccacctgatgagcttcacattgcccgacgccttggagtggattcagatgaatattgcaggtctaaaaggatcaataaagaaaatcgtccttgatcagtattatgtgaattctcaacaagaaatacttctctggacgcaaaaatatttgaacaaaaaggaaacagcactacctcaaatcgcaataggaactgagggacagaccgaaatgaatggtaatatggtaaaggcacgtgaaggccttgcggaacttgtgaatcatagcgaaccggacttaaatgcatttatgctgaaagcagaagaggacagtgctttaataaaaaacttgacagatgaagttcttgatatgctaagtaagcttataagctttaattctgaagtcttgacagatacaatagttgatggtattagaaaagaaatcgatgagctcttggaaagacttggagaaggaaacaatacagctgagacagccaaatacccaaccagcaaccaaagaactgggaattctccgaaaatgatcgctcctactaaacatatttcgaaaaataaataccacactaaacataacatcaaaggtatggaaaacgaattgcctacactagatacaaacaaaaaagaaccgatgatggtcgatttgatggatataagaaagattaaagtcaaactgattgaatataaagcaaatgaaaccggtggcactaaaaatggattagctgaaaaacaatcgaaccttagcaaattaagtgacattcacctagctgacaaatttccagatcaagttaactcgatcgaaagtattacaaataaaatcgaatcgaatgcaaatgatagcaatgaaattaaccataggcaggattattcccttcatataaatttttttataaattctgcacaaaaggtaaccatttctagtattgatttagagagaaaagaaaacactgtagcagctgaagatgaaacatctggaacacaacctattaaaatcagtacagaaaatgaatcaggtggccataaactcaattcagagcaaaattccaatagcattaaacgtcgattccaatttccgaaagatttacatgggacccaatcattagagtttgatttaaaggaatgtctagatcaatacacgagtggaggtatgaaagctgcaccagaaaaaatgatgaaacataatgaatcctctgaacggatgtccaagtcaaaatgtgaaaatgacttggtttcctgtcctccttttaagaatatttcatttgacttcaacgaaaacaaaggaaagatgagaaacattttaggaccatgttgatctgagcgcaagtcattaaaaaaaaaaactccatttattaaaaataatatgaaaactaatcatggtgcaggggatacaattataaaagataatcccgacgctttaccagactatacatttggaaacactgtgaatgagaaaaactgtacagaaagcccaccaaagagtatttctaaaaatgaaaatagtagtaccattaaaatagaaattgagtccgggacagaaaaaaaaatcctgtacttcggatacacctttagcgatgattacaatccacgtgtgccatgatgttacaaatttcgataattcttttgatttatctgcgactgatgatatgaaatctataataaccaaaaacaaaacctcggggcaaaatatgaaataatataatgaccattccgttacggaagtagaaatcaatatgcttatattctttataaatttataattttgtacaatccccataatgatgcttttataatattgtaaattataacactaatatttcttaaaattcgttatacatagattattttagaagattaatattattaaacgttatatttttcttttggatgaaatgaatattatgaaaactaccaaatattcaatatatgcgtcacaacaaataattcttcaataaatataatttaaaaaaattatattttccaagtgttttacctaattgattgaatttgtttgtatttcttctgctgccacatgctgagaaagaataggtccttctctccaagtccaaaatgtcaccgtcccaaatgaataattaaacataattagctctcattaaacagggtacttcccccggagctggccaaaaccgaatacaaaacgcagcttcgacacacacggttggccagctgaggggcattctggccaaatcaaagcgaatcagcccagttcggtgaggtcggggtccgaagtgggatgttgtgaccccaataagtcaactgcaatacataaatttcgacacagcagccggcttgga

SEQ ID NO: 11963 - DNA, 1488 bp, DROSOPHILA
atgaatctaaccttgaaatcagaaaaggagtcaagtgctagcactgcagataaagtctcgaagctctacagcgagatagcaaatatgaaaagggactatgatgactgggcgaaaattatggaaaagagccacttaaaagaacaaaacgagattaagctttgggaaagggctattgaaaaagttaaagaaacggtgaaagacaacagtgccgagacaacttttgatgtcaggaatgacgaaaatgatatttttttgactatcgcgtacacgcccacccaatcaaagtgcatagaaataaaaaacagcggccacctgatgagcttcacattgcccgacgccttggagtggattcagatgaatattgcaggtctaaaaggatcaataaagaaaatcgtccttgatcagtattatgtgaattctcaacaagaaatacttctctggacgcaaaaatatttgaacaaaaaggaaacagcactacctcaaatcgcaataggaactgagggacagaccgaaatgaatggtaatatggtaaaggcacgtgaaggccttgcggaacttgtgaatcatagcgaaccggacttaaatgcatttatgctgaaagcagaagaggacagtgctttaataaaaaacttgacagatgaagttcttgatatgctaagtaagcttataagctttaattctgaagtcttgacagatacaatagttgatggtattagaaaagaaatcgatgagctcttggaaagacttggagaaggaaacaatacagctgagacagccaaatacccaaccagcaaccaaagaactgggaattctccgaaaatgatcgctcctactaaacatatttcgaaaaataaataccacactaaacataacatcaaaggtatggaaaacgaattgcctacactagatacaaacaaaaaagaaccgatgatggtcgatttgatggatataagaaagattaaagtcaaactgattgaatataaagcaaatgaaaccggtggcactaaaaatggattagctgaaaaacaatcgaaccttagcaaattaagtgacattcacctagctgacaaatttccagatcaagtaaccatttctagtattgatttagagagaaaagaaaacactgtagcagctgaagatgaaacatctggaacacaacctattaaaatcagtacagaaaatgaatcaggtggccataaactcaattcagagcaaaattccaatagcattaaacgtcgattccaatttccgaaagatttacatgggacccaatcattagagtttgatttaaaggaatgtctagatcaatacacgagtggaggtatgaaagctgcaccagaaaaaatgatgaaacataatgaatcctctgaacggatgtccaagtcaaaatgtgaaaatgacttggtttcctgtcctccttttaagaatatttcatttgacttcaacgaaaacaaaggaaagatgagaaacattttaggaccatgttga

SEQ ID NO: 11964 - protein, 495 aa, DROSOPHILA
MNLTLKSEKESSASTADKVSKLYSEIANMKRDYDDWAKIMEKSHLKEQNEIKLWERAIEKVKETVKDNSAETTFDVRNDENDIFLTIAYTPTQSKCIEIKNSGHLMSFTLPDALEWIQMNIAGLKGSIKKIVLDQYYVNSQQEILLWTQKYLNKKETALPQIAIGTEGQTEMNGNMVKAREGLAELVNHSEPDLNAFMLKAEEDSALIKNLTDEVLDMLSKLISFNSEVLTDTIVDGIRKEIDELLERLGEGNNTAETAKYPTSNQRTGNSPKMIAPTKHISKNKYHTKHNIKGMENELPTLDTNKKEPMMVDLMDIRKIKVKLIEYKANETGGTKNGLAEKQSNLSKLSDIHLADKFPDQVTISSIDLERKENTVAAEDETSGTQPIKISTENESGGHKLNSEQNSNSIKRRFQFPKDLHGTQSLEFDLKECLDQYTSGGMKAAPEKMMKHNESSERMSKSKCENDLVSCPPFKNISFDFNENKGKMRNILGPC

SEQ ID NO: 11965 - DNA, 6468 bp, DROSOPHILA
aaaatagaaactaaataaatttgacatttttgcaacacaatctagaaagtttccttccttgtaggtaaactattgaattccagaggtcagataagaagaaaagcccttatcagtacggaaacgtgtagttcaagtggttttatcagcattttgtaaccggattgagcataaaaatgcgaaacgtgcgaaaagtttattaaccctttgaagaaactggagaaatccgttctttgagggtccacgaaaccaaaataattggagagatcagtcgttatgtaccgatgtacgtacatgtatgtatgtatgtataaacataattgccgattgttgacagacggcgagctttatttatcttatttgctttctttttttaatttggcatgtgtgaaaaaactagttttgcactgtattggtataaacgtaaacaaactgagaaaacagttgattcaattgtttgtttatttataacgcgagccaattcctcaagaatttgcaacaacaaatgggtcaagttaaaaggaaagtgggacagacgtaaaaagaaaaaccacaaatccagtaacatttcttacttgattattatgatctatatttttgtatcaacttttaacacttaacattaaagttaaaaaatcacaaagctaccacttctaccggtgaaattgaaataaatatatttgtttgactgtcagcgaacagctgaaagtctagtgttgccatcgctcaccaactttcatagtttccctggcgccctctaggcggctgctatagcgagtcaaaggcagggcttggcagcacttaagtggctgagtgcctaatatttaaatacaacaaaacccatttttttttgttaatttagatttctaattactatgcttatgaacagaaactaaaaattcaaaagatgggcaccactaaagtcgccaaactatcgatatttgtagcaattacacgttttccagcacttgaatcgaagagcgaacgtttaccctcactgccgcaatcgcgaacaattttttattatggcacttgcgcggctcacaaacgatattcgctgataaacattcattggaaattattgccgaacgcagaggactccgccaattgaagtgtgcgcttaaaacgatcgccgtgcaggaagcggaagtgccccataacagctattttctcgccgctttctcccccatcacccccccgcaaaacaagcgacgccgatagaaacatttaatttgtgcaaatagccgaaacctacacggtcggccatcaaatattatgaaatgggtaagctgcgagggtaaccacgagtgggtccatttccacagccttgcgtttccacggcgcaaatcgaaaacgaactgcaattgcaaatgcatcttcaatgccgctgcaagtgtgtgtgtgtgtgtgtgtgcggtgtgatgtgagcgtgtgtgcgagtgtgtgcagttttcttagggcgttttaactgttatttattttcggtttcttcattttccgcaaatagtcactttttcgtgtttgtctgatttccccccccccccccccagcctgcactatgaatccgatttcgaaatggattgaaattcacaccctcaaatcttcagtgtcacttgcaaatgctcaaaaacgtatggaaatttctgacttgctatgatgtgacttaaaatcatatttttatgttaaacgcccttatattcataattggtaaagcataccaaatcttaattaatacaacatataaagggtagagcagcgattgagaacttttctgcatatttcaaaaccttaaatataacctgtgtacaatgagggaaatgtttctcacactgtagttagaaattaagtcatgttaatgctgtctaattgcagcatcagctttaaataacttgcccagtgttatctgaaggtgtgttaatgcatgcgatacatcataggtgcaataggtataatcctgtaaaggcagattgaattattattccgatacccctgcattcgatcaggagcattgatcccccgaatcagagcttaagaccacacatccaggtggaacttgttgcttgaggcttggttgtaggtcagtgcgaagaggtggctgatccggcggcgaagggtgcgcaccaggcgacgtccggcgacgatgtaagtagcggccatcgtaaacccaatcactccagtaaccacctccaagcaaatttccaaaaaatcgttaccttcacttgccttgtttcgatatgattttattttatgttgtttcctcgtatcagcagcaaaattcgtgcacttctaacatcgatattggccaatcttcaattgtgaacctcctgtttagttgcgctatcgtgcttaaccaattggaccagctattttattatgttgctaactcttacctccacataaatacacaaaaacacaagacactgggattagtccttatctatggaaatattcgatatcggtaaccttacactgatgtttaaacaaattcgaaaactgagcaccataaacaacaattagtaaaccatcattataaacaaaggtttcataatgtttgtaaaacgttcttcagtttgtttgtgccttataaatctgcattgtggagcatttactatgcttcataaaatgataggacttgatcaactaatcatagcattgatggcgaaaactaatatttcacatcttaaattaggactaaacaaacacaaacatatacacacttatacactgaaatatgtatacattacaagtagtttgacccacaaccaatacttttcccagacaatgccctcggccatcagtggcgcgccacatgcccacatacccagcaacgaggagtgcggcatccgcgatgtgtggaagcaaaacctggaggaggagttccgcaccatacggaaagtggtgcagaagtaccactatgtggccatggacaccgagtttccaggcgtggtagcacgtccagtcggcgagttccgctccacggcggactatcattaccagctgctgcgctgtaatgtcgatctgctgcggattatccaattgggccttaccttcatggacgacgatggaaagacaccacccggctactccacctggcagttcaacttcaagtttaacctgaggtaaaagtgttttgtttatgctctaatggggggtcctatattatcgtttgtttccctagcgaggacatgtatgcgcaggactcgatcgatctgctgcagaactccggaattcagttcaagaagcacgaggaggatggcatcgatcccatcgacttcgccgaactgctgatgagctctggcatcgtgctggtggaaaacatcaagtggctgtgcttccactccggctacgattttggctaccttctaaagctgctcaccgatcagaacctgcccccggacgaatctgaatttttcgatctgctgcacatctactttcccaacatcttcgacatcaagtatctgatgaagtcgtgcaagaacctgaaaggcggcctgcaggaggttgccgatcagctggaactgcggcgcgtgggcccccagcatcaggccggctcggatgctctgctgacgggcatggccttcttcaaaatgcgtgaggtacagcacacaaatgatttccacattacaccggtggcgcacgatgtactctttcgctatctgcttgagcacaccatgaacttaaagccgacgatcagctgcatccatctgctgagccgtccggcatacaatgggggccctgcccccgacgaatctgcgataatcagcagtggcaacggcacaggcaacaccaactccaccgagcagttcacctcgagcgcctacatggttacacctcctaatacgcccggcatggccaagagcgatgccgcatcgctgtccaatcgccatacgtctatttcgaatagcttcggatgattagacagctcgctcgctggtgttgccgtgcacttgccactgctaacgtaacgtgcctccgcccatcataatcattattccttaggtttaaggtttttcatggttgtcataacgcattttcatacataactcatctatgtacttagttttttgtgacctgcacaatttacagagccagtgacccagaatttatgaatgaaatccataatttgaagtgttcttagtagttagtttggagctgttaaacccatgtgaaacatgtttatttagctgtaatgcccgcgatacgaattgaaatgagaaacgcgctggattcgaatggaaaattaaatgaattggaattaattttctttaaatgtttatttgcattctttggtgtttgggcatggcatatgcatatcatagcttgcttgatttcatatgacatctttttaattgtattgatgttcattttaatttatgttaagttcacgctcttcatttatatcgaattaacaaattattcttttgtaattttaagcgctttgctgacatatgtttccacacggtttactgtgtgtatcagcgtaccaagacctttatcttctagagaactgccgaatagttttgaaataacaagaacattgcagaataaatcccatcccatactaacattcattaaatatgaaatttactaatattgaaacctcgtccaatcacatcggttctgcggtatgtaacaaatcctatctacaagtaggacccacccatctacttgggattactttctaagactttgctgccgtagaaatatgtgtgctttatacgctttgtagctcccaactaaagttgctcgcattgatacatcccataattaccatacttacccagaaactgctttctaacccatttgtgctgtcccattcgaaaaacgatccaatgttctgtacctgcctaatgaaacttacaatctttgcagatgttcttcgaggacaacatcgaccatgcgaagtactccggacacctgtacggcctgggtacctccttcatcgtcaatggcaccaacttccacgacagcaacggtgagacgaacagcgcttcatgattcgtactgatggggaacgtggtcgtgcacgacaggaagttcgagcaggaggaatcaccgggtccgtcggcatctgtgcaggccacaccacctggccaactgatcctagccgtaacaacaccattgcagtaatctgtggacagtcgacacagatcgttcccatttgtgaacaattataccccgttggccataaagctaacttcttgatgtttcccacgcaagttcagatgaataggcaaccgttcaatacgaaaacatggcataaactaattgtaaatcgcatagaaatgaaaaaccggcaaaactaaaatagattcaatttcaagttctgcatgtcttaaatgtgttacgaatacaaaactaaggtatgtaaaattaagctaaaactgtaagccaatgagcgaaacagagaatattgtgtatttgtaaaaagagcaaaaaaacaatatatttaaaactttttaatttagtgtacatttcgaaaacgtgtttttatttgaagtatgaatacgaatcgagatgtttggtttagtagaaaaaagatggcgaaaacctgtagaaaaaaatatcaaatatcaaatatcaaatcaagagaaaccaagaatcccaatatctacagatgaaaacaaaattttcaagggttaaaaatcaatagtgggttaatgaacatataaaaggtatttttaaaatataacggaaatacgccgaagtagcaatagtcggatttttgtgaaactgtggtgcggtcacaccgagcctagtccttatgttttgtttatggaaaatatcttttagtttttgagtattaaaagccaaatcgatggcaactgtggctgaatgcaatcacagcgtcctcgacctggtaaccaaaatggccacaatgctggtggccgatgagatgaagccaaaaaaacaaacagctgtgctggtggccaaaaagcgctccaaaatctatgaatcgctgcttcacagtgaaacgatgtcgtcccaggacaagctggagatgctccaccaggtgaccagcgaggtggcaaagaacccagaccggatggacatgctgctcaggttccaaaatctgctagaaggacaggataaggaagaatcggagattacacaggaccaggatgaggaaaaccagtccgaagtggtgatcaaacgtatcaaggcaggtccactgcagctgattgaaaccatagagattgtggaggaggcacttcatccaaaggcctttcccgacatcaatcaaatgaatcgcgccctgaaacccctgcaactacagccatactccgatattcttacaacgagtaacctgaatataaattttccgccagaaaagctaattccgaagatcataccatctactgtaattcgcatgggattatcagagtccattacacgcatgaggaacgaaatggaaaaaccaatgcatccaccaccccgattgccagtgctcgcgaaaaaagtcgtagctcc

SEQ ID NO: 11966 - DNA, 1966 bp, DROSOPHILA
caatcgcgaacaattttttattatggcacttgcgcggctcacaaacgatattcgctgataaacattcattggaaattattgccgaacgcagaggactccgccaattgaagtgtgcgcttaaaacgatcgccgtgcaggaagcggaagtgccccataacagctattttctcgccgctttctcccccatcacccccccgcaaaacaagcgacgccgatagaaacatttaatttgtgcaaatagccgaaacctacacggtcggccatcaaatattatgaaatggacaatgccctcggccatcagtggcgcgccacatgcccacatacccagcaacgaggagtgcggcatccgcgatgtgtggaagcaaaacctggaggaggagttccgcaccatacggaaagtggtgcagaagtaccactatgtggccatggacaccgagtttccaggcgtggtagcacgtccagtcggcgagttccgctccacggcggactatcattaccagctgctgcgctgtaatgtcgatctgctgcggattatccaattgggccttaccttcatggacgacgatggaaagacaccacccggctactccacctggcagttcaacttcaagtttaacctgagcgaggacatgtatgcgcaggactcgatcgatctgctgcagaactccggaattcagttcaagaagcacgaggaggatggcatcgatcccatcgacttcgccgaactgctgatgagctctggcatcgtgctggtggaaaacatcaagtggctgtgcttccactccggctacgattttggctaccttctaaagctgctcaccgatcagaacctgcccccggacgaatctgaatttttcgatctgctgcacatctactttcccaacatcttcgacatcaagtatctgatgaagtcgtgcaagaacctgaaaggcggcctgcaggaggttgccgatcagctggaactgcggcgcgtgggcccccagcatcaggccggctcggatgctctgctgacgggcatggccttcttcaaaatgcgtgaggtacagcacacaaatgatttccacattacaccggtggcgcacgatgtactctttcgctatctgcttgagcacaccatgaacttaaagccgacgatcagctgcatccatctgctgagccgtccggcatacaatgggggccctgcccccgacgaatctgcgataatcagcagtggcaacggcacaggcaacaccaactccaccgagcagttcacctcgagcgcctacatggttacacctcctaatacgcccggcatggccaagagcgatgccgcatcgctgtccaatcgccataccgctttgctgacatatgtttccacacggtttactatgttcttcgaggacaacatcgaccatgcgaagtactccggacacctgtacggcctgggtacctccttcatcgtcaatggcaccaacttccacgacagcaacggtgagacgaacagcgcttcatgattcgtactgatggggaacgtggtcgtgcacgacaggaagttcgagcaggaggaatcaccgggtccgtcggcatctgtgcaggccacaccacctggccaactgatcctagccgtaacaacaccattgcagtaatctgtggacagtcgacacagatcgttcccatttgtgaacaattataccccgttggccataaagctaacttcttgatgtttcccacgcaagttcagatgaataggcaaccgttcaatacgaaaacatggcataaactaattgtaaatcgcatagaaatgaaaaaccggcaaaactaaaatagattcaatttcaagttctgcatgtcttaaatgtgttacgaatacaaaactaaggtatgtaaaattaagctaaaactgtaagccaatgagcgaaacagagaatattgtgtatttgtaaaaagagcaaaaaaacaatatatttaaaactttttaatttagtgt

SEQ ID NO: 11967 - protein, 406 aa, DROSOPHILA
MKWTMPSAISGAPHAHIPSNEECGIRDVWKQNLEEEFRTIRKVVQKYHYVAMDTEFPGVVARPVGEFRSTADYHYQLLRCNVDLLRIIQLGLTFMDDDGKTPPGYSTWQFNFKFNLSEDMYAQDSIDLLQNSGIQFKKHEEDGIDPIDFAELLMSSGIVLVENIKWLCFHSGYDFGYLLKLLTDQNLPPDESEFFDLLHIYFPNIFDIKYLMKSCKNLKGGLQEVADQLELRRVGPQHQAGSDALLTGMAFFKMREVQHTNDFHITPVAHDVLFRYLLEHTMNLKPTISCIHLLSRPAYNGGPAPDESAIISSGNGTGNTNSTEQFTSSAYMVTPPNTPGMAKSDAASLSNRHTALLTYVSTRFTMFFEDNIDHAKYSGHLYGLGTSFIVNGTNFHDSNGETNSAS

SEQ ID NO: 11968 - DNA, 6546 bp, DROSOPHILA
caacgtgtcgagctattggccaaaaagatcacagagcttggatattgctgttactatatacacgctaagatggcccaggcacacagaaatcgagtattccacgatttccgccaaggactctgtcgcaatctggtgtgctccgacctgttcacccgtggtatcgacgtgcaggccgtgaatgtagtaatcaatttcgatttcccacgaatggcagagacatacttgcatcgaattggtcgctcaggacgtttcggtcatttgggtgagtttaattgcattctcatattatagtttagcctatttacaatcttcgtttctcattttaaggtattgctattaatctgataacctacgaggatcggtttgatctgcatcggattgaaaaagaacttggaaccgaaataaagcctattccgaaggtcatagaccccgccctttatgtcgcaaacgttggcgcatccgttggcgatacttgcaacaacagtgatctgaataattctgcgaacgaggagggcaacgttagcaaataaaacggatatgccctgtgtaacgctagtatctgaaatagagtctaaatcgtggaatcaataaaaacagatgaactatttcagaaatcaaaattgtattaaataaatggaaagcaattcaatttttaaatgcgctcttaagataactgaaatgactggtctataaaaaaaaggctcgttcactttgtgggttttggtgctgagaagtattaacattaactattggggatttggtaaggaaagttagtcgaatgctattaaaaggcaggctaaggtcgtttaatatcaatccagtttttagtaaagggtttaaatcaaataaaaggtctaaaagtaattacaggattttcggacaagagaagtacacttggatcaagctaaatcctagatttacttacatggaagaattaccattggcaattacccgatttactagattccaaaaaaaaagtacaaagggatcattataatttaaataaaatttatttattagcatccaaaattgtaagctttgcttgtcagaatatttacaataaatgtacaatattaaacaaatcatatatataggatagggtcataaatttcaaaactttacgtattaaatatgttcgatgaggaggaagaggagtcggattggtcaaagtcgattttcgcataggtattcccatcctccgggcatgcggacaccggcggcgattcgcgtgatcctctcttcaggtatttagctggattttggccactgcaatggggaagatctaggctggcgtagtgcagctccggctgggatatgcgagacgacgaccttgaggggaaattcaaatctttaatctgtagaatgttctgtggtgtacttggatctgtgccagtgctacgcgaatcggcggcggcggctggctttgctgaatttatattgaatttggtgagtgagctgctgctcaccgcggtggcggtggcattatcgggaatcgtattcacactctctgtaagtctctgcgaacgctccaagttatccttgtgtatacccttttggtatagcttcgatgagatgagtgagctgtcgcttttaatttgcagaattttgtagccggcttcgttaaattttgtgaaatcattcgatttgtccttgatttgtgtgtagtcttcgctgcttatcgaatgaaccaacttcttttcctcatgcccgcctatatccaaattgttgttctcgacaatcttgtcggccagatgattatttagcttatcgctgctctgcgcgcacactttctcgcaatcaatttgatttgctgaatgaacatcatggcttttgcttgtactctcgacatttgtgggtttcgagctaaaggtgttgtcattcaatggcgagttcgacttcttttcctcgcttctgctgggctgttctctccatttctcagcggatatattgtatgtgctaattttgtttaaatcgtgcactggtgcggctgttgcggtgagtggcggtgctgtctgatagtcggatagcttgagtttctccactttcattggcaggcaattcgaactgggagtgtatccattaccgactggcttcatctcgaggtaaccatcctcggatgtgatcgcagtgttatttagtttggtgccattgaaaatgtccttttgacttgtggcgtgcagagttaggctggagctatccgttcgcggggcttttgggaacacgttttcaatgtatttcggaatttcattattcttgatgaacttctgcttttccaaattggttgcttgtgaaaaatcaatttccattaagtcactcattcggtcggagtttatctggttcttcagactgaggagtggagcacttgtggacttcttttgtcgattggcactgctgccatagctggttccttccttggtaatgctactctgactcctattcgctgtgaactcatgtttattgtcctccacgaggaccactcgctgcaggtcgcagcgcggtatcttcgatttggagccaaccgagtaggctcgcacgcgattcggattctgtcccgtatcattcaagtgtcccaggcgcttattaaactttaaatgctcaaccttgttgcctatcgaataggcgcgaatgggacgacagcatctgtaacaagatgtgattgattgcattacgtggcacagttgaagcgaaatgtgtactcactggttatcagagtccagatcaaaatccttagcaagcttttccgacgcgtgctccggaaagttgaaatgcagcgaagcatcttccaatctctgcatatcagccttctccttttcatggatagcatcggtaggattgactggattcatcggtatgtagttttcgtcacttactgcagttaaacaaagccaattgattagctacttttcatgttaaaaaattgtttttgtgtttggcttaccattttgttcggtgactttgctaaataattccgcactggcaaagtcatcaatgttttcctcaggaattgccgtctccgatgaccgcgtgctagaaattgaaatggtgattattattaaataattattatttgattgcaacgcactttaatctgtagtggctaaaactgccgttgtcgtcggattcatcgacactaattgatgactcttcggattctgagcatcttaatggcatggtgaacgttggactattactatgcttgttggttgagtgcggacggatgccagatatagtattggatcgcagtccatggttggaaccaaagtacgtttgattgctggactcgcttagggttccatttctggttggtaagctatcgcatctctctctgccgaaacctgaaacgattgcgtttgattaattttgcgttaaaacatgcatttgaagtatttaccatagttatggggcgaactgcagctgcgcaattcgagagagttttgactattttgtatgacatttacgtttatcggcttcgatgcttcgtttgcagacgacgatcgctttctcatgggctcgtgacttaagtcaggtctattctgataaacgtttattaaattcgtgttcgactctgttttggctgacatagcgctgaaagaaaaaacccacagaattattaaagttaactgggagatatcttaaactatctatgtcgttttgtaggatgttcatgaaatcttggattagttgtaatgagagttaaatacctcagtatcgtgttgtgcatattagtagcaatagctgcgttatccgtctccatccacagatcaccagatcccaagacactttggcggccaagttccacgtagaatatacattgtggggatgcatgaccgcatctgaaattaagtccgaattattttacaatcccttgcagttttgctggcaacaactaaccgcctgatcgtggtcaaaagtatttcaatgctcgcaacgcgatcctcgccattgggcgtcttctccggtccaatgcacacgaatgtcagggattttgaagtaaggcaacagtggtaggttccggtgattccaactttctccgaaatacccttcttttgaatgacaacttgccaaacgtggtctgcaaagtgaaatgaagtgtttaggtttcatactaactggtagttatagtttatttggcataccataaggtgagtgcgctgttccattcgaattggctatgttcctttgtagaactagtagtttgtccaaccatttgcgtaaatcattttcgttctcgagaacgatgccgaatccaccgtctctggaggagagcacaatgacaaatctatgcttggtgtccaaacggcgattgatgttgaagcaattcttcagatatataaccctttttggctcggctctttgcaggaacttcttttcggtatcgtagtactccagccgggctgccgaagtgctcgtctcctcgtacagcacaaagaacttcttcttcatggtcttcagcttcttgaggtagccactcagcgccatgccgtcatccgatattgatgccatgatttccaatcttagttcctggaaggcgacgtgtttatattattagtaggcgatatggacacatatttgatttgcaaggctttcacttttctgttttcaaattaaagaacgaacacatgtataatgttttttattttttgcattgtaatttagaaacatatacctaagttataggctttactaatgtaggaaacacgagttttgtgcaatacatttgcttttctaagcataaacagcacaaaacatttccaactgccggaacaacaaatcgcttttcacaacgcaaacacgcgaaaagcattcgcaatgtcggctggcaaaaaaaatccttgccgtctgtcaacatcgagcatcggaaatcgcaatcaaaacacgcaattacgtcgtttatgtcaatattcgagtgcagcttacgcggcgcgacgtattcgaattaggatgtaaagcgatggaattcggaatcggaattggatgtggaattgtgaattcataattggctcactgtgctggcgctgtaaagattgtttatttcgttttcaggtttctgcgcattgcattaagataaccgcagctagatgctcattttattatacatatatgtacgtacatatgtacatacataagtacgtgcgcgcgtatgtttgtacatattttgttttatagatgagcatcataaatatatatatatatttatatgtacatatatctgtggaattctaatacatcttacatacatatgtatctgcgagttatttttccccgtaggcatgtatgtacaaacaacgatacatatggcacactctggtggtatcatttacaaacgcacatggatatgggaaataatacctcaacgccaatgtggctgggaaatgtgttacctaagacgtctagctgcccgtatgcccgatatgcgcgaaatcagtgtttactagttatccgcgcgatacatttagcatttgtattattattgttcaccaacgcaattctttattatcaaacccacatttattcgcgatgacactttgctgttatcgttatcgcagcataggaataacagtacgaagttgccatcccgatctctacaccggtgagagttgccagcccgatttacacgccggcttattcgatactaattgagttatcgaatgaccgtttgtttcgtttaaatttagtataacagttttttatttaatcatcattttaaattttttgtattttagaaatgtttttatcggtaactaaattatctactttccatattcttgtatgaaacaaaattttaaaagtatgtatcgactttatataccgaaataatttatatggttaaacttttccatttaaattttatgaatttatacaaagattaaaatgtaattagctcctgaaatcaggacaatgaaatgattaaactggtattttaacgatttaacttaagaaagcgggctcaaaaaacaaggatgagtaagaaattacaaagtttcgcatattgattttattttttaatggttactatatttttaaatacaatttgaatattttatttgttgtaataatttaacaatacacgccgtattgttggtaagctttagttttcttgtgactgactaaggaggaaaaagtcgttctctaccgcgttctattatttgtattgtgtgcttcgtagtccatgacttcctcatagattagctccttccactgctccacagtgtgttccctttcgtccacgctgtgatcatatggctccggagcgggctgcaagagatgcatgcaattaagcgattaaaaacattcaacattcctagaaatccagtttatgccagaatcacttacagcatccacttcctcagcatcataccacacgttgatatattcatgcttcaaagcctcgtccacagatatccgctgctctggatcaatgactagcattttactaagaagatttctagcgtcagaagccttccggcggctattctgattattatcatttggaaacaagccatcggggaaaagtctatcaaatgagtatccagtgtatctaggacg

SEQ ID NO: 11969 - DNA, 3208 bp, DROSOPHILA
ctgcgataacgataacagcaaagtgtcatcgcgaataaatgtgggtttgataataaagaattgcgttggtgaacaataataatacaaatgctaaatgtatcgcgcggataactagtaaacactgatttcgcgcatatcgggcatacgggcagctagacgtcttaggaactaagattggaaatcatggcatcaatatcggatgacggcatggcgctgagtggctacctcaagaagctgaagaccatgaagaagaagttctttgtgctgtacgaggagacgagcacttcggcagcccggctggagtactacgataccgaaaagaagttcctgcaaagagccgagccaaaaagggttatatatctgaagaattgcttcaacatcaatcgccgtttggacaccaagcatagatttgtcattgtgctctcctccagagacggtggattcggcatcgttctcgagaacgaaaatgatttacgcaaatggttggacaaactactagttctacaaaggaacatagccaattcgaatggaacagcgcactcaccttatgaccacgtttggcaagttgtcattcaaaagaagggtatttcggagaaagttggaatcaccggaacctaccactgttgccttacttcaaaatccctgacattcgtgtgcattggaccggagaagacgcccaatggcgaggatcgcgttgcgagcattgaaatacttttgaccacgatcaggcgatgcggtcatgcatccccacaatgtatattctacgtggaacttggccgccaaagtgtcttgggatctggtgatctgtggatggagacggataacgcagctattgctactaatatgcacaacacgatactgagcgctatgtcagccaaaacagagtcgaacacgaatttaataaacgtttatcagaatagacctgacttaagtcacgagcccatgagaaagcgatcgtcgtctgcaaacgaagcatcgaagccgataaacgtaaatgtcatacaaaatagtcaaaactctctcgaattgcgcagctgcagttcgccccataactatggtttcggcagagagagatgcgatagcttaccaaccagaaatggaaccctaagcgagtccagcaatcaaacgtactttggttccaaccatggactgcgatccaatactatatctggcatccgtccgcactcaaccaacaagcatagtaatagtccaacgttcaccatgccattaagatgctcagaatccgaagagtcatcaattagtgtcgatgaatccgacgacaacggcagttttagccactacagattaaacacgcggtcatcggagacggcaattcctgaggaaaacattgatgactttgccagtgcggaattatttagcaaagtcaccgaacaaaatgtaagtgacgaaaactacataccgatgaatccagtcaatcctaccgatgctatccatgaaaaggagaaggctgatatgcagagattggaagatgcttcgctgcatttcaactttccggagcacgcgtcggaaaagcttgctaaggattttgatctggactctgataaccaatgctgtcgtcccattcgcgcctattcgataggcaacaaggttgagcatttaaagtttaataagcgcctgggacacttgaatgatacgggacagaatccgaatcgcgtgcgagcctactcggttggctccaaatcgaagataccgcgctgcgacctgcagcgagtggtcctcgtggaggacaataaacatgagttcacagcgaataggagtcagagtagcattaccaaggaaggaaccagctatggcagcagtgccaatcgacaaaagaagtccacaagtgctccactcctcagtctgaagaaccagataaactccgaccgaatgagtgacttaatggaaattgatttttcacaagcaaccaatttggaaaagcagaagttcatcaagaataatgaaattccgaaatacattgaaaacgtgttcccaaaagccccgcgaacggatagctccagcctaactctgcacgccacaagtcaaaaggacattttcaatggcaccaaactaaataacactgcgatcacatccgaggatggttacctcgagatgaagccagtcggtaatggatacactcccagttcgaattgcctgccaatgaaagtggagaaactcaagctatccgactatcagacagcaccgccactcaccgcaacagccgcaccagtgcacgatttaaacaaaattagcacatacaatatatccgctgagaaatggagagaacagcccagcagaagcgaggaaaagaagtcgaactcgccattgaatgacaacacctttagctcgaaacccacaaatgtcgagagtacaagcaaaagccatgatgttcattcagcaaatcaaattgattgcgagaaagtgtgcgcgcagagcagcgataagctaaataatcatctggccgacaagattgtcgagaacaacaatttggatataggcgggcatgaggaaaagaagttggttcattcgataagcagcgaagactacacacaaatcaaggacaaatcgaatgatttcacaaaatttaacgaagccggctacaaaattctgcaaattaaaagcgacagctcactcatctcatcgaagctataccaaaagggtatacacaaggataacttggagcgttcgcagagacttacagagagtgtgaatacgattcccgataatgccaccgccaccgcggtgagcagcagctcactcaccaaattcaatataaattcagcaaagccagccgccgccgccgattcgcgtagcactggcacagatccaagtacaccacagaacattctacagattaaagatttgaatttcccctcaaggtcgtcgtctcgcatatcccagccggagctgcactacgccagcctagatcttccccattgcagtggccaaaatccagctaaatacctgaagagaggatcacgcgaatcgccgccggtgtccgcatgcccggaggatgggaatacctatgcgaaaatcgactttgaccaatccgactcctcttcctcctcatcgaacatatttaatacgtaaagttttgaaatttatgaccctatcctatatatatgatttgtttaatattgtacatttattgtaaatattctgacaagcaaagcttacaattttggatgctaataaataaattttattt

SEQ ID NO: 11970 - protein, 968 aa, DROSOPHILA
MASISDDGMALSGYLKKLKTMKKKFFVLYEETSTSAARLEYYDTEKKFLQRAEPKRVIYLKNCFNINRRLDTKHRFVIVLSSRDGGFGIVLENENDLRKWLDKLLVLQRNIANSNGTAHSPYDHVWQVVIQKKGISEKVGITGTYHCCLTSKSLTFVCIGPEKTPNGEDRVASIEILLTTIRRCGHASPQCIFYVELGRQSVLGSGDLWMETDNAAIATNMHNTILSAMSAKTESNTNLINVYQNRPDLSHEPMRKRSSSANEASKPINVNVIQNSQNSLELRSCSSPHNYGFGRERCDSLPTRNGTLSESSNQTYFGSNHGLRSNTISGIRPHSTNKHSNSPTFTMPLRCSESEESSISVDESDDNGSFSHYRLNTRSSETAIPEENIDDFASAELFSKVTEQNVSDENYIPMNPVNPTDAIHEKEKADMQRLEDASLHFNFPEHASEKLAKDFDLDSDNQCCRPIRAYSIGNKVEHLKFNKRLGHLNDTGQNPNRVRAYSVGSKSKIPRCDLQRVVLVEDNKHEFTANRSQSSITKEGTSYGSSANRQKKSTSAPLLSLKNQINSDRMSDLMEIDFSQATNLEKQKFIKNNEIPKYIENVFPKAPRTDSSSLTLHATSQKDIFNGTKLNNTAITSEDGYLEMKPVGNGYTPSSNCLPMKVEKLKLSDYQTAPPLTATAAPVHDLNKISTYNISAEKWREQPSRSEEKKSNSPLNDNTFSSKPTNVESTSKSHDVHSANQIDCEKVCAQSSDKLNNHLADKIVENNNLDIGGHEEKKLVHSISSEDYTQIKDKSNDFTKFNEAGYKILQIKSDSSLISSKLYQKGIHKDNLERSQRLTESVNTIPDNATATAVSSSSLTKFNINSAKPAAAADSRSTGTDPSTPQNILQIKDLNFPSRSSSRISQPELHYASLDLPHCSGQNPAKYLKRGSRESPPVSACPEDGNTYAKIDFDQSDSSSSSSNIFNT

SEQ ID NO: 11971 - DNA, 6298 bp, DROSOPHILA
cgaaaaacgatccaatgttctgtacctgcctaatgaaacttacaatctttgcagatgttcttcgaggacaacatcgaccatgcgaagtactccggacacctgtacggcctgggtacctccttcatcgtcaatggcaccaacttccacgacagcaacggtgagacgaacagcgcttcatgattcgtactgatggggaacgtggtcgtgcacgacaggaagttcgagcaggaggaatcaccgggtccgtcggcatctgtgcaggccacaccacctggccaactgatcctagccgtaacaacaccattgcagtaatctgtggacagtcgacacagatcgttcccatttgtgaacaattataccccgttggccataaagctaacttcttgatgtttcccacgcaagttcagatgaataggcaaccgttcaatacgaaaacatggcataaactaattgtaaatcgcatagaaatgaaaaaccggcaaaactaaaatagattcaatttcaagttctgcatgtcttaaatgtgttacgaatacaaaactaaggtatgtaaaattaagctaaaactgtaagccaatgagcgaaacagagaatattgtgtatttgtaaaaagagcaaaaaaacaatatatttaaaactttttaatttagtgtacatttcgaaaacgtgtttttatttgaagtatgaatacgaatcgagatgtttggtttagtagaaaaaagatggcgaaaacctgtagaaaaaaatatcaaatatcaaatatcaaatcaagagaaaccaagaatcccaatatctacagatgaaaacaaaattttcaagggttaaaaatcaatagtgggttaatgaacatataaaaggtatttttaaaatataacggaaatacgccgaagtagcaatagtcggatttttgtgaaactgtggtgcggtcacaccgagcctagtccttatgttttgtttatggaaaatatcttttagtttttgagtattaaaagccaaatcgatggcaactgtggctgaatgcaatcacagcgtcctcgacctggtaaccaaaatggccacaatgctggtggccgatgagatgaagccaaaaaaacaaacagctgtgctggtggccaaaaagcgctccaaaatctatgaatcgctgcttcacagtgaaacgatgtcgtcccaggacaagctggagatgctccaccaggtgaccagcgaggtggcaaagaacccagaccggatggacatgctgctcaggttccaaaatctgctagaaggacaggataaggaagaatcggagattacacaggaccaggatgaggaaaaccagtccgaagtggtgatcaaacgtatcaaggcaggtccactgcagctgattgaaaccatagagattgtggaggaggcacttcatccaaaggcctttcccgacatcaatcaaatgaatcgcgccctgaaacccctgcaactacagccatactccgatattcttacaacgagtaacctgaatataaattttccgccagaaaagctaattccgaagatcataccatctactgtaattcgcatgggattatcagagtccattacacgcatgaggaacgaaatggaaaaaccaatgcatccaccaccccgattgccagtgctcgcgaaaaaagtcgtagctccattagaggatgaacgaccttttgtggcccagcctggaccggagaagcacttcgtttcggataaattgttgaccaacgaacttaagatcctccggaacaagaacctggttctcaactacctagatgaagcaaccctaatcgatcacctaaagaaagcagcgtgtggtattgaatctttaacgtttcccatctcgtcggcagataagttggagttgcgagtgaggcccaacacaactttgccaactatgctgccggaggtgctggcggattttgcaaatcacttcattcgtgccggctgcgccttcctgcgtttgagttcccgcaccaaatggaacaatatcgccgaaatgcggctggaaaggcctctaaatcgagtgagattgaataccttatttccagtagtgatatattcaacaatcccatgctttcttataggccatgcgagagacgattatggactatctaagcaccactcggcagtttttgctctctttgcaagccgatagccttttccagctgctaaacaacacctccacagcgattcagttactctgccaactagataggatgttcgaaaatgaaccaagatgtaagaatgccgcgacgcgaaattatttcagaattaatctcttttatatacattaatgcagtaaacctgaacactgggataactggctccttcctgttgagctccatctggctggccatcgacacctgcggaaacaaagacttcctgcacctgctcatctatttcttgcgctgcatatcccgtaattattttattcagctacagagatggatctaccatggtgaactagacgagtcggtcaacgagattttcatcagccgctgtctgaacacttcaccgtcttttacaaaccagtgcagcaaagagttctttgacaaaagctatcaagtggacaacgaggcgattcctgaatttttagtcggttgcgaagaggaaattcttcaatgtggcaaatacaacctggtgctaagggcatataacgctcaggtatgcagaagattattcaaaactagaatccatatataatgatttattctttttttagcaccccgtttttgacgtgcagtacccggatattgtggtttgcctaacggagcaacaactcaaaaatatgcgccgcaacctggccgataagtatgccatcatctataaacgtttcggatggtgcagcatgcaaagcattttcgaggaccgcatggcgacaaagcgtgtatttgccaatctaatggtgaagcgaacgcaggcccatctggacgcgtgggcgcagaagcagcgtgaactccaaataaaagcgaatgcccagaaaaaactccagaacgatcagttaaacgcagagcaggaacgtatccagcaaaatcacttagagaagcggcgtcaggacattgttaatgaacttgcatttcagcgggaatgcgaacggatggaggataagctcctggagcgggaaaagcaagagctgcaaaagaaagtggtgcagctagcagctgtcctgtcgtccagtcctgaccgaagcacagtcagcgatctcagttttgcatcctgcattgaggaaccagattgtctagcagaatcatcttctgataaagatgatgcaaatacagaaaattcagaggatgaggcaacaaaacagttggataagactttaaatgttccattggaacagcccgaagctgaatatcaagcggatgtagatgtggaccaaccacgtggcaaagagtgttcacttcccaatgtgtttcagtatcaacggagtcactcggacgtgataaattctaacgagcatccaacaacccaagcagagttcaatcgaaaccgccagcatggtctctcctccgaccagtttcaacagtgtcatgccacggtacatctacaagagtccgacttacttaaaaccgctgccagcacgagttcaggattgcacgcagaaattcctcaagatattaatgctaatctcaattgcccggacacgaaagagctgaccgaactacagcgaaaccgcaagcgcaacgagcatcatgacggcttcttcagttttaactctaccgaagatgagcacacccatcgattgcgttccctattgaactcaaatactgaacgtggcagaaatcgacttcgggttatggagaccgagttcggtctaggttataagaacacggatatagaaacaaaggccacgccctgtttgcctctcgaaatcgacaagcttcacgtcgaaattcccctggcggtgctaactccaatgtccaccacttccgatgtggatttcggtgatccgtcgccacgggaactaccagaaatagctgacactgctaataataacaatgttagtgggagcattgaaagtttgtctccggagttgccaaagcccgttcttgcaattgctaaaccaactagcttattgccgaaactggattttggaatgaaagatgaaagggagacggaacaggacagagataaagttagcactttgcccgaggcttgcaatccgtttatggcccgccgctgcctgcagctctccgtaatggcgccccttaacgcatactacggactgctccgaaatgaagtgctgagaatattccaggagcagcgtatctacgagcatttccgcaagctcagaaactactttttcctggtggacggtcaatttggagctacactcacgaacgaaattctaggaagaataagggcgggcgttgggccacgaagtctcagccagaagggcatccttgacaccattttaaccaatgcgctggcggcttgttcggcggatgaaacgacggtatcggagaaccttaccctcaattgtaccaccatcccggatacgctcaacttcctgtccgtggaagccacttctatgctaaagctgaactgcaagattgattggcctttaaacatggtgatcagctcggagacgatttcaaaatatggccagatcttcgggtatctgctgaagcttcgtcacgttagtttcgtgctggatggaacctacgagtatctgcagcaaatgggcaagcttctgggaccggaacttcggacatgtactcatttccgacacatgcagatgatgcgccacaagatgtcgcacttcatgacctcgtttcaaacgcatctggtggccaaggccctgttgtccacctggaagagcttcaaggaggagttgtgcacagccgattccattgaggcgttgtacaagcagcatgttgcctacttaaagcgggtagccttcctagcactgctaaatcgacgcagtgcgaaagtaaaggaaaccattgataatatcctagtgattatactacgcttttgcaagtgagtttacgtcttaaatagtctgctgattcattttattctttaatttaaatgtttttcagagtcattcagtcgcagtcctttattgtggatcaagataattactttgtgcacccccgcttcaaacgtctgcagcaggaagaggctgagttcgagaaattcttgcagtatctcatctatttgggcaacaaggcggccgcttctggttaccaggaggaaatcggtgacctgatttgtattattaactttaaccactattacaaggtatctgggaaccatactggttcctcaatggaggacaaaaagtgctagccaataattgttagatagggaatttatcttgccattaagctgagcttagaacattttaaaaaatatttatgcatgcatggcgtctcctaaatgtaaagcttcggtgaagaaaatcagctttaaaggcatttatttcttagtactatttctttagtttcggttaacagttttgttgtgttgtaagttaatattaattttcaaataaccggctcaaattaaaagaaaataatttaattagtaacatctaatagtgttttaattgaactcgtattaaatgccgaaaaaactgttttgaatatttatccatatcattaatagatttctgtttaatatttaagaaaaacttttaaaagagacaattgtctctaaagtagaatgtacgtattaaatattgtaatgaaaccaatgtcgacatgatttcttgaaactgttgattcgaatttataaataaatgtgcttatttatgtatgtcttaccatatttaatatttaatatttaatatttaattcaaacgtatgtaaggtatcgcttccctatcatctctaagtgactgtgcgcgtacgatgtatcggtattcgctccatccctggtcatgagtcacttcgtgtagaataattcagttttatttttagtttataaaagcgctgcacgcgatcaagaattttatatttttaagtaatttatttcatcgaactataatcaaaaaacatgcaggtaagatggactgttataagcaaattatatttattatccgaacaataaggtttttccatttcgataaatggtaatggtgggtgtgttttggtgcatccaaaaataaaccccatatttggtattgaaaatcatgaatgaaatgaaactcacgtggccttgttgtccataggacccaaacgaagataccgagtggaatgatgtgctccgagccaagggaataattgggcccaaggcgaaggaggcggagatcacagaggatcagatccagaagctgatggacgatgcc

SEQ ID NO: 11972 - DNA, 4056 bp, DROSOPHILA
atggcaactgtggctgaatgcaatcacagcgtcctcgacctggtaaccaaaatggccacaatgctggtggccgatgagatgaagccaaaaaaacaaacagctgtgctggtggccaaaaagcgctccaaaatctatgaatcgctgcttcacagtgaaacgatgtcgtcccaggacaagctggagatgctccaccaggtgaccagcgaggtggcaaagaacccagaccggatggacatgctgctcaggttccaaaatctgctagaaggacaggataaggaagaatcggagattacacaggaccaggatgaggaaaaccagtccgaagtggtgatcaaacgtatcaaggcaggtccactgcagctgattgaaaccatagagattgtggaggaggcacttcatccaaaggcctttcccgacatcaatcaaatgaatcgcgccctgaaacccctgcaactacagccatactccgatattcttacaacgagtaacctgaatataaattttccgccagaaaagctaattccgaagatcataccatctactgtaattcgcatgggattatcagagtccattacacgcatgaggaacgaaatggaaaaaccaatgcatccaccaccccgattgccagtgctcgcgaaaaaagtcgtagctccattagaggatgaacgaccttttgtggcccagcctggaccggagaagcacttcgtttcggataaattgttgaccaacgaacttaagatcctccggaacaagaacctggttctcaactacctagatgaagcaaccctaatcgatcacctaaagaaagcagcgtgtggtattgaatctttaacgtttcccatctcgtcggcagataagttggagttgcgagtgaggcccaacacaactttgccaactatgctgccggaggtgctggcggattttgcaaatcacttcattcgtgccggctgcgccttcctgcgtttgagttcccgcaccaaatggaacaatatcgccgaaatgcggctggaaaggcctctaaatcgagccatgcgagagacgattatggactatctaagcaccactcggcagtttttgctctctttgcaagccgatagccttttccagctgctaaacaacacctccacagcgattcagttactctgccaactagataggatgttcgaaaatgaaccaagattaaacctgaacactgggataactggctccttcctgttgagctccatctggctggccatcgacacctgcggaaacaaagacttcctgcacctgctcatctatttcttgcgctgcatatcccgtaattattttattcagctacagagatggatctaccatggtgaactagacgagtcggtcaacgagattttcatcagccgctgtctgaacacttcaccgtcttttacaaaccagtgcagcaaagagttctttgacaaaagctatcaagtggacaacgaggcgattcctgaatttttagtcggttgcgaagaggaaattcttcaatgtggcaaatacaacctggtgctaagggcatataacgctcagcaccccgtttttgacgtgcagtacccggatattgtggtttgcctaacggagcaacaactcaaaaatatgcgccgcaacctggccgataagtatgccatcatctataaacgtttcggatggtgcagcatgcaaagcattttcgaggaccgcatggcgacaaagcgtgtatttgccaatctaatggtgaagcgaacgcaggcccatctggacgcgtgggcgcagaagcagcgtgaactccaaataaaagcgaatgcccagaaaaaactccagaacgatcagttaaacgcagagcaggaacgtatccagcaaaatcacttagagaagcggcgtcaggacattgttaatgaacttgcatttcagcgggaatgcgaacggatggaggataagctcctggagcgggaaaagcaagagctgcaaaagaaagtggtgcagctagcagctgtcctgtcgtccagtcctgaccgaagcacagtcagcgatctcagttttgcatcctgcattgaggaaccagattgtctagcagaatcatcttctgataaagatgatgcaaatacagaaaattcagaggatgaggcaacaaaacagttggataagactttaaatgttccattggaacagcccgaagctgaatatcaagcggatgtagatgtggaccaaccacgtggcaaagagtgttcacttcccaatgtgtttcagtatcaacggagtcactcggacgtgataaattctaacgagcatccaacaacccaagcagagttcaatcgaaaccgccagcatggtctctcctccgaccagtttcaacagtgtcatgccacggtacatctacaagagtccgacttacttaaaaccgctgccagcacgagttcaggattgcacgcagaaattcctcaagatattaatgctaatctcaattgcccggacacgaaagagctgaccgaactacagcgaaaccgcaagcgcaacgagcatcatgacggcttcttcagttttaactctaccgaagatgagcacacccatcgattgcgttccctattgaactcaaatactgaacgtggcagaaatcgacttcgggttatggagaccgagttcggtctaggttataagaacacggatatagaaacaaaggccacgccctgtttgcctctcgaaatcgacaagcttcacgtcgaaattcccctggcggtgctaactccaatgtccaccacttccgatgtggatttcggtgatccgtcgccacgggaactaccagaaatagctgacactgctaataataacaatgttagtgggagcattgaaagtttgtctccggagttgccaaagcccgttcttgcaattgctaaaccaactagcttattgccgaaactggattttggaatgaaagatgaaagggagacggaacaggacagagataaagttagcactttgcccgaggcttgcaatccgtttatggcccgccgctgcctgcagctctccgtaatggcgccccttaacgcatactacggactgctccgaaatgaagtgctgagaatattccaggagcagcgtatctacgagcatttccgcaagctcagaaactactttttcctggtggacggtcaatttggagctacactcacgaacgaaattctaggaagaataagggcgggcgttgggccacgaagtctcagccagaagggcatccttgacaccattttaaccaatgcgctggcggcttgttcggcggatgaaacgacggtatcggagaaccttaccctcaattgtaccaccatcccggatacgctcaacttcctgtccgtggaagccacttctatgctaaagctgaactgcaagattgattggcctttaaacatggtgatcagctcggagacgatttcaaaatatggccagatcttcgggtatctgctgaagcttcgtcacgttagtttcgtgctggatggaacctacgagtatctgcagcaaatgggcaagcttctgggaccggaacttcggacatgtactcatttccgacacatgcagatgatgcgccacaagatgtcgcacttcatgacctcgtttcaaacgcatctggtggccaaggccctgttgtccacctggaagagcttcaaggaggagttgtgcacagccgattccattgaggcgttgtacaagcagcatgttgcctacttaaagcgggtagccttcctagcactgctaaatcgacgcagtgcgaaagtaaaggaaaccattgataatatcctagtgattatactacgcttttgcaaagtcattcagtcgcagtcctttattgtggatcaagataattactttgtgcacccccgcttcaaacgtctgcagcaggaagaggctgagttcgagaaattcttgcagtatctcatctatttgggcaacaaggcggccgcttctggttaccaggaggaaatcggtgacctgatttgtattattaactttaaccactattacaaggtatctgggaaccatactggttcctcaatggaggacaaaaagtgctag

SEQ ID NO: 11973 - protein, 1351 aa, DROSOPHILA
MATVAECNHSVLDLVTKMATMLVADEMKPKKQTAVLVAKKRSKIYESLLHSETMSSQDKLEMLHQVTSEVAKNPDRMDMLLRFQNLLEGQDKEESEITQDQDEENQSEVVIKRIKAGPLQLIETIEIVEEALHPKAFPDINQMNRALKPLQLQPYSDILTTSNLNINFPPEKLIPKIIPSTVIRMGLSESITRMRNEMEKPMHPPPRLPVLAKKVVAPLEDERPFVAQPGPEKHFVSDKLLTNELKILRNKNLVLNYLDEATLIDHLKKAACGIESLTFPISSADKLELRVRPNTTLPTMLPEVLADFANHFIRAGCAFLRLSSRTKWNNIAEMRLERPLNRAMRETIMDYLSTTRQFLLSLQADSLFQLLNNTSTAIQLLCQLDRMFENEPRLNLNTGITGSFLLSSIWLAIDTCGNKDFLHLLIYFLRCISRNYFIQLQRWIYHGELDESVNEIFISRCLNTSPSFTNQCSKEFFDKSYQVDNEAIPEFLVGCEEEILQCGKYNLVLRAYNAQHPVFDVQYPDIVVCLTEQQLKNMRRNLADKYAIIYKRFGWCSMQSIFEDRMATKRVFANLMVKRTQAHLDAWAQKQRELQIKANAQKKLQNDQLNAEQERIQQNHLEKRRQDIVNELAFQRECERMEDKLLEREKQELQKKVVQLAAVLSSSPDRSTVSDLSFASCIEEPDCLAESSSDKDDANTENSEDEATKQLDKTLNVPLEQPEAEYQADVDVDQPRGKECSLPNVFQYQRSHSDVINSNEHPTTQAEFNRNRQHGLSSDQFQQCHATVHLQESDLLKTAASTSSGLHAEIPQDINANLNCPDTKELTELQRNRKRNEHHDGFFSFNSTEDEHTHRLRSLLNSNTERGRNRLRVMETEFGLGYKNTDIETKATPCLPLEIDKLHVEIPLAVLTPMSTTSDVDFGDPSPRELPEIADTANNNNVSGSIESLSPELPKPVLAIAKPTSLLPKLDFGMKDERETEQDRDKVSTLPEACNPFMARRCLQLSVMAPLNAYYGLLRNEVLRIFQEQRIYEHFRKLRNYFFLVDGQFGATLTNEILGRIRAGVGPRSLSQKGILDTILTNALAACSADETTVSENLTLNCTTIPDTLNFLSVEATSMLKLNCKIDWPLNMVISSETISKYGQIFGYLLKLRHVSFVLDGTYEYLQQMGKLLGPELRTCTHFRHMQMMRHKMSHFMTSFQTHLVAKALLSTWKSFKEELCTADSIEALYKQHVAYLKRVAFLALLNRRSAKVKETIDNILVIILRFCKVIQSQSFIVDQDNYFVHPRFKRLQQEEAEFEKFLQYLIYLGNKAAASGYQEEIGDLICIINFNHYYKVSGNHTGSSMEDKKC

SEQ ID NO: 11974 - DNA, 4484 bp, DROSOPHILA
ctcgctctccttttgtgtggctaattttttccttttagtccttttttcggttgccttcgtgcagaaattccctgctttatgtaatttagaacacaatgtttgcgttgcactgttggccgactgcagctgaaaaccgcacaaaaaaagcgacgcacacacacaccttcgagcatccggacttccaatttgcactgcttttctaacagtctatcgcgcacgcactgccacaatttcacccgcttatcgcgccgcaatatgggacgttcgcttttcaatcgattttggtaaccggcaggtgcgctttatgcgagaattacgaattttctccagcggcaactagaatcgttcacacagacaccgtagaagtgacgccatctttgaagcgattagtgttgcaaagcgcgtctgcaaaagtgctggctaccaactacggttgatagggatgagggctatggcttgttgaccgaaaatgataaatgttaactatgccaatatattttagattttactaatacgttacaaaaataagaaaagactatgataaaattgtgttttagcttggctcataagtattgatcctttataagctatggtcttgcagtggctaacatttctcaaattagggcaaccatctgataagatttctaattcgaattctaataaatgaatttaaactgctttttcttaaagttaaaaaaaaattagttttaaatcaaacggcatgcatacattaaccatcaaacaatgtaattatatatataatattaccaattgggctactaaatattgctgatatgtaagctatggtcatgaggtaaaggcatattatttatataattttcatagtatctttgttgtaggggaaaaataacaagtaatttaaaattgttcaattgacttaaaacaaaatataacagatattatttttaaatccaacgacataccatataaagttggtatttctttctaatctgcttggtattctcatcgaccccaatcggtcacactggtcgtgaatcagaaacgcactaattagtcaaaaaaacggtacaaaagatcgcttaattgctgaaatttcacctgtcgcagttaagtttacccaccagcagttcaaaaccagccagaggctagctaaaaaccccaaagatcgaccccaaaacatcgccgcaaagtggacaactcccagttttcagagcacctgcccctcaaaaaggagcatcgcgacaaaaaggcgagacttcgcagcagaatgtcctcgctctctgcgtccgcggagaatgtgtccagtttgggactgggatcgggcggaggaggaactacttcccacgacggcaactcccagcagggttccggatccgacggaggatccagtatgtgcctggaactggccctcgagggtgaacgcctctgcaaggcgggtgactgccgggcgggcgtggccttcttccaggcggccattcaggccggaaccgaggatcttcgcactctgtccgccatctactcccagctgggcaacgcctacttctacctaggcgactacaacaaggcgatgcagtaccacaaacacgatcttacgctggccaagagcatgaacgaccgactgggcgaggccaagtcctctggcaatctgggcaacaccctcaaggtaatgggtcgcttcgacgaggcggccatctgttgcgagaggcacctaacgctggccaggcagctgggagatcgtctgtccgagggacgcgctctttacaacctaggaaatgtctaccacgccaagggcaagcacttgggtcagagaaaccctggaaagttcggcgacgatgtcaaggaggcgctcacccgtgccgtggagttttaccaggagaatctgaagctcatgcgggatctgggtgatcgtggtgctcaaggtcgagcttgtggtaatctgggaaatacctactacctactaggcgatttccaagcggccattgagcatcatcaggagcgactgcgcattgccagagagtttggtgatcgcgcggctgagcgaagggccaacagtaatcttggcaactcgcacatattcctgggacaattcgaggacgccgccgaacactacaaacgcaccttggctttggccgttgagttgggtgaacgcgaagtggaggcccagagttgctacagcttgggcaacacctacacgttgctgcacgagttcaacactgccatcgagtatcacaatcgacacttggccattgcccaggagttgggcgatcgaattggtgaggccagggcctgctggtcactgggcaatgcccactctgccatcggtggtcatgagcgggccctaaagtatgcggaacagcatcttcaactggccaaggagctgcacgacccggtgggtgaaagcacagccagggtgaacatctccgatctacgaaagctactcggaatgcccgactccgagccttcacccaccgaggaggaggctcgatccaccgcctccgatcactcggccagcggaaatcagtcggatggatcggagaactcgcaaggaagaatggtaagagaaacgagctgcaacaacataaagcaatatgaatgattcctgagatatttttaaacaatactggcagtccgtttgttctatttttcgaagtggacacctgctgcttgcagtgtttgcccctttatgttagcgtaaatatttatactttgtaccaaaacacatcgttaaactttcgattcgagcacatgctgagaaattgaaacccctgaaagatacatagctaaatttattactttaattgcttcccgtcaggtgcgcgttcgtcgccagagcatggagcagttggacctgatcaagatcactcccgatggaaagcgcatgcaggaggaaaagctacgagcacaggcgaccaggaaagccaaagacgacgactttttcgagatgctttcgcggtcgcagtcgaagcgcatggatgaccagcgctgttcgatcaaggtgaatcccgccggagctccggcggtggccactggcgccacgcgtaagccgcttgtgcagcagaactcgttgttcgtggatcccaccaacctgcctggcctcaagtcaccgtcgtcggcgaatccatcagccattggacatgggccgctcgccaggagcgccaccactacgcagcagcccgatgatgacttcctagacatgcttatgcgctgccaaggctcgcgtctggaggagcagcggtccgagttaccgcgccccaatgtcaccatggacgcagaggcggaggcaccaccgcgatccgtcccagaggctgctgttccaggggcaccacgcggacagaccggacgtggagctaccgtccccgatgaggacttcttctcactgatcatgaaggtccagagcggtcgcatggaggatcagcgcgcctcgattccgttccgaaatgccaacaataacaacaatagccgcagcaacaacaacggttcagccggcggagctggaaagtagagagttgtagtccaaaaagctgaagtccaaccaaacaatcctataaatccatccctggccgcagctcctgactcatttcgttgtaagcccatcttgcggccatttattcagtcgtttattttcggaaattggctgctaaacattttgttcttttacaagatttatatatacacacgtacacgaaaagcattaatttatgaatagcaactaaccacgtaaccaaatattaggggtgtatagggcctcgtctacacgagcagagggaggaacctccaacggatgcacacactcatccactcatgactcattacatactccaccatgagctggccatgatattgaacgatatgcactcgagtcttacgatattaacgttttaattgcatgtgcaagtagtttaagccggataatactaatgtactaatccaatttgctcaatagacggaaccaagtcttctctacgatcaacgatcttacattctcgtagccacattcagctaaatattaagttttaagtccatcgaacccactctacatgtaagcaatgcattttccaaatcaaaatctaactacagatatatccaattgtaactatgagtattgcatttttctatcaatctatcgatcgatctaaactctgaacatattttaagccacttacaatttttgttagtatattaacaagacacaaagaatagcagctcggaattccatttgaggaccggcgcttgtgcaagcacttagcatacgatatacacaaccaatcatacttacacatatacaagaaacatatgaacaatatatatatagttataccaatgtctaacgatttgcctcttcgggtattgttctacacaatatatacaatacaagttatatatacacaaaacaaaaacacaaaactgagttcgagttgtacgaaatgaagccaaaatttattaatgttatacttttttgtagcacgagatctacgggatctgcgaatgaaagataccataca

SEQ ID NO: 11975 - DNA, 2226 bp, DROSOPHILA
gtcacactggtcgtgaatcagaaacgcactaattagtcaaaaaaacggtacaaaagatcgcttaattgctgaaatttcacctgtcgcagttaagtttacccaccagcagttcaaaaccagccagaggctagctaaaaaccccaaagatcgaccccaaaacatcgccgcaaagtggacaactcccagttttcagagcacctgcccctcaaaaaggagcatcgcgacaaaaaggcgagacttcgcagcagaatgtcctcgctctctgcgtccgcggagaatgtgtccagtttgggactgggatcgggcggaggaggaactacttcccacgacggcaactcccagcagggttccggatccgacggaggatccagtatgtgcctggaactggccctcgagggtgaacgcctctgcaaggcgggtgactgccgggcgggcgtggccttcttccaggcggccattcaggccggaaccgaggatcttcgcactctgtccgccatctactcccagctgggcaacgcctacttctacctaggcgactacaacaaggcgatgcagtaccacaaacacgatcttacgctggccaagagcatgaacgaccgactgggcgaggccaagtcctctggcaatctgggcaacaccctcaaggtaatgggtcgcttcgacgaggcggccatctgttgcgagaggcacctaacgctggccaggcagctgggagatcgtctgtccgagggacgcgctctttacaacctaggaaatgtctaccacgccaagggcaagcacttgggtcagagaaaccctggaaagttcggcgacgatgtcaaggaggcgctcacccgtgccgtggagttttaccaggagaatctgaagctcatgcgggatctgggtgatcgtggtgctcaaggtcgagcttgtggtaatctgggaaatacctactacctactaggcgatttccaagcggccattgagcatcatcaggagcgactgcgcattgccagagagtttggtgatcgcgcggctgagcgaagggccaacagtaatcttggcaactcgcacatattcctgggacaattcgaggacgccgccgaacactacaaacgcaccttggctttggccgttgagttgggtgaacgcgaagtggaggcccagagttgctacagcttgggcaacacctacacgttgctgcacgagttcaacactgccatcgagtatcacaatcgacacttggccattgcccaggagttgggcgatcgaattggtgaggccagggcctgctggtcactgggcaatgcccactctgccatcggtggtcatgagcgggccctaaagtatgcggaacagcatcttcaactggccaaggagctgcacgacccggtgggtgaaagcacagccagggtgaacatctccgatctacgaaagctactcggaatgcccgactccgagccttcacccaccgaggaggaggctcgatccaccgcctccgatcactcggccagcggaaatcagtcggatggatcggagaactcgcaaggaagaatggtgcgcgttcgtcgccagagcatggagcagttggacctgatcaagatcactcccgatggaaagcgcatgcaggaggaaaagctacgagcacaggcgaccaggaaagccaaagacgacgactttttcgagatgctttcgcggtcgcagtcgaagcgcatggatgaccagcgctgttcgatcaaggtgaatcccgccggagctccggcggtggccactggcgccacgcgtaagccgcttgtgcagcagaactcgttgttcgtggatcccaccaacctgcctggcctcaagtcaccgtcgtcggcgaatccatcagccattggacatgggccgctcgccaggagcgccaccactacgcagcagcccgatgatgacttcctagacatgcttatgcgctgccaaggctcgcgtctggaggagcagcggtccgagttaccgcgccccaatgtcaccatggacgcagaggcggaggcaccaccgcgatccgtcccagaggctgctgttccaggggcaccacgcggacagaccggacgtggagctaccgtccccgatgaggacttcttctcactgatcatgaaggtccagagcggtcgcatggaggatcagcgcgcctcgattccgttccgaaatgccaacaataacaacaatagccgcagcaacaacaacggttcagccggcggagctggaaagtag

SEQ ID NO: 11976 - protein, 658 aa, DROSOPHILA
MSSLSASAENVSSLGLGSGGGGTTSHDGNSQQGSGSDGGSSMCLELALEGERLCKAGDCRAGVAFFQAAIQAGTEDLRTLSAIYSQLGNAYFYLGDYNKAMQYHKHDLTLAKSMNDRLGEAKSSGNLGNTLKVMGRFDEAAICCERHLTLARQLGDRLSEGRALYNLGNVYHAKGKHLGQRNPGKFGDDVKEALTRAVEFYQENLKLMRDLGDRGAQGRACGNLGNTYYLLGDFQAAIEHHQERLRIAREFGDRAAERRANSNLGNSHIFLGQFEDAAEHYKRTLALAVELGEREVEAQSCYSLGNTYTLLHEFNTAIEYHNRHLAIAQELGDRIGEARACWSLGNAHSAIGGHERALKYAEQHLQLAKELHDPVGESTARVNISDLRKLLGMPDSEPSPTEEEARSTASDHSASGNQSDGSENSQGRMVRVRRQSMEQLDLIKITPDGKRMQEEKLRAQATRKAKDDDFFEMLSRSQSKRMDDQRCSIKVNPAGAPAVATGATRKPLVQQNSLFVDPTNLPGLKSPSSANPSAIGHGPLARSATTTQQPDDDFLDMLMRCQGSRLEEQRSELPRPNVTMDAEAEAPPRSVPEAAVPGAPRGQTGRGATVPDEDFFSLIMKVQSGRMEDQRASIPFRNANNNNNSRSNNNGSAGGAGK

SEQ ID NO: 11977 - DNA, 2346 bp, DROSOPHILA
aattaaaataaacccttttcggtctttttgtcggtattttgtgtgcttgaacaatgcatgtgaaacttttatactttccaagctgaaagcccacaaattaacccaagtcaaagcacttcggttcaaactctttgggtcactgcaaagaccacagtgcagatgagctgccaggagcgctggtcatatcaccatggccctttgatgctaatgactctgccatcgccttaaaaccgggggataagcatcgatgggggctcacaacgctccgaacttagcgggcaatcaaaaaccgtgctgaggcaaattggcatgcgtgatgtagatgaatggagatgcagccagatgcagctagatgcagtggccagggggaaatggcgatggatggagtttctgggcgggggcagaggtacatatgtgggacaagtgatttccgcatcgctttctggatcgcagcgagcggctgcgttgattgattgattaattgacaaaggaattgccgttagttttccattcgcatttacatttgcatatctaatttatgaacggccaagtcttgtccggccgtatgtagttcattgtgttagctatgcaaatgctgtacttccgctgcgagcgtctgcccaaagcagcttaattattcattaatttcaacttaaattccatatttgtgcctgcagccatttgtggcccagtttcgatggcctgcagttgcagttatctttccgctggcttttgtcaccataaaactgaagtgttgcccgattatgaaataattataagcgttctgcacgcactaaccggtgattttaagggcgattggactttgattcggattttgggagatagagttcaatgtgggagctattcgcatcgattctagtacgaaattaactagctttgtttagagatttgcgcaactcgggcatctagttacccgttccattgtgtttcaatacccatggaaatgagaacatttatgagcctcactcggcccgaaaattgcacccagttagcatctatgtaaattcacaaaatctataaagtgggacccaatttgccactgccatctgcctcgaccttcgttttcagtggaggtgctgcagcatgccttgcatatttaatccgggctacattggacccgatccgccctgctgtgaccccgattgcttggaggagggccactgcacggttccggagtgcggagtttgcccggagtcccaactaccccgatgcaatcccgccccacaatccaacaaggacgcggcgaagcaaccactggaccagaaagcccaaaaagaaccgaagctccgggaacagaagtagtggggaaaaaggcaaagctgcaaaaatgaaccaggagtcctttggagatgtgctgaacacacaaccttgttgtgtgttgctaatatcttcaaacatcttgagctaaacccatttagctcatcatctcctgggcatcgaaccgtcatattgtaacattatatttcaaaaaaattaataataataataaataaataaaatgaatatctataaataataaaaacaataataatatatattaacctcaaattaccagctcttttctattttagcacaaaataactgtggataaaaaatacagataaaattaattcattttcttatgatctatctaaaatgaagtcaaataaatttaaaccagcattcttgatttaaatgtcaacaaaataacacataagcgtacatacgcattttcttcattcaaatttcaagcacgaaacgtgttgttctggtcaaacatttgtttaaatttctcatttttctcttccatttccggtgagtttcgaaagagaaaatgtgggagatgtatttataaaataagatttgcagacttctttcgagtgctgaaaatggtttacttaagtcgtccttggactccggccataaaccctttctacattggcccctatccgagatgcgcagtatgtccgtgcaacttcgacatttacaaaggatacacccccggtggctggcacagtcgttgctatagcagctattgacgagacgagtacctgtataaaatgcaagaataacggcgggaacaaatatagttgaactttgaaactgcacaccaattagcctcgcacacatctatgtagagaaataataaaattgattcatcgtcaccaaactgttgaatattgctggggaaataatataaatattccaatcgaaatggcttagatttcaaattagaactcctgggaattttagtttatcaggtcgcaaattgtgtgaaaatagttttctaaattcaaaattcaagtctcttggtcatgtcctcgtctgtggatcacgtggtacacc

SEQ ID NO: 11978 - DNA, 346 bp, DROSOPHILA
tgcacccagttagcatctatgtaaattcacaaaatctataaagtgggacccaatttgccactgccatctgcctcgaccttcgttttcagtggaggtgctgcagcatgccttgcatatttaatccgggctacattggacccgatccgccctgctgtgaccccgattgcttggaggagggccactgcacggttccggagtgcggagtttgcccggagtcccaactaccccgatgcaatcccgccccacaatccaacaaggacgcggcgaagcaaccactggaccagaaagcccaaaaagaaccgaagctccgggaacagaagtagtggggaaaaaggcaaagctgcaa

SEQ ID NO: 11979 - protein, 72 aa, DROSOPHILA
MPCIFNPGYIGPDPPCCDPDCLEEGHCTVPECGVCPESQLPRCNPAPQSNKDAAKQPLDQKAQKEPKLREQK

SEQ ID NO: 11980 - DNA, 2496 bp, DROSOPHILA
cgaatttacatatatgtctaattttgtatgattaacattgcgttgtttatataattccctattcatttgacgagtttcaaaatcaataacatatgtgtaccatagtagataccatagatagtattcgaatctatgtatatctatatgttttgagggcaggccaagcagttaatatgtatgtgtattgtacaatattaatcatttgctgtttgttatcatgttttttcgaattcaaattatacctgcatttttaaatgtatacttatgaatgtgattttacccaaaaacaaaagcaactacaaaaatatactcgtatttactaaaccgataaagtatgcaaatagtcgaatagatcgaataccacatacatatgtagttttatatagcatatgcttggggtgacgatccaccgatctcactaaccgtatctcttctcactttaacacgctataagaaaataccaaatcgaaagctacatatttgaatatatatactcgtactcactataagaaaatacccgttgtcgtaacgaaagctaggatcttctgagaatcgaaggagtatatggcttatcgtattaccttatcgaatcgaatagagcctagaccctagagttactggcatacgaatatatgtattccgtgcatgtttaccaaccgaatcccaataaactaacacattaaaccgatcgatctggctgtgaacttttcacttccctgaaatcttgggcttatccttatcgctatgggaaactgggggaggcgacttctctgctgcggttatgtaatgccccaaaaaagcgccagataagaccaaccgccggttgcggaagatgagcggatcgccacggcccatggagataaagttgtttacaggaatccggaccgagcacaaagacaaacagcaatggcaataaagcaatgggacagagagacaacccagctgcaagctaattaaagttgcgacagaacgaagccagtcgccagtagtccgccagttgcgaatggagcaatttccagccgggagtgtttgcaatcctggtactatcccgtgagaagggctgaaaaaggactgtaaaatacccagttcccatctatagttatctgtcgtgcctgcaaggggctacggcaactttggtggtattgacaaaaaaaaaacgaaagatacatgtcacagttatcatatataaattatcagtcatttgaataaatcattattcattattattattattttcacttcttgttacagataaagttacataaactgcgtataccctcttgttcggcacacatccagggtaccacacggcaaatatgtcctgcaacgagaagacagcgcttctggcaacgcaacaaggacatcagcagcggcagcagcggcagcagcagcacatcattgtcgtgcccgcgacggggaaggatccaaaggattatgagcccattttcacaactgctgagtaaacgctttccgtcgtatttcattaaaaaataacttcgttacacagtgccgcctgcccgcttctttcgtagctattcctacggactgacgctcgaggagctcctgcccttcgctctggatccctggtggcaggccgtacggcgcctcagctgcgggctcctgggcctgactttcctgctgaccctgattgctggactggttatggcctattccgacagtgtctgtctcccaaatagagcaattagcagaaacgcgaccaccacgacaacgatggccacgccactatccttggctctcaacggctcccagctgctgatggccagtttatagtggccgtaagctaatctgtgtagcattttggagatgccgcaatccaccctgcggaattgcatcagccgcatcagctcgcactattagcatttgtttggcttgccggtaatggaggcgacctaatcctcctcctctctactgtttacccctactcaagctgagtgataagcgatgcaccgcgggattgattggtcgtgaaataattatactgattaacttatttgctacacaaccgcctactcgtaaagtaaaaagaatgcaaaaggtataaggaagcgtttccgtaccaattaagaacattgtatcgcaaacttattaatttttatatatatacatatatatatatgaatattacttaaactaataaacgaatagttttttttcatcgctgtattctggtttcggtttctgggagtttagaagttaacaaaccgccttatagttttacagccccaccctgaaaaaatggtttgatttagttttattttataaatagtcttggcaatttgtatacttgtgaaaaaacattttcaccacgcccacactagcgcgcacaattaacaaaatcctgtagttacagaggtggtactcttgtcattttggaagttttatgtattatgtagtttatgtatatatataaaaaatattttcttagaatttaaattatttaaaatattattattattatattatatattaacacat

SEQ ID NO: 11981 - DNA, 606 bp, DROSOPHILA
cgaatggagcaatttccagccgggagtgtttgcaatcctggtactatcccgtgagaagggctgaaaaaggactgtaaaatacccagttcccatctatagttatctgtcgtgcctgcaaggggctacggcaactttggtgataaagttacataaactgcgtataccctcttgttcggcacacatccagggtaccacacggcaaatatgtcctgcaacgagaagacagcgcttctggcaacgcaacaaggacatcagcagcggcagcagcggcagcagcagcacatcattgtcgtgcccgcgacggggaaggatccaaaggattatgagcccattttcacaactgctgactattcctacggactgacgctcgaggagctcctgcccttcgctctggatccctggtggcaggccgtacggcgcctcagctgcgggctcctgggcctgactttcctgctgaccctgattgctggactggttatggcctattccgacagtgtctgtctcccaaatagagcaattagcagaaacgcgaccaccacgacaacgatggccacgccactatccttggctctcaacggctcccagctgctgatggccagtttatag

SEQ ID NO: 11982 - protein, 133 aa, DROSOPHILA
MSCNEKTALLATQQGHQQRQQRQQQHIIVVPATGKDPKDYEPIFTTADYSYGLTLEELLPFALDPWWQAVRRLSCGLLGLTFLLTLIAGLVMAYSDSVCLPNRAISRNATTTTTMATPLSLALNGSQLLMASL

SEQ ID NO: 11983 - DNA, 3495 bp, DROSOPHILA
gtcaattcagttatttggctgtataatatcgcagtcagtgatgatgtcttggcttttttctatttatattgaggttgaataagataagcaataaaataaatttttatatttacctatgtatttaagttaaaagaataccaaatttataagacatttatccatccattttattcattttatatatggataatcgctgtgatcaccgatatttttctattccggtggaaaacatttatattttcgtttgcgaccgagaaatttcatatgatgataaaataaacatttaaaatgttgtctttcatatgttttggcttacataaattggactactgtggtattctttgaaagacgttttcagtgagaatgcatcgagtggaacagtgtgggaaagaaacatctgggatggtctaaattatatcaaattcttcatcccatcggaatgaatggaaaatgcgatataaaactagatatgccaaaccaaaagcagctgacgcgtacagctgaatcgcctaaaataggcggggtgatggttaactctacaaagggccaagcccacgttgggttgaggtacataccgaaaagactggttcaagtatcaatcatgggattaatgctactttgtattaaccctgacgtcccctctctttctttaatgacgtaataaaattatgatgtgactcataaccaaaaaaaataagcttttgaaggtcatgtactatttacgtgtactttatgtcgatgctttcaaacaaccagatcatcgattaacgcttcgaactatgaagaaaacggatggaaaatatgctgattaccatctatacgtggtaatagagatcccaaaacagtagggttcctctacagtatgtcttttctttaaaacgcagagaaaatgaatttagacattatatataaaagtatttaaacaaattatttattcatatatggtaattcttagtttaggttttcttgtaaaataacaatttcttaacttaactatggattaaaatgtctaagaagttaaatcaatggaaattatacgcccagtgccattgaaaggcggagccgcggaaatcgcatcaaacgtactactctcagtagtctgatttgtagtgctttttttcgaattagccgaatgagcgtaccagtctgtgagtgcgaccaagttcttagaaaaattgcagttttcctgattgtattcctttctgtgtccctcagaatcagcaaaagtattcgatgtactcagggaaccaaccagtgaatgattggctatcgagtctacggtacagcgactaattactgaattagccttatagtttgaataaatatataaagattgctgtaggggcttaaccgaattatcaactattactgattctggctctggagcacatttacttggctcgacgacgcggctactgtacaaatttctgttgttatgtgtaagttttattacagtcagtgcatccgagccaagtcttttgggcgagcctattgctggctcttgttgctcatcgtcgtccgaggagcataagtcaattgtatcaacaacaacttcctttgtgggtgaaattctccagtgtgagttgagcgaattgtggcgcgttagtcttatattgagttttgtatttgcagtgtgattttgctcttccattacgtgttcggatatttttttcaatctgactgatattggacggcattgtttaatcagcggagagttcaaaaacaaaaagttctcagtagtgtccctgcgtttaacaaattgacgccgcggaaaggaatatatgtgataattgtgttcatgtgactttttaaatgtacaatgcactgtagtgtttgtttttttttcaaaatacttttgcttggtatttgatttattgatcaatggagtgtaacaaaagcgttccaggcgttcctgtctttccgcaatataatccattgatattgtttgttttgtcgattttaacaattgctgtcctgcaggtgatgatattgggataaacgaacacctactaaacgaatgaactgttcgatttctccgcgatggtaaacgcctctttctgtttgatgtttccgttgatgtttcttcgctgaatgaatatgttttctgtttctctttagataaactattatcggagaatttgggttgcagtttaaagtttaagagaaaggcgttgcgctgttcgatatcttcgtttttcccatcacttttgttatctggctcaggggaatcacaaagtataacgtcatcctccatgcaacaaatgttttcgtgttcctgttatgcaatagagttattaactattaactttgacaatctttggcaatcaacttacgagtatagcttctttagaataaagttcggcatcacagttgtcacataggtagatatcaaaaggtggtggctcaaccatcatatgctgtacgttttcgctaatggaactgttgttcttttgcagcaacaagcactttctgttcttttgttgtctatcatatgactgcaaaataaccaattcagaattaactaattttaaaacccaattattcaaagtaggcttggcttaccatgttttcatttcgaaatgtaaccaacagtttgttgtttctcctgtcatacaatgaagttgttgagttataattgtttatgaatcttaagctcgcgtgttcatacgcagctaaatcattacaaaatcttaatagaaataagcttttgtgaaattgatagcatataaccacaatttctttcattttttccatccaattctgtaaaatagatacaggtatatattagccatttatgggggtgaatgttaaatataagccatagaaatcaaaaggtaagggaaaaaagcttaccccaacaaatgctttcggctttttgagcggaatctcgaaaggagcgctttcgggccaccattctggttcactgcaatctattttctttggtaagtttatgtgtcctaaagagcattgcaccatgaagggaataaaattttctaactgggactccgtaattttttctagggatgttggatatccgttcgcaaacaaaagtggtaggttggatatcatgttgtgttgagctttatctttttcatccattgtcactgcaagtgaattaaaatgttatattttattgccatgttatcgatagttttccaagataaccgattaaaacgattacatatgtataacatatctacttaaaaatttaaaactactaaactttcctaaaaccaaaccaaacaaacgatttcaaatatttattagcagttgtgataagtaaggggcgcagtatatggatctagctgtgtccgtatgtctgtccgtcctcatgaacgtcgagatcaatagagaatactgagggtgatgagtaaactcaattaggtaccgtgtaatagttgttctatagtccttgaaaagtatataatgatcatctgcctgtccgtcctgatgaaggccagttactcgtaaaaatatgaaactaacaagtcttta

SEQ ID NO: 11984 - DNA, 1437 bp, DROSOPHILA
tcatatgatagacaacaaaagaacagaaagtgcttgttgctgcaaaagaacaacagttccattagcgaaaacgtacagcatatgatggttgagccaccaccttttgatatctacctatgtgacaactgtgatgccgaactttattctaaagaagctatactcgaacacgaaaacatttgttgcatggaggatgacgttatactttgtgattcccctgagccagataacaaaagtgatgggaaaaacgaagatatcgaacagcgcaacgcctttctcttaaactttaaactgcaacccaaattctccgataatagtttatctaaagagaaacagaaaacatattcattcagcgaagaaacatcaacggaaacatcaaacagaaagaggcgtttaccatcgcggagaaatcgaacagttcattcgtttagtaggtgttcgtttatcccaatatcatcacctgcaggacagcaattgttaaaatcgacaaaacaaacaatatcaatggattatattgcggaaagacaggaacgcctggaacgcttttgttacactccattgatcaataaatcaaataccaagcaaaagtattttgaaaaaaaaacaaacactacagtgcattgtacatttaaaaagtcacatgaacacaattatcacatatattcctttccgcggcgtcaatttgttaaacgcagggacactactgagaactttttgtttttgaactctccgctgattaaacaatgccgtccaatatcagtcagattgaaaaaaatatccgaacacgtaatggaagagcaaaatcacactgcaaatacaaaactcaatataagactaacgcgccacaattcgctcaactcacactggagaatttcacccacaaaggaagttgttgttgatacaattgacttatgctcctcggacgacgatgagcaacaagagccagcaataggctcgcccaaaagacttggctcggatgcactgactgtaataaaacttacacataacaacagaaatttgtacagtagccgcgtcgtcgagccaagtaaatgtgctccagagccagaatcagtaatagttgataattcggttaagcccctacagcaatctttatatatttattcaaactataaggctaattcagtaattagtcgctgtaccgtagactcgatagccaatcattcactggttggttccctgagtacatcgaatacttttgctgattctgagggacacagaaaggaatacaatcaggaaaactgcaatttttctaagaacttggtcgcactcacagactggtacgctcattcggctaattcgaaaaaaagcactacaaatcagactactgagagtagtacgtttgatgcgatttccgcggctccgcctttcaatggcactgggcgtataatttccattgatttaacttcttagacattttaa

SEQ ID NO: 11985 - protein, 448 aa, DROSOPHILA
MMVEPPPFDIYLCDNCDAELYSKEAILEHENICCMEDDVILCDSPEPDNKSDGKNEDIEQRNAFLLNFKLQPKFSDNSLSKEKQKTYSFSEETSTETSNRKRRLPSRRNRTVHSFSRCSFIPISSPAGQQLLKSTKQTISMDYIAERQERLERFCYTPLINKSNTKQKYFEKKTNTTVHCTFKKSHEHNYHIYSFPRRQFVKRRDTTENFLFLNSPLIKQCRPISVRLKKISEHVMEEQNHTANTKLNIRLTRHNSLNSHWRISPTKEVVVDTIDLCSSDDDEQQEPAIGSPKRLGSDALTVIKLTHNNRNLYSSRVVEPSKCAPEPESVIVDNSVKPLQQSLYIYSNYKANSVISRCTVDSIANHSLVGSLSTSNTFADSEGHRKEYNQENCNFSKNLVALTDWYAHSANSKKSTTNQTTESSTFDAISAAPPFNGTGRIISIDLTS

SEQ ID NO: 11986 - DNA, 3175 bp, DROSOPHILA
ggcttgctcttttcggaattcctggactgaaatagaagctacttgagaatcatttaaataacacaaatgaacttatactatcacatagggtaaaaaatattaaacaaaatgttttttattgtttatgattatatagcattcaaatggattccgtattcaataatacctcatacaaaatcttaccgatgctgcgcgattcgaggattgtgttctgctgattctcttgctcggccaaatcctcctgcagcttaattttgcgctggaactcctgctccttgcgatgcaccgtgtagtagaggatgtcctgcagcccggccatttcgagcagctcctcaattcgcgtgatctggaacatacagtcctgtatcatggtgttggcctgtgccataccggcaccgttatcctccactaccaaggcgcactgcttgaccaaggtcaggtcgaatagcacctgctccaaacgcggccctacaactgaacaagcagaaacatgtatgtataaatcttacttggagattcgcgcattatgcccactcactctgctcctcgacgatcaattctttccttttcttgagttccttctcgagctgcgccattttggtatcttttggccaattttgccccataaattctttgacaagtggatatttttccatattttgtccgttcaatgtttccccccgataagcttacaagtttgcgcgttcagtaatttatcggatatcgaatgctaaggcacagcgatcattgttgaaaagtgtcatagatactgaagtcacagcgatatatatcgcttactgttttagaaaacttattttaaaaaggaataaaaaaatgtaacgtaccgctgaatattaatttaattacaagttttatttgtttaagcttttttttattaatgttgtacaagatttgtagagatttgctcatctctgacgacaagtgccagtgttggcaaacgctccgccgaaaatcagctgtaagcggtgcttgttaaaaaaaaactgacagcagccgacggacttcacataacataagagcaaattttcagccttttcattattttggaaacgccagaatgctgacaaactgtgcctccaaaacactggccgccgtggtgagtagcgcagccatccaaactgtccagtaattcgcggtgtcaaccagggaaggcaacctgttccccgagttatataattggcgacaggaaaacaataacattaaggatatgtgttgttatttgcagcgcgccaacatccgggcaattgccaccagcagtgcccgggccagcgacaatctgttcgtccatcgcgacacaccggaggataatcccaacatcccgttcgagttcacggcggagaacaagaagcgcgtggaggccatactcagcatctatccggaggggcacaagcgcggcgccatgatcccgctgcttgatctggcacagcgccagtacggctggctgccaatctctgccatgcacaaggtggccgagattctccagttgcccaatatgcgcgtctacgaggtggccactttctatacgatgttcatgcgcaagcccactggcaagtatcacatccaggtgtgcaccaccacaccatgctggctccgcggatcggacgacatcctggagacctgcaagaagcagctgggcatcggcgtcggcgacaccaccaaggacaggaagttcaccatctcggaggtcgagtgcttgggcgcctgtgtcaatgcgccaatggtggcgatcaacgatgactactatgtaagcaattctaattgctaaatgtgtttcctggtcatttgtttgtaggaaacgccagtttcactctcagcctcgtccagcgtttcaatcttaatgcgctgaaatcgactctatattgtgcaaacattgctaacgttttttttttactttgcaggaggatctgacatccaaggacatgcaggacatcctgaacgacctgaaggcggataagatatcgccccctgggccacgcaacggacgctttgccagcgagccaaagggcgagcccacttccctgagcgaggagcccaagggtcctggctttggtctgcaggccggtctgtagaggatgagcaaggagcagaacctatcactgattgtcgaacgaaagttaaataaatgttaagcaacttatagaggtcattgataaaggatttttggatttttttttaaaaatatgctcactttccattggaaagtttccattttgaaaggttacacataaaataataactcccaacgaactcgagaatactagtacattcaattagatgtggaagatcgccagaaccccaatgcaagccaaatgtgcgtttttcatatcttgaccaataaatgattttattttgtagtggaaacggcaggttcccattgctaattataatggatgtttactattgcatacgtacgcatgttccattactaattataatgttcgctcattataattgtatgtacaatggcgtacgtacgtaagaacgaatattatgaattaagatgattggaagagtagttgagaggctattttcagctgtggcaattgaccaatacaaacatcaattactcaaaggataaaactaaagctacagaaatgatgccttacattctacgctggttgagtgcaattaaccagatataatactacatgtatgtacgcactgtgatgcagtcgattgcctgtcctttttacttatgtactaaaatccgaatttaatatttagttatttgtgttgcccgtaaagttgtccgccaatagtcaggattgtggacatgatgtggattggctccgcccgcgagcttttttaaaaccaataacgataagggaaattttccgttaaaatctaactggagccgccatgggtcacctttccgcgtacttcggtccgcatgtgttgtaatattatatgtaaaaaaaaaaaagtgtactaaattcctacatggatttccttccttgttgcccttcctcactcctcgccgtagaaaatgctgaaagtataaaggtttattgacatatgagtaacatggttgagtgtggatatcaaaactataaacaaaataatgaagaaatcagacacaatgcgtgaaattaagcaacgaaacgggcaaatataaactgaaagtatcaactgaggaataactgaatttaatact

SEQ ID NO: 11987 - DNA, 892 bp, DROSOPHILA
aaaactgacagcagccgacggacttcacataacataagagcaaattttcagccttttcattattttggaaacgccagaatgctgacaaactgtgcctccaaaacactggccgccgtgcgcgccaacatccgggcaattgccaccagcagtgcccgggccagcgacaatctgttcgtccatcgcgacacaccggaggataatcccaacatcccgttcgagttcacggcggagaacaagaagcgcgtggaggccatactcagcatctatccggaggggcacaagcgcggcgccatgatcccgctgcttgatctggcacagcgccagtacggctggctgccaatctctgccatgcacaaggtggccgagattctccagttgcccaatatgcgcgtctacgaggtggccactttctatacgatgttcatgcgcaagcccactggcaagtatcacatccaggtgtgcaccaccacaccatgctggctccgcggatcggacgacatcctggagacctgcaagaagcagctgggcatcggcgtcggcgacaccaccaaggacaggaagttcaccatctcggaggtcgagtgcttgggcgcctgtgtcaatgcgccaatggtggcgatcaacgatgactactatgaggatctgacatccaaggacatgcaggacatcctgaacgacctgaaggcggataagatatcgccccctgggccacgcaacggacgctttgccagcgagccaaagggcgagcccacttccctgagcgaggagcccaagggtcctggctttggtctgcaggccggtctgtagaggatgagcaaggagcagaacctatcactgattgtcgaacgaaagttaaataaatgttaagcaacttatagaggtcattgataaa

SEQ ID NO: 11988 - protein, 242 aa, DROSOPHILA
MLTNCASKTLAAVRANIRAIATSSARASDNLFVHRDTPEDNPNIPFEFTAENKKRVEAILSIYPEGHKRGAMIPLLDLAQRQYGWLPISAMHKVAEILQLPNMRVYEVATFYTMFMRKPTGKYHIQVCTTTPCWLRGSDDILETCKKQLGIGVGDTTKDRKFTISEVECLGACVNAPMVAINDDYYEDLTSKDMQDILNDLKADKISPPGPRNGRFASEPKGEPTSLSEEPKGPGFGLQAGL

SEQ ID NO: 11989 - DNA, 3876 bp, DROSOPHILA
tacagtgtctgcctgctaaacctatccgaaagaggcctcaccgatgatcgactcaatcatctcctgaatgttgcgccagagcagagtatcattctgctggaggacatcgacgcagcattcgtctcgcgcgaagctactccgcagcagaaatccgcctttgacggtctcaacaggataacgttcagtggactcctaaattgcttggacggtgtgggctccacggaggccagaattgtcttcatgacaacaaactacattgaccgcctcgatcccgccttagttcgtcctggtagaatcgatttaaaggaatacattggctattgtacgcaatatcagttggaggagatgttcaagaacttcttcgccagcagtgacaccacaaaagccgaggagttcggaaaacgagtgaattcctttggacgctccgctagtccggcgcaaattcaaggctttttcatgaagcacaaactgtcctcgccgcaaactgttattgattcttgtgaagatatctgggaaaatgttttagatcataataaaaagattaattgaattgttgtggattttgtttacttgaagctctttaagacaagactgatgtcccttttgggtcttaattaattaaaacatctatcaattttactgtcattcgatattagtttatgtcattgttttcgaatttatttcatttttcaatgatttaagattatccattcgtttttatgcatagttgcacgtgtaattcccaatcgaactcacctaaatgaaggtcttgttttatattatgatttaattacatttttataggtaatttaaaaatatgaactatgttctaaaatatatgtatattttatgtgacattaagtttgattagtcctttgatcttctgggcctaccgacctttcctttcctttgtccaagcgttccattcgagttggcggggcccttaagtaatttgtgccaatcttgttcacacaccaagctagctcctaacatagtatacctgcaaaaagaaaaagcaattccatttcaaattcgctcttcactgcagtgtgttgttaggcatacctatcaccaggacgcagactggatccacacttagcacaactaaagcaccttagatgaaatacgcaattaattatttgtttttgttgattttgtaaatcgatattatttattccagtaagtgctttcgctaccagttcacttggcggtatagtttctccgcagccagaacaaactccggagcacccgaacatgctggaaaataaatgtgaacttgaacacaaggaacataatctaaagagtatctaaatggttgacgccattaagtaggcaacatgtttttaaggaagctgaaataatcttttcagtcgaatgcgtgcgtacctggaatagtcctttttgcaaagaatcaggcctcgcctcgtaaaacagctggaacccacttctgctagcatagctccacagcagtgacatttaaggcagccattgtgccagtatctgtccaaagcgtataaaagatatctatcacttattttatctgcaagcgaaacagagaaaacgtgagttaagttattgtagctcatagatgaatcgattcaaggaacttacctccacaaccaccacacactttaataagggagttggaatgaattaactgctgattattgaaatcgtttgaagattcgtccatgaacgatagctgagacgatgagatattcgagttggtctccacagtgtcctttgtgtggtttgagtttctatagtcaattactatgggggcgaagttctcaggactagatgagtcttggtgatgtgccgctagtatgtctctgtatgaatggaacgttgcattcattgcaaataatgttgatgacttaagtcgtagaaggcatatgggtcctgtttatggtttaaacctgaaaagtacagaaacatgtattgatagagggaaatgtgttaaatatattaataaaatcaccttttaacatgtgcaaaaatgaagcctagtcgtggaactccataattgccgtgtttctaccataaactcaacgcataaaccacataaaatatctaaaataggtttaaaataatcaattattttttaaggagcagtgggcttacagataaatgttaagcttagtaaggaaaaatataaatgcatctcttttagtacaattacgccgattttgaaaaaaaattcaaactaccatccagaattttcactagaaggtaataaaatatttattttatcaatcgatgacagaacgtgctattcacgccatttctcgccgattgcggatgcaaaaatagcgacaggcaatcagcaaaataaatgacttttggattttcgaaagcgatccaatttgaaattatttttgaatcattgcattctgcacagctgtcattacatacaaattgattatatacgcacgtacgtacatatgtacataagtaaaacacccaaatgaccatacatacatacacacactcgcagcgaacgcttgcaatgtacgtacatatatgtgtgtatcaaactgcggtcttacgccgatagattaatcaatatttaatgtttgtaatttgcactgttcattacggcgaactaaaacttcaaactggcaaacttgacgtttatgtacagaaatactgatttgctgtcagtggcacatttgagcgaaattttgtgtacatatatatgctggtatttgtttcacttaatcactcgactaaacggggtttttgtaaacaataaacacaatattcacttacacactcatcaattaattatttaaaagcgaaaatttctttgacaacaccatgaggaacagtaaaatcgctttggtttcaaacaccatttcttgtatacgactttacataccaaactaattcatagatatgaaagcaagcaatccgcgattatacagggtgcaccgtgtacacttccacattttaatcggtcaattcagttatttggctgtataatatcgcagtcagtgatgatgtcttggcttttttctatttatattgaggttgaataagataagcaataaaataaatttttatatttacctatgtatttaagttaaaagaataccaaatttataagacatttatccatccattttattcattttatatatggataatcgctgtgatcaccgatatttttctattccggtggaaaacatttatattttcgtttgcgaccgagaaatttcatatgatgataaaataaacatttaaaatgttgtctttcatatgttttggcttacataaattggactactgtggtattctttgaaagacgttttcagtgagaatgcatcgagtggaacagtgtgggaaagaaacatctgggatggtctaaattatatcaaattcttcatcccatcggaatgaatggaaaatgcgatataaaactagatatgccaaaccaaaagcagctgacgcgtacagctgaatcgcctaaaataggcggggtgatggttaactctacaaagggccaagcccacgttgggttgaggtacataccgaaaagactggttcaagtatcaatcatgggattaatgctactttgtattaaccctgacgtcccctctctttctttaatgacgtaataaaattatgatgtgactcataaccaaaaaaaataagcttttgaaggtcatgtactatttacgtgtactttatgtcgatgctttcaaacaaccagatcatcgattaacgcttcgaactatgaagaaaacggatggaaaatatgctgattaccatctatacgtggtaatagagatcccaaaacagtagggttcctctacagtatgtcttttctttaaaacgcagagaaaatgaatttagacattatatataaaagta

SEQ ID NO: 11990 - DNA, 898 bp, DROSOPHILA
taaagtcgtatacaagaaatggtgtttgaaaccaaagcgattttactgttcctcatggtgttgtcaaagaaattttcgcttttaaataattaattgatgagtgtatattttatgtggtttatgcgttgagtttatggtagaaacacggcaattatggagttccacgactaggcttcatttttgcacatgttaaaaggacccatatgccttctacgacttaagtcatcaacattatttgcaatgaatgcaacgttccattcatacagagacatactagcggcacatcaccaagactcatctagtcctgagaacttcgcccccatagtaattgactatagaaactcaaaccacacaaaggacactgtggagaccaactcgaatatctcatcgtctcagctatcgttcatggacgaatcttcaaacgatttcaataatcagcagttaattcattccaactcccttattaaagtgtgtggtggttgtggagataaaataagtgatagatatcttttatacgctttggacagatactggcacaatggctgccttaaatgtcactgctgtggagctatgctagcagaagtgggttccagctgttttacgaggcgaggcctgattctttgcaaaaaggactattccagcatgttcgggtgctccggagtttgttctggctgcggagaaactataccgccaagtgaactggtagcgaaagcacttactggaataaataatatcgatttacaaaatcaacaaaaacaaataattaattgcgtatttcatctaaggtgctttagttgtgctaagtgtggatccagtctgcgtcctggtgataggtatgcctaacaacacactgcagtgaagagcgaatttgaaatggaattgctttttctttttgcag

SEQ ID NO: 11991 - protein, 218 aa, DROSOPHILA
MLKGPICLLRLKSSTLFAMNATFHSYRDILAAHHQDSSSPENFAPIVIDYRNSNHTKDTVETNSNISSSQLSFMDESSNDFNNQQLIHSNSLIKVCGGCGDKISDRYLLYALDRYWHNGCLKCHCCGAMLAEVGSSCFTRRGLILCKKDYSSMFGCSGVCSGCGETIPPSELVAKALTGINNIDLQNQQKQIINCVFHLRCFSCAKCGSSLRPGDRYA

SEQ ID NO: 11992 - DNA, 5751 bp, DROSOPHILA
ggacagcccggatacggcagccagcctggtattggcggacagactggagccggacagcccggatatggaacccaacctggagttggagctcagaccggaaccggacaacccggatacggtgcccaacctggagttggcactcagactggagccggacagcccggatacggcagccagcctggtattggcggacagactggagccggacagcccggatatggaacccaacctggagttggagctcagaccggagccggacaacccggatacggtgcccaacctggtgttggcgctcagactggagccggacagcccggatacggaagccaacctggtattggcggacagactggagccggacagcccggatacggaagccaacctggtattggcggacaaactggagccagacagcccggatatggaagccaacctggggttggagctcagaccggagccggacaacccggatacggtgcccaacctggtgttggcgctcagactggagccggacagcccggatacggaagccaacctggtattggcggacagactggagccggacagcccggatatggaagccaacctggggttggagctcagaccggagccggacaacccggatacggtgcccaacctggagttggcgctcagactggagccggacagcccggatacggcagccagcctggtattggcggacagactggagccggacagcccggatatggaacccaacctggagttggagctcagaccggaaccggacaacccggatacggtgcccaacctggagttggcactcagactggagccggacagcccggatacggaagccaacctggtattggcggacagactggagccggacagcccggatatggaacccaacctggagttggagctcagaccggaaccggacaacccggatacggtgcccaacctggagttggcactcagactggagccggacagcccggatacggaagccaacccggatatggaacccaacctggagttggagctcagaccggaaccggacaacccggatacggtgcccaacctggagttggcggacagactggagccggacagcccggatatggaacccaacctggtattggtggacagactggagccggacagcccggatacggcagccagcctggtattggcggacagaccggtggcggacaacccggatacggaagccaaattggcggacagactggagctggacagcccagctatggaagccaacctggagttggagctcagaatggagccggacaacccggatacggtacccaacctgttattggtggacagactggagccggacaacctggatatggaggtcaaactggagtcggtggatcgcctggatttttaactcagccaggtattgggggtataagcggaccgattggagggaaactcggtggcggacaatcagaagccgcaaaacctggatattgggctcaacctggaattggcggaccatccagatacggcagtcaacctggaattggtgatcagaccggaaccggacagtcaggatacggcgggcagcctggaattagcggacagaccggaggcggacaaccaggatacggaggacaggctacaataagcggactccctgggtatggcactcagccaggaattggagcactaaccgctgttcctggcggacattatggatacgaaactcagcctggaattggtggacagaccggaaccaaccaacccggattcggtggtcaacctggaattggcggacagactggagccggccaacctggatatggatttataggtcagcctggtattggagggcaaacaggaactagtggaaggcaacccggttacggaacccaaccaggaattggcggacagactgcagccggacagcccggatatggaagccaaaccggagttggcggacagatcggagccggacagcccggatatggaagccaacctggaattggcggacagactggagccggacaacccggatacggtgcccaaccaggttttggaggacaacccggatacggaaaccaacctggagttggcggacagactggtgccggacagcccggatatggaagccaacctggaattggcggacagaccggagccggacaacccggatacggtgcccaaccaggttttggaggacaactcggatacggaaaccaacctggagttggcggacagactggagccggacagcccggatatggaagccaacctggagttggcggacagactggagctggacaacccggatacggtgtcatacctggatttggaggacaacctggaataggcggacagaccgccgctggaaagcccggatacggtggtcaacctggaattggtggatcacctgtgtatggaacacagcaaggaactggaggtcaatcaggaattagcggtggccaacccgggtacggaactcaacctggacaaaccggagccgggcaacccggatacggaagcttacctggaacaggtggtcaggccacagctggccaacccggatacggacccggatctcaacccggaattggcggacagacagttggtgggcacggtggatacggtagccaacccggaatcggtggagcgccagtttatggaacacagccaggaggtggcggccaaactggagtcattggagggcagcccggacagatcggagacagagtaggacaaccaggatacggaacccagacaggacaaattggggcaccaggtcgatatacagatggaagtcaaactgtacctggtgctgttggcaccggtggagttggtaagtagctatcaaggcggtggaaaacaatgttttgaattgctcgtttcccagttgctgccggtaccagcggagctgacgatgccttctcccaagccgagtcatcaattggcgacggacaagcgtcggcaagtgctcagggcaagaagaatggaggcacggccaagactcaggtgtcgggaacttacagctccggcggaacctttagcgccagtgcaatgacgtccgatgctgatcgtgcggccagtgcacaggttaccggaaatgctgatggagccgtgagtcagtctcagggatcgggaggtcctgcccagtcgcaggcccaggtacaggttgccaaggacggcggcaccaaggcctcgtcgcagagcggtggcatcatccaacagagccagagcgaggttcacgccaatgacaagggcggcctggcggacgcccaatcgagcggacccggacaaacctcctcccaggcccagatcggtttccgacccggccaggaggccaatcctatagcagctaatggtggcggccaggcatcgtcctcatctggcactcattccagtcagagtagctcgcagattcacggaacatcgaggtaacattgctataggattattgattattgactttagccactcattattggttttgtatttcagctttggtgtttcttaccatggtgctgcacaatccgcgtcgggaaccaaagagcaggttgctacttacagggaagcaaacagggaactcttcaataccatcagtcagtttggcaacaacgcaaatgcgtaagtaatcggaaaagtgaagaaagaaagaaaaacatgttttgggctatttaaaaaaagggataacgtatgcttctgtggtttttaaattggcaaaatatgttcaaaattgatttcgaaaagtcacacactttagctcaatcaatttattgtgattttataactgccatgcctttatggaattctttagcataaaacgtattcatttttgtatactttttgaggttatttatgttggatacataaacgaataaatcctttaaaatttctaactacttttgcttacttacttttcaaatgggaagtgcgtgcctctgtaaaatttatacgattgtattttattttcttttctttaactttcaacttccagtgttactgatcgagctgatgctgtctacagtggacccgcgcttactgatgagtccgacagggtgccagaggcgcaactgaagtccaccaagcccaaggaggaagcggagcaggtagtgagtaagctagaccacccggagcccgttcagtacgatgatgaagatgaggccgatcctgatgaatacgatgaggatgagtactatgaggagaagccagtgaagctagaggaatccccaaagtcgtccaccatagtggcaccaaccgaggcaacacctaggcccaagacctacaaccagtcatcacccacgcaaagccaacagacagtcgtggtgccggtgccgggtgaaaagtatcaggtggtgcaaaagcagaacggtaaagccaccatcaatgcagagccctcgaccaccgaggccataccaccgggattccgaggaaccgtaaatgtggaaaagaagttccacaccaaggccctggagctgcacgctcccaaaggagtagagatcacacccgacaccagcgacgagggtccggtccggggtgacaagccgctacggcgtgctcctgatagctacgtcaccgtcaccaagtcagtgacaggcagcatggacaacacaaagaacccaccgcaggagaacaagaacttccagtcgacctattacaccaagtcctcgacctgcggctatttcaccttctcttgcaacattgtctacggcgccaatggaaggagcaagatctgccgtcccaaggcgcccaccaatggaaaatgctaggggagcataatacacatccctctaaccacaccaccacacccatattatagtagatcagttccagaggggctcaattttagaacagcttaaccaactgccatctacaaaccacctatttgtattttgatgcagcttgctcttgagcacttaagtgttttttcgcatacaattaaacggtttcactgccaattcttgaatattttgtacgatttgcaactgtaattaatatttaataacaaaacacaatatgaaaaagagaattttgtttcgttatcttaattccggaactgcttgtgcgatgttgtttcagaaaaccctctaaacacacatcttatcgcatgtaaggagctgagaattccaatagagatattgcgggcagcacattacgaagggtaaataatcacaccgaataaacttggtgcaatccgctgggtagggtattagctggttgagcttattctcgcatagtttcgtaagatcggaattttctggttctttaatcggtggagaattgggataggagttgttccaattcgttatcggatctatggaggaacagccaaccggagtctgcgaattgcattgtagtagctgtgagttccaataaaattccggaggacagtcaagcaatcgggtctcgtagtaccgatggcagtcattgggaaacggccatctctgcacagtttgggccatgcaaaatccagagaacacggcacatagtaaaacaattagtggtaacttgtttagcactgataaaagtgaaaatttagtaatgttatgaaaatatttaagtttgtacttttctctctgcctcgcgaagatttcttagtctgataccgatccgatgtttctgggtttttatatatcattgctaagtaaatacatattattgacaaattgatactatgactttagaggaattttatttattggctttcatatcatagctgtccttgaaaagataagcttgtccggtcaagtggatgggaaaataactcgt

SEQ ID NO: 11993 - DNA, 3222 bp, DROSOPHILA
atggaacccaacctggagttggagctcagaccggaaccggacaacccggatacggtgcccaacctggagttggcggacagactggagccggacagcccggatatggaacccaacctggtattggtggacagactggagccggacagcccggatacggcagccagcctggtattggcggacagaccggtggcggacaacccggatacggaagccaaattggcggacagactggagctggacagcccagctatggaagccaacctggagttggagctcagaatggagccggacaacccggatacggtacccaacctgttattggtggacagactggagccggacaacctggatatggagccaggtattgggggtataagcggaccgattggagggaaactcggtggcggacaatcagaagccgcaaaacctggatattgggctcaacctggaattggcggaccatccagatacggcagtcaacctggaattggtgatcagaccggaaccggacagtcaggatacggcgggcagcctggaattagcggacagaccggaggcggacaaccaggatacggaggacaggctacaataagcggactccctgggtatggcactcagccaggaattggagcactaaccgctgttcctggcggacattatggatacgaaactcagcctggaattggtggacagaccggaaccaaccaacccggattcggtggtcaacctggaattggcggacagactggagccggccaacctggatatggatttataggtcagcctggtattggagggcaaacaggaactagtggaaggcaacccggttacggaacccaaccaggaattggcggacagactgcagccggacagcccggatatggaagccaaaccggagttggcggacagatcggagccggacagcccggatatggaagccaacctggaattggcggacagactggagccggacaacccggatacggtgcccaaccaggttttggaggacaacccggatacggaaaccaacctggagttggcggacagactggtgccggacagcccggatatggaagccaacctggaattggcggacagaccggagccggacaacccggatacggtgcccaaccaggttttggaggacaactcggatacggaaaccaacctggagttggcggacagactggagccggacagcccggatatggaagccaacctggagttggcggacagactggagctggacaacccggatacggtgtcatacctggatttggaggacaacctggaataggcggacagaccgccgctggaaagcccggatacggtggtcaacctggaattggtggatcacctgtgtatggaacacagcaaggaactggaggtcaatcaggaattagcggtggccaacccgggtacggaactcaacctggacaaaccggagccgggcaacccggatacggaagcttacctggaacaggtggtcaggccacagctggccaacccggatacggacccggatctcaacccggaattggcggacagacagttggtgggcacggtggatacggtagccaacccggaatcggtggagcgccagtttatggaacacagccaggaggtggcggccaaactggagtcattggagggcagcccggacagatcggagacagagtaggacaaccaggatacggaacccagacaggacaaattggggcaccaggtcgatatacagatggaagtcaaactgtacctggtgctgttggcaccggtggagttgttgctgccggtaccagcggagctgacgatgccttctcccaagccgagtcatcaattggcgacggacaagcgtcggcaagtgctcagggcaagaagaatggaggcacggccaagactcaggtgtcgggaacttacagctccggcggaacctttagcgccagtgcaatgacgtccgatgctgatcgtgcggccagtgcacaggttaccggaaatgctgatggagccgtgagtcagtctcagggatcgggaggtcctgcccagtcgcaggcccaggtacaggttgccaaggacggcggcaccaaggcctcgtcgcagagcggtggcatcatccaacagagccagagcgaggttcacgccaatgacaagggcggcctggcggacgcccaatcgagcggacccggacaaacctcctcccaggcccagatcggtttccgacccggccaggaggccaatcctatagcagctaatggtggcggccaggcatcgtcctcatctggcactcattccagtcagagtagctcgcagattcacggaacatcgagctttggtgtttcttaccatggtgctgcacaatccgcgtcgggaaccaaagagcaggttgctacttacagggaagcaaacagggaactcttcaataccatcagtcagtttggcaacaacgcaaatgctgttactgatcgagctgatgctgtctacagtggacccgcgcttactgatgagtccgacagggtgccagaggcgcaactgaagtccaccaagcccaaggaggaagcggagcaggtagtgagtaagctagaccacccggagcccgttcagtacgatgatgaagatgaggccgatcctgatgaatacgatgaggatgagtactatgaggagaagccagtgaagctagaggaatccccaaagtcgtccaccatagtggcaccaaccgaggcaacacctaggcccaagacctacaaccagtcatcacccacgcaaagccaacagacagtcgtggtgccggtgccgggtgaaaagtatcaggtggtgcaaaagcagaacggtaaagccaccatcaatgcagagccctcgaccaccgaggccataccaccgggattccgaggaaccgtaaatgtggaaaagaagttccacaccaaggccctggagctgcacgctcccaaaggagtagagatcacacccgacaccagcgacgagggtccggtccggggtgacaagccgctacggcgtgctcctgatagctacgtcaccgtcaccaagtcagtgacaggcagcatggacaacacaaagaacccaccgcaggagaacaagaacttccagtcgacctattacaccaagtcctcgacctgcggctatttcaccttctcttgcaacattgtctacggcgccaatggaaggagcaagatctgccgtcccaaggcgcccaccaatggaaaatgctag

SEQ ID NO: 11994 - protein, 1039 aa, DROSOPHILA
MEPNLVLVDRLEPDSPDTAASLVLADRPVADNPDTEAKLADRLELDSPAMEANLELELRMEPDNPDTVPNLLLVDRLEPDNLDMEPGIGGISGPIGGKLGGGQSEAAKPGYWAQPGIGGPSRYGSQPGIGDQTGTGQSGYGGQPGISGQTGGGQPGYGGQATISGLPGYGTQPGIGALTAVPGGHYGYETQPGIGGQTGTNQPGFGGQPGIGGQTGAGQPGYGFIGQPGIGGQTGTSGRQPGYGTQPGIGGQTAAGQPGYGSQTGVGGQIGAGQPGYGSQPGIGGQTGAGQPGYGAQPGFGGQPGYGNQPGVGGQTGAGQPGYGSQPGIGGQTGAGQPGYGAQPGFGGQLGYGNQPGVGGQTGAGQPGYGSQPGVGGQTGAGQPGYGVIPGFGGQPGIGGQTAAGKPGYGGQPGIGGSPVYGTQQGTGGQSGISGGQPGYGTQPGQTGAGQPGYGSLPGTGGQATAGQPGYGPGSQPGIGGQTVGGHGGYGSQPGIGGAPVYGTQPGGGGQTGVIGGQPGQIGDRVGQPGYGTQTGQIGAPGRYTDGSQTVPGAVGTGGVVAAGTSGADDAFSQAESSIGDGQASASAQGKKNGGTAKTQVSGTYSSGGTFSASAMTSDADRAASAQVTGNADGAVSQSQGSGGPAQSQAQVQVAKDGGTKASSQSGGIIQQSQSEVHANDKGGLADAQSSGPGQTSSQAQIGFRPGQEANPIAANGGGQASSSSGTHSSQSSSQIHGTSSFGVSYHGAAQSASGTKEQVATYREANRELFNTISQFGNNANAVTDRADAVYSGPALTDESDRVPEAQLKSTKPKEEAEQVVSKLDHPEPVQYDDEDEADPDEYDEDEYYEEKPVKLEESPKSSTIVAPTEATPRPKTYNQSSPTQSQQTVVVPVPGEKYQVVQKQNGKATINAEPSTTEAIPPGFRGTVNVEKKFHTKALELHAPKGVEITPDTSDEGPVRGDKPLRRAPDSYVTVTKSVTGSMDNTKNPPQENKNFQSTYYTKSSTCGYFTFSCNIVYGANGRSKICRPKAPTNGKC

SEQ ID NO: 11995 - DNA, 4135 bp, DROSOPHILA
ttgataaaccttaacaaaaacccttcttgcctgatcctccagtcggcacgagtgaaatccgaagcccgggacaccagtcaaaggtgtgggggggtcgtcatgcaattgctttgtaaaattctagaggagaacgataatgttgcttgagatgatgatatataatgcttagagaacccacgcataatctaatgacacacagaaacacaacaaattcgatggttattgcaagatatactttatcgatgataatgatgaatatgaaaatacgaaataaatgataatataagtgaagcatgaaactactttttttctatttttcaatgttttagctgcaagcaaataatgtaatgagaatgtggagatgtttgtttaagttatttgatacaacaaattacgagaaatatatataccacatacacaaacacctaaacccaaacacatgcccgatatgcccgacaggaagtttattcgattttgttgattaacaaaaagatacaaccgaatatctgaggacatacagccgttatgagatgattgattatgagatccttgattgaaacgcaaacaaaacgatgggaataaaaatgaaaaatacaaaagcatactgaataaatatagaatttttttcaagcgaaagaaattaaattcacatagatttattaatttaaaaattaatataaatatacttcaaatatgaaaagtatgaaaacaaaaaaaaaaaatgcaaacaagaaaaacaaaaaactacatatattaaatacacacatactatatgagtatactacggattattattactcttataattattattattgtattgaaggaaaaatataaaagagaacattaaacagcataaataaaaaataacaacaaattgttttgtttgaactggcttggggtttcggctttcataaataacaaaaccttggcattatttattaatttgtgataatttatttgtgaacttttagacaatgttgaacattttgcaaatcttttagacgaaaggctcaatggtgaattccaccgccgaacaaggcgtggtcagctcgaaggcttgcagcactgtgggatgcaaaaccccaatcttgccgatgacaacaccgtcgtacattacattagcacagcgaccggggaagtagctgggatctgaaatgaaatggaacatgggtaactcaaaatcacaagaactcttcgacaacttaccctcggtggcctgaaggtaatagcccttggtcccgctggccgatttccagggcacagagagcaattgcatcacgcgatctagcaggccgtgaaccacctcgaaaccagcggtcttattgcagtttacagcacacacccttcgctcattgcgagcaccaacttccgtgctctcatccgcaaccaccacgtcgctgatctcgaagagcttcaggggtagcggcatcttgcgattggccaccagcgtcttgaggagaccgggcaatagggtcgtgcgcactacttggaactccagggtcttgggattgcctatgtgcacggccggcaaggcgtcgatgttcttgttcagcttgcgcccaatgtcatcccgtgagcagagcgtaaaggtcagcgcctcggtgaagcccgcctgggccacctgttcgcgcagttgttcggtcagtttgttaagtgggaattgcttggcaatttgcatgaatgcaggcagggacttcttaatgttgttgtagccgtaggcaatagccacgtcctcgtagatgtcgcacgcgtggatgacgtcgtgccgtgtgggcgggatcttaaccaccagcgagtcgccatcgaccttggcctccagatacatgcgcgtcagcatatctgcgagcttttccgccggctcatcgatgccaatataggcattggcgcgctttaccgatatcctctcctcgcgcacctccagttccggataggagatcacactgccatcgggttgcaccacatcgcacggctccacggtaaacttctgggcgcagtgctcggaaaagaggcacacaatggtgtccagcaccacttttgccttcgttctatccgtggccgtgcactcgatgaatacgttcttggtcttcagcgtaatcttggaatgatcaccgttgatgatgggcggcagtgaaagcaccacacggttggcatcgtagatcactggataaaccggtgattcccgaatgattggcagatattgcttcagctgcgcatgcgtggaatagaagtccatgagctcgctgccagtcatctccttggtttggttaagtggtttgaacttgatttgatccggcgccagagcctcgtaactgaagggtccctgtagggtgtccagatcgtgcgttccgatagccaccagagtacgcttccggcagatgttctgatgcagcttgtcctgcagatcgatgaagctgttgtaggaggcctgcgtaaaagtcacgttccggagcacagcggccacagcgtacggacggatctgcgccgtcgaagggtcaatcttcagcacctgcctcttggccagctccacaaactggaacttagggggcttgagtctgaaagggcatagttccatcctgtagcatagttccattaataggaaagcgatgcatcgaacttactttccctggaataccagcagacccgtgaccaagccctctaaacagagcagatcataccgattggcgggtatgtcgattctgtatatgatctcctcgctggcattggccgccgctgccacatcgccctgttccttggtcagcatctgcttctccgtggtctgtgggcattatttcacgggattttaacatgtttgtactctttattagtcagcagcacctaccacttcgtccagctccaacccgaaggcaaagcagagatcctggaactcatcatcggctacgggaaagaggtaaatattagggagctccaagcgatgaaaacgtgattacacgtggacttttcaaactcactgtacgtcttgccgagcgcctcgaagagcagatcacgtttaactccaatggtgggcatattgaatgaatcacctgttagtcccgagctggcttttaacacagataaatgggcttaaacacaaattggcttatttcagaccggtgccagtgttgccaatttatggtgaccttattttgcagtactatcgcatgggcgatgttttgatggtcaccctgacttatgcaggagggtcacactattttccataaaatagattgtgcacactaagagattgatgaaaactaaataaatcgactcgttcacactaagctcaggggtaattttgagttacgtttaagttctcatatatttcatatttcattttgattcaaatattcacttcaaatatttatttttaaaatactgtaaaatatatatatatatatattcaattatgtaaatacatcgcagtgaactaaatacacaatttaaatggtaattagttaaatactaaatacaacttgccgtttccttttacatcataagattcacttaattagagatatatatttgtatagctaagtgtataaggcccccaaaaacagtccgggcgcgcacaaaatgattgggcaaatgggatcggaatccaaattaaaggatacacatttctaatcaaatatagttatatttactaaaaatgttttatggacgtggtcgctttccgtaaaatttgactgacaaaaacttattttcgagtttcgttagttaccaattttgacctattgaccatcgaaacggcaacgtatttgatcaatgcagtgcctgtttgtcgtattgggggtctactgttgtttctgcattgctgcagccggcccattcggttttgccgcacccaaattcttataagccttgcccccgttgcgctcccattcgcgattgaactcgtgctccaggatctcggcgccgcgcttgcgcgtcagacccgtctcctccaggctcagttcgcacatctgcatgtcgtccgttccggctaccagtagaattggcggcttgtccgcatgcagttccatctggcgtgcgatccactggccatcaaagtgggcataccacaggccgcgcttggctgcaggggatttatcattaaactttgaatatttcattattttatagtcgcggcgaacac

SEQ ID NO: 11996 - DNA, 1875 bp, DROSOPHILA
cataaattggcaacactggcaccggtctgaaataagccaatttgtgtttaagcccatttatctgtgttaaaagccagctcgggactaacaggtgattcattcaatatgcccaccattggagttaaacgtgatctgctcttcgaggcgctcggcaagacgtacaccgatgatgagttccaggatctctgctttgccttcgggttggagctggacgaagtgaccacggagaagcagatgctgaccaaggaacagggcgatgtggcagcggcggccaatgccagcgaggagatcatatacagaatcgacatacccgccaatcggtatgatctgctctgtttagagggcttggtcacgggtctgctggtattccagggaaaactcaagccccctaagttccagtttgtggagctggccaagaggcaggtgctgaagattgacccttcgacggcgcagatccgtccgtacgctgtggccgctgtgctccggaacgtgacttttacgcaggcctcctacaacagcttcatcgatctgcaggacaagctgcatcagaacatctgccggaagcgtactctggtggctatcggaacgcacgatctggacaccctacagggacccttcagttacgaggctctggcgccggatcaaatcaagttcaaaccacttaaccaaaccaaggagatgactggcagcgagctcatggacttctattccacgcatgcgcagctgaagcaatatctgccaatcattcgggaatcaccggtttatccagtgatctacgatgccaaccgtgtggtgctttcactgccgcccatcatcaacggtgatcattccaagattacgctgaagaccaagaacgtattcatcgagtgcacggccacggatagaacgaaggcaaaagtggtgctggacaccattgtgtgcctcttttccgagcactgcgcccagaagtttaccgtggagccgtgcgatgtggtgcaacccgatggcagtgtgatctcctatccggaactggaggtgcgcgaggagaggatatcggtaaagcgcgccaatgcctatattggcatcgatgagccggcggaaaagctcgcagatatgctgacgcgcatgtatctggaggccaaggtcgatggcgactcgctggtggttaagatcccgcccacacggcacgacgtcatccacgcgtgcgacatctacgaggacgtggctattgcctacggctacaacaacattaagaagtccctgcctgcattcatgcaaattgccaagcaattcccacttaacaaactgaccgaacaactgcgcgaacaggtggcccaggcgggcttcaccgaggcgctgacctttacgctctgctcacgggatgacattgggcgcaagctgaacaagaacatcgacgccttgccggccgtgcacataggcaatcccaagaccctggagttccaagtagtgcgcacgaccctattgcccggtctcctcaagacgctggtggccaatcgcaagatgccgctacccctgaagctcttcgagatcagcgacgtggtggttgcggatgagagcacggaagttggtgctcgcaatgagcgaagggtgtgtgctgtaaactgcaataagaccgctggtttcgaggtggttcacggcctgctagatcgcgtgatgcaattgctctctgtgccctggaaatcggccagcgggaccaagggctattaccttcaggccaccgaggatcccagctacttccccggtcgctgtgctaatgtaatgtacgacggtgttgtcatcggcaagattggggttttgcatcccacagtgctgcaagccttcgagctgaccacgccttgttcggcggtggaattcaccattgagcctttcgtctaa

SEQ ID NO: 11997 - protein, 589 aa, DROSOPHILA
MPTIGVKRDLLFEALGKTYTDDEFQDLCFAFGLELDEVTTEKQMLTKEQGDVAAAANASEEIIYRIDIPANRYDLLCLEGLVTGLLVFQGKLKPPKFQFVELAKRQVLKIDPSTAQIRPYAVAAVLRNVTFTQASYNSFIDLQDKLHQNICRKRTLVAIGTHDLDTLQGPFSYEALAPDQIKFKPLNQTKEMTGSELMDFYSTHAQLKQYLPIIRESPVYPVIYDANRVVLSLPPIINGDHSKITLKTKNVFIECTATDRTKAKVVLDTIVCLFSEHCAQKFTVEPCDVVQPDGSVISYPELEVREERISVKRANAYIGIDEPAEKLADMLTRMYLEAKVDGDSLVVKIPPTRHDVIHACDIYEDVAIAYGYNNIKKSLPAFMQIAKQFPLNKLTEQLREQVAQAGFTEALTFTLCSRDDIGRKLNKNIDALPAVHIGNPKTLEFQVVRTTLLPGLLKTLVANRKMPLPLKLFEISDVVVADESTEVGARNERRVCAVNCNKTAGFEVVHGLLDRVMQLLSVPWKSASGTKGYYLQATEDPSYFPGRCANVMYDGVVIGKIGVLHPTVLQAFELTTPCSAVEFTIEPFV

SEQ ID NO: 11998 - DNA, 4116 bp, DROSOPHILA
ccacattttcacacacgaaaaggggggatgtagttggtggaaaactccgccccacttgctcgactgtccggtccccaaccacacaataaagaacaatatatttcacacaactttgttcatatttttaatgtcaggagtataattattacgttcattgactttgttaagtagcctactttatgctaatgtgatttcatagcacaaaatggaaatggcaaatggtgagagggccagcagctttgcatagaatatttttacataattgaatgtgcaggtccttcaactgacagttactggtaaagcttaagttcttatgtgtcattatatatatacacataacgtctagattcgttgggaaaaattgatttaaatgtttaatataattcaaagaagaatattattacatctagcttgaaatgggatccttcaccaattattttgaaaattccgaagcaaatacttggaatacttggaatttattaagtacctcgttgttataactagtagttgtctccagttaacataaagctattataaatgtcataataaacaaccgcttatcagtacttagccgacgagtgcttagggctcaattaaattaacaacaattacgtaaatggaaaagaacaaaacccaccacgtaatgtttgggtttaaatacgtcatcctaggcggaaaacaacaaaccaaaatacgcatactaaatcgatttctcgagctatttctgtacattcacctgtcctgcattgctaatacgccgtgttgctcgcgcgttatttaatgtttgagccatcgatgtcgatgtcgtgctgcaatgtcaatatcaaagacactgcgcacagcaaggttgccgaagccgtagtagtttaccgccgtgcaattgctgaatttctgctgtgcggctaattgaatttagaggggcgacaggtgccacaatgccaggtataaatgccggattgccaaagagcgctaattaatagcctagtggaccacgcaacgcggcgtataccatcgagaacgagcgcgaaacgttaaaggcacatccaaagtttaaactatttccgcagagattttgataaacagctccaaaatggtggtcaatttcaaggtgttcaagaagtgttccccgaacaacatgatcacgctctacatgaacaggcgtgattttgtagattccgtgactcaggtggaacccattggtaggtgtcacagaccgaaacccttgagcaatgggatttacgaatgaggaaatccatcaaaaaataaattcgtgtaggaattggtacccatattcgattgaagtatcttatagtttgaaaataacttcagtgtaacttttgtttcaacttaacacattggaatttttaataccttccttgaaaagtgatatcaaatcaaaattatattataaaaactccatttcgaatctgcatatgccgaccagcaaatataaactcagggagttattcaaaattgcatctgaattcaatagcccagggagttaagttaaattggctgcgctagcagctaaccaagttcatcgattacgcgagcaagcaaaccaagaggctgggcgcttgtaaataatattctccaattaataagcgtcctcttgcagatggaatcattgtgctggacgatgagtacgtgcgccagaaccgcaagatcttcgtgcagttggtctgcaatttccgatatgggcgcgaggacgacgagatgatcggtctgcggttccagaaggaactgaccctggtctcgcagcaggtgtgcccaccccagaagcaggacatccagttgaccaagatgcaggagcgtctgctgaagaagcttggctccaatgcctatcccttcgtgatgcagatgccaccaagctcgccggcctcggtggttctccagcagaaggccagtgacgagagccagccctgcggagtccagtacttcgtaaagatctttaccggagacagcgactgcgatcgatcgcatcgcaggagcaccattaacctgggcatccgcaaggtgcagtacgcaccgaccaagcagggcatccagccctgcaccgtcgttcgcaaggacttccttctgtcgcccggagagctcgaactggaggtcaccctcgacaagcagctgtaccatcacggcgagaagatctcggtgaacatctgcgtgcgcaacaactccaacaaggtggtgaagaagatcaaggccatggtgcagcagggcgtcgatgtggtcctgttccagaacggtcagttccgcaacacgatcgccttcatggagacgagcgagggatgtcccctgaacccgggatccagcctgcagaaggtcatgtatctggtgcccaccctggtggccaattgcgaccgcgcaggcatcgccgttgagggtgatatcaagcgcaaagacacagctctggcctcgaccacactgtgagtaaaatttattcacatcatagcttagcagatgaaacattaatattatactctattaagtatcaacttaaaatcataccataaaatcaatcaaattttaaagttaggaacctttttaaaaatcgtattttcccggtgactaacagttctttagctaaatgtgtttacaaaatggcataaaacgcatactaatactaagtgaaaaatgcatatttaaaattctatttcagtattgccagtcaggatgcgagggatgcctttggcataattgtttcatatgctgtgaaggtcaagcttttcttgggagccctgggcggcgagctctgcgctgagctaccatttattctgatgcacccgaaggtaataaaaggtgtgcccaaatatttgaatagttattgaaaggcaatcaattatttacagccaagtcgcaaggcccaactggaagccgagggctccattgaggcctaaactgaaagggctacctcaaccaacgaaaaaaatggcgtatttctacaagtcaaaccgatttttgtagatcctaaaaaatgctgatgttgctgaaatgttctgaactgcagtcgtcgtacttttcctatatagcaaatccaatatccatatattgtatgtgtgtatgtgtattatatttataactcaactaacaattaaatatgaacagagtttatgtatgtattttggagtattctattgaatttagcacggtgtatttgaaaaggctccagcattgaaagtttgtatggaatgcgcactaaatatttaataatgtgcttacgaaggcatttcgtagtatttgatatcttgcaatgtctgctgattatgtacattgaagtgcaatggggaaatcaacagaagccagtgcaatctattcaattactaatagtgggtcttgcatttgtggcttagtaattccaattattgctactctgaaaagccgaggagcagcctaattaatacttggccactatgctggaggaagtttactgaactgaattcgagtaaggaaaatggacaataattgatataatatggtgagcttcttgctggactttgaaatcgtaaaatttaagcgaacacacttcaaacgcatccatttaatttgtgaatgtttgcagtcccacttttaataagcacccaatattaacgataacgccactctaatcaaaattttccaatagtcagggttgaaatactgatcaatcacgctgccaacatttcggcagaccaggtgggtaatgagtttaaaatggttttgcgtaatgggattaatcgaatttcattaaggaagattagattgccgtctttggaagtgatcttttatagtggctgaccataaaaattgcattgcaaatactaatttaagcatacatgctatataaccgataagatgggcgagcgtcaaggcaaaaatagttgaccgtattaatagtttaatcaactagcttcaagttaatttataatgcgaattaggaagcactctggcatgctattaaaaacttaagaactgataaacgaaacttaattcctaaaataaaaatgtacctaattacttttatatactattataaataaaattgtaccatgtatcgttaaatttgatttagttaccaagtggtatttggtacgtggcagcatgaaatagctactactgctagtctggctgattagccag

SEQ ID NO: 11999 - DNA, 1404 bp, DROSOPHILA
ggcgtataccatcgagaacgagcgcgaaacgttaaaggcacatccaaagtttaaactatttccgcagagattttgataaacagctccaaaatggtggtcaatttcaaggtgttcaagaagtgttccccgaacaacatgatcacgctctacatgaacaggcgtgattttgtagattccgtgactcaggtggaacccattgatggaatcattgtgctggacgatgagtacgtgcgccagaaccgcaagatcttcgtgcagttggtctgcaatttccgatatgggcgcgaggacgacgagatgatcggtctgcggttccagaaggaactgaccctggtctcgcagcaggtgtgcccaccccagaagcaggacatccagttgaccaagatgcaggagcgtctgctgaagaagcttggctccaatgcctatcccttcgtgatgcagatgccaccaagctcgccggcctcggtggttctccagcagaaggccagtgacgagagccagccctgcggagtccagtacttcgtaaagatctttaccggagacagcgactgcgatcgatcgcatcgcaggagcaccattaacctgggcatccgcaaggtgcagtacgcaccgaccaagcagggcatccagccctgcaccgtcgttcgcaaggacttccttctgtcgcccggagagctcgaactggaggtcaccctcgacaagcagctgtaccatcacggcgagaagatctcggtgaacatctgcgtgcgcaacaactccaacaaggtggtgaagaagatcaaggccatggtgcagcagggcgtcgatgtggtcctgttccagaacggtcagttccgcaacacgatcgccttcatggagacgagcgagggatgtcccctgaacccgggatccagcctgcagaaggtcatgtatctggtgcccaccctggtggccaattgcgaccgcgcaggcatcgccgttgagggtgatatcaagcgcaaagacacagctctggcctcgaccacacttattgccagtcaggatgcgagggatgcctttggcataattgtttcatatgctgtgaaggtcaagcttttcttgggagccctgggcggcgagctctgcgctgagctaccatttattctgatgcacccgaagccaagtcgcaaggcccaactggaagccgagggctccattgaggcctaaactgaaagggctacctcaaccaacgaaaaaaatggcgtatttctacaagtcaaaccgatttttgtagatcctaaaaaatgctgatgttgctgaaatgttctgaactgcagtcgtcgtacttttcctatatagcaaatccaatatccatatattgtatgtgtgtatgtgtattatatttataactcaactaacaattaaatatgaacagagtttatgtat

SEQ ID NO: 12000 - protein, 364 aa, DROSOPHILA
MVVNFKVFKKCSPNNMITLYMNRRDFVDSVTQVEPIDGIIVLDDEYVRQNRKIFVQLVCNFRYGREDDEMIGLRFQKELTLVSQQVCPPQKQDIQLTKMQERLLKKLGSNAYPFVMQMPPSSPASVVLQQKASDESQPCGVQYFVKIFTGDSDCDRSHRRSTINLGIRKVQYAPTKQGIQPCTVVRKDFLLSPGELELEVTLDKQLYHHGEKISVNICVRNNSNKVVKKIKAMVQQGVDVVLFQNGQFRNTIAFMETSEGCPLNPGSSLQKVMYLVPTLVANCDRAGIAVEGDIKRKDTALASTTLIASQDARDAFGIIVSYAVKVKLFLGALGGELCAELPFILMHPKPSRKAQLEAEGSIEA

SEQ ID NO: 12001 - DNA, 7038 bp, DROSOPHILA
agaacaaatccaacgtcaatggtgctgcagctcctcgccctggacattgattgcaacaatttcgacttcctagacccgccacttgaagatggactgcgcagtgcgtataagagcctcgatgccctgggggctattaagactggagatgactcatacattacaccgctgggtcggcaaatggtgcagtatcccttggatcccaagtactcaaagctactgcttactgcttcatcgttcggctgcatggaggagatcctgagccttgtttccgttctctcaagcgatcacgtcttcgtctcgaatagcgaaaaaaacgaaatggctgcactagctcacgccaagtttcagtccaagcatggtgatcatttgacgctgctgaatgtgttcaatgggtttttgaaaagcgaaaagccaaaggtaagtgtttcgtcgtactatctttcctattaaacaatcattaaatcgttttatctgttttagatgtggtgtcacgacaactatttaaatttgcgtagtttaacctatgcacgaaatgttcgccgacaattgagggaaataagcgagcacttgcatttggctctaaatagctcggatgacattgaaatgttgaagaaatgcattttaaatggattctttgaaaatattgccgttctgcaacgcgatggcttctacataaccgcttccggcaacatcaggtccaaaatccatccgtcgagcgttctgcacggaaagtacaagccgagctacatactcttcaccgaaattgtgcagacggagcaaacgtttctacgccaagtcacggaaatatccatcgaatggatcaaggaggttgtgccgtttgttaaaaacataccaacaagatgaaataaagtacaaaactgttcaaagaatgttttgatcttttccttatcccttttttttttattaatatatcatcaagatcgggaagttaagattgtacagataggcttgttaattctttggtattcgaatcttttttattttggttgcaaaaaaataacaataagtttaacaaaaaatatacaaaacgcgactttcatttgttattatttattaccttaaccagttaacatttaaaatattttttgagattattacaatacaactatgggattgatttatagtattcccgctagtgctgtctcgtgctcagcagccgcctggctatgataccttaatctagcattacttacaggagcccctgtaacaaaaaaaaaaacgaaggattaataggttataagttattttatcagaagctatcttcactcaccaatataacttaatagaacgggcagaaagatcaacccgtgcgccgccccaattacaacgattcccaagtacatacggaaataaaacacctggaatatctgactttttgcaaaggctaacactagtatgcccgcaaatttggttaaagtgattccggagaaaatggagctacccattttggaaaggctatctgcagctcgatcaatttgactaactgatttcgatgtggcgaagctgtgcaccaagtgcgaacaaaattccacggatatgccgacggccatgacgagattcaccaacgaaacagcattcaacgaaatgttccaataatacataaggccacctaaattaacaacaatcatagttatcgttatgacaacaactaatgcggaatgaacatcgaagcccatcaaaacaaatgtaacaacgaatatggaaagaactgaaatacccatgctctgtagcgtatccgaccacatggtcagatattgttcgtaaaacacatagaatactgaatatggaaacacttcgaccgtaagggccgatgccataggaactccatttgacattagtctgccctgcaacatttgcgtaatattcgcggatatctttctagccgactctagggccagaaagtagtcggccgaggacttaagtatggtgtggtatgccataaaatacgacgcctcgatgttcagtctttcatggctgttggaataccgaacagctccgccataggcggcatgaccggccttggcgcacgtgtcatcgggattgtccttcaggaaaaatggcaaatacttaacaaactccttttcctccggcctaagaagtgaattcttcgtgatattacacctcaaacaggaagtatctgaaatatgaacgaaatgttattagatattttctatgctcaactatggattaggtcaaaactcaccctgatgcggacaaaagtcgccgctatcctttctatatttgcaacaggatgatgctgctgccgcccaatcgaagtagtcatcgatccaactggatgctggacgcgcgatatacgtttggttagagtgcctactggctaagtagatctgcgtgagtacgctgtcatcgttgcaatattgacctgcacacaccaaattctgatccgaactattcgtataggctagatcgcccttcagcacaaagtacactggtggaccaatgttgagattctcgttcaacgattggaaatagtgcaagacgaaactatcctgcggcatagccaactcttgatccagcccaatgtcgattcgtggcgcaatggcaatgctgaagcacagccaggcaaaaaagatgaccatcacactggcgcgcacaattttcttcatcagaaatgggacgtaaacactactgaaaaatttgtacaagagtccctcattactagttatactatccggcttcttgcccttgatgaaacaacaaatgtccatacgattctcctccctgcgcttcgtatccaacgtaaataggctaacgaaacaggttatttgcaatagaaaatcaatgatgagggctacgccggcgtatagggcaaaagcccttacggctggcatatcagaaaggccaccgagaaagaagcaaaagctttcactcaacgaggtgagcagcatactgggtccaaccttgccgagtattcgaccaacttgctgctcaagcgtttcattgggtttgcgttgatcgcgctgatgagtttggaccagaataaaaatgttatccactccgacagctaatactaaaaacggtatgacctcgacaatgatcagggtggccggcaaaccgatgtaaccgaaaacgccaacggacgacactaccgaggccaaaacaatgatgacaccgcctatgccaagcgttatcttactgtcgataaacactcgcttgaactccttgacatggccaagcgaaatcgctatgtacatgaacataattaggtaggacaccaaaatagtcagcacatccgactgggactccctgttgagctcgtcttctatcgatctctccgatgtgaaggctatgtccatgtactgcgacatattgttcttcgtatagttggtcataaactccacgaatttcttctcccacgttaaggcattttccaaatcggttttgttatgatgattcttgaccaggaatgtcagaatgatcgcattggccaactcaaatttcgtgctgccagtcagttggtctccaggtggcaggaatcctccaagtgctatggctggatctacgggaccgccataaggagctaggcataaatagggattgctaatgcaatcgtataaggcatccaaataggtaacctatgaataaaaccgaattcgaacctgatagcaaatctattgaagtatatttgacttacattgaatccattgtcctcgtcgtggtcatccaatctttctcgatcatcgccaaagtatccccaaatcgattggacaacgcactgggacacatcgatttcactgccatcatccgacaaaggcgcgtagcatatatccttcagctgtgtgccatttgcgttaatttccttgatgccctcctgcagatccaacacttttgttagaaattctctgtcgaagacgggaccgaaggtgtatgggccgttcgaggtgttgtgcacaatctgtggcaagttcacagctttgatgattatctacaagatagataaagattacgattatgcaaaaaaaaccattatatctcaaaagcttacctgttccagcctatagaatggcgaaaacttcgtatcgaaaaactctctctccagtctggattttgagttcggcgaagcccaaagtttaaccggatccgttgtgatttctataaagttgatgccataccccagtataacaaccagggatgctccggcaattaaagtcaagccaggattgctagcaaagtacgttccccatttggtgaagaatgtttccaggaaagtttctgtgtgggcgccaagtttttcaaagtatgaatcattctcgctgtagggcatttcatcggaaacatcattgccatccacttgaaagttgtcatctgaaatagggaaattcattatatttcaagctactaaaatggtcattcattcattcattcatgagttttgcaaattattcacacagaaagtgtaatttgaagtacacttaacattcagatatgaaactagtgacgaataatttaactgcgtaaaactcacccatggacgaaccttgtgtaaacagaaacgagcccattaagaatactaagactcccaccaagaagacagctgccatgatgacgaaataggcgtcgagtccaacaattttgaagggctctggacggggcggttccggcggtccctggggacaggataggtcgcagtccgagcaggagcacgcaggtagtttgctctacaagcaatttatatatttagcacaaaatgaaatgaatttccaataaggatagtaggtacatacgctaactgcttggttgcaaggaacggtcgttacattgaggggcgtaaagttattgctatttgatttgggctcatgttgaatataggtaatttgaaaaggaacatatggattggtggcatcgcccataaagttgaaccattttgtaggattgcagcgagatgctgagtaagcgccgcacattaaatcaaaagctaattgacccgtttgcggtacagaaacctatttgaacacaaacaataattattttcgatcaatgaataatgtatatggaatccagaagtacctgagagcacgatttataagtcttgttgatgtattccgttgatatatgcaagtcaacagaacttatgtactcatcacctgaaattcggaatatataattattcaataattaataagctattaataatgattacctttcttatttttctgcgtggccaccacatgcatgaactcagcctgctttggtgaacaggtgaattggcagatgtgccgcaccaagttctccatgcaggatggacatcgatccaagatatttccggccagctccacattcttattaaggagctccacctgcaaaggcatttgtttgataattatgacgcctgggcaaagctaatgctactcataacctgattcttatcgcagcaaaatttgttttcgctattctccagcagaaatccacagcgtttcttcagcagctccagaccgtcagttgccatttccttcgctgttccattgtacggacagttttggctgtgcgaaaagtcattggtgttgcacacgccataccaaacgcagtccttaaaaagttgcaaaataagttaataacattatagagcagagatatgtagagtgagctaagctaagttgaagtctggtttttagctatctttttgctgaccccaaatacctttttcaaatttaaatattacttccaaaactaagtacgtcatctcaccgccacccagagctataaaaatatatattttttctaattgccttgcatctgttttagctcattcattgttgaggtgaaacaacagcttttccaatacaatttaccagtccattttcagaaatgattttacgacgactaatctgcgcgattaaaaacccagtatgcttaatattgataaaatattgaaatttaatgataaaaaccaaatgttagtttacctgtttcgatgattgaattagcgtaaagagcacagcagcgatgaggatgtgtactccaaatggagatatcctgagcggggatcttggactcattctatcacaatcgcatatctgtaaagaacgtttttggttaaagtatgcacctgggcttactattatgtatgatattcgaagtaagagtctcggttttcgactaagaactgaatcaaatgtaatccgagcctggcaaattcaacgttttcgcttacacaaataaagtacacttcatgcaaatttgcgtttagccagatgaaaccgttttccaacgaattaaataaacatttattccagcaaaccaaatatatatatacaaaatatacaacgaagtgagttttggaacacttgcaactcgcaattgcgatatctggcgattaaattgttgtttagactctgcagatgcgctgcaattcgataagcagtattcctaataatagaactgcctcctaaggaaagaataacaataaaactgattcattgccacgcttcaatatccattcagtttcagtcaatatatattgctgaatggtgtaatcaaatactcgaaattataatgtaatcaaaacagtgcacattatatggttgggtggtttagaatttcggataatccctccactcattaaaataatatataccgatatgaaaaccaaatataccaaaataaaagattgcgtttgtttcgaatttgtttaacttttatttgccaaaatgttttgtatttacaaagaaaaatgttagtaaaattttcaaaaataccacatgttttgttaggcatgaatatgaattaataaaatattattcaaaatttctaagaatgctaaaattaatagcggaattttgacaaaacgatggttaaacttttaataaattaatatttataaatctttatgactttgtgtcataaaaatcaaactagaatatgtattaaaataaatttaagataaatctaaacaattgcattcgtatttaaaaaaaaagatgaatgattttactatcttgtatactgaaaatattctataaaaaatgcatgacaaaaagaattgaaatagttttcgaa

SEQ ID NO: 12002 - DNA, 4003 bp, DROSOPHILA
atgagtccaagatccccgctcaggatatctccatttggagtacacatcctcatcgctgctgtgctctttacgctaattcaatcatcgaaacaggactgcgtttggtatggcgtgtgcaacaccaatgacttttcgcacagccaaaactgtccgtacaatggaacagcgaaggaaatggcaactgacggtctggagctgctgaagaaacgctgtggatttctgctggagaatagcgaaaacaaattttgctgcgataagaatcaggtggagctccttaataagaatgtggagctggccggaaatatcttggatcgatgtccatcctgcatggagaacttggtgcggcacatctgccaattcacctgttcaccaaagcaggctgagttcatgcatgtggtggccacgcagaaaaataagaaaggtgatgagtacataagttctgttgacttgcatatatcaacggaatacatcaacaagacttataaatcgtgctctcaggtttctgtaccgcaaacgggtcaattagcttttgatttaatgtgcggcgcttactcagcatctcgctgcaatcctacaaaatggttcaactttatgggcgatgccaccaatccatatgttccttttcaaattacctatattcaacatgagcccaaatcaaatagcaataactttacgcccctcaatgtaacgaccgttccttgcaaccaagcagttagcagcaaactacctgcgtgctcctgctcggactgcgacctatcctgtccccagggaccgccggaaccgccccgtccagagcccttcaaaattgttggactcgacgcctatttcgtcatcatggcagctgtcttcttggtgggagtcttagtattcttaatgggctcgtttctgtttacacaaggttcgtccatggatgacaactttcaagtggatggcaatgatgtttccgatgaaatgccctacagcgagaatgattcatactttgaaaaacttggcgcccacacagaaactttcctggaaacattcttcaccaaatggggaacgtactttgctagcaatcctggcttgactttaattgccggagcatccctggttgttatactggggtatggcatcaactttatagaaatcacaacggatccggttaaactttgggcttcgccgaactcaaaatccagactggagagagagtttttcgatacgaagttttcgccattctataggctggaacagataatcatcaaagctgtgaacttgccacagattgtgcacaacacctcgaacggcccatacaccttcggtcccgtcttcgacagagaatttctaacaaaagtgttggatctgcaggagggcatcaaggaaattaacgcaaatggcacacagctgaaggatatatgctacgcgcctttgtcggatgatggcagtgaaatcgatgtgtcccagtgcgttgtccaatcgatttggggatactttggcgatgatcgagaaagattggatgaccacgacgaggacaatggattcaatgttacctatttggatgccttatacgattgcattagcaatccctatttatgcctagctccttatggcggtcccgtagatccagccatagcacttggaggattcctgccacctggagaccaactgactggcagcacgaaatttgagttggccaatgcgatcattctgacattcctggtcaagaatcatcataacaaaaccgatttggaaaatgccttaacgtgggagaagaaattcgtggagtttatgaccaactatacgaagaacaatatgtcgcagtacatggacatagccttcacatcggagagatcgatagaagacgagctcaacagggagtcccagtcggatgtgctgactattttggtgtcctacctaattatgttcatgtacatagcgatttcgcttggccatgtcaaggagttcaagcgagtgtttatcgacagtaagataacgcttggcataggcggtgtcatcattgttttggcctcggtagtgtcgtccgttggcgttttcggttacatcggtttgccggccaccctgatcattgtcgaggtcataccgtttttagtattagctgtcggagtggataacatttttattctggtccaaactcatcagcgcgatcaacgcaaacccaatgaaacgcttgagcagcaagttggtcgaatactcggcaaggttggacccagtatgctgctcacctcgttgagtgaaagcttttgcttctttctcggtggcctttctgatatgccagccgtaagggcttttgccctatacgccggcgtagccctcatcattgattttctattgcaaataacctgtttcgttagcctatttacgttggatacgaagcgcagggaggagaatcgtatggacatttgttgtttcatcaagggcaagaagccggatagtataactagtaatgagggactcttgtacaaatttttcagtagtgtttacgtcccatttctgatgaagaaaattgtgcgcgccagtgtgatggtcatcttttttgcctggctgtgcttcagcattgccattgcgccacgaatcgacattgggctggatcaagagttggctatgccgcaggatagtttcgtcttgcactatttccaatcgttgaacgagaatctcaacattggtccaccagtgtactttgtgctgaagggcgatctagcctatacgaatagttcggatcagaatttggtgtgtgcaggtcaatattgcaacgatgacagcgtactcacgcagatctacttagccagtaggcactctaaccaaacgtatatcgcgcgtccagcatccagttggatcgatgactacttcgattgggcggcagcagcatcatcctgttgcaaatatagaaaggatagcggcgacttttgtccgcatcaggatacttcctgtttgaggtgtaatatcacgaagaattcacttcttaggccggaggaaaaggagtttgttaagtatttgccatttttcctgaaggacaatcccgatgacacgtgcgccaaggccggtcatgccgcctatggcggagctgttcggtattccaacagccatgaaagactgaacatcgaggcgtcgtattttatggcataccacaccatacttaagtcctcggccgactactttctggccctagagtcggctagaaagatatccgcgaatattacgcaaatgttgcagggcagactaatgtcaaatggagttcctatggcatcggcccttacggtcgaagtgtttccatattcagtattctatgtgttttacgaacaatatctgaccatgtggtcggatacgctacagagcatgggtatttcagttctttccatattcgttgttacatttgttttgatgggcttcgatgttcattccgcattagttgttgtcataacgataactatgattgttgttaatttaggtggccttatgtattattggaacatttcgttgaatgctgtttcgttggtgaatctcgtcatggccgtcggcatatccgtggaattttgttcgcacttggtgcacagcttcgccacatcgaaatcagttagtcaaattgatcgagctgcagatagcctttccaaaatgggtagctccattttctccggaatcactttaaccaaatttgcgggcatactagtgttagcctttgcaaaaagtcagatattccaggtgttttatttccgtatgtacttgggaatcgttgtaattggggcggcgcacgggttgatctttctgcccgttctattaagttatattggggctcctgtaagtaatgctagattaaggtatcatagccaggcggctgctgagcacgagacagcactagcgggaatactataaatcaatcccatagttgtattgtaataatctcaaaaaatattttaaatgttaactggttaaggtaataaataataacaaatgaaagtcgcgttttgtatattttttgttaaacttattgttatttttttgcaaccaaaat

SEQ ID NO: 12003 - protein, 1287 aa, DROSOPHILA
MSPRSPLRISPFGVHILIAAVLFTLIQSSKQDCVWYGVCNTNDFSHSQNCPYNGTAKEMATDGLELLKKRCGFLLENSENKFCCDKNQVELLNKNVELAGNILDRCPSCMENLVRHICQFTCSPKQAEFMHVVATQKNKKGDEYISSVDLHISTEYINKTYKSCSQVSVPQTGQLAFDLMCGAYSASRCNPTKWFNFMGDATNPYVPFQITYIQHEPKSNSNNFTPLNVTTVPCNQAVSSKLPACSCSDCDLSCPQGPPEPPRPEPFKIVGLDAYFVIMAAVFLVGVLVFLMGSFLFTQGSSMDDNFQVDGNDVSDEMPYSENDSYFEKLGAHTETFLETFFTKWGTYFASNPGLTLIAGASLVVILGYGINFIEITTDPVKLWASPNSKSRLEREFFDTKFSPFYRLEQIIIKAVNLPQIVHNTSNGPYTFGPVFDREFLTKVLDLQEGIKEINANGTQLKDICYAPLSDDGSEIDVSQCVVQSIWGYFGDDRERLDDHDEDNGFNVTYLDALYDCISNPYLCLAPYGGPVDPAIALGGFLPPGDQLTGSTKFELANAIILTFLVKNHHNKTDLENALTWEKKFVEFMTNYTKNNMSQYMDIAFTSERSIEDELNRESQSDVLTILVSYLIMFMYIAISLGHVKEFKRVFIDSKITLGIGGVIIVLASVVSSVGVFGYIGLPATLIIVEVIPFLVLAVGVDNIFILVQTHQRDQRKPNETLEQQVGRILGKVGPSMLLTSLSESFCFFLGGLSDMPAVRAFALYAGVALIIDFLLQITCFVSLFTLDTKRREENRMDICCFIKGKKPDSITSNEGLLYKFFSSVYVPFLMKKIVRASVMVIFFAWLCFSIAIAPRIDIGLDQELAMPQDSFVLHYFQSLNENLNIGPPVYFVLKGDLAYTNSSDQNLVCAGQYCNDDSVLTQIYLASRHSNQTYIARPASSWIDDYFDWAAAASSCCKYRKDSGDFCPHQDTSCLRCNITKNSLLRPEEKEFVKYLPFFLKDNPDDTCAKAGHAAYGGAVRYSNSHERLNIEASYFMAYHTILKSSADYFLALESARKISANITQMLQGRLMSNGVPMASALTVEVFPYSVFYVFYEQYLTMWSDTLQSMGISVLSIFVVTFVLMGFDVHSALVVVITITMIVVNLGGLMYYWNISLNAVSLVNLVMAVGISVEFCSHLVHSFATSKSVSQIDRAADSLSKMGSSIFSGITLTKFAGILVLAFAKSQIFQVFYFRMYLGIVVIGAAHGLIFLPVLLSYIGAPVSNARLRYHSQAAAEHETALAGIL

SEQ ID NO: 12004 - DNA, 2690 bp, DROSOPHILA
gtttgttatttcccctgcgccattatggccgttgtcacgttggttgctaggtcaatggccatttgttgcgctaatttccgtttaaatggctgaaggcacgccattttcaaattaagttccttggatttgcacactttgattcgattgattatgtgctaattgattaagtggatgtgtacattagtcaatgaatattaattgtgcaattaattaggaaaatgttgtgacgatttatataagcgtagcttaataatatgagattatatcgtagatggtgtgacttttgctttggcaaaatgtaaaagtttctttgatatctcgtttagaaatcattaaaaccaaaatgctcaacattttctacattttcaaccaaaagagacattatgttgatgtactcttgcaatttactaccaataaatggaaaattagatgtcagaatggatgggtaaaacatctgaatgtgcaacatgcaactcactaaacacgcgaaagacttaaaaagtctatcagacacctgtccgcaaatggttagaatgaatggtttccgagcacgacaagaactgttgcttcagaatcgcaacagttggccaggggaaatggcccaggtaacaccatccaagtaaatcatttgtatttcccataatttgtaacccctttttatggaaactacaagcgcaggcgcgattaacaagtggttgtaaacaaaacagtcacctgttgccacgatagcaacaaggtgcctgagtatgtatgtatgtctggaatgcaacagataattgcatgacttccggctgtaaaagtttttccacttttctatttccatttgagattggacaaggcctaggtcgcggaatgtgtctcgtgctttgggtgatggttcactgaactccagaccccaaaaaccgcaccacatttatgcaagcagtcagccaagcctgaaaatcaatatgcttataaacggaagccagagccgatgcctccaaccagttgattggcgaccatgtggcagttggcattgggactgggtctaatccagcagctgagtctagccatcgtggtggagcgcaacatgttcgcctactacaaggtgccagccgctcagctacttttcgcccaagactcggatgcggacatcgactcccactcccaagaaatcagcactctggatggaggccagctcagcgacttgtactacgtactacagtgtccaccaaagcatgatgaaggcattcccaaggcgcgggacatgcaaacatgcagcgtggtagaccagtacagaggcatgtggaaaaaacccaagaagccaaagcccaagaagcactttcacatggtccctttccggatagtactacgtccattaggaccgccggccaggagacgcagtctaaagcgtcgtaaacgccaggaaaaagttggcgagactccggatattacaactccgattgatggggctgcttccctagcaaagttggaagtggtgactagtcccctacagttcctgggacgcacccataagcggcagaagcttcttaagctgtccgccgaccatcgaaagtccaaggtgggcaccagttccaaagctcttcagcatatgtaccatcgcgatgagtcctacaacgatcatatattctacgacgaacttcaggaggacggagagttccacaacctcggcaatgaaaaattgaattaagtgtagttattccagtatattatatagtatatatcggagctggtgggataaagaatataaaaaaaagcacacacacaaacctaataatatattatataatatatgcataatatatgcaatcctaagcagtcgcttttattaggatcccatccgaatgtctacataaggaagaaacatatcatcgtaggctacgttatcgaaaactctgttgagcaggacagtgaaggcattggtgaaggctttgactagaccgggctgcaaatcattccagaactccacccagttctcgttgaatagcttattcatgaaaattgtcacatctgtgttttccttgtacagtccatccaaccatatgatccatctaaaagttgaaccggaaagtaaatcagggaacacagttcatttgccatccaattaccgatccaagtcgagactgggcaccagattgtaaatcttcagatagcgcttgtcatttctgtactccaccaacgccttgatggtcagggtaatccggaagttctgaaagtcggatatcaacctcccagtggtattgaagaagaagagcaaaaccctgccactcatatcataggtggcctcatgcacaagtcgtggcaatcggaccttcagcacaatttgcttctgattgggctcgtacaggaatccctcgacgtgggtgattgtggcattattgaagcccttgttcacattgtcccgcattcgaaagtccatccagataggaccgcgactgggtgattccataataacggaatcgggaaagttgtaggcatccagcggcggaagtcctatctctggaatgcccttggggtagtgtttaatcaatgcattgatacttctgaccaggcaggttgagtccccgaaatggcacttctcaacatcttcggctagaaatgttcatctcagttaaaatcagatcaatctggcactgaaaacccacgcacgtaagcttgctcccgagatcataactgggatacaccaacac

SEQ ID NO: 12005 - DNA, 690 bp, DROSOPHILA
atgtggcagttggcattgggactgggtctaatccagcagctgagtctagccatcgtggtggagcgcaacatgttcgcctactacaaggtgccagccgctcagctacttttcgcccaagactcggatgcggacatcgactcccactcccaagaaatcagcactctggatggaggccagctcagcgacttgtactacgtactacagtgtccaccaaagcatgatgaaggcattcccaaggcgcgggacatgcaaacatgcagcgtggtagaccagtacagaggcatgtggaaaaaacccaagaagccaaagcccaagaagcactttcacatggtccctttccggatagtactacgtccattaggaccgccggccaggagacgcagtctaaagcgtcgtaaacgccaggaaaaagttggcgagactccggatattacaactccgattgatggggctgcttccctagcaaagttggaagtggtgactagtcccctacagttcctgggacgcacccataagcggcagaagcttcttaagctgtccgccgaccatcgaaagtccaaggtgggcaccagttccaaagctcttcagcatatgtaccatcgcgatgagtcctacaacgatcatatattctacgacgaacttcaggaggacggagagttccacaacctcggcaatgaaaaattgaattaa

SEQ ID NO: 12006 - protein, 229 aa, DROSOPHILA
MWQLALGLGLIQQLSLAIVVERNMFAYYKVPAAQLLFAQDSDADIDSHSQEISTLDGGQLSDLYYVLQCPPKHDEGIPKARDMQTCSVVDQYRGMWKKPKKPKPKKHFHMVPFRIVLRPLGPPARRRSLKRRKRQEKVGETPDITTPIDGAASLAKLEVVTSPLQFLGRTHKRQKLLKLSADHRKSKVGTSSKALQHMYHRDESYNDHIFYDELQEDGEFHNLGNEKLN

SEQ ID NO: 12007 - DNA, 4702 bp, DROSOPHILA
gggtctagtattttttgatttctcgaattgatgtctcacctggggttgagctgatttctcatcctctgttccagcatcgacatcggattccgaatccttttcagcaaccttcttgccatttttgacggaagaagtcgaagccctgctcagcttgcgcttcttgatcggacttgatgcatgtgcagaggctttggaggtggagggcagttcattgctatcttccgtttcaccgcgcacggatcgccgtgtctggcgtttgatatttggcttccttggcgaactgtcggcactagggtctacatcggaatgattagcatcatcatccgaatcctctataacgatttttttgccatttttgcggggcgaagtggtggcgttcctggccttgcccaccttgcgcttgttccttgcagctggtacatccacgttggaggtagaggtctggcaatcgctgtcttcgctgtcagaggccacagtcagtttggcctttcgtttgttcggcgtcttcctggacgatcgacctgtcccattggacttttgctggtcaatctcctcgttttcgctctcgttggcgactccgttcctgcgcttactttctgccaccttcttactcgccttggccataatgcacttgtttatccggttgtgtgacaacgtccaatttgctctacggtggcgatttcaattgccgcgtaccagcaaaacaaattctttatagagttttttgacgactgtacacttggcagtgttaccagactgcaagaaacaaaaaatcacgaagtcgggatatgcagttttataaatatatatatatttatatttcctgggaatatttatttaatgtttatcaatcgagatcccgagatcgaatcgaagtaagaaagtaagaaaattaattctttccaaatttctagaaacggtaatacaaattagtggtcgatacattcgacttgaaatgcgaattaatcgattgaataatcgtttcttctctcatccctaattccaaccgcgtgcgaatttcaatacgtttcgaaacgaccgcattttggtcaataaacagagggtatgcagcgccagaaacccaagggacccggcaaaccgggttcgcgtttcaagccgggatccggcacgttcaaaggagctggtggtggccggaaaagcggcgacaacagccagaagcgtccgcgccaggagatcaacaagtcgcgactggccgccaccgaagcggagatccaggacctcaagaccaaatacgcagagatcgatgctactgccattaagaagttcgcccagtttccgctgtccaagaagacccaaaaggcactggcggagtccaaattcgtgcatcccacgcaggtgcagcgggacagcattggacccgcactgcagggcaaggatgtgctgggcgcggccatcacaggcagtggcaagacactggcctttctcatacccgtaagttggtcctcgtcccttcttcgaaagaaattgccggctgtaagttatatatgcaatggtccatttattgcaggttctggagcatctgttcatgaacaaatggtcgcgcaccgatggcgttggcgctatcatcatctcgcccacccgcgagctagcctaccagatcttcgagaccctaaagaaggtgggaaagcaccacgacttctccgccggcctcatcatcggaggcaagaacctgaagttcgagcgcactcgcatggaccagtgcaacatactgatctgcacacccggaaggctgctgcagcacatggacgagaatcctctctttaatacgagcaccatggagatgttggtcctggatgaagccgatcgctgtttggatatgggtttccagaagaccctgaattcaatcatagaaaatttcccaccagtgcgtcaaacgctgctattctcggccacgcaaacgaatacggtgcaggatttggcgaggcttaatctaaaggatccggtctacgtaggctacggaggagcgacgccaagagaagagcccagcgccagcacgaagaagactccgaacacagctgtcttggcagttcctgagcttttgcagcagagttatgtggtgttgaacctggaggacaagatcaccatgctgtggtcgttcatcaagaaccatttgaagcagaagatcattgtgttcgtggccagttgcaagcaggccaagtacctgtacgagatattttgtaaactgcggccgggtagcccgctgctggctctctatggaacgctccatcaggatcgtcgcattgccatctacgaggatttccttcgcaagagccacgtcgttatgttctccactgatgtggcatcgcgcggtctggactttcctgccgtcaattgggtggtgcagttggactgcccggaggatgtttcacagtacattcatcgagctggacgatctgcgcggaacaagacacgcggcgagtgtctgttggttttgacacccagcgaggaggagtacatgattagtgcgcttaaggaacagttgaatatcgacattcgttgtgtgcaaatcgatcccaagaagctcttctctccgcgcgtcaagatcgaggcctttctggcccaatttcccgaactgagggcaaccgcccagcgcgccttcctctcctacataaaatccgtgttcctgatgcgcaacaagcgcttgtttaatgtgttcagcctggatctagatgcatttgcccaatcgctcggcttggcggttacgccgcgtgttcccttcctcgaaaaattcctgtggcgccagaagcagctacagcagcagaaagaacagggtgataacgcaaaatcgatcaatccattgctcagcaagctgaccaagcagcagagctttggcaggcggtgacgaggatgaagagaacagtgatgacgaagactttatcaaggtgaaacgtaaggatcacgatgtggaaggagagccagtgaagctggacgaagaggatgacactgagaatgaggcagaggccccacttgtggtacccaagcgcgagaagctggtaaccaaggcctcgctggccaagaaggcgctgaagaagaatctgcaggtcaactccaagctgaagttcgatgacgagggcgaaactatggcagatgatcgcagccaaatgaaggccttgagtgccaggcaaagaacagtgaaccaagacgacgacgatggaggcattaatctagtgctgtccaaggcgctactcaccgaggaggatcaatatgacaagcagcgattccgggagctggtcaagaagcgccacaaactgcagcgcgagaagctgcggaaaaaggcggaggaggccaagggcagcgacgacgaagaggagcaacaggacgatgacaatgcggacgatgctggcagtgagagtgaccattcagtggacctctcctggctgccggatcccgataaggtttacaaaaataagcctaacgcttcggatcgaaatgaatccaaatcagagtccagcgatgcatccgatgacgagaaagctgacgacagcgacggcgacgacgacgacgtctccgacgatgaacccgcctacaaaaagtccaagctgacgaacaagatgactctaatggacacggaggccatagcggccagtcttttgggtagctaagtgggggaataaattaatgccaactactttgtaaaaataaccgtgtagcttaatagaagtttgtttttatggatacttcaattaccgatgttattttcatggggctcaattaaaggaaacttcactttaattatataaagaagtttggagctaaaaagatatatttgcatctgaggatgttctgaaatgcttttttgttatccccagtaaaaagtcgcttttcaaatgcttcacaaatatttggaaaatgcccacaaatttattacttttgtttcgtttgatttgatttcattatgtttttcctcgtctttcggttgtggcggctccacaccgctaccagcccatcggatggagcccaggagcggtggtcacccatctgacttggcgtatccggcatccagaatccgcaacgtggatgtgagtggtggagttcggacgggggtggcggtacggggattcgctggattctgcgcgggaagggtttggtttttgatggggagagggaggagacttcttttcggtttgaaaagggggcgtggctgcgtggcatgggcgtggcataaaatttgcttttaaaaatatcattacacatcacgtcaattacaattttttttgttcgatttgttttgcttttttttttgctttgtttcgtttcgtttagacatatttgcttgttttttttttcaatgttttatgtttttgtttcagtttagcgtatatatgtacgtgtacaaataatgcaatagacacacatctatacaaattatactatataatggttaagtttttctgttcttttctttttctctcgttatttgttgtaaatttcatttggagtgcttatttcttctgtttttattttgttttgttttcttttgtttggcaacagatctcgcgttattttcttgctttgagtttgaggtccgtttcagacacaagatacacaattatatatgtatgtaattaggtttcggtttgtatataaaaaattaatactcaattacaaggaataacacttaggcgtatgttgtctacaattgtttacgatttgcattttgcattttttagtcgttccttct

SEQ ID NO: 12008 - DNA, 2562 bp, DROSOPHILA
ttccaaccgcgtgcgaatttcaatacgtttcgaaacgaccgcattttggtcaataaacagagggtatgcagcgccagaaacccaagggacccggcaaaccgggttcgcgtttcaagccgggatccggcacgttcaaaggagctggtggtggccggaaaagcggcgacaacagccagaagcgtccgcgccaggagatcaacaagtcgcgactggccgccaccgaagcggagatccaggacctcaagaccaaatacgcagagatcgatgctactgccattaagaagttcgcccagtttccgctgtccaagaagacccaaaaggcactggcggagtccaaattcgtgcatcccacgcaggtgcagcgggacagcattggacccgcactgcagggcaaggatgtgctgggcgcggccatcacaggcagtggcaagacactggcctttctcatacccgttctggagcatctgttcatgaacaaatggtcgcgcaccgatggcgttggcgctatcatcatctcgcccacccgcgagctagcctaccagatcttcgagaccctaaagaaggtgggaaagcaccacgacttctccgccggcctcatcatcggaggcaagaacctgaagttcgagcgcactcgcatggaccagtgcaacatactgatctgcacacccggaaggctgctgcagcacatggacgagaatcctctctttaatacgagcaccatggagatgttggtcctggatgaagccgatcgctgtttggatatgggtttccagaagaccctgaattcaatcatagaaaatttcccaccagtgcgtcaaacgctgctattctcggccacgcaaacgaatacggtgcaggatttggcgaggcttaatctaaaggatccggtctacgtaggctacggaggagcgacgccaagagaagagcccagcgccagcacgaagaagactccgaacacagctgtcttggcagttcctgagcttttgcagcagagttatgtggtgttgaacctggaggacaagatcaccatgctgtggtcgttcatcaagaaccatttgaagcagaagatcattgtgttcgtggccagttgcaagcaggccaagtacctgtacgagatattttgtaaactgcggccgggtagcccgctgctggctctctatggaacgctccatcaggatcgtcgcattgccatctacgaggatttccttcgcaagagccacgtcgttatgttctccactgatgtggcatcgcgcggtctggactttcctgccgtcaattgggtggtgcagttggactgcccggaggatgtttcacagtacattcatcgagctggacgatctgcgcggaacaagacacgcggcgagtgtctgttggttttgacacccagcgaggaggagtacatgattagtgcgcttaaggaacagttgaatatcgacattcgttgtgtgcaaatcgatcccaagaagctcttctctccgcgcgtcaagatcgaggcctttctggcccaatttcccgaactgagggcaaccgcccagcgcgccttcctctcctacataaaatccgtgttcctgatgcgcaacaagcgcttgtttaatgtgttcagcctggatctagatgcatttgcccaatcgctcggcttggcggttacgccgcgtgttcccttcctcgaaaaattcctgtggcgccagaagcagctacagcagcagaaagaacagggcggtgacgaggatgaagagaacagtgatgacgaagactttatcaaggtgaaacgtaaggatcacgatgtggaaggagagccagtgaagctggacgaagaggatgacactgagaatgaggcagaggccccacttgtggtacccaagcgcgagaagctggtaaccaaggcctcgctggccaagaaggcgctgaagaagaatctgcaggtcaactccaagctgaagttcgatgacgagggcgaaactatggcagatgatcgcagccaaatgaaggccttgagtgccaggcaaagaacagtgaaccaagacgacgacgatggaggcattaatctagtgctgtccaaggcgctactcaccgaggaggatcaatatgacaagcagcgattccgggagctggtcaagaagcgccacaaactgcagcgcgagaagctgcggaaaaaggcggaggaggccaagggcagcgacgacgaagaggagcaacaggacgatgacaatgcggacgatgctggcagtgagagtgaccattcagtggacctctcctggctgccggatcccgataaggtttacaaaaataagcctaacgcttcggatcgaaatgaatccaaatcagagtccagcgatgcatccgatgacgagaaagctgacgacagcgacggcgacgacgacgacgtctccgacgatgaacccgcctacaaaaagtccaagctgacgaacaagatgactctaatggacacggaggccatagcggccagtcttttgggtagctaagtgggggaataaattaatgccaactactttgtaaaaataaccgtgtagcttaatagaagtttgtttttatggatacttc

SEQ ID NO: 12009 - protein, 805 aa, DROSOPHILA
MQRQKPKGPGKPGSRFKPGSGTFKGAGGGRKSGDNSQKRPRQEINKSRLAATEAEIQDLKTKYAEIDATAIKKFAQFPLSKKTQKALAESKFVHPTQVQRDSIGPALQGKDVLGAAITGSGKTLAFLIPVLEHLFMNKWSRTDGVGAIIISPTRELAYQIFETLKKVGKHHDFSAGLIIGGKNLKFERTRMDQCNILICTPGRLLQHMDENPLFNTSTMEMLVLDEADRCLDMGFQKTLNSIIENFPPVRQTLLFSATQTNTVQDLARLNLKDPVYVGYGGATPREEPSASTKKTPNTAVLAVPELLQQSYVVLNLEDKITMLWSFIKNHLKQKIIVFVASCKQAKYLYEIFCKLRPGSPLLALYGTLHQDRRIAIYEDFLRKSHVVMFSTDVASRGLDFPAVNWVVQLDCPEDVSQYIHRAGRSARNKTRGECLLVLTPSEEEYMISALKEQLNIDIRCVQIDPKKLFSPRVKIEAFLAQFPELRATAQRAFLSYIKSVFLMRNKRLFNVFSLDLDAFAQSLGLAVTPRVPFLEKFLWRQKQLQQQKEQGGDEDEENSDDEDFIKVKRKDHDVEGEPVKLDEEDDTENEAEAPLVVPKREKLVTKASLAKKALKKNLQVNSKLKFDDEGETMADDRSQMKALSARQRTVNQDDDDGGINLVLSKALLTEEDQYDKQRFRELVKKRHKLQREKLRKKAEEAKGSDDEEEQQDDDNADDAGSESDHSVDLSWLPDPDKVYKNKPNASDRNESKSESSDASDDEKADDSDGDDDDVSDDEPAYKKSKLTNKMTLMDTEAIAASLLGS

SEQ ID NO: 12010 - DNA, 5189 bp, DROSOPHILA
gcccgaggattccgagtccgattctgaatccgaatacaattttcgattccgaatccgagtcagccgttctgttttatatattcgcgaaaactgaacgagcgcctgttcaaaaaattatcaaaatgaaaaagccacacacacactcgcatacagtcacacgcacactggtggacacacagcacaaatacactcgcgcgctcgctctcttttccgatagccctctcccgctcgcgcacacacttagtcatacttgcggctggacggcgatctaatagtataaagtgtggggttctttcttatctggccattgtccattgtccgttagccgagtttttcccgtttttctttacggtttttcgcattcgcattttcattttggtcgcgtcatagggccgcccgcttctccacccctctctccaacactccaggaaactcctctctccgcgcccgtcccgctcacactttattccaaaaacatctcatcatccactctcggtatggctgtgtgtgtgtgtgtgtgcgtgtgtctgttcgcctctggctgggcgtgcgtgcatttgtgtgcgtgctgtgtggaattttttcacttctgctctttcggccacttacaatttatattggtgatttcacaacactcagcacgaattcgacacttaatttgcttacaaaatggcacaaatttgttgattcttatgcgtctaccgtttagctatatcgtataaaagttaatgcaattacaaaaattcgaattgaactcgacgattttttcccatgcaaaatgacgatgaacaatgttcatccgtttcatttctcggtagcgggatgaacgctcgatgaccaaccaacgccttcgagcgcagggctgttattaacccaatcgatagttctcatcgatggcaactctgtgcgcgttattcccatgaccgaccacgactggtaacaccgcacatatgttattcttgctcttcttcttaaatttgcggtcgcatggcccgggaagtattggtagttcagcaaaaaactgaaaaggaatgcttgacgaacatattctgaaagaaatgaaactgagcttccagctcaccgaacagcgagaactagcctctggtcgccgtaagccggaaaaaccacaacacccacctgctgttccaaagaaaaaagttatttcaaaggtggccagcaatcctgcaaagatttcggaaacaatgattcaaaaagcccagatggagtcgcccaaaaaatccaagaaaaataagacagccggcgcaaagagacctctttccaataatgtgtcgaatccagacagttcaccatcccagaagaggcttaaaaaggataataccctacccaaaaagaatcctgtaaataaatcctcaaatgttgcagctaaaaaatctgcagcaacaagcaaaagtgctaagcttcctattcccaaggttcatagtataaatggtatgcattagatccagaattacaacctcattttattttaatatatatgtatttttcagaattagctcctaagaaaaccaaagtcaagacgccaaataaaacaaaagaagcaagtttatctaagaaacataaggtaaatggaaacaagagctcaatgaaggtcgtacaaaatggtaaagtagtagagataattggtactgcagcggaaacaagtgacattgaaatgaattcattggatgattggagtgaagaagacgattatttaattgaaagtggtaaggaatttttaatattactcttgtttcttaacttaaactatgttttttagactctgaaaacgatgtagttgaagaaatagacgagacatttcttaaagatccaaagatttttaaggtcaaatgcaaaggccccgaatacaagttatcagatattcttcctccttttgaacacgatgaataccaacctcttttgttggatggggatggcagtggaacagttcgaaagattaaggtatttaaaagtgcacaggaagaaactgacagcgacgaagatgacattgattatgagccagaagatagcgatgactttggatcggaggaatttgacagcgaagagtctgacagtgaagacacaagcagcgcagactatgatagtgatggagatttctacagtgaatatagcgatatggaggatgttagtgacagcgatagtgaagaattcggaagcgatatcttcgacaccgacgacctcgattcaacttatgagccacctgacattgagggattcttcgatcatccacctgtgggtatgcaaagagagccgcttattatagaggaaatcttcgacgatccgcctgtggaaaaaaagcaagaacgtattgaacagtcaagtgttatggatattgttgtaaaaaacttaagcagtgtgcccccaaagaaggagtctgaagttgcaattgaaaccgaagagaatgatgaggtatcactgcctgaagttgtaacaccagaaaaggaaaattatctccaaccaagcgatgtcccgttttacagaaatccgcaagcgaatcccactgagcttagcgtctttgagaacagtctgaagagcaatcatgtgctggccgtgattaaggaggacctcgaagtttatggcacactagtgttgactctactctgtggtcaaatatcagtaaatggttacagagcacgcaggcaggaagcaatcacaatttattctcctaaaggccttaattgggtatctatttcgccaaccaagactaaaaaacctgtaaaagatgaggtaaattgggaagaactcaacaagaactttacacgcgcccagctagacaggattaagaccagctttcagcgtcagacgaatgcaatagtactgctccaccgaaacacaagtgcccagcagctcgtcgatacctttggcaagcacatggcgcaaaatgtattcccacttgtcaattcttccaatcgaccatttggccaaagtgaaaccctgttgcactgtctgattcaatcgagcgatcaaagtcgcactctccaagttccgcaggtttggaataagttacaaatgcatgcaacgagccgaataatcgtagccggtggtaagggcgtcggaaagtctagtttattgcgttacctcatcaaccgaaatctgggtcaattcccatccatgctgctcatcgacctggacattggtcagccggaaatatttgtaccccagactatttcttgcaccgtaattgatgagccccttctgggaccgggcttcctgtacaacaggcagccggaacatgccattgtcgtgggccacaccaacattgtcttgtgcgcagagcagtatgcccgagcagttattcagctagtccaaaacattcagaacgatgccaagtattcaaatattccttggctgataaatacgatgggctataataagggatttggtatcgaattgatggctctgctggtggatcgcattcgtcccacggatcttgtacagattgccagtcccattccaatcaataactttgattctgtcctcgaccggaacagtctgtcgcagataaaaccaattatatactctgcggaggagttcaagatcaatgaaataccaaaatacacactccataagctgataagtgcagtgcctgcaagggaaaaaggaacttggagtctcagcgccaaggacatgcggtactccaatcttctggcacgtctcagttcctgcctgactggaaatgccaaatctcttacagactgccagccgttgggagtgtctttggaatccctgaaaatcctgcatcccaccagcaagaattactcgcgcgaagaactgattcgaggcatggaggctaatgtagtatatctgtgccatcacggagcaggtctgccccaatgtttgggaataggtttgtacacattcacgttcttttgtggcttattaattgaattccaaaattcttttaggtgtggttcgcgccatcgactacgagcgcaaggagttatacctggtgccagcaatgccgctacaaaagatgtccctggtggattgtcttatcctcggcggggaacagtccctgccgcagggcttccttcgggatcagggccaaggtgtgtccagcagtgtgcccttcgtgttcatccttgacgattcgaaatcttcgaagagtattcagcagatctaccatcgagcgccagcctttctgggagtaccagcgaatcaacgaaactaaaactgagcttactgtagcaatcgcaatcggataacattgtaaataaagttaggtttattaacacaaggctagtgtgacaaattgtgacgtcctttgaggatccggttcatcagcactcgtcgtccctcaggcgtcgacatcctagcattccagccgtggacattaattctcttcacctccatgggtttcggaaaatggcagcgtactttcggtttcagcaccgcccggttgaaagcgtgcttatcccgcacgattagagtttgtgcggtgctgacaaccgccaggcaggtcctgcaatgccaatgtatgttattataccactcaaaataaatggtatattcattatttactcgcctttggagcattccttgcagcatgttaagtaatttccagttagtatgaccgcatgaagtccgaataataccgcctgaacagccggtaagccgctttggcgttgccagaccattgggttcgaaatttcgaacttagctgcatgctattttacgttagcatgtaaaatgcattacatatagatggaatcatacaattaatctaaaaaatcgtcataatattggtcaaatggaaaaccaccatatggggacaaattagataaaccgcttttaattgaatggatctgaaagtaaccgaaaactttttaaatatggaatgaatatgtttggttgtacatatatcgaattggtattgtgccatctctagctacccacgatggttgtggcagcgcagctgttgcaaatgaatccacaagatacatttcggtatattttccgcaacggattcttttccaccctcagttgcggtcacactgcctagccaacaacaaccacaactcggtgccgttagggctgcgtttgttttctgctcccattcagctgcatagaaaagaaagaaaagtgaaaagtgttcggaaaacaggcagcatgtgaagcataattactccacggaattactatctcaaacgaaatagttgtcgccgaaaaga

SEQ ID NO: 12011 - DNA, 2995 bp, DROSOPHILA
tattggtagttcagcaaaaaactgaaaaggaatgcttgacgaacatattctgaaagaaatgaaactgagcttccagctcaccgaacagcgagaactagcctctggtcgccgtaagccggaaaaaccacaacacccacctgctgttccaaagaaaaaagttatttcaaaggtggccagcaatcctgcaaagatttcggaaacaatgattcaaaaagcccagatggagtcgcccaaaaaatccaagaaaaataagacagccggcgcaaagagacctctttccaataatgtgtcgaatccagacagttcaccatcccagaagaggcttaaaaaggataataccctacccaaaaagaatcctgtaaataaatcctcaaatgttgcagctaaaaaatctgcagcaacaagcaaaagtgctaagcttcctattcccaaggttcatagtataaatgaattagctcctaagaaaaccaaagtcaagacgccaaataaaacaaaagaagcaagtttatctaagaaacataaggtaaatggaaacaagagctcaatgaaggtcgtacaaaatggtaaagtagtagagataattggtactgcagcggaaacaagtgacattgaaatgaattcattggatgattggagtgaagaagacgattatttaattgaaagtgactctgaaaacgatgtagttgaagaaatagacgagacatttcttaaagatccaaagatttttaaggtcaaatgcaaaggccccgaatacaagttatcagatattcttcctccttttgaacacgatgaataccaacctcttttgttggatggggatggcagtggaacagttcgaaagattaaggtatttaaaagtgcacaggaagaaactgacagcgacgaagatgacattgattatgagccagaagatagcgatgactttggatcggaggaatttgacagcgaagagtctgacagtgaagacacaagcagcgcagactatgatagtgatggagatttctacagtgaatatagcgatatggaggatgttagtgacagcgatagtgaagaattcggaagcgatatcttcgacaccgacgacctcgattcaacttatgagccacctgacattgagggattcttcgatcatccacctgtgggtatgcaaagagagccgcttattatagaggaaatcttcgacgatccgcctgtggaaaaaaagcaagaacgtattgaacagtcaagtgttatggatattgttgtaaaaaacttaagcagtgtgcccccaaagaaggagtctgaagttgcaattgaaaccgaagagaatgatgaggtatcactgcctgaagttgtaacaccagaaaaggaaaattatctccaaccaagcgatgtcccgttttacagaaatccgcaagcgaatcccactgagcttagcgtctttgagaacagtctgaagagcaatcatgtgctggccgtgattaaggaggacctcgaagtttatggcacactagtgttgactctactctgtggtcaaatatcagtaaatggttacagagcacgcaggcaggaagcaatcacaatttattctcctaaaggccttaattgggtatctatttcgccaaccaagactaaaaaacctgtaaaagatgaggtaaattgggaagaactcaacaagaactttacacgcgcccagctagacaggattaagaccagctttcagcgtcagacgaatgcaatagtactgctccaccgaaacacaagtgcccagcagctcgtcgatacctttggcaagcacatggcgcaaaatgtattcccacttgtcaattcttccaatcgaccatttggccaaagtgaaaccctgttgcactgtctgattcaatcgagcgatcaaagtcgcactctccaagttccgcaggtttggaataagttacaaatgcatgcaacgagccgaataatcgtagccggtggtaagggcgtcggaaagtctagtttattgcgttacctcatcaaccgaaatctgggtcaattcccatccatgctgctcatcgacctggacattggtcagccggaaatatttgtaccccagactatttcttgcaccgtaattgatgagccccttctgggaccgggcttcctgtacaacaggcagccggaacatgccattgtcgtgggccacaccaacattgtcttgtgcgcagagcagtatgcccgagcagttattcagctagtccaaaacattcagaacgatgccaagtattcaaatattccttggctgataaatacgatgggctataataagggatttggtatcgaattgatggctctgctggtggatcgcattcgtcccacggatcttgtacagattgccagtcccattccaatcaataactttgattctgtcctcgaccggaacagtctgtcgcagataaaaccaattatatactctgcggaggagttcaagatcaatgaaataccaaaatacacactccataagctgataagtgcagtgcctgcaagggaaaaaggaacttggagtctcagcgccaaggacatgcggtactccaatcttctggcacgtctcagttcctgcctgactggaaatgccaaatctcttacagactgccagccgttgggagtgtctttggaatccctgaaaatcctgcatcccaccagcaagaattactcgcgcgaagaactgattcgaggcatggaggctaatgtagtatatctgtgccatcacggagcaggtgtggttcgcgccatcgactacgagcgcaaggagttatacctggtgccagcaatgccgctacaaaagatgtccctggtggattgtcttatcctcggcggggaacagtccctgccgcagggcttccttcgggatcagggccaaggtgtgtccagcagtgtgcccttcgtgttcatccttgacgattcgaaatcttcgaagagtattcagcagatctaccatcgagcgccagcctttctgggagtaccagcgaatcaacgaaactaa

SEQ ID NO: 12012 - protein, 987 aa, DROSOPHILA
MLDEHILKEMKLSFQLTEQRELASGRRKPEKPQHPPAVPKKKVISKVASNPAKISETMIQKAQMESPKKSKKNKTAGAKRPLSNNVSNPDSSPSQKRLKKDNTLPKKNPVNKSSNVAAKKSAATSKSAKLPIPKVHSINELAPKKTKVKTPNKTKEASLSKKHKVNGNKSSMKVVQNGKVVEIIGTAAETSDIEMNSLDDWSEEDDYLIESDSENDVVEEIDETFLKDPKIFKVKCKGPEYKLSDILPPFEHDEYQPLLLDGDGSGTVRKIKVFKSAQEETDSDEDDIDYEPEDSDDFGSEEFDSEESDSEDTSSADYDSDGDFYSEYSDMEDVSDSDSEEFGSDIFDTDDLDSTYEPPDIEGFFDHPPVGMQREPLIIEEIFDDPPVEKKQERIEQSSVMDIVVKNLSSVPPKKESEVAIETEENDEVSLPEVVTPEKENYLQPSDVPFYRNPQANPTELSVFENSLKSNHVLAVIKEDLEVYGTLVLTLLCGQISVNGYRARRQEAITIYSPKGLNWVSISPTKTKKPVKDEVNWEELNKNFTRAQLDRIKTSFQRQTNAIVLLHRNTSAQQLVDTFGKHMAQNVFPLVNSSNRPFGQSETLLHCLIQSSDQSRTLQVPQVWNKLQMHATSRIIVAGGKGVGKSSLLRYLINRNLGQFPSMLLIDLDIGQPEIFVPQTISCTVIDEPLLGPGFLYNRQPEHAIVVGHTNIVLCAEQYARAVIQLVQNIQNDAKYSNIPWLINTMGYNKGFGIELMALLVDRIRPTDLVQIASPIPINNFDSVLDRNSLSQIKPIIYSAEEFKINEIPKYTLHKLISAVPAREKGTWSLSAKDMRYSNLLARLSSCLTGNAKSLTDCQPLGVSLESLKILHPTSKNYSREELIRGMEANVVYLCHHGAGVVRAIDYERKELYLVPAMPLQKMSLVDCLILGGEQSLPQGFLRDQGQGVSSSVPFVFILDDSKSSKSIQQIYHRAPAFLGVPANQRN

SEQ ID NO: 12013 - DNA, 4022 bp, DROSOPHILA
gcgaaccctaccagcgcgatcctcaatcctttcgatgacgatagcgtccttgccctaaatattcaccgcacggcattgtagacgctttatggccaatcctttctgcttgtgtgtttgcaaacaattccattttatggccgcctaagcgaatttccccgcctcaattaggctgaggttgtaaacgcataaagcaaacacgcgagagtgcgaacgccgagcaggcagccggcaaaaaaaagaaggaggaaaaaaaggacgaattcggggcaggcattccgtttacacaggatatccacgcaaatgcgcatgtcctttgagcgcaattagccgtcggggaaatcccagcccagcgaacccagagcaaacccagcgatcgagttcgtttccgaagtctttcgttcgccattcttggctttccgcccatcggttcgcccctttctcgtctgtttgctcgaacccaagcccagtcccaaacccagtcccaatcgcaaacccaatcacaaacacagactcagacccagacccatacccaaaacccagactcatttacatattgctcgttttctgctgttttcgctgcgcttaagtatgtttgcccggtccgatctctccgtgtttgctttggaccatctcgaccatcttgaccatcttggcctgtttgccgcctgtccaccttttgctcttcgatgccgctgcaggattttcgtggaaatgtatagctttaacaagcttaaaacttaaaaatggcgtgactcgacaaacaaaagatatgagagacaaatgaagtctgcttccaaataggcgctgctatgtggtcgaagtttttaaaagtgcttcgataaatttggttacttttcattatttatgatttttataataaagagataatatatgcggtagcattcaaatctaaagtgcataacattttgtatgtatcccattaaagaaaagacatctgcgatagtctcatagtcattgtgttttctatcccaactcaaatacacttagattttaaaagcgcaaaactacatttatttcgttaaatactactggaccgccattaaaaatgaatcgcctgtttctcaaaagggcgggacagcatgtaaccaggagccttcttggtccaaatgggagtcgtctgcttcaagtgtcctgcgttcgagatgccagttgcaaagatgagtactccttgatagaccacaagttcgatgcgattgtcattggtgccggtggagctggaatgcgggctggatttgggctggcggagaagggtttccaaacggccattatatcaaagctatttcccacccgatctcacacggtggctgcccagggtggtgttaatgccgccctctcaaatatggacaaggacgactggaagtaccacttctacgacacggtgaagggctccgattggctgggtgatcagaacgcgatccattacatgtgtcgggaggcggagagggcggtctgcgaactggacatgtacgggatgcccttctcgcgaaagcccgatggcaagatctaccagcgaccttttggaggtcagaccttggactacggaaagggcggggtggccagaagggcgtgtgcatgtgcagatcgcacgggtcacgcccttatccacacactgtacggacaaacgctgaagcactccgattcttgccactattttgtggactacttcgttctggatctgatcatgtcgcagggtgcatgtgtgggatgtttggcttggaaactggatgatggcaccttccatcggtttttggccaaaaatacggttgttgccgccggcggttgtggtcgggtgtacttctccacgaccgccggacacacatgtaccggcgatggcaatgcgtgggtgtctagacaggagctgccgctcatggatatggaatttgtgcagtttcatcccactggcatctacggagccggatgccttatcaccgagggagttaggggcgaaggcggtttcttcttgaactgcaagggagaacgtttcatggaacgctatgctccaaaggccaaggatctggcgtccagagatgtggtggcgcgggccatgaccatggaggttcttgctggcaatggttgtggtccgctcaaggatcatgtgcaccttcagctccaccatatcgacgccaagatcatcaagcaacgattgccgggcattatggtcaccgcccggatttttgccaaagtggatgtgaccaaggaaccagtaccagtgctgccaactgtgcactacaacatgggcggcataccaacggattacaagggtcgtgtggtcaccatcgatgagaatggcaaggaacaggttgtcaagggactgtactcctgcggggaaacttcctgcgcctcagtacacggagcaaatcgattgggtgccaactccctgctggatctgatcatctttggccgcgtctgtgctctggacattgccgcaaacaactgtccgggggataagccgccccaggtggaggacaaagccacggagaagtcgctggataattttaagcgcctgcgctgcgccgacggatgcattcccactgcggtgttgagaatggaacttcagcggaccatgaccaaacatgcggctgttttccgggagggaaaactgctcaaggagggtctgctcaaagtggccgagttatgtgaacagttcaaggacatcaagacaaccgatcgtacgatggtgtggaactccaacctagttgagacgctagagctgcagaatatgctagccaatgcggtgcacatcattacagccatggaaaatcgcaaggagtcgaggggctcccatgctcgcgaggatttcaagacgcgcgtggatgagctggactatggagcaccactggccggacagaaaaagaaaccattcgaggagcattggcgcaagcacaccatgacctttgcactgggtaacaaaggatgtgcatcgatcaaatatcgcccggttgtggacaccaccttggacagctccgttgcacccattccacctgctccgcgcacctactgaacatttatgtgtagttttgagctggtacagtttcattctcttacattctctgggatattaaaacaaaaacacatattgactatcaaaatgtggccattttgtataaatatataagatgaaaacaacaaaaaaaggtattctcttgttctattttaattgtaaacatttcaacgattttctgatactgaaagcccaactcgcagtcatttagaatgttgttgaatgtaatattaaaagaccatttgattaatttttgggtctaattcggcgattgtaaaagaaaatcgtaaaaggaaacatataaattttaaatacttttgaacttagattctctcagttgtcttagcttctgtaaaaatattggagttgtgcttttaattttagaaatcgatttcagcggaagtggactactactttcggttggtcctagcttaaattcatcattcaccatcatattctccgtagttgtcattatagtaagccataaaatgtacggtgttacgatgaaaaaaattaagtccagaataagggcggtcttccaagcgttgcgcccaagaatatccaagtcctttagatccacggccgtttttaaaacaaattcggcggatgtgctccatgtggaggtcggatgtaaccaaaatggcattggaggtaactctgaccattcgcgcagaagcaaaagattgagaatggagttagtatcgtggctggagctcagtctccgaaattccccatccaccacatggtacacgttagcctcccgaaaggcggaaaatcgtccccttagccaaaaattggtggagagatcaccaaaagccaagtccacatcgaggcaacccattgaggtgctagccagctggtataagaccgctttccaatctccgcaactcggctggtgtgacgaacagattagcaaaagccactcgccagtaagcacttccttccagttgccctcatcaatgcgggtaattaatccatctccatattcggccatcaaata

SEQ ID NO: 12014 - DNA, 2022 bp, DROSOPHILA
acacttagattttaaaagcgcaaaactacatttatttcgttaaatactactggaccgccattaaaaatgaatcgcctgtttctcaaaagggcgggacagcatgtaaccaggagccttcttggtccaaatgggagtcgtctgcttcaagtgtcctgcgttcgagatgccagttgcaaagatgagtactccttgatagaccacaagttcgatgcgattgtcattggtgccggtggagctggaatgcgggctggatttgggctggcggagaagggtttccaaacggccattatatcaaagctatttcccacccgatctcacacggtggctgcccagggtggtgttaatgccgccctctcaaatatggacaaggacgactggaagtaccacttctacgacacggtgaagggctccgattggctgggtgatcagaacgcgatccattacatgtgtcgggaggcggagagggcggtctgcgaactggacatgtacgggatgcccttctcgcgaaagcccgatggcaagatctaccagcgaccttttggaggtcagaccttggactacggaaagggcggggtggccagaagggcgtgtgcatgtgcagatcgcacgggtcacgcccttatccacacactgtacggacaaacgctgaagcactccgattcttgccactattttgtggactacttcgttctggatctgatcatgtcgcagggtgcatgtgtgggatgtttggcttggaaactggatgatggcaccttccatcggtttttggccaaaaatacggttgttgccgccggcggttgtggtcgggtgtacttctccacgaccgccggacacacatgtaccggcgatggcaatgcgtgggtgtctagacaggagctgccgctcatggatatggaatttgtgcagtttcatcccactggcatctacggagccggatgccttatcaccgagggagttaggggcgaaggcggtttcttcttgaactgcaagggagaacgtttcatggaacgctatgctccaaaggccaaggatctggcgtccagagatgtggtggcgcgggccatgaccatggaggttcttgctggcaatggttgtggtccgctcaaggatcatgtgcaccttcagctccaccatatcgacgccaagatcatcaagcaacgattgccgggcattatggtcaccgcccggatttttgccaaagtggatgtgaccaaggaaccagtaccagtgctgccaactgtgcactacaacatgggcggcataccaacggattacaagggtcgtgtggtcaccatcgatgagaatggcaaggaacaggttgtcaagggactgtactcctgcggggaaacttcctgcgcctcagtacacggagcaaatcgattgggtgccaactccctgctggatctgatcatctttggccgcgtctgtgctctggacattgccgcaaacaactgtccgggggataagccgccccaggtggaggacaaagccacggagaagtcgctggataattttaagcgcctgcgctgcgccgacggatgcattcccactgcggtgttgagaatggaacttcagcggaccatgaccaaacatgcggctgttttccgggagggaaaactgctcaaggagggtctgctcaaagtggccgagttatgtgaacagttcaaggacatcaagacaaccgatcgtacgatggtgtggaactccaacctagttgagacgctagagctgcagaatatgctagccaatgcggtgcacatcattacagccatggaaaatcgcaaggagtcgaggggctcccatgctcgcgaggatttcaagacgcgcgtggatgagctggactatggagcaccactggccggacagaaaaagaaaccattcgaggagcattggcgcaagcacaccatgacctttgcactgggtaacaaaggatgtgcatcgatcaaatatcgcccggttgtggacaccaccttggacagctccgttgcacccattccacctgctccgcgcacctactga

SEQ ID NO: 12015 - protein, 525 aa, DROSOPHILA
MCREAERAVCELDMYGMPFSRKPDGKIYQRPFGGQTLDYGKGGVARRACACADRTGHALIHTLYGQTLKHSDSCHYFVDYFVLDLIMSQGACVGCLAWKLDDGTFHRFLAKNTVVAAGGCGRVYFSTTAGHTCTGDGNAWVSRQELPLMDMEFVQFHPTGIYGAGCLITEGVRGEGGFFLNCKGERFMERYAPKAKDLASRDVVARAMTMEVLAGNGCGPLKDHVHLQLHHIDAKIIKQRLPGIMVTARIFAKVDVTKEPVPVLPTVHYNMGGIPTDYKGRVVTIDENGKEQVVKGLYSCGETSCASVHGANRLGANSLLDLIIFGRVCALDIAANNCPGDKPPQVEDKATEKSLDNFKRLRCADGCIPTAVLRMELQRTMTKHAAVFREGKLLKEGLLKVAELCEQFKDIKTTDRTMVWNSNLVETLELQNMLANAVHIITAMENRKESRGSHAREDFKTRVDELDYGAPLAGQKKKPFEEHWRKHTMTFALGNKGCASIKYRPVVDTTLDSSVAPIPPAPRTY

SEQ ID NO: 12016 - DNA, 2944 bp, DROSOPHILA
tatagtgttatcaaaacgcgccccttttaaacacctttatgcagtctcaaatatatacaaatgcaaggcagtgattagcctatcaaggcgtgaagataaatcggtgtttcatttagtaagtacacaaccagtttattgtaaagcacactaacttcagtcacaaaacacagtagcttaacaataaccagaacatgccgcccagcttagatgcgtttaggtaatagatcccactaactagagctagaataagtcctgggcttagactagaccgcttggatcggcggagctcgggaggagcagcgaggtaagtgcattgttccacattgagttgcaatgcttacgatggtgcagcattacgatttgatatttccaaactgagtgcgaactaattgtccgctcttttcctttcagtggccatcgatttgatcgttcagcatatccgggacttcttaaacaatcgatctcggcacggatcaaccggaaacatggctctctacatgaatctggatttgaatgcgacgggtgccggtttcgcgggcccaggtaaggccaccatccaaaaggcgcgtccccactaaccatccgctgactggagtgaatgatccggattactaaccaatcaaccaaccaatgcatgcaatcggacacttgctgtgctgtatatatagtatcttctgttatgctttgtgtttccctgtgaagatggaagtaacctcggcacgtacaacgccatccgaagattctcgacgatctgcaaggagctcaacatgcagggcaactatttctttgagacaaataagaacctgccgtaccactaggatgggatggcgtgagagttcccggagcagtacaagacacgacgcacataggcgattgttaattatctaaccaaatattgtacccatagacatattttttcagtaaacacaattgattgttgatgataaatatttatgtttgtcaaaatactgttaccgaatgcttcgactgcagttgtcatctacaccttgcacttgtacattgcgttgatcttgcgcacatctccggctgagaagcccttgcgttgacccatctggctggcatcggatgtggcacgcagtgccttcaacgtgggctggccattccgagtgaaactggtgggggagtagtgcatcacactgccatagtcgtattccacgccgaagccgtactgtgtcctggaactggacttctcgaagttgaccatcatctcgggcttgatgttgtccttcatcacgcgcacataggagtcacgttcgtgacgattctgctcatggaagaagcccagggcgtgcatcagctcgtgaatgggagtgccgtatgtacgcaagcagttgggcgactgcagattcacttcctggcgaccacctaagcgcccaatgctactccagcagccagactttccgctaccaatggagatgtaatccttttcggtggtcctgggcttgaagcgcacgcatgttttggtgtggtattcctaagatacaaaatcttatttgtaaattgtaatagggactattactgaaacctcaccttaaaagcgtggttaatattccccaattcctggctggtaaaaggacctttgatctcgtagggcacaacgccgcccggccagcgggaactcagcgccaaaatgccattacgagtgccattgaatcgggcgtccctgtagctcagtggaatcaggatgtcaccttcgtggtaggttcccagctcctcgggattcagcggggattccacaccgagtgcctcaaccaaagctccagtcgtctccacgtccggattaccgaacagagtatctccaagatctgtcaagtcaatcatttcctgggagtccatatcctccaggggcatggaatctcccagagaaatgcccagtataatcagtagcaaaagcgaaccagtattattttgcgatttgcccattttgctaattccccaactgctgtgatttctaaccaggcttacccacattatatagtcccacctagacctccaaaaattgacgacatgttgtcggtgctgcctgtttatgctgagttctctttgaaacgataagtcggcgctttgtggccgtttacatttacattaagtacgtagttgctatccgccggcttcttgatttatggggaatttacttttatgcattccgacttgaaaatatgtgcagtgcggaattttcgcaagttaagatttgcggtattataaaaggtttattctatttggattatgatgatgtaggtcacaacttacaaaacccataactgccgttggtaatttaagtgaagtttacgttttcatgttcccgccataaattaaactttactatgctcgtgtattttggaatgtcacctagacatacacacgatattaattgatatattgaatagttatatcagtaaagttttatgaaaatgtaattaacggtttaattcttgtgcgaaatcaattcaagaacaaaatattttttttgtacatattgtaccactgtgcaacttgaatatcagtgtggccatgcatgttgactctatatcaaaatccagccaaacctagccaagcggactggtcacactgcaccatatataagcccacgaaacggatatcgccgattcaaacggtcgaacatttttcttgctgctcgtacgtacgttttattggttgctcgcgctcgtaacgtttttttcgccccgttttggccaatgtgtgtgcgcgcgcgtgtgtgtgtgctgcttgcagttcaaaagggcagcgacaacaacaagaacagcgcacctctcttttaagccaagtcttcggcgctcgtatgtgtgtgtgtgtgttggtgtgattcagaatcgtggcctgggaagaaatggcaaattagttggctcaaagtggaatctctgtgctcaatattcaaattcaggctagaaagtgtcgcgtgcga

SEQ ID NO: 12017 - DNA, 888 bp, DROSOPHILA
atgggcaaatcgcaaaataatactggttcgcttttgctactgattatactgggcatttctctgggagattccatgcccctggaggatatggactcccaggaaatgattgacttgacagatcttggagatactctgttcggtaatccggacgtggagacgactggagctttggttgaggcactcggtgtggaatccccgctgaatcccgaggagctgggaacctaccacgaaggtgacatcctgattccactgagctacagggacgcccgattcaatggcactcgtaatggcattttggcgctgagttcccgctggccgggcggcgttgtgccctacgagatcaaaggtccttttaccagccaggaattggggaatattaaccacgcttttaaggaataccacaccaaaacatgcgtgcgcttcaagcccaggaccaccgaaaaggattacatctccattggtagcggaaagtctggctgctggagtagcattgggcgcttaggtggtcgccaggaagtgaatctgcagtcgcccaactgcttgcgtacatacggcactcccattcacgagctgatgcacgccctgggcttcttccatgagcagaatcgtcacgaacgtgactcctatgtgcgcgtgatgaaggacaacatcaagcccgagatgatggtcaacttcgagaagtccagttccaggacacagtacggcttcggcgtggaatacgactatggcagtgtgatgcactactcccccaccagtttcactcggaatggccagcccacgttgaaggcactgcgtgccacatccgatgccagccagatgggtcaacgcaagggcttctcagccggagatgtgcgcaagatcaacgcaatgtacaagtgcaaggtgtag

SEQ ID NO: 12018 - protein, 295 aa, DROSOPHILA
MGKSQNNTGSLLLLIILGISLGDSMPLEDMDSQEMIDLTDLGDTLFGNPDVETTGALVEALGVESPLNPEELGTYHEGDILIPLSYRDARFNGTRNGILALSSRWPGGVVPYEIKGPFTSQELGNINHAFKEYHTKTCVRFKPRTTEKDYISIGSGKSGCWSSIGRLGGRQEVNLQSPNCLRTYGTPIHELMHALGFFHEQNRHERDSYVRVMKDNIKPEMMVNFEKSSSRTQYGFGVEYDYGSVMHYSPTSFTRNGQPTLKALRATSDASQMGQRKGFSAGDVRKINAMYKCKV

SEQ ID NO: 12019 - DNA, 4779 bp, DROSOPHILA
aaatattttttaaacaatgtaatcacataaaaacctaactaaaaagtaaagtttcaacattaccttaaatacattgatttaatttaaactttatttcattttatgcaacttaaaaacgcgagttataaacttatttcgtgctagtgtgcttaaaatgtcaataaacgcttaatttgcaaattttgaaattttttttcattatagttgtttttagtcatataaaaacgattgaaaacaaacaactattgccattaggaggaaccccttcaattgacctaagcgggtaccttggcctcgaagaaagcagtggtgttaagacaaagctgcgtcttgaagatttgcagtggggcctggcagacgtgtggtgcccatttggtgcagcccctcacggacaagcggtgctcgctcattgtggtcccttcggcagtcatggtgacattggccaacagtgtgaggcaatcaccggtgatgggagtgggttgaccagcctgccagggaaggtagaatgccttcttcccagtgctctgccagtagtaatcttcacttccgcccagcttatttccggatgtccacagctctgggctttggggtacaacagttgtcagccattcgttgatggcagtgaactccattttattgctaaagctcagaagtccggcgttaagggattgacagtgacgatccgaagaagttcttccaactattatcaaaaaggaggcatttgcccgccacctgggtgaagttggttggacaaacggcaacggtttcctcgctggccaccaggtaaagttgacccaaggccaaactggccagtgcgaaacaaactaacttggtcgacaacatcttgagtaactgatcaacagctggcccatggatctcttttatatggccaaccagcttggggggcagcgataagtcagctatttgataaggattcttagaacatgcgtggttaaagttatcatttccttatcaattcaactgagatgtcgtaaatggcatgactagaagggtatagtacgaggaatcccctagaaaagaagtatataagccagcttgtatgtatttcaataaggatagttaacaatacgaacaagcagagtaaaagattttactagaatcgtccgcgaaataagcacacttttccagggtctaagtcaaatctaattttgatttcaggtaaccatcgccactgacttgggaaaagtagtaactcgtctgcaattggaacgctccgaagtagccttctacatcttcaccaacggcagcaaacagcggtaggtcttcttacaattcccgaattaataatccttactctttaaaaacagagccaacctcactttgagatttgcgaatacggatcacgccctaaacaacatgaccacttggagtgaaatcagtgttcccacagcaccagacgaggatgaagatgatcgggaaatgatgctgaatcggtacgagttccagagccgactaaacgaatttagagatcgtgtgcgtttggaaccggaggagagctccatcaccgaggtgatgaactggtacacatccattaatcgtggattgctccatcatctgagtgaacagattaaggaaacagataatagcggcgtatggcggtgagtatagttgatatataaattcttcaataaaacaactttcaatacttgcctgtaagttcttacatatttgttatcaaatttgaaatctggcagatacctagttgggttcaagaaccttctcaagagcattgaatgccagaatattgccacatcctttggtattagatactatggacgaggatccttgacagctgagaacttcgtatcctatgtacgttacgaattcatggcccgtgagatgatcaactccacattaaactacgcacccatgcttaagaacatgtacaccaacatcaccagcaccaagaagtttcatcgcgccaaacaaatgtgtgtaggctggtgtaatttactcaaatcgattcctgtatgaagttctttcacaggggcaccactctgctaaagaataatccgaatgtgtcaaatgaacgcagtgccattgagtactatgagctgatgaacaactatactgatgatctgagaattcttcaaaaggccctgcgacgtctgattaagtatggcaattgtaaactatattatattcttaaataccttcctatttttaagggaatacgtggacaagacactggtagaggctgaccgaaaagaggcaatcggtattgcgattctggtggtggtgctaatagtatcaccggtcatcatcgtactggttaagaatgccgctgccactatacaggtttctaccttacccctgccaactgaccatctcgtactcatcccacttcatcccatagctttatgcacttaatctatcccagaaggccaaggagctgaagcgcgagaagcgaaaaagcgactcgctgctcttccaaatgctaccaccaagtgtggccatgcaattgaaacagacccagcaggtgagtccagctgtgggtgagaattaaccaggtctaattgacttcctgacaggtgcccgccgagctctacgaggcagtcaccatttactttagcgacatcgtgggtttcaccgaaatagctgcggattgcactccactggaggtaaagtaccactatcactttattcatcatatcattttgctaatcaactttggtttaagcatatcttgtaactaacattcaactttagttgtatttaggtataatttgtattcctttgacatttatctctaatgagagatacatctcacactttcaggtggtgaccttcttgaattcaatttaccgggtgttcgacgagcgtatcgagtgctacgatgtctataaggttgagacgattggggactcatatatggtggcatcgggtctgccggtgaagaacggtaatttatgcaaattcagctgtcagtcattcagtcatttaaaccccgcccgccggcaacatcccactgcttgactgccccaaaaagatttgcgctaatttaaatttcatttgtggccatgcgcgtaatttatgccatggaactttccgacccgctgcctctgcagggaacaagcacatcagcgagatagcaacaatggcccttgatttgctggacgcctcgtcggtgttccggattccccgggcaggagacgaatttgttcaaatacgatgcggtgtgcacacgggtccggttgtcgccggtatcgttggcaccaaaatgccgcgctactgcctcttcggcgacacggtgaacacggcctcgcggatggagagcaccggcgaggcgcagaagatacatatcaccgaggagatgcacgactcgctgcaacaggtgggcggattccgtaccgaacaccgcggcctcatcgatgtcaaggtatttgcaatcgatcaaaatcattcttacgaaccttgaggattctacttaagatgtttacactgcgtatgagtaatgtttgtaaattaccgttagcccttagtataattcagttccttttaactcccattagttcgctatagctttttgtgtaccgtgttttttccatacttttaaaacaactttttttgttgggtgaacctgcaaactgtttcattttcagggtaagggtctaatgagcacctactggctgacctgcaaggacggaccggttagggctcgcgaggagatctcgtggcgggcggacatacagcccgtgtttcttgaccacctgaagctgcatccgccaaccgactacaagctgccaaagcggaaatgagatgcaaccaactgcaagttttccggctaggccaaataatgcttatcctggccataaattcgaggtgcttttcttttggatgtgcatgcattagtgtcccgctctctcaatctctctatttaaatatctaagtatctttcctttctatcaaaaagttgaagttacacggtgcaccaagtgtagataaaatatacaacataaaattcgtcttaattttaaattcgcttcaaaatataataattaaatcacttccttgaaaaaaagtggaagtgcaactgatgcatcgtgtacaacaactttaaacgcttcaatggccaatcgtctttttacatgtaatacacagtgcaaatcacaagcatgcggccaaaatacagacttatgttaataaaaaatatgcgagaaatacattgttaccattcgttttccaaccacagtgatgggacatatataaagaaacctaaaatcttttctttcacttctttagttataaaataaggttataatttattttttatcaaattcggtgttagtattaatacaacaatttttttgagtgttcaatggtgagttttattaaaccgtacaacgatatgtatcgaatgtaaatcagctggaagtatgaccgccctgcgaagtgcgatagtgtgaccgcagccactaaattcgaactgtgcctgtgtgcctgcgtgtgggcgtgtgtgtgtgtgtgggaagttacagagagaacaaagtaaaatttgaaaagttaaagctgcagctgctgagggcatagccaaaattggacgaatcactgccatggccaaggttatatcgcaggacaccttcgacgatgttgtgaaggagaacgttgtggagttctcgatgactccttcggaggcgaaagaagagaccatcaagcaattcgaggcacaggtaagtaatgtcgacatagtcatccagtagattcactttaatgaaatgattgcagggcatcaacctggccaacattatcaaggacctg

SEQ ID NO: 12020 - DNA, 1701 bp, DROSOPHILA
atgactagaagggtaaccatcgccactgacttgggaaaagtagtaactcgtctgcaattggaacgctccgaagtagccttctacatcttcaccaacggcagcaaacagcgagccaacctcactttgagatttgcgaatacggatcacgccctaaacaacatgaccacttggagtgaaatcagtgttcccacagcaccagacgaggatgaagatgatcgggaaatgatgctgaatcggtacgagttccagagccgactaaacgaatttagagatcgtgtgcgtttggaaccggaggagagctccatcaccgaggtgatgaactggtacacatccattaatcgtggattgctccatcatctgagtgaacagattaaggaaacagataatagcggcgtatggcgatacctagttgggttcaagaaccttctcaagagcattgaatgccagaatattgccacatcctttggtattagatactatggacgaggatccttgacagctgagaacttcgtatcctatgtacgttacgaattcatggcccgtgagatgatcaactccacattaaactacgcacccatgcttaagaacatgtacaccaacatcaccagcaccaagaagtttcatcgcgccaaacaaatgggcaccactctgctaaagaataatccgaatgtgtcaaatgaacgcagtgccattgagtactatgagctgatgaacaactatactgatgatctgagaattcttcaaaaggccctgcgacgtctgattaaggaatacgtggacaagacactggtagaggctgaccgaaaagaggcaatcggtattgcgattctggtggtggtgctaatagtatcaccggtcatcatcgtactggttaagaatgccgctgccactatacagctttatgcacttaatctatcccagaaggccaaggagctgaagcgcgagaagcgaaaaagcgactcgctgctcttccaaatgctaccaccaagtgtggccatgcaattgaaacagacccagcaggtgcccgccgagctctacgaggcagtcaccatttactttagcgacatcgtgggtttcaccgaaatagctgcggattgcactccactggaggtggtgaccttcttgaattcaatttaccgggtgttcgacgagcgtatcgagtgctacgatgtctataaggttgagacgattggggactcatatatggtggcatcgggtctgccggtgaagaacgggaacaagcacatcagcgagatagcaacaatggcccttgatttgctggacgcctcgtcggtgttccggattccccgggcaggagacgaatttgttcaaatacgatgcggtgtgcacacgggtccggttgtcgccggtatcgttggcaccaaaatgccgcgctactgcctcttcggcgacacggtgaacacggcctcgcggatggagagcaccggcgaggcgcagaagatacatatcaccgaggagatgcacgactcgctgcaacaggtgggcggattccgtaccgaacaccgcggcctcatcgatgtcaagggtaagggtctaatgagcacctactggctgacctgcaaggacggaccggttagggctcgcgaggagatctcgtggcgggcggacatacagcccgtgtttcttgaccacctgaagctgcatccgccaaccgactacaagctgccaaagcggaaatga

SEQ ID NO: 12021 - protein, 566 aa, DROSOPHILA
MTRRVTIATDLGKVVTRLQLERSEVAFYIFTNGSKQRANLTLRFANTDHALNNMTTWSEISVPTAPDEDEDDREMMLNRYEFQSRLNEFRDRVRLEPEESSITEVMNWYTSINRGLLHHLSEQIKETDNSGVWRYLVGFKNLLKSIECQNIATSFGIRYYGRGSLTAENFVSYVRYEFMAREMINSTLNYAPMLKNMYTNITSTKKFHRAKQMGTTLLKNNPNVSNERSAIEYYELMNNYTDDLRILQKALRRLIKEYVDKTLVEADRKEAIGIAILVVVLIVSPVIIVLVKNAAATIQLYALNLSQKAKELKREKRKSDSLLFQMLPPSVAMQLKQTQQVPAELYEAVTIYFSDIVGFTEIAADCTPLEVVTFLNSIYRVFDERIECYDVYKVETIGDSYMVASGLPVKNGNKHISEIATMALDLLDASSVFRIPRAGDEFVQIRCGVHTGPVVAGIVGTKMPRYCLFGDTVNTASRMESTGEAQKIHITEEMHDSLQQVGGFRTEHRGLIDVKGKGLMSTYWLTCKDGPVRAREEISWRADIQPVFLDHLKLHPPTDYKLPKRK

SEQ ID NO: 12022 - DNA, 7311 bp, DROSOPHILA
aggggccgacaaagccggatcgggaacaagatgccactggcgctctatgttcatatgtatactcacatcccgatgactaactcctactgcaagaggaacttatgatctgatgccgctagggatgtctgcaaatttctgggaggagaagggttaaacaattgattcataaagagaccaacaaacgggaaactaactgaactaaatttcattcgatacaatggatgcatcgatatgctacgaaaagccgataaattattgtgatgagcttgacaaaaggtagttgctgcagttttaggggcgcccaatttaaatgattaagagatacagtcgtggttcttttactttattcgataagtcaatgcaccgatatatactgcagtaccaatatatgtgatcgtgatcaatagaactgagtgctcgggcaaaaggtatttgatgttataccaagtggcgccatagtaatttgtataattaataagattctgccagaacggtaattaacaggtataagagttgacttttttcatataaccgcaaacatatcatcgatatatcgatagttttggatttgaatttgcttcgatgtcggctgacaattaacgtaattggtttttatatatagttataaaaatacaaataaaaatagttataaaacggcttaggaaggaacaggatatttatttaactgtattgccctaacggctgaatattgaagtcaaaggttacattttgaaattcaatgcgtaatcagatcttattttcccaatgtcgtcattatcacaacggaaatatcatgaatgtctcaacagcttccaatgccgatgattcatccatctcggaacactttagattctacggtgtatactatgacgacgcagaagataccagcttccagttaggcgctaccaccgaatatttcctagcaacaacaacctatcgccggttggttcatctctaatcgacttccagcgagagagcgcgagtataaaagccaaagacggagcgcaaacagctatggtatttattcacatcgcttgcagttcgcatcgtctgacttgtacgttgaaaatcgaatatcattggtaaatcaaaaggaatttgtagataaaactcattgtttactctcgctgtgccagaaatcgcaaaaaatcaagcggaaaatcagtcggaaaagtgagaaaagaaagtgtgtgctaaacactcaaagataattttcatttgtgccattccaaaatgggcattttgtagaattctagttgtgggtgcggtatcgcgagaattctccagaatcttgtttctctatttactttatatttcaataataaaagcctcgggtgggagaaaaattcaaaaccgaaagatgacatcatcaaactcaaaagcaaaagccccactcttttggcgttttctctcgcgacgcgtgtgacttttctcatctccgacgaaatctaagtaaacttttctgttcctttcttgctttcccattttacgtaggaatgagaagcggaatttttcgaaatatctctatcccccagtgccctgcttaatttagtaattcaatcaacttcaattgcccgacaggcacttcaaactacagtaagcactgtgtatgagcgcctgtgccttgctcagcattactcaccggaatcggatgtggccacattccaccgtccacaaaatatagtagtagtgtactcgaggccgtgcaattatagtagaataggtgtgtcatcaaggtttattactaagtgaattgctcagtgcatttgcaaaacatttttgaaacatttcgaggtacagtccatcgaggtctccaaaagaagttggcaaaagcttttgtttatggagtttttcacacatggtcacgagctattccagtttttacacctatattataatatctcttttttaaagtcgtgctcagagcttaaaattgacgtcacaaatctggtgaatcactgagtgctgtaatttcaatgtatcatcagtctatttcaagaacaacattaccagatacgctatgctaaagcatatctatcaatcttgttttttccagaccccaaccactttttataatgaaacaaaagaattgtaattaagggtgttttcaaacacaaatgtgttttctacattgaggtcaaactattacggagaactccaatcaatatttagagagtctaaccaattattattgattacattattctcaacttgcattataatttatttaaaaagaaatcatatattaactaaagtagtctataaacactagaatcttgagtttaattgtacgccatacgtaaaagaaccggtttcaacgttggccaaaacattttgtttgtttatagctcgactgcagaggcgtttgtagttgtatctttttgttaacttttttgtttttttggatggcgtcgccacgtcaagtcttttataatgcttttttcggctgccttttgttgactttctactttggcggcagcatagaaaggcaaacatgtattttcagcactgtcgcactgtgattactaatttggggaagctatcaaaaatctcaatccatttatcattaggtaatttggccctattgattttagggattatgtggactagtccctcgagatagtgttccacttgacaactgaagtggagtggtagatctagaacgcaaacgggtgacgagtcagacatttccctgaagctttctcttggccacaaccaagccgtgcccgatgttttccaagccagaacgcaatgagctcatccgtttatgaggccacttcgtgtgggtttggtctggcctatcacgaaactgccgcgccatgccatttggctatcagacgcacccggttccaaggttcgttcctccgcaaactgcgtactgaaaagtggaaactttcacttttccccggcagtacgttgaacttcgatttgggcaccggtcggcaaggaaaactaaaaaaaaaaacatctcggtaaataaactaggaaaaaaaatcaatgggtaaaaatgctctcagaccagcgccaggctggctacggggcgtatgcgtaatgtgaggcttttacgagttgatgatgtcaccaggcaggaattaaccgaaggccgggcttattgggtctgggaaacataacgtatccaacattgctgggggttcagttttcatcacgatttcggcgtagccattattcattatgatttctcacttcctacttacagatttttcacaacaaaccaatcaaaatgagttccgctgagtactacccattcaaggtgagtttacaatggattgtactttatgagtctggtataaatcaattatttcatgcgattagcgccgttaatgtaaaaaatcagatcaaattagattcaacagatagatgagaatatcttaatattattttttctaaaacgtgtgttgttgtcaagtaagcaagatttttctcgatgcaatctataaattattacaacgaccagatgctacgaaattatctataattgggctattaaattatcatcagaggtgtatactagacaatcgttgacaaacaagtaccgattggtgggagaagagagtgataagagggtttcagttatgagttccttagataagagtcacaacgaaaaaaaaagtcaatttagaaagctaactttattgcagaggaattcatgcaatactgagataatacatgtagggaataaccacatatgtatttgtatttagaacaagtgccactgagtagtgttgagtcatttctttgggattacgtgccctgcattaaaatacacccaattcttctttgttgttactcatttgctgattgcctatattcgatttgcagtgcacacccactgtctacccggcggatcccttcgatcccgtcgaggatgcggctattctgcgcaaggcgatgaaaggcttcggcaccgacgagaaggccatcatcgagatcctggccaggcgtggcatcgtccagcgtttggagatcgctgaggcgttcaagacctcgtacggcaaggacctgatctcggacctcaagtccgaactgggcggcaaattcgaggatgttatcctggctctgatgacgccgctgccccagttctatgcccaggagctgcacgacgccatctcgggactgggaaccgacgaggaggccatcatcgagatcctctgcacgctgtccaactacggcatcaagaccattgcccagttctacgagcagagcttcggcaagtccctagagtccgacctgaagggcgacaccagtggccacttcaagcggctgtgtgtctcgctcgtccagggcaaccgggatgagaaccagggcgtggacgaggccgcggccatcgccgatgcccaggctctgcacgacgccggcgagggacagtggggcacagatgagtccaccttcaactcgatcctgatcacccgctcctaccagcagctgcgccagatcttcctcgaatacgagaatctgtcgggcaacgacatcgagaaggccatcaagcgggagtttagcggctccgtggagaagggtttcctggccatcggtacgttcttatagcatcctattctttagggtcccttctaactgatgcattgctctgcagtcaagtgctgcaagtccaagatcgactacttttcggagcgcctgcacgactcaatggccggcatgggcaccaaggacaagacgctgatccgcatcattgtcagccggtcggagatcgatctgggtgacatcaaggaggcattccagaacaagtacggcaagagcttggagtcctggatcaaggtaaataccgatttcaattacattcatatctgcgtgtgcttgccagaactttcgattctgcaccctgttcaatgtgccactaactcgcattcgattgcacctgcaacaaatcccattaattgtggctccatcaaagtttaataatcgttcatccaagctggcttctcctgttgttgttactgctcctttgcccaacactttcttgccgatttctgaagccattatcccttcccgcccgattgcttcatttgtgtgcataaaacattaaaacttggcatattctatatttttagggcgatacatccggcgattataagcgtgccctattggctattgttggcttctaaaaagaaccccatccaacaataatttatctctttcgtctgttccacgctctaaactatatgcaaacagaatgtacaaacaaaattccgatatcaaatagttgacaatgtatagtttttgaattggaacacgttttaacgaagacgcagtgcatttaagtcgtagaatcagaaccccagtctcgcatcctgttgattattataaccattgtgacttttattattatgactatgcacgccacatgcacataattgtatctctataattactacacctcaggctacttgcattgctgtgtaggtatactttcagttttgttttgagtctcatttgcaagatattttaacttttaaaaaatacgaaaataaaaaatacgaaaaaatgaaatacaaaattcaaatcgagtttctgttacctttagcagaggtctctgcactgcttgtcatgtaaataacagcgctacattgggtcgcctaacatcaaaacattaaacattaaaaagggcgtggattaaaccaacttaaaaatcgatttaaatggggctaaatgagtatattagccctctttaattgtctatataaactagatcagcaagtgtataaggtatacaaactgttaaatatagttcaatttagatctaaatatacttgcactgcttgctaaaagtacatgtcaattacatgtaaatataatgtacatacaatttcaagatgtaaaactttaaatgttatgttaaatttgaaagacattcatttgctgatcaggtagatatatagttgattaccccttggaggagtagcttccggcaattaaccaaaccataagccatgtatacaaagtaaaaggcgtttaatgctctgaccctctgctcttttcacgcttttctctacccgtttaaacgaaccaacaacaggaggatgccgagaccgatattggatacgtcctggtcactcttacggcttggtagacggaagcagccggaatatccgaatatctatgagcaataccccactgttcaagtagaaaatgccaaaaacaaaaaaacgttgcatttccccaaaaaaaagtataacaaaagcgaagaacaaatggagttggtctatatacagtagttgtgatgtgttctaaaaatccaatctacaaaacgcttagtattttccctctgtgcaataacgtctaacgttcaacgattatttaacatttttacgtatttttattttgtatacatgtctttttttattgtaaattatggcgcatcaaagtcgtatgcgtagtttgtgcttgtattaactaataaagttggcttacactcaacggcaaagctgggtcacattcaccatccactgatctcctttccaggacgacctctccggagactacagctacgtcttgcagtgcctggcctcctactaaggatttcctcgttggatcgattgttaaccattctatttgttgtaactcttactttaaggcaagcatcgtttgccaactgttttgcggaagattcatagcctatgttcaattcataaatgcactgtaaaatcgcggtaaataattggaagattttttcacttatctagggtaaccgaaaccaagggggaatgggtattggggaatattcgttaagggggaatgctgtttgggttttctacttggcaactcgatcctggtaggctgcccacaggcggtcgcggtacgtctgagccgcctgcttcgggctgctggccttcagaatgcccctgcccaccactccgatgtcggcaccccgctccttgaccacatgctccggactctggtactgctggcccaattggtccacgccctcgtctatcttcacaccgggcgtcagttgcagaagtccggggaaggcaaaggcatcggaggattggcataccacaccggcaacgaaatctacatcggctccctcggttgcgatcttgttgctgttctccttgtacttggcgtcgatcaggttgccgctggcagacatctccgccagcaggaagacgccgcgttccttgccggctcctccttcgccaaggcccgccttcagaccctgcagaatactacgtccaggtaaggtgtgggccgtgaccagatctgcccaactggaaatcttatagatgcccttgccgtactgcagggacaccgtgttgccgatgtctgcaaacttgc

SEQ ID NO: 12023 - DNA, 1264 bp, DROSOPHILA
gagcgcaaacagctatggtatttattcacatcgcttgcagttcgcatcgtctgacttatttttcacaacaaaccaatcaaaatgagttccgctgagtactacccattcaagtgcacacccactgtctacccggcggatcccttcgatcccgtcgaggatgcggctattctgcgcaaggcgatgaaaggcttcggcaccgacgagaaggccatcatcgagatcctggccaggcgtggcatcgtccagcgtttggagatcgctgaggcgttcaagacctcgtacggcaaggacctgatctcggacctcaagtccgaactgggcggcaaattcgaggatgttatcctggctctgatgacgccgctgccccagttctatgcccaggagctgcacgacgccatctcgggactgggaaccgacgaggaggccatcatcgagatcctctgcacgctgtccaactacggcatcaagaccattgcccagttctacgagcagagcttcggcaagtccctagagtccgacctgaagggcgacaccagtggccacttcaagcggctgtgtgtctcgctcgtccagggcaaccgggatgagaaccagggcgtggacgaggccgcggccatcgccgatgcccaggctctgcacgacgccggcgagggacagtggggcacagatgagtccaccttcaactcgatcctgatcacccgctcctaccagcagctgcgccagatcttcctcgaatacgagaatctgtcgggcaacgacatcgagaaggccatcaagcgggagtttagcggctccgtggagaagggtttcctggccatcgtcaagtgctgcaagtccaagatcgactacttttcggagcgcctgcacgactcaatggccggcatgggcaccaaggacaagacgctgatccgcatcattgtcagccggtcggagatcgatctgggtgacatcaaggaggcattccagaacaagtacggcaagagcttggagtcctggatcaaggaggatgccgagaccgatattggatacgtcctggtcactcttacggcttggtagacggaagcagccggaatatccgaatatctatgagcaataccccactgttcaagtagaaaatgccaaaaacaaaaaaacgttgcatttccccaaaaaaaagtataacaaaagcgaagaacaaatggagttggtctatatacagtagttgtgatgtgttctaaaaatccaatctacaaaacgcttagtattttccctctgtgcaataacg

SEQ ID NO: 12024 - protein, 324 aa, DROSOPHILA
MSSAEYYPFKCTPTVYPADPFDPVEDAAILRKAMKGFGTDEKAIIEILARRGIVQRLEIAEAFKTSYGKDLISDLKSELGGKFEDVILALMTPLPQFYAQELHDAISGLGTDEEAIIEILCTLSNYGIKTIAQFYEQSFGKSLESDLKGDTSGHFKRLCVSLVQGNRDENQGVDEAAAIADAQALHDAGEGQWGTDESTFNSILITRSYQQLRQIFLEYENLSGNDIEKAIKREFSGSVEKGFLAIVKCCKSKIDYFSERLHDSMAGMGTKDKTLIRIIVSRSEIDLGDIKEAFQNKYGKSLESWIKEDAETDIGYVLVTLTAW

SEQ ID NO: 12025 - DNA, 4553 bp, DROSOPHILA
ttcaatgccctttttctttggctaccgatcgaaatacccactttatggtctacctcccgccttcctcgcccgcacacatgtcatgcatatatattttcctgctcgatcggcacacgcatagcgacagaaaacaggcgagatgtataattttatataatagggcaaagttatttttaaaggcactcgacaatattattatgctaataaaagaaatgaactgcttgctacgcggcggcggcgaaaagacaaaaccgtttttcacaccaaataacggtccattcgagtatgattgtaagtaaaagtaccgtaacagggacttaccgcgttttcggcgcttatccttgcgcttacgcggctgcacatcgcccgacattttgctcgctaaaggcactaaaacctatgccaatataatggagagtgtttgtttttccttttcgagcggaccgggcaaaacgggcgatctggatcgacgaacagcacgttactaaatgcaaataccgctcgcaccgtgggaaaattatttataaagagacagtggcgttgccagatccggcgggaatgatgaaagctagagatgacagctgggcagtaaaggcaccgctatttcaattttattattctggatggaaaactcatgacagctctcaaaaactatatttacgcataaatatttatacatttatttaattctaataattatgttttattttaaatcgtgttgtgtcgatagattgaatttaattttaacagttcagcaacgcaaacgtttagaaaacccaaatgtaattttttctgttactcgtggatttttcatattttatgtctatgcgctatccatacaacagaacaaattgatttatttgatttaaaatgtaaagtgctcaaagtattaaatacaagtaaataatttaaattaaaaaaattagcttttttttaaatatcgcatgtcattaaaattcatgcgcactgcagtctccagtatcgtcacgcgcccatctcgaagggaaccaaccccgaccaagaaaaaaaaaaacaagaaaataatacacaattggcgacggcggtgcagaggttctccgtgtgatccgatcgaacgggactaggaccgacacggaccaggtctaaatccgcgaggtcagcggtattatggccggcgacatgtccatcggctgtgcggccctgaagcgatccagcaagctgaggtcctgcaccagcgccgccgacacggactcgatgcgggtgcccagcgaccacagggacaacgggagcctgatcaagccgcctccggtgccgccgcagaatatgcgcggcggtctgcgggtctataagattgtcatcctgggcgacggtggcgttggcaagtcaggtgagctattctagccatggattagacgaaagaaaatgccgagttatcactgcgcactttgattggggctgcgaaaaatcaataaattatctcaatttcttttacgctttgttttgacccccgtaccaccgacacccacgaaactccaccaaccaccactcccaacgccctctgaaaacgacgacgaaacccgaacagctgtcacccttcagttcgtgagccacagtttcctggactaccacgaccccacaattggtgagtaaggcgcagggtgcgcaaggcgtctaaggcacaagcccccacaaccccactaaatgtataccggttttttttttcttttttgctgctgcagaggactcctaccagcaacaggcggtcatcgacaatgaggccgccctgctcgacatccttgacaccgccggccaggtggagttcacggccatgcgggaccaatacatgcgttgcggcgaaggtttcatcatatgctactcggtcaccgaccgccacagcttccaggaggcctccgagtacaggaaactaataacccgtgtccgcctgtccgaggacattccgctggttctgattgccaacaaggtggacctggagtcgcagcgacgcgtgaccaccgaggagggccggaatctcgccaaccagttcggctgcccgttttttgagacatcggctgcactgcgtcattacatcgacgaggcattctacacgttggtccgcgagattcgacgcaaggaaatgcacaaggccctgggcacggactccaattcggaaaagattcacacggggcgacgaagtcgctggtggcgcatccgatccattttcgcattggttttccggcgcagacgaaaccttaactagaccaggaggcggattccttgaaatgagtgcaatattaaccacaaaaaccaagtaacttttgtttgctatattttgtatatagcacatacccatcagatacaacatacaaaagagaaattaaccgatcgaggagcagataactaattgttatggccacagtggtttatttattatttgttatggaaactatttaaagtacttgttgttggccggaaaggatagcgaggcagtagatcagcgatagagtatatcaatacgtttaagcaccgatccaaaagatacatattaacaatgcacgtacatatgtttatgtagtaaatattactaatgttgattcctagacgagagcgattaagcaagtgtggcaattggctaaagctcaaaagcatttaaattcagcaagatcgaggggtcgagtcttcccccactaacaatctgaacaactctgaatcctagccaggagattaacccaaaagccaattgccaggtgcgaagggcagagaattggaggatttttaaacttatgtatgtacgtatttacccagaatacacgcacatgacatacgttacacgagccacacatttaactaatcgaataaatgttgaatttaatgtatactaatattataaatcgatcgatcgacctaagaagtatgtaaaacgcgggaacattgcaaattatgaaatatgaatgagaatgtgcgttcatttcagatccaagcccaaattgataatttaagtccacgacagccgatgcatttgttgtttaagtttgagaaaagtctattgtttatattgttaaggacacacgtgttacgcctaagtttatttattattagtttaacgaaatctgttgattacttttaccacaagaaaccacacatcacgttctctaagcaatcaccatgagttcctctcatcaatgttaactgcatcaccggaaacaaaatactaacacggctttaattactctgtttgttacatgatcccaaaaaacagttgaatggactacccataattactaataattaattgttattgcgaatcctgcaaccgttcgaaccaaacagatcgactgacgaaaaaaagaaaaacaacagctccaacacgaaaacgaatcaaatgcgggtagaaatataatagaattgctttcgccgcgaaagttaagcgattaaaaagtacgttttaagagaaaaggcttgggaactagatgttcaaagcaatgtgtcgtgtccatgttgtttcgaaaacgacatacctgttcgggaataatattgtgaaacctaatacctaatcgatgaaaaaccaaaacattttgattcataatgttatgtacattttaaatgtaaaaaaaaaaattaaatacaaaagcacaaaataaacaaaaacaataccctcaataaagatttttttaaccccgttaaagataagtgttttgactttaaagggcgggtattccccggatttaaatccattatcttagcctaataaaattcgatgcccggccaaataagaaaacagttagttaaaccaagagtagatcaaatgtactgtttattcataagtataatatagtttggttgtatctgatgcatcttcgagtttttcaacttctgtgtgagaattacacgattgacggtacaaaatacaaaaaaagagacatacacatatgtactgtatagtataattatatgtataatcgtattttataaaatcataaaatactcttcatatagttgtttggttgttttgtagtatctttttttttttatgttttccactcgttttaatgcaaagtacaaatattaaaaactcgcttaatgcgctcgaaatagtttttcacttcatcaaaaattttccctcttagcatctcccacgcgaaaactgaatgcatctcatttgtggcttacgtttagttaaataaacatttatcgtttttgttttgttttgttttgtgtttagttcggctcttgtaatgtagtttcgcttccaactcctattggcggcctggtctctctgtatttgatagatttaatgggaacataactctcatcttgacgcctacgacctccttggaccccgggatccaacatccgattccgtttccgattctgttcctaattccactgattcacctgactcactcaccctcgcatacgacacaatctcgtccagccacagccgactctacacttgacaacacagttaacgaaataataacatacatctaggaggagggggtggacagaaacggacacaacttgaatatgtttacatatatcgatatatattttttgcttgcagtggctgactgatt

SEQ ID NO: 12026 - DNA, 2258 bp, DROSOPHILA
aagggaaccaaccccgaccaagaaaaaaaaaaacaagaaaataatacacaattggcgacggcggtgcagaggttctccgtgtgatccgatcgaacgggactaggaccgacacggaccaggtctaaatccgcgaggtcagcggtattatggccggcgacatgtccatcggctgtgcggccctgaagcgatccagcaagctgaggtcctgcaccagcgccgccgacacggactcgatgcgggtgcccagcgaccacagggacaacgggagcctgatcaagccgcctccggtgccgccgcagaatatgcgcggcggtctgcgggtctataagattgtcatcctgggcgacggtggcgttggcaagtcagctgtcacccttcagttcgtgagccacagtttcctggactaccacgaccccacaattgaggactcctaccagcaacaggcggtcatcgacaatgaggccgccctgctcgacatccttgacaccgccggccaggtggagttcacggccatgcgggaccaatacatgcgttgcggcgaaggtttcatcatatgctactcggtcaccgaccgccacagcttccaggaggcctccgagtacaggaaactaataacccgtgtccgcctgtccgaggacattccgctggttctgattgccaacaaggtggacctggagtcgcagcgacgcgtgaccaccgaggagggccggaatctcgccaaccagttcggctgcccgttttttgagacatcggctgcactgcgtcattacatcgacgaggcattctacacgttggtccgcgagattcgacgcaaggaaatgcacaaggccctgggcacggactccaattcggaaaagattcacacggggcgacgaagtcgctggtggcgcatccgatccattttcgcattggttttccggcgcagacgaaaccttaactagaccaggaggcggattccttgaaatgagtgcaatattaaccacaaaaaccaagtaacttttgtttgctatattttgtatatagcacatacccatcagatacaacatacaaaagagaaattaaccgatcgaggagcagataactaattgttatggccacagtggtttatttattatttgttatggaaactatttaaagtacttgttgttggccggaaaggatagcgaggcagtagatcagcgatagagtatatcaatacgtttaagcaccgatccaaaagatacatattaacaatgcacgtacatatgtttatgtagtaaatattactaatgttgattcctagacgagagcgattaagcaagtgtggcaattggctaaagctcaaaagcatttaaattcagcaagatcgaggggtcgagtcttcccccactaacaatctgaacaactctgaatcctagccaggagattaacccaaaagccaattgccaggtgcgaagggcagagaattggaggatttttaaacttatgtatgtacgtatttacccagaatacacgcacatgacatacgttacacgagccacacatttaactaatcgaataaatgttgaatttaatgtatactaatattataaatcgatcgatcgacctaagaagtatgtaaaacgcgggaacattgcaaattatgaaatatgaatgagaatgtgcgttcatttcagatccaagcccaaattgataatttaagtccacgacagccgatgcatttgttgtttaagtttgagaaaagtctattgtttatattgttaaggacacacgtgttacgcctaagtttatttattattagtttaacgaaatctgttgattacttttaccacaagaaaccacacatcacgttctctaagcaatcaccatgagttcctctcatcaatgttaactgcatcaccggaaacaaaatactaacacggctttaattactctgtttgttacatgatcccaaaaaacagttgaatggactacccataattactaataattaattgttattgcgaatcctgcaaccgttcgaaccaaacagatcgactgacgaaaaaaagaaaaacaacagctccaacacgaaaacgaatcaaatgcgggtagaaatataatagaattgctttcgccgcgaaagttaagcgattaaaaagtacgttttaagagaaaaggcttgggaactagatgttcaaagcaatgtgtcgtgtccatgttgtttcgaaaacgacatacctgttcgggaataatattgtgaaacctaatacctaatcgatgaaaaaccaaaacatttt

SEQ ID NO: 12027 - protein, 264 aa, DROSOPHILA
MAGDMSIGCAALKRSSKLRSCTSAADTDSMRVPSDHRDNGSLIKPPPVPPQNMRGGLRVYKIVILGDGGVGKSAVTLQFVSHSFLDYHDPTIEDSYQQQAVIDNEAALLDILDTAGQVEFTAMRDQYMRCGEGFIICYSVTDRHSFQEASEYRKLITRVRLSEDIPLVLIANKVDLESQRRVTTEEGRNLANQFGCPFFETSAALRHYIDEAFYTLVREIRRKEMHKALGTDSNSEKIHTGRRSRWWRIRSIFALVFRRRRNLN

SEQ ID NO: 12028 - DNA, 5773 bp, DROSOPHILA
gattacggccaaggaggacgggccttcgaccacagacattgccatcattgtaatacccgtagtggtggtgctgctgctgatcgcgggagccctcctgggcaccttcctggtgatggccaggaacaagcgagcaaccaggggcacctatagcccgagcgcgcaagagtactgcaacccacggctggaaatggacaacgtactgaagccaccgccggaagagcgactaatttagttttgagttttgagcatgaacgacgattagcaaagcaaacaaaagatatttttaaatccgcccatatacacctagctgtaggagtaactcaatgttttgtactaagttggcccctagttatggtttacatcttaaggtgctcaaagcaatagcagcagcagcagcagccaggcttccacctcgactcgtcccttatcccctgcctacgctttagttagttaataatgccgttgtctatttattctagtagtttagatgacatacgtaccgccctatagtcgttatgtagttatgttccgatagtttagattcagtattcgatttctcgtatatgtaatcctaaagctgcgaacaaagttgagctccgacgtcgatttcccctttgcattccacaaggaagcccatcaaatgtattgtatgagtatttttgtaaataagattgtttgccgactcttaaactaaattagctgagctaaaatcgaaattaaaaacagaaaatcctatatgcctatatatacgcgagtatatatatcagtaaatgtggccttataacaaaaaaaaatatagtaacgaaaagcaatgacaactagaacagaaaaagtattggttaagtaaatcaaataaaaaacatattttgctctagagtatctaagcgtaaacttaagagactgtactatataataaatataaaatatttcgactttttccaatcaattgcctattcaattatccagttaaagacacacggcaaactatatataaaaatcgttttctttttttcatttgtagcaactattgctaaatttattcgtcagctttaccatgacgtgtatcttatggtttgaatgcaaccaaattcgcaggaccaacaaagttaagttatgtttatcatgtatgtgagcgagcttctaatgactaatacacatgtttataattataagcagtaggatgaatgcaaataataatgaagattaaataggtaaggtatacaactcggtgtatatagatagaaaaaactccaagctcgcctaatcatacactcgaaatagagtacatttgctaaatatcatttgaacgaaagtgcagtccacattagcccaaagatgccacccacttgaatttgctctgcatctcaggatggtagaagatgcactccagcttgtttacgcagttcttgccgaagcggcagggcttgggatgatagaaggtgcagcccagcttggaacaattcggatagtacttgcacatggtagtcgcagtcgtggatgtaacaggagccgatatcgacttgtagttctgcactgggatgacgtgagaggctgtaaattaaaaaaaaagtttgtgagtttgtaaaattaaatacaaaggctatcaacttacatagtggtggagcagcaagctggacatggcttagatccctttgaccgccatgggcgtagttgcagtctatgctcatgcaggccatgtcgaatttgcacttcggatgcgagtacatgcacttgtccgcgaatttgcagttggggaaagacttgcacggcgccgttggatgatagtactcacagaactgctttgtgcagtttggatgatatttgcagcgctccttgggtttgttcaccttcagcacggtggaatccacgctaactgcgctcactaattggggcaagatattaagtaattgttcaaatttgttaaaattgaaagaatacacttacacgccggcaagttgtcgtatttcctgtcctccggattgcgtatggataccctgcgtctctccggagccgcgacatcacgatcggggctgccagaacgacgcttcttactcgcactcggctcgtcctcacttttaagagtgaagcgaatgggcgtgtgcttggctttggtagttgtcgaaacggaagtggacgcactgacagatttggcggccgatgacgtctccgctgaattagatcttacggatttctccttgctggaagctttcttctccgcccgcgcctttggtttggctggcagcggtggagttgttgagccttcctcgattttacccttatccttattgtccttgtgaccattggccgccgctggctggcgcttgtttggtgatcgtttcttcggtgacccgtgcatttcatcatcttcatcggtgtcattttttatgatgatcttcttgatttcctgaggctgacggcgtacctcgttgcgattgatgctgcgtgttgtcggcagggagggtgacccactgctctgtctcggcgatggcgagaagcttctatcccgattggatcggcgtcgcttgtcaaccgtcgtagatgtgggctcaatattagaggaggacacttgtggcgtggatacgggtgaggtggatcgtttacgagagttgctcggccgcttgcgagaggcccctcccttgacattcttacctccgagagctttgtcgccgtttaacgtgaccacaaactgagtcttgagggctccggaattgggacttggctcgtcgtgggagctgatgtgcaaatccaattcatccacgttggtcagcaattgcggcacatacgtctcgacgccctcagtcattaggcttggcgtatattcttcctccaccactttgatctcggcgcgacgctcgttggaccgccgttcacgctttccatccctttgtgtcacatttaccactaattcccgagtggtgcgccggaagagttcgttgccttgtgcacttctctttcttcgtttcctctcgcgattccgtttacgaatctgatcattcttatcctccgacttgcgcttgcctagagaacttatgatcttgcccacatcctcgtcctccttctgtgtcgaagtcttggcgaggattgtggaacgctgcgcgtccgccactgctcgcagcaggaggttcttgcaggcctgtcgtctgggagaaacatttggtcttggcttgaccttaataacggagttgactggcttttcggccatatcctcatcgtccgacggctccggtggcttgttaacggccacaataacttgggagacaatgcgttgctttgtacttggagcctccggactaggcgaacgacgctggcgctgattacggttagtgtccctagaggtatcgcggctggagcgtcgttctcgggtgcgctctctttgactgcgctctttggtggcctcgggttcgctccgtcgccgatgggtcggcacatagagctccttttggttgcgctgcgaacgatctgccggcgtttgggcctttgaaccgagacggtcatgcaccgatcgcctttcagaccggtcttccttggccttgtcagccgaagaatcttttttggggctcttctcctccgcctcctcctggcgggaatcgatctccggttcagcctctggacgcttttcgggtgtcttctcgcgtctgttaaaaataatggggctcttagcttttcgtggtggagcctccaatttcgggggatcctcttctggctcctggtctacagactcctccctcgcgctcaagttcaacagatcctcatcatattcatcgctttcatccccgatctcgccaatctggcgtaaatgcttcttggctgcatgaattttcttttggatttcggccagctcagcgaggtctttttgccggttaacaccgatagtagttgagatgatctcagacacagcgggcacatccagcgccctattggccgatgcatcctcatcctcgatggacttgcgatttttctttttgtgcaggatctcgtctttggcactgagatcaatgtccatggttttctttgccttctcgagaagctcttcggcaaaaacatccgtgatggaactgacaattggcatggcatctgaggaacttggctgtggttccgacagctcatctccggactttcggtgcggtcgcttatccttcttggatccttttttgtccttctcctgaccgcgagacttgcgcttcttgctggaagctgaaaaaattggagttagtgggtgcttaagtatgatgagcatatccatcataccactggatgtggggagtgtgacctcttggagcttttgcagcacttcgtgcagccaggtgacaaagaggtcagtttgatcgcctaggaatagattcagctcggcgttcatctgctgtttggtgcgcttgttggccaccatgaccatgacgtagtccggcaattcatcgtctataaaaccggccgatcctccggttcccagctccagcagctttgcctttacggcgctctattaatgaagtgcaaaaatatatatagtattggagtatccaatccgagcggtatccataacgagttcattgatttttttccaatgacttacgcgcatcttctgaccaatctcgctgcccagattgcactccatgtttgctggtttatctatcgcctttttcgctgtttattcgccgcgagcatttattatttacgcttactttgtggctacactccactttttgttacattagaaaatggcaaaacctcccaaaaaaaaaaaatatcgcagctgctccgatattcataactagtggtgtgcgtttgacattaagggtattcacgtttaattcacacgttttataatgtatatatcgattttctataaacatagctttaaaataataaatagttacagaaatttcatttgaaattaaaatggcaaattaaaaacttctgaaatttaaaaatgctcctggccatggccatgaactgaagtgcaacataacttcaaaataatcaacaccaatgggacaatttaaaaatataaaaagatttcacttgttattcattaaatcataagtctagttatcaagaatttgtgtagtagctattaaattacattcgaaaattaaaagcgaataattgcaaacagtttatttaatcacatagctaaatataaatttcataataagcttaaattccaaaccaatggctacgaatatgtttgactgagaattaaaattctcaatttgaagtaaatatcttagattgtagaatcctgcgaagcatttcagtgcatcatctcaaattcaaatacgaaaattggctccttcggctaagactcgatacccatcttgtgagccccgccaccaactatcgatacgcaaaggcatttcattcggtgggaatggcaatcgagtgtcacacgggaagaagaagctgcgaaaagaattttagaagaaagcaactgcaattttgtcataatcggagctgcaattcgcaatgaataatggaaactagacaacccagttccggtgatgatctaaagccaggtgcgtaccgcccggtggcgcagcgagtgcgtccaacggggctaccaaaggcagcccctttgactttgtgaaatgtgtgtctgtgtttcgctcgcccttcgaatcgaatggctgcgttttttcgactgcgtttcgccaagcgaaattcacgggcccctttggccagatatatctggaatattgacgactcccagcgagcgcattttcgacaacttgttgcactaaaacccgtgaaatcctctatcttgcagagctgtacttcc

SEQ ID NO: 12029 - DNA, 3503 bp, DROSOPHILA
accactagttatgaatatcggagcagctgcgatattttttttttttgggaggttttgccattttctaatgtaacaaaaagtggagtgtagccacaaagtaagcgtaaataataaatgctcgcggcgaataaacagcgaaaaaggcgatagataaaccagcaaacatggagtgcaatctgggcagcgagattggtcagaagatgcgcagcgccgtaaaggcaaagctgctggagctgggaaccggaggatcggccggttttatagacgatgaattgccggactacgtcatggtcatggtggccaacaagcgcaccaaacagcagatgaacgccgagctgaatctattcctaggcgatcaaactgacctctttgtcacctggctgcacgaagtgctgcaaaagctccaagaggtcacactccccacatccagtgcttccagcaagaagcgcaagtctcgcggtcaggagaaggacaaaaaaggatccaagaaggataagcgaccgcaccgaaagtccggagatgagctgtcggaaccacagccaagttcctcagatgccatgccaattgtcagttccatcacggatgtttttgccgaagagcttctcgagaaggcaaagaaaaccatggacattgatctcagtgccaaagacgagatcctgcacaaaaagaaaaatcgcaagtccatcgaggatgaggatgcatcggccaatagggcgctggatgtgcccgctgtgtctgagatcatctcaactactatcggtgttaaccggcaaaaagacctcgctgagctggccgaaatccaaaagaaaattcatgcagccaagaagcatttacgccagattggcgagatcggggatgaaagcgatgaatatgatgaggatctgttgaacttgagcgcgagggaggagtctgtagaccaggagccagaagaggatcccccgaaattggaggctccaccacgaaaagctaagagccccattatttttaacagacgcgagaagacacccgaaaagcgtccagaggctgaaccggagatcgattcccgccaggaggaggcggaggagaagagccccaaaaaagattcttcggctgacaaggccaaggaagaccggtctgaaaggcgatcggtgcatgaccgtctcggttcaaaggcccaaacgccggcagatcgttcgcagcgcaaccaaaaggagctctatgtgccgacccatcggcgacggagcgaacccgaggccaccaaagagcgcagtcaaagagagcgcacccgagaacgacgctccagccgcgatacctctagggacactaaccgtaatcagcgccagcgtcgttcgcctagtccggaggctccaagtacaaagcaacgcattgtctcccaagttattgtggccgttaacaagccaccggagccgtcggacgatgaggatatggccgaaaagccagtcaactccgttattaaggtcaagccaagaccaaatgtttctcccagacgacaggcctgcaagaacctcctgctgcgagcagtggcggacgcgcagcgttccacaatcctcgccaagacttcgacacagaaggaggacgaggatgtgggcaagatcataagttctctaggcaagcgcaagtcggaggataagaatgatcagattcgtaaacggaatcgcgagaggaaacgaagaaagagaagtgcacaaggcaacgaactcttccggcgcaccactcgggaattagtggtaaatgtgacacaaagggatggaaagcgtgaacggcggtccaacgagcgtcgcgccgagatcaaagtggtggaggaagaatatacgccaagcctaatgactgagggcgtcgagacgtatgtgccgcaattgctgaccaacgtggatgaattggatttgcacatcagctcccacgacgagccaagtcccaattccggagccctcaagactcagtttgtggtcacgttaaacggcgacaaagctctcggaggtaagaatgtcaagggaggggcctctcgcaagcggccgagcaactctcgtaaacgatccacctcacccgtatccacgccacaagtgtcctcctctaatattgagcccacatctacgacggttgacaagcgacgccgatccaatcgggatagaagcttctcgccatcgccgagacagagcagtgggtcaccctccctgccgacaacacgcagcatcaatcgcaacgaggtacgccgtcagcctcaggaaatcaagaagatcatcataaaaaatgacaccgatgaagatgatgaaatgcacgggtcaccgaagaaacgatcaccaaacaagcgccagccagcggcggccaatggtcacaaggacaataaggataagggtaaaatcgaggaaggctcaacaactccaccgctgccagccaaaccaaaggcgcgggcggagaagaaagcttccagcaaggagaaatccgtaagatctaattcagcggagacgtcatcggccgccaaatctgtcagtgcgtccacttccgtttcgacaactaccaaagccaagcacacgcccattcgcttcactcttaaaagtgaggacgagccgagtgcgagtaagaagcgtcgttctggcagccccgatcgtgatgtcgcggctccggagagacgcagggtatccatacgcaatccggaggacaggaaatacgacaacttgccggcgttgagcgcagttagcgtggattccaccgtgctgaaggtgaacaaacccaaggagcgctgcaaatatcatccaaactgcacaaagcagttctgtgagtactatcatccaacggcgccgtgcaagtctttccccaactgcaaattcgcggacaagtgcatgtactcgcatccgaagtgcaaattcgacatggcctgcatgagcatagactgcaactacgcccatggcggtcaaagggatctaagccatgtccagcttgctgctccaccactatcctctcacgtcatcccagtgcagaactacaagtcgatatcggctcctgttacatccacgactgcgactaccatgtgcaagtactatccgaattgttccaagctgggctgcaccttctatcatcccaagccctgccgcttcggcaagaactgcgtaaacaagctggagtgcatcttctaccatcctgagatgcagagcaaattcaagtgggtggcatctttgggctaatgtggactgcactttcgttcaaatgatatttagcaaatgtactctatttcgagtgtatgattaggcgagcttggagttttttctatctatatacaccgagttgtataccttacctatttaatcttcattattatttgcattcatcctactgcttataattataaacatgtgtattagtcattagaagctcgctcacatacatgataaacataacttaactttgttggtcctgcgaatttggttgcattcaaaccataagatacacgtcatggtaaagctgacgaataaatttagcaatagttgctacaaatgaaaaaaagaaaa

SEQ ID NO: 12030 - protein, 1004 aa, DROSOPHILA
MECNLGSEIGQKMRSAVKAKLLELGTGGSAGFIDDELPDYVMVMVANKRTKQQMNAELNLFLGDQTDLFVTWLHEVLQKLQEVTLPTSSASSKKRKSRGQEKDKKGSKKDKRPHRKSGDELSEPQPSSSDAMPIVSSITDVFAEELLEKAKKTMDIDLSAKDEILHKKKNRKSIEDEDASANRALDVPAVSEIISTTIGVNRQKDLAELAEIQKKIHAAKKHLRQIGEIGDESDEYDEDLLNLSAREESVDQEPEEDPPKLEAPPRKAKSPIIFNRREKTPEKRPEAEPEIDSRQEEAEEKSPKKDSSADKAKEDRSERRSVHDRLGSKAQTPADRSQRNQKELYVPTHRRRSEPEATKERSQRERTRERRSSRDTSRDTNRNQRQRRSPSPEAPSTKQRIVSQVIVAVNKPPEPSDDEDMAEKPVNSVIKVKPRPNVSPRRQACKNLLLRAVADAQRSTILAKTSTQKEDEDVGKIISSLGKRKSEDKNDQIRKRNRERKRRKRSAQGNELFRRTTRELVVNVTQRDGKRERRSNERRAEIKVVEEEYTPSLMTEGVETYVPQLLTNVDELDLHISSHDEPSPNSGALKTQFVVTLNGDKALGGKNVKGGASRKRPSNSRKRSTSPVSTPQVSSSNIEPTSTTVDKRRRSNRDRSFSPSPRQSSGSPSLPTTRSINRNEVRRQPQEIKKIIIKNDTDEDDEMHGSPKKRSPNKRQPAAANGHKDNKDKGKIEEGSTTPPLPAKPKARAEKKASSKEKSVRSNSAETSSAAKSVSASTSVSTTTKAKHTPIRFTLKSEDEPSASKKRRSGSPDRDVAAPERRRVSIRNPEDRKYDNLPALSAVSVDSTVLKVNKPKERCKYHPNCTKQFCEYYHPTAPCKSFPNCKFADKCMYSHPKCKFDMACMSIDCNYAHGGQRDLSHVQLAAPPLSSHVIPVQNYKSISAPVTSTTATTMCKYYPNCSKLGCTFYHPKPCRFGKNCVNKLECIFYHPEMQSKFKWVASLG

SEQ ID NO: 12031 - DNA, 3212 bp, DROSOPHILA
caataaatacaatcccgcctggcaattactttcgcacaccaggcacggccaacccagttttatcgttatctatacggagaatctacggatcgtaggcctcgcacagtggcacacttacacacactcgcagtcacaaacacaatcacactcattcactcacacactcagtcagtcatctcatccatcatggcacgtattcgcatttgtcgtgcgaaggtgggcagagaaattgggctcccttagaaaagaaaacacaatggcagcccagagatccgcagacagacatcaaattatattcgaaattgccattgtttgcagagtggagagactgctagctcatcgggagttttcctacaattttcactttcgttgagagcagaagcgtgcagaaattttccaaattcgaccccagaaaagcctccgttcgccaggccagctgacgctgaagtgagggatcggttataacccagcagcggcaaaagcagcggcagcccagcggcgatgagagcgaaagtgcacgacactgggtctcgacttggccaaaatgtgtggccaaaacgaggagctcgaagagagagagaaagagagagagagagagctctccagcacatccacatccgacagcgggaaatcggcggtgctgtaataagttgattgtgcggtaatttcggtttcacttgccatcccacacagacaggcagacggtaaccccacagatacaagtaagctgggagttaaagatacagatacttttgcagacagagacacagacagatggccaagacagcgtctcattattggcctgctcgccacgcatgcgcagtgcccagaaagcaaagtcgcatcatcatcaccatcaccaaaaaacgaaaaacccaagccgaaacggagaccctctcgcagttacaacaactgctgatattgtggtagtggtgctgtgcatctggctggatttctgtataaattggtgatgcggctgcagtggttcgtcagtgaagcatttgatttggtctaataaacagcagccgagtgcaatccgaggatatagcaacgtgaggcacttgaagctttgagttaacccaaaccgtataactgaatccccgtcttgtttctgttcttcccaaacaaaaatcattgcatctacaaaaccacagaccgaggattactgtgacatagtgccgagtgctaaagtgtgtgcgttgtgaacgaaaaatccgtgaatccccatctagtatccataacccatacgcaccgttgacccgtgattgttcagccatgaaagccttcatcctaatgtcctgcctggcgctggccgccgctcgtcctgaagccggatacaactacaaccgtcctggtggcggcggtggctctggcggcggctccggcggtggcctgggcggtggattcggaggtggctccagcggcggcttcggcggcggtattggtggaggattcggtggtggattcggcggtggcagcggcggaggaggattcagcagcggcggaggcggtggcttcagcagcggcggtggtggaggcggaggcggtggattcggcggtggattcggaggcggctccggcggcggctccggcggcggtttcggcggaggtgcgtgggctttacacccaggatcacttccgaatgtaatcctaatttaacaaaacataatattgttcacccacaggtggcagcattggcggattcggaggcggcggcggtggtggtggtggcaccaccttggtgcagaagcacatctacgtgcacgtgccaccaccagagcaggaagaagtgcgccagcgccctaacctgcccattggccagtcccagaagcactacaagatcatcttcatcaaggccccatcgccaccatcgtaccaggctccggtcattcccctgcagcctcagaacgaggagaagactctggtctacgtgctggtgaagaagcccgaggatcagcaggacattgtcatccccacgcccgcacccacgcagccatcgaagcccgaggtgtacttcatcaagtacaagacccagaaggattccagcggcatttctggaggaatctccggctccactggtggcttcacccagaccaacaccggcaatggttacacctctggcggcgatggtggcttcactggtggagacagcggctccatctcggccccgtccagcaactacggaccacctggaaagtccggaccctactaaatggatcttcaacccatcgtgaactcaaaattgcgaacttcgaactcggcccaagctgctgactagtcctgtcgttgacacgcccccaaactctcacatttgagtaccacatcatccacatcacattaaccacctcacgatcttcgaccaccatgtgtccctgaattatctcagatttgcatcactccttttaatcgagggggcggcgctttcgcccacgacttttgtacataatacgtttccatttttccgtttccactcactctgactatccacctttttgcatctgtacatttttcaccttcaactaaattagagtctaaccttcagccctgcctggaaaattctattagctaataggcgacaagtgcgggttccttggatggtaacctcacctggcgcccggaagagcgaatgatgatgatgatgatgatttgtagcagaagatgatttagcggggcctgacttgctccatacatataaatacatatactttaattatactaggcttaagtacgttatgcacaaataaaaaaacaacggtgacaaaattacgaaaaaaaaaacactaagatattttaatttcacactctagaagctaaaaggtacttagtagtcaagggaactccttagctgaccctgtagttgaactctggggtagtgaactaatgaaaagttaatttcatgcttctgttttcttttcgatagattttacttctttctgtggttggatagaaactaagaacccagttgaccagcaatttaaatccttataattaatttgaatcttttcttggccaagttttcatttgaactttcagctaagttgcggtggaaagtgtgccaaaactttaaaacgcttttagtggctccagttgcacaatcgcaagaagttgctattttattacaagtttccaggaaagaggcaggaagatcgttcgcctgaagtttgttaatgacaaactgttgctccgggttttccctctcattaccaactgct

SEQ ID NO: 12032 - DNA, 1034 bp, DROSOPHILA
tttgatttggtctaataaacagcagccgagtgcaatccgaggatatagcaacaccgaggattactgtgacatagtgccgagtgctaaagtgtgtgcgttgtgaacgaaaaatccgtgaatccccatctagtatccataacccatacgcaccgttgacccgtgattgttcagccatgaaagccttcatcctaatgtcctgcctggcgctggccgccgctcgtcctgaagccggatacaactacaaccgtcctggtggcggcggtggctctggcggcggctccggcggtggcctgggcggtggattcggaggtggctccagcggcggcttcggcggcggtattggtggaggattcggtggtggattcggcggtggcagcggcggaggaggattcagcagcggcggaggcggtggcttcagcagcggcggtggtggaggcggaggcggtggattcggcggtggattcggaggcggctccggcggcggctccggcggcggtttcggcggaggtggcagcattggcggattcggaggcggcggcggtggtggtggtggcaccaccttggtgcagaagcacatctacgtgcacgtgccaccaccagagcaggaagaagtgcgccagcgccctaacctgcccattggccagtcccagaagcactacaagatcatcttcatcaaggccccatcgccaccatcgtaccaggctccggtcattcccctgcagcctcagaacgaggagaagactctggtctacgtgctggtgaagaagcccgaggatcagcaggacattgtcatccccacgcccgcacccacgcagccatcgaagcccgaggtgtacttcatcaagtacaagacccagaaggattccagcggcatttctggaggaatctccggctccactggtggcttcacccagaccaacaccggcaatggttacacctctggcggcgatggtggcttcactggtggagacagcggctccatctcggccccgtccagcaactacggaccacctggaaagtccggaccctactaa

SEQ ID NO: 12033 - protein, 286 aa, DROSOPHILA
MKAFILMSCLALAAARPEAGYNYNRPGGGGGSGGGSGGGLGGGFGGGSSGGFGGGIGGGFGGGFGGGSGGGGFSSGGGGGFSSGGGGGGGGGFGGGFGGGSGGGSGGGFGGGGSIGGFGGGGGGGGGTTLVQKHIYVHVPPPEQEEVRQRPNLPIGQSQKHYKIIFIKAPSPPSYQAPVIPLQPQNEEKTLVYVLVKKPEDQQDIVIPTPAPTQPSKPEVYFIKYKTQKDSSGISGGISGSTGGFTQTNTGNGYTSGGDGGFTGGDSGSISAPSSNYGPPGKSGPY

SEQ ID NO: 12034 - DNA, 3536 bp, DROSOPHILA
accgttagcccttagtataattcagttccttttaactcccattagttcgctatagctttttgtgtaccgtgttttttccatacttttaaaacaactttttttgttgggtgaacctgcaaactgtttcattttcagggtaagggtctaatgagcacctactggctgacctgcaaggacggaccggttagggctcgcgaggagatctcgtggcgggcggacatacagcccgtgtttcttgaccacctgaagctgcatccgccaaccgactacaagctgccaaagcggaaatgagatgcaaccaactgcaagttttccggctaggccaaataatgcttatcctggccataaattcgaggtgcttttcttttggatgtgcatgcattagtgtcccgctctctcaatctctctatttaaatatctaagtatctttcctttctatcaaaaagttgaagttacacggtgcaccaagtgtagataaaatatacaacataaaattcgtcttaattttaaattcgcttcaaaatataataattaaatcacttccttgaaaaaaagtggaagtgcaactgatgcatcgtgtacaacaactttaaacgcttcaatggccaatcgtctttttacatgtaatacacagtgcaaatcacaagcatgcggccaaaatacagacttatgttaataaaaaatatgcgagaaatacattgttaccattcgttttccaaccacagtgatgggacatatataaagaaacctaaaatcttttctttcacttctttagttataaaataaggttataatttattttttatcaaattcggtgttagtattaatacaacaatttttttgagtgttcaatggtgagttttattaaaccgtacaacgatatgtatcgaatgtaaatcagctggaagtatgaccgccctgcgaagtgcgatagtgtgaccgcagccactaaattcgaactgtgcctgtgtgcctgcgtgtgggcgtgtgtgtgtgtgtgggaagttacagagagaacaaagtaaaatttgaaaagttaaagctgcagctgctgagggcatagccaaaattggacgaatcactgccatggccaaggttatatcgcaggacaccttcgacgatgttgtgaaggagaacgttgtggagttctcgatgactccttcggaggcgaaagaagagaccatcaagcaattcgaggcacaggtaagtaatgtcgacatagtcatccagtagattcactttaatgaaatgattgcagggcatcaacctggccaacattatcaaggacctgtccgtcaatccgcaaaccggccaacctgtcatcaacgaaacggtggacaagatcaaggagcacattggccaaaaactggaggaaacaacggagctgctggaacagctggccaccttggatgctgagtgcaaaaagtcgctagcccatagggttctagccggcaaaaatggagcccacgatgccctgatcaccctgttggaggagacgctctctgctgagtcacccaacgaatccgtgttaaaaaagtccttggaagccatcaacagcctgacccacaagcagccggatctgtttgatgccgaggcgatggccgtggttctcaagttactggccctcaaagtggagagtgaagaagtcaccctgttgactcttcaatggctgcagaaggcctgcatcatgcatgaaatgaaccgccagaatatcatgaatacctccgcactcaaactcatgaagccccttttagggaaagggaaggaccgcctggtgcgtgaactgaccgccgtcttccgcttcctagtgctggatgatgacattcgcgttgagtttggatgcgcccacgagcacgcccgccaaatagcaggcgaggtgctcatcaccttggtggaacttttgccggcctatcaggatcctaatgttctggctgatcttctgctgaccattggaacactggctgtgcgtcaggaactctgtacagctatcgacgaggctggtggactgaagtccgtcttcgagatcatgagttcgaatttggatgaggtgcgtctaaatagagaggccttaaagttgctacgtgccctggctggccaagactccgtgaagtcacatatagtacagcagggcgtggctcctataataaagcaattgctagagacgcaccagtccaatgaaaacatcgttgccgccgctttggcctgcgtgactactctgacactccgagtgcaggaacacagtgccgcctttttcgataccggcatcgccgaagtaatcgtggaggctcttcgcgcccatcccaaacacaagatagtccagcgaaacggagcgtgggccatccgcaatatggtgtcacggtcgcggaaccagtgtgaaacctggatctccttcggcgttgaggatctactaaatatggcaatgaaggagcaccccagtgtggagcaggacatcaaggcggcgttgcgcgacctcggctgtagtgtccacttgcgcgaggaatggacgggcacggcggagaaaaaaattgccgcctaatcgcacacacatatgccttttgtatttttatatatttactgctaaattattactattgcttaattcatgcattggctaactaacaaaatcggcaatcctcaataccaatcgcgtgctaatacccaactggggcagtctcttatgatcacatggctgtggacttatttgcccaggttaaagttgcgcagcgagccggctttaagacgctggttgacattccgggaaagggcggtcgaggatctgattgtggaaagaccctcttcctcggcgcgctgcgcaaaggggtcaaccttctcagaaccgcccattccattgtagacaaaatttgagcccgtcgtggccgtcaacgcagaactacttgaacttcccagcagcagtcttggcttcttgaagattgaatactgggggaatatacggaatttttaaatggttaagtggaattcggcaaaattattgcgtttaccttttcactgagatcactgctggttttccgtatggttccgctggtcatagacacaccgccaccgactcccttgatgggcgatattttagacttggccagcccaatgttacccttagtattaagaagatgcgccaacccgacgctgctggatttaatgttgagatatggggaggtggattcttcgatgcgcttaatattctccttctgtagggcagcaaaatattagtagcttatattttcgtttattcgtgtctactcacaactgtaggggaaatagtggtacgcctttcctcccttttaagggccaaaatgttgctgttcagaccacaagaggcatttggtgagtccaagtaagcggtcttgttctcaaaagcttgtagctgaaaagataatagtatgtttaatcgaaattgtgttaaagaaggctcagcaaaccttctcctgcgcctggtaaaggtcgctctccaggtgtgaaacacgctcttccagcttgctgcaatcgaatgagcacatatcaattataaaaaccacgtttgg

SEQ ID NO: 12035 - DNA, 1481 bp, DROSOPHILA
ggaagttacagagagaacaaagtaaaatttgaaaagttaaagctgcagctgctgagggcatagccaaaattggacgaatcactgccatggccaaggttatatcgcaggacaccttcgacgatgttgtgaaggagaacgttgtggagttctcgatgactccttcggaggcgaaagaagagaccatcaagcaattcgaggcacagggcatcaacctggccaacattatcaaggacctgtccgtcaatccgcaaaccggccaacctgtcatcaacgaaacggtggacaagatcaaggagcacattggccaaaaactggaggaaacaacggagctgctggaacagctggccaccttggatgctgagtgcaaaaagtcgctagcccatagggttctagccggcaaaaatggagcccacgatgccctgatcaccctgttggaggagacgctctctgctgagtcacccaacgaatccgtgttaaaaaagtccttggaagccatcaacagcctgacccacaagcagccggatctgtttgatgccgaggcgatggccgtggttctcaagttactggccctcaaagtggagagtgaagaagtcaccctgttgactcttcaatggctgcagaaggcctgcatcatgcatgaaatgaaccgccagaatatcatgaatacctccgcactcaaactcatgaagccccttttagggaaagggaaggaccgcctggtgcgtgaactgaccgccgtcttccgcttcctagtgctggatgatgacattcgcgttgagtttggatgcgcccacgagcacgcccgccaaatagcaggcgaggtgctcatcaccttggtggaacttttgccggcctatcaggatcctaatgttctggctgatcttctgctgaccattggaacactggctgtgcgtcaggaactctgtacagctatcgacgaggctggtggactgaagtccgtcttcgagatcatgagttcgaatttggatgaggtgcgtctaaatagagaggccttaaagttgctacgtgccctggctggccaagactccgtgaagtcacatatagtacagcagggcgtggctcctataataaagcaattgctagagacgcaccagtccaatgaaaacatcgttgccgccgctttggcctgcgtgactactctgacactccgagtgcaggaacacagtgccgcctttttcgataccggcatcgccgaagtaatcgtggaggctcttcgcgcccatcccaaacacaagatagtccagcgaaacggagcgtgggccatccgcaatatggtgtcacggtcgcggaaccagtgtgaaacctggatctccttcggcgttgaggatctactaaatatggcaatgaaggagcaccccagtgtggagcaggacatcaaggcggcgttgcgcgacctcggctgtagtgtccacttgcgcgaggaatggacgggcacggcggagaaaaaaattgccgcctaa

SEQ ID NO: 12036 - protein, 464 aa, DROSOPHILA
MAKVISQDTFDDVVKENVVEFSMTPSEAKEETIKQFEAQGINLANIIKDLSVNPQTGQPVINETVDKIKEHIGQKLEETTELLEQLATLDAECKKSLAHRVLAGKNGAHDALITLLEETLSAESPNESVLKKSLEAINSLTHKQPDLFDAEAMAVVLKLLALKVESEEVTLLTLQWLQKACIMHEMNRQNIMNTSALKLMKPLLGKGKDRLVRELTAVFRFLVLDDDIRVEFGCAHEHARQIAGEVLITLVELLPAYQDPNVLADLLLTIGTLAVRQELCTAIDEAGGLKSVFEIMSSNLDEVRLNREALKLLRALAGQDSVKSHIVQQGVAPIIKQLLETHQSNENIVAAALACVTTLTLRVQEHSAAFFDTGIAEVIVEALRAHPKHKIVQRNGAWAIRNMVSRSRNQCETWISFGVEDLLNMAMKEHPSVEQDIKAALRDLGCSVHLREEWTGTAEKKIAA

SEQ ID NO: 12037 - DNA, 4820 bp, DROSOPHILA
aatacgaaaacgttttaattctttccaaattgacaaactggcatcccacattaaagtgttgcaaaacaacggacgggctcagctgtttcgcccatcgccaaaatgttgttgttaaataagctgcccaggataacgcaactactcgccagagatcccaaggatcagcgaggcatctggggctatgtggctgtcgccttcaaccaggtggacgcggaacgtctgtcgaaagtgggtgccaaccgcctgtgcgccgagtggattattaaaaacggaggcggagtgcgctttgtggagagtccctccaggctgtggaaggattacaactcgttgccgggagagaacacgcagttctgcatcaaagtggtggacgcgtcaaattcgtcaatcatgaaaataggactggagcacttaaaggactgccggagcatcgatacagtcatcttccacaattgcaagcacttggagaacgatggcttggagggacttcatcacatcagcagctccctgcagcgactccaggtctccggatgttacaacatcacggattccggtcttgctgtgatcggggagctcaagaatctgcgacaactgctcatattcgatatgattttcgtgaagaacatggaggctgtagccgcctctctgaaaaaacagcttcccagctgtgatatcaaggctaccaagatgggcctaactctgaagcccaaagaataatccccagcagaacacgaacttattggtttggtccaataaaaccttttgcagtgttgagaaaagctaaggcttgcacagtgggtaaaaattgatttcaataagtttaatagtcataaacctcaaatgaaatgttattgcatataattaactccttcaattgatataaatatatttattgacacatgaactatatatattttagatttatcgattcattgctgaatttgcttatattattaacggtctatagccaacactgtcatatcagtatttttggttgaccgttatacggtcatgttatcttgggaataagagaaaaggacaatatgtgaaaatatcaataaaatgacaaaaataaagaatctgctgagttttgtgacccagtcacgggccatatcgcacaccaatcccagggaacatatacttaactgcctgacctatgggctactagtcattgtggcgctctgcgcgggttttctgctttgggatctctccagcagcccacgggatggattcttccatgggaaaagggactcgcacacattaatcctcgacctggagcacatccaggagcttgccgtaaatccggaggccgaacagcgggcacggaatgtaaactgcaccttctgggactgcctgaacatctacaaatgcgagcacgaccgcctaaaggtctacatctatccgctgcaggagtttgttgacgagcagagcgacaaaacggccaccaccctgtccagcgagtacttccaaatattggaggcggtactaaagagtcgctactacacgtccaatccgaacgaagcgtgcctctttctgcccagtttggatctcctgaaccaaaatgtcttcgacaagcacttggcgggcgctgccttggcttcactggacttctgggatcgtggtgccaaccacatcatctttaatatgctgcccggcggagctccatcctataacactgtgctggatgtgaatacggataatgccatcatttttggcggtggctttgactcttggtcttatcgcccgggctttgatgtcgccattccagtctggagtccacgattggtgcgacaacatgcacatgcgacggcccagaggaagttcctattggtagtagcccagctgaacattcttccgcgctttgtgaggactctgagggagttatctctggctcacagcgagcaattgcttcttttgggagcctgcgagaacttggatctcacaatgcgctgccctttgtcgcagcaccacaaatcgctggagtatcctcggctgctgtctcgcggtaaattttgcctgctaggtcgtagtcttcgcatgggtcaacccgatctagtagagattatgtctcagcactgtattcccgtaattgccgtggacaactatgtgctacccttcgaagatgtgattgattggtcattggcctccgttcgtatacgcgaaaacgaactgcattccgtaatgcagaagctaaaagcaatatcgagtgttaagatagttgaaatgcagaagcaagtgcagtggttgttctccaagtacttcaaagatctgaagactgtgacactaactgctcttgaggtgctggagagtaggatctttccgctgcgagcccgtagcagtcgtcagtggaataccattgataccaacgcccgttccacattcaatccccttttcctgccgtcgctggcaccaaagtcacagggcttcaccgccgtcatcctcacctacgatcgcgtggagagtctgttcctgctgattcagaagctcgctgtagtgccatcattgcaaagcattttagtgatttggaataatcagaaaaaatctccaccgcactgtgagttctttaaaagtccacaactacaacataagtaataatccctaatatatttttattttagtatccacctttccatctatatcgaaaccgctgaaaattcggcaaaccaaggagaacaagctatccaatcgattctatccatatccagaaatagaaacggaagctatcttaaccatagacgatgacatcataatgctgaccactgatgagttggattttgggtaaatataagttgtattttaagataattcgttacgaattattatcattattttgtagctatgaagtttggcgagagtttcctgatcacattgttggctttcccagtcgaattcatgtttgggaaaatgttacgatgcgctggcactacgaatcggagtggacgaaccaaatatcaatggttcttaccggcgctgctttccatcacaagtactggagtcacatgtacacacatgccatgccgggtgatatcaaggattgggtggatgagcacatgaattgcgaggacattgccatgaattttctggtggccaacatcaccaacaatccgcccattaaggttactcctcgaaagaagtttaagtgcccggagtgcaccaatacggaaatgctctccgctgatctgaatcacatgcgtgaacgttcggcttgcattgatcgcttctccaaaatctacggccgcatgccacttcgcacggtggagttcagagcggaccctgtgttattccgggacaatttcccggacaagttgaagcgttacaatgatattggtagcttataagggtccttagctttgaggccaacattccagaggaacctatgcagatataccaaagacttctgagaataccgctcaactctaatggaaatctaatgttcgtttatatcatagcaataccttcttaacggataaagaggccaacttatctggatctcgcttagaaaatcaatttcgtcattgggatgtgatagagatgactattgtaggcaggtccggttgtattcttttgacttctcattggtactcaaaaatccaattattccgtttggattctcacgtatttgtcaaaatagtttaaatatgctttagaacaattaattgaattaacgtccgttctttggacttattataagttattattattgtagttgtaggtcgtaatattggcagcttttatctagactttattttgattttaaatcaataatttaaaaaactgaaactggcctgtaaataagaattaaaataatcatatcatagaaaaattattttattagatggattgcttcaagctgggaactgaaatctcttgcattaactaaatggtacgttttcaggattttaaatcggataaatgctaatatcattaacatggtggctctgatcttaggtctcaggctttctcaattgatgccaaatactcattgtaacgctgttcctgctgctgttggagtttctgcagcttcttgatctgtcctttactgacttctttgccctccttgtcgtgagtgggaaggccctacaaaaaatgttttaaaatagtagcatattttgaacataggttttaatattgcgtgtcttacattttcgtcgaacgctgagtacttttcggtttcggccaggaacatttccttgggattcacacgtcgctgggcttctttcgcagctgcagcctccgcagccgcctgcttcttgcgctccttttctgctgccttctccgcttcggcggccagctttgcctcccgttctcgtaaaagtgagtcgcggtcgactagctttacggcatactttccaatatccttgtcctccagtcgcacgcccaaattgggcagcacattgtcgcgtagatcatcgcagagcttcaggatgtcgaaggccttcagagttttggcttgctcccgcaccaagtagcggaattcagccagcgattgaacgtaaggcaaaaccgtagtttctaaatccgcgccggcagcttgtgctcccgagccaccactaacggggaagccaatgccaccgcgaggaccagatattgcgccaaacacgtgcaacagatcggtgatatatgtggctacgtttcggagcagcagactgttgagtctagtcttattgtcgcgaatgtagacattggacacggataccagctctcgaatggcgtcaagggcgctgcgagtatcaatgttgtctgcgggcatagatagagcaatattatatatttaagggcgatttaatcttttgattactcaccacacaagctggcgtgtactt

SEQ ID NO: 12038 - DNA, 2698 bp, DROSOPHILA
atacggtcatgttatcttgggaataagagaaaaggacaatatgtgaaaatatcaataaaatgacaaaaataaagaatctgctgagttttgtgacccagtcacgggccatatcgcacaccaatcccagggaacatatacttaactgcctgacctatgggctactagtcattgtggcgctctgcgcgggttttctgctttgggatctctccagcagcccacgggatggattcttccatgggaaaagggactcgcacacattaatcctcgacctggagcacatccaggagcttgccgtaaatccggaggccgaacagcgggcacggaatgtaaactgcaccttctgggactgcctgaacatctacaaatgcgagcacgaccgcctaaaggtctacatctatccgctgcaggagtttgttgacgagcagagcgacaaaacggccaccaccctgtccagcgagtacttccaaatattggaggcggtactaaagagtcgctactacacgtccaatccgaacgaagcgtgcctctttctgcccagtttggatctcctgaaccaaaatgtcttcgacaagcacttggcgggcgctgccttggcttcactggacttctgggatcgtggtgccaaccacatcatctttaatatgctgcccggcggagctccatcctataacactgtgctggatgtgaatacggataatgccatcatttttggcggtggctttgactcttggtcttatcgcccgggctttgatgtcgccattccagtctggagtccacgattggtgcgacaacatgcacatgcgacggcccagaggaagttcctattggtagtagcccagctgaacattcttccgcgctttgtgaggactctgagggagttatctctggctcacagcgagcaattgcttcttttgggagcctgcgagaacttggatctcacaatgcgctgccctttgtcgcagcaccacaaatcgctggagtatcctcggctgctgtctcgcggtaaattttgcctgctaggtcgtagtcttcgcatgggtcaacccgatctagtagagattatgtctcagcactgtattcccgtaattgccgtggacaactatgtgctacccttcgaagatgtgattgattggtcattggcctccgttcgtatacgcgaaaacgaactgcattccgtaatgcagaagctaaaagcaatatcgagtgttaagatagttgaaatgcagaagcaagtgcagtggttgttctccaagtacttcaaagatctgaagactgtgacactaactgctcttgaggtgctggagagtaggatctttccgctgcgagcccgtagcagtcgtcagtggaataccattgataccaacgcccgttccacattcaatccccttttcctgccgtcgctggcaccaaagtcacagggcttcaccgccgtcatcctcacctacgatcgcgtggagagtctgttcctgctgattcagaagctcgctgtagtgccatcattgcaaagcattttagtgatttggaataatcagaaaaaatctccaccgcacttatccacctttccatctatatcgaaaccgctgaaaattcggcaaaccaaggagaacaagctatccaatcgattctatccatatccagaaatagaaacggaagctatcttaaccatagacgatgacatcataatgctgaccactgatgagttggattttggctatgaagtttggcgagagtttcctgatcacattgttggctttcccagtcgaattcatgtttgggaaaatgttacgatgcgctggcactacgaatcggagtggacgaaccaaatatcaatggttcttaccggcgctgctttccatcacaagtactggagtcacatgtacacacatgccatgccgggtgatatcaaggattgggtggatgagcacatgaattgcgaggacattgccatgaattttctggtggccaacatcaccaacaatccgcccattaaggttactcctcgaaagaagtttaagtgcccggagtgcaccaatacggaaatgctctccgctgatctgaatcacatgcgtgaacgttcggcttgcattgatcgcttctccaaaatctacggccgcatgccacttcgcacggtggagttcagagcggaccctgtgttattccgggacaatttcccggacaagttgaagcgttacaatgatattggtagcttataagggtccttagctttgaggccaacattccagaggaacctatgcagatataccaaagacttctgagaataccgctcaactctaatggaaatctaatgttcgtttatatcatagcaataccttcttaacggataaagaggccaacttatctggatctcgcttagaaaatcaatttcgtcattgggatgtgatagagatgactattgtaggcaggtccggttgtattcttttgacttctcattggtactcaaaaatccaattattccgtttggattctcacgtatttgtcaaaatagtttaaatatgctttagaacaattaattgaattaacgtccgttctttggacttattataagttattattattgtagttgtaggtcgtaatattggcagcttttatctagactttattttgattttaaatcaataatttaaaaaactgaaactggcctgtaaataagaattaaaataatcatatcatagaaaaa

SEQ ID NO: 12039 - protein, 717 aa, DROSOPHILA
MTKIKNLLSFVTQSRAISHTNPREHILNCLTYGLLVIVALCAGFLLWDLSSSPRDGFFHGKRDSHTLILDLEHIQELAVNPEAEQRARNVNCTFWDCLNIYKCEHDRLKVYIYPLQEFVDEQSDKTATTLSSEYFQILEAVLKSRYYTSNPNEACLFLPSLDLLNQNVFDKHLAGAALASLDFWDRGANHIIFNMLPGGAPSYNTVLDVNTDNAIIFGGGFDSWSYRPGFDVAIPVWSPRLVRQHAHATAQRKFLLVVAQLNILPRFVRTLRELSLAHSEQLLLLGACENLDLTMRCPLSQHHKSLEYPRLLSRGKFCLLGRSLRMGQPDLVEIMSQHCIPVIAVDNYVLPFEDVIDWSLASVRIRENELHSVMQKLKAISSVKIVEMQKQVQWLFSKYFKDLKTVTLTALEVLESRIFPLRARSSRQWNTIDTNARSTFNPLFLPSLAPKSQGFTAVILTYDRVESLFLLIQKLAVVPSLQSILVIWNNQKKSPPHLSTFPSISKPLKIRQTKENKLSNRFYPYPEIETEAILTIDDDIIMLTTDELDFGYEVWREFPDHIVGFPSRIHVWENVTMRWHYESEWTNQISMVLTGAAFHHKYWSHMYTHAMPGDIKDWVDEHMNCEDIAMNFLVANITNNPPIKVTPRKKFKCPECTNTEMLSADLNHMRERSACIDRFSKIYGRMPLRTVEFRADPVLFRDNFPDKLKRYNDIGSL

SEQ ID NO: 12040 - DNA, 6096 bp, DROSOPHILA
ttttgctgcaaatgagaaatgcatcagtctggtacttaaggcaatgtgtatacaaaagcatacaggcacttcttttgtgtttccttcagatcccgaatctgctgttcatccttgttgcgctctttttcgaccattttcatggacaacatcgcattgtccagctgctcctgcagtgaaccaacatcgatgtggctcacatccaagttggccagattgaaatagaccctaaatatgttgcgggtagtgcacttattccggcactgaggacaggtctttgatctgcgaaagatatttgattttattgtcgggaatcagaaatatccttatgcgttgtttaccgatcgagccattgatttagacagttgtggtggaacatatgaccacaaactgtggcaaaaacctcgtcggcctggccaaacaattcggcgcatatcacgcagtttaagttcaacatttttggcacaaataactacataaaaatagttattacaaaagaacaacaaataaacgcacgccgaacagtttgcgcgcccaacgaaacacagctgactgatggcgattttacgatgctccaatgagcggaattcaccacaccagtatttgtcaagaatcgattgtagacaataactgttagctgatagatatttccacgacaaactaattgctaactaacttggcttaagtcgaaacaacaaataatgtttacaaatacgcttactcagccactgaaactaaaattcatcctaaattttagaaagatatgtatgtgtggatactttttaaaccctacttcttaagatatactgtggatataaatttcatattttattctgccaatccatcttaaatccagctacttatgctccgtactttagccccatggtggtcttatcgataacagcgggagcactgtggcgctatttacgaaagcacaccgtgtgctttcgatatcgcgacaatgctatctagaggtggagaaacatcgatgttttaaagaacacaacacatcgatgtttttccacctcttttaaaagtcgtcaaatagcaataataaataggaatagttataaatttgtgcatttaatttcgttcgttatttgcgtttcaatcgaccgtgggtcccagtgagctaactgcacctgcacccaaagcggaagctgagcgaaaaggtgtttcatttggcgtgcgcatttcgacacctttgtcaacgctgattcttatttggtggaccgacgactcacacacacgcgcgtaccaatataacagacactgaagtgtgtgtggaagggacagacaaacaaccgtgcgataacaacaacaaacggcagtgatcgcggcgagaaatggaaatggccaacaacatggtcagcagcagcaacagtggcggcggtggcagcagcaacaccacctcctacggcaacaacagctacaacaacagtgcggtggacagtggtcacagttcgcacagtggtgtcggtagcgggggcggtggtgagggaacgggagcgcgcctccgggatgtttgtaccatcctgaacactggccccgccgcctatcaaaatcaaacaggtggctatgcctacgaccacatcatcgccctgatgaggaaccttgatctgcaggacgatggcattgtgctgaactccaagatcaagaccatcgaaacggacttctgcaacatagtgcgcgacgagtctatgctttggtatgtgtgccgatctctaccgtttggttggttcgctcattgatgattaatcatatcataagtagtgtgtttatttgccacctcttttcgcatatacatatggatgtatgtaaatacccggcgtaggtacagtgcggtgcgatagcatatgggcaaggcgagctcccaagcccatcaaagccagccatgtgataacaagacttaatgcatgcagtacatatctgcctggcgaagaccgatccttattgtaatatttatgacattccattacaagtagcatgagtaattcgttaaatttgggagcttgtggcgttcgcccataggttacagcattctataagttattccaataatgaaatgcttgaaatgcagaaaccgaattactaatcaagttcaaacgttaatttgtttttacgcgttcaagaacccttgggttcttaaagtgcaactttgtaaacttttcttcttacttcattatttttaggttcgaaaaagtttttgcgaccttctacatatacatttcaattttattaaatgtctaaaaatcgatttataaatctgaaaagcactgtatttgtgtatatgtgttcgtgcacgagttcgttgtttgcgaccaggttgctcgaacgtcagcgtgtcttgaaaatttacaacttttcatacaaataaagacgggcagagagacatcggcgccatcgaatcatttcaaagtgaacatttttccctccgattctctcaggctcatgctcgagttaattgctgaacaaatagttcgcagcttgggcttatcaaacaatgctgctatgcgttatatcagtgggggtgttaaacacagttgtagtgcaaactttaacattatgaagtagtagtagacttgattattataacatactaataaatgaaaagtaaataaactaattgtatttgcaattttcagtgagtcaatggagtacctgaacgacaaggcgcttagcgatggtgatacggcgctaaagttcgccctgctcttctcatcgagaaatttcgacgcactggccatgaaagagacgaaggtgcgcagcgccatgctcaagattttggagacaaacttcctcaacgcggacgcatatcggttgcacgacaagaaccgactgtacaactcgatcacgctgctgggtgaatattatcacagggtaaggctggcggataataccccgatcaccattttgggtgagtccctgctggacttgcttacccgcgagctcaatgacacgtcggtggtgctgggcactcggattgcccgcctggtgctgtcacagatcacactgaatggggagatcatgcgcaagcggcataaggtcgagattgatttactgctcttccacgttcgccggcatttgatcatgcagcccgcgctgaccgctaaggtgaaggccatgctactgatggtgctggacctcttttacagccactttaagcatatcggccacgacctggagacaatgtacaccaacttcttggtggtggaagatggcgaagaggatggggtcaacaataatggctccggcccccaggatctcgccgaagatggccgctcacagcagcttcagcatcaacagtcagagaacggcagcagcgccaacacgtccggccaggatcaggatacctttgaaccgcggccgtcggcaaagaagtggagcgagcaggtgtgcgaggattccttttgtgaaactggctacggtgaggcggatcagggcgacgatagatactccgaatctggactctcgtatcaagcgaataactctgcttcactcggccaccgtcgtcgcggattccaacctcggcaagtgccgcgtcctttgaagtcacatcaatcacaacagcagcagcaccaacaaccagccagcatagagtatgtaccaaatctttactatataagtgtaatactatttatagctgataatcaatcacaacttaacatgcatacgtttagaaaaagttctacgactgataggaatcttttaatatgatgaataattaaatttatgtatatatatacatatataacaaaatattgcaatttatttatagagacatatccaagattgattcaagtcctttaagtaagtcaaggataaaatatttattaacacctattgtttaaaaatgtcctaaatcctaatttacatttctttaattttgatttgaagcaatcgaaaatttgatttgaactgagtttcgagtatttaagtttaattgaggaattttaaataacattattttatttaatgtatgctttactgtagatattttggtaacacaaaagtatcgttataaaaaacgagaacttttatatttaatttattttcatttcattctaccgatatttatttaacgacaaaatattaaccacaaatttttgaacagcgccagctccgaccagtatccatccatggccagcagcgaggatcgggacgagagcaagccgctccctagctggcggaagacacgcttcaaccgcaatcacgacggcgaccagagtaacggacggtcgcgcgaccaacagcggcggtacagcgtgagctgcgacgatgaccaccacagcgtgcgcagcgagggaggcggcaacctgcgactgtatagcatccacgacaggaggaagcactcgcaggagcgcatcgaacgcaatatgtctggcggtggcaactataatagtatagtcaactcgaattgggatcaaagggatcgcgatgatcgcagtgagcgctcttatatcagtaactacgagcgcggaaacaactataagcgaggtgggcgattcaataaccgcaacacctacgacaaaccgccgcgattccagaaacaacagcagcaacaacaacagcagatgcaacagcaacatcagggaggcaaccataaaatacacagcgattcctggcgacgctcaaacaatgctataaacagtggctaccaagacgagaactgtgcgtacaactcgaatggtccggaatcgaatagtcgcagctcatccagggctcgcactctgccgagaccgccaaaatcgcaaatggataaatcaggcggctataggtacaatcagagccccacgcatgcaggcggtggtcctcgattcccgcgttacagcagccaaagcagtttggccagcgaagcgtccagctcgtttgatcgtcgccaacagacatcgccacaaaatccacatcagcatcagcaccagcggcaccgccatttcacacgccgctcccagccagacatccatcagccgcagaacgaggagaactggcaggggcaggcggataagggccaaccaccatccggaaaggaggaaagcgagctggtgcggaatgcccagcagaccactcagtacatgaactatttgtcggcccagaaatgagtttatacactttacgaagtcatccacatgtacgaaaattgtttttgaagtccgtttagaagttatttgtttcgccttcgtatatgtttcctaatggatgtgtatatccacgtagactgttttcacattattttgtcttcaactgagctcaaatgttaaaccaatacaaaacaatttagaccaatcacaaaacaaatccatctcaaatccaggcttaaagaatattaagcatgcatgcattacacattggagccactaaatttgtaaataccaattatatatatatgaatgtcttgtgtagtcccacacaaccacgccacataaacactcccacacaaaatacagtcacacacactcatttttatatttatatatacaaattgcttagaaactaagtacaaagtcaatgaaaaaacaaaaataatcctatttctattgaaaagtaaaacgcctgttggtgaaatgttaaaagcatgttgaacatataaaaatttgtatttttagctaaatatatacttatatattaaatgtcatgttatagtgcaggttcagccgatttattaaacgaattatacaagcttacgtatttttaaagcaaattttgtgaggccctctgttggaacaacaaagccaagccggagtgcagagaaaaacatgaattgtagagttatacgagtagtcttatatagatacttaaacctctttgtttaggtataatcaatatgttcgcaacatgcgtaggttcaaaacactaatcagcatataaatagcgtctaacacatttttaataaaacaaaaaaattgcattatcattaatcaaacattaaaacaaattcttttgaaaacttttgaaatcaccagcagaatgtcatagtcttacctccgtatttacatcacctgattggatgaatgtattttccgaatccttgtgggtgactcccctcgtcttctgcgtttccactttccagaacttctgtgggcaactctcggttgtgcatac

SEQ ID NO: 12041 - DNA, 2644 bp, DROSOPHILA
caacacatcgatgtttttccacctcttttaaaagtcgtcaaatagcaataataaataggaatagttataaatttgtgcatttaatttcgttcgttatttgcgtttcaatcgaccgtgggtcccagtgagctaactgcacctgcacccaaagcggaagctgagcgaaaaggtgtttcatttggcgtgcgcatttcgacacctttgtcaacgctgattcttatttggtggaccgacgactcacacacacgcgcgtaccaatataacagacactgaagtgtgtgtggaagggacagacaaacaaccgtgcgataacaacaacaaacggcagtgatcgcggcgagaaatggaaatggccaacaacatggtcagcagcagcaacagtggcggcggtggcagcagcaacaccacctcctacggcaacaacagctacaacaacagtgcggtggacagtggtcacagttcgcacagtggtgtcggtagcgggggcggtggtgagggaacgggagcgcgcctccgggatgtttgtaccatcctgaacactggccccgccgcctatcaaaatcaaacaggtggctatgcctacgaccacatcatcgccctgatgaggaaccttgatctgcaggacgatggcattgtgctgaactccaagatcaagaccatcgaaacggacttctgcaacatagtgcgcgacgagtctatgctttgtgagtcaatggagtacctgaacgacaaggcgcttagcgatggtgatacggcgctaaagttcgccctgctcttctcatcgagaaatttcgacgcactggccatgaaagagacgaaggtgcgcagcgccatgctcaagattttggagacaaacttcctcaacgcggacgcatatcggttgcacgacaagaaccgactgtacaactcgatcacgctgctgggtgaatattatcacagggtaaggctggcggataataccccgatcaccattttgggtgagtccctgctggacttgcttacccgcgagctcaatgacacgtcggtggtgctgggcactcggattgcccgcctggtgctgtcacagatcacactgaatggggagatcatgcgcaagcggcataaggtcgagattgatttactgctcttccacgttcgccggcatttgatcatgcagcccgcgctgaccgctaaggtgaaggccatgctactgatggtgctggacctcttttacagccactttaagcatatcggccacgacctggagacaatgtacaccaacttcttggtggtggaagatggcgaagaggatggggtcaacaataatggctccggcccccaggatctcgccgaagatggccgctcacagcagcttcagcatcaacagtcagagaacggcagcagcgccaacacgtccggccaggatcaggatacctttgaaccgcggccgtcggcaaagaagtggagcgagcaggtgtgcgaggattccttttgtgaaactggctacggtgaggcggatcagggcgacgatagatactccgaatctggactctcgtatcaagcgaataactctgcttcactcggccaccgtcgtcgcggattccaacctcggcaagtgccgcgtcctttgaagtcacatcaatcacaacagcagcagcaccaacaaccagccagcatagacgccagctccgaccagtatccatccatggccagcagcgaggatcgggacgagagcaagccgctccctagctggcggaagacacgcttcaaccgcaatcacgacggcgaccagagtaacggacggtcgcgcgaccaacagcggcggtacagcgtgagctgcgacgatgaccaccacagcgtgcgcagcgagggaggcggcaacctgcgactgtatagcatccacgacaggaggaagcactcgcaggagcgcatcgaacgcaatatgtctggcggtggcaactataatagtatagtcaactcgaattgggatcaaagggatcgcgatgatcgcagtgagcgctcttatatcagtaactacgagcgcggaaacaactataagcgaggtgggcgattcaataaccgcaacacctacgacaaaccgccgcgattccagaaacaacagcagcaacaacaacagcagatgcaacagcaacatcagggaggcaaccataaaatacacagcgattcctggcgacgctcaaacaatgctataaacagtggctaccaagacgagaactgtgcgtacaactcgaatggtccggaatcgaatagtcgcagctcatccagggctcgcactctgccgagaccgccaaaatcgcaaatggataaatcaggcggctataggtacaatcagagccccacgcatgcaggcggtggtcctcgattcccgcgttacagcagccaaagcagtttggccagcgaagcgtccagctcgtttgatcgtcgccaacagacatcgccacaaaatccacatcagcatcagcaccagcggcaccgccatttcacacgccgctcccagccagacatccatcagccgcagaacgaggagaactggcaggggcaggcggataagggccaaccaccatccggaaaggaggaaagcgagctggtgcggaatgcccagcagaccactcagtacatgaactatttgtcggcccagaaatga

SEQ ID NO: 12042 - protein, 766 aa, DROSOPHILA
MEMANNMVSSSNSGGGGSSNTTSYGNNSYNNSAVDSGHSSHSGVGSGGGGEGTGARLRDVCTILNTGPAAYQNQTGGYAYDHIIALMRNLDLQDDGIVLNSKIKTIETDFCNIVRDESMLCESMEYLNDKALSDGDTALKFALLFSSRNFDALAMKETKVRSAMLKILETNFLNADAYRLHDKNRLYNSITLLGEYYHRVRLADNTPITILGESLLDLLTRELNDTSVVLGTRIARLVLSQITLNGEIMRKRHKVEIDLLLFHVRRHLIMQPALTAKVKAMLLMVLDLFYSHFKHIGHDLETMYTNFLVVEDGEEDGVNNNGSGPQDLAEDGRSQQLQHQQSENGSSANTSGQDQDTFEPRPSAKKWSEQVCEDSFCETGYGEADQGDDRYSESGLSYQANNSASLGHRRRGFQPRQVPRPLKSHQSQQQQHQQPASIDASSDQYPSMASSEDRDESKPLPSWRKTRFNRNHDGDQSNGRSRDQQRRYSVSCDDDHHSVRSEGGGNLRLYSIHDRRKHSQERIERNMSGGGNYNSIVNSNWDQRDRDDRSERSYISNYERGNNYKRGGRFNNRNTYDKPPRFQKQQQQQQQQMQQQHQGGNHKIHSDSWRRSNNAINSGYQDENCAYNSNGPESNSRSSSRARTLPRPPKSQMDKSGGYRYNQSPTHAGGGPRFPRYSSQSSLASEASSSFDRRQQTSPQNPHQHQHQRHRHFTRRSQPDIHQPQNEENWQGQADKGQPPSGKEESELVRNAQQTTQYMNYLSAQK

SEQ ID NO: 12043 - DNA, 6835 bp, DROSOPHILA
ttggataccagtctagatgtcctggaaaactcgcgtctgctctcagccatagccaatcaccggcgacccacctctaccacgaacagcaacagtgcgagcaacgtggttacaaggcgtctgcgtggtcgcgctagccaggcgaattcgcacgacgaggatcatgaggaagaggaggctgctgcttccgatgagggcactgatggaggctctagctcgcagagctacgaagatgaggatgaagactccgactcggaagacaatcagccgctgaccagctacgtatcgcccagcaatggtcgtccgaggcgaaaggcaaaaacctcctcctcctccgcaacaactcaggagcgtccgctgcgacgcacacgtcgcccgccatccaataactccatcgcgaacgacaacgatgacgatgatgactatgttgtgccgcggagtcgtcgcgccaaccggggtggaaaccagcgagccgggcgcaaccaaaagagaccgcgctacaatgagcagtccgaggaggaagaggcggcggctggatattcccatcggagtaaacgaatccgtaacggcgacgctcatgccagctctcaggagcgatcacaggcctccaccgagcgggaccaggaggaagaagaggacggtacttcggtggactcggaagaacagcaggtgaacgttagcagcagaggcagggtgcgcaagccgtctgccaaggcgcgcggtatcttcaaggagtgaccgcagactgttttatgtataaattaaatctaattgctaaatcaacaaacctttgtaacatttgctagagtcttatttcttattattgattaatatgtaagagtaaatcacgtcacttctcattgtaatgtcagtgtcaccgctacggtcattgtcccacacccaacccaccccgatccgtcaaatccgtaaccccaaccgtgaagtgttagcccatatccatcatacaccgtggcagaatatgttcaattaatgttcaagtcttaagttgaatattggcatcagtcctacattctatgtgtagggggcatggccaaagcaacgttttatatgtatttctataatatataggtactatcatacatatatatttaaaggtagcactcggaatcacacttcatttaaaatagttttagaataaagtatcatgaaaaacactgtatgtaactcttgatcttactcctaatcctacaaactaaaaaggtggggcatgatgaaactacttgaccgtcttggcgtagttcttcacccactgttcggcctgctgcttgaccttggccaccgttgcatccgtgccgtgattctcctccagctgcagatactttttgtatatgacttgcatcttgttcggcttcagtttttgcaccacggcacgctccaaaacgtttctaaaataaaaaaaatttagttaataagacaacttttctgtttacatagcatagctatcaaactcacctcgcggaatcgattagacccgccttgattagcatgtccacatataccgaccagatgtcgattcgtttgggataggaagtgactacatcatcgagcagcgtctgcgccatgtcattgttatcgtgctttgcatacaacttggcaaaggacacaatgcaggggatgtctgcaatggttatataaaattaaaacaagttacattttaattaaagtaaacttacgctcttgatttggcaaggcccgcaatgcgcgctggagcagattgtgaacttggtcagacttgcccagccagaagtacgcctcggcggccacgggccacaccctgagctccgttttaaacttgttgagtactgtggtcagcacggaggaaaggcggtcctttctcttgttcttctttaagatgtctacaacgctaatgtaaatctccaaaggatcattgcagtttagggcttccttgagcacatcatcgaagttgttgctgtagacgagttccatgtttagcaaggcgctccacatgttcctcagttcctgtgtttcccggaaggatatcgtggatatcgccctgcgagctaaggcgcgagctttttcaatctctgtgttggacaaaaggaaagcgatgtacttcagccaggatatactgttgtttggctgggcaatcacaaggcgctcgtactggtcgattgtctccagacgtgccttgggatccgcattgcgctcctcgatctcccgcagtcgctgctcttccttgatctccgccttggccttctccttggcgctgagccgtttctttttggctgcatttttttgtgtttccgccacattcagctcctcgtcttcgtcgctggacccttccttggactggttcacatcatcctcccagaaactagacacaccgggcaaacgcgacttgccttctgctccattgcttttgggtgtctcagacttggcatttttggctggagttttatcttcaaagaagagcttgccattctgcttaggtttctctttcacaattccattggtcaggggttgagtcttcttttggccattggtaattttttctaccacttctgcctttcgcttggtaggtatggctttcgcttccgttttagtttccactttagctttcgctttgactttcttctgtgcagaggtctcctcaattgtagtcttcttttgtttaggtgactcctctacttttgccttcttagcttttacaggggcgacctctgtgcccgccgttctcttcactcccctccagaggcgccaaacagtctctggcactgcgatatggagtttgtcatggatgaaggctatattgcagaaatctccttggcgcaactcggcacttccagaattttcgatatcgttggggtgcaaccgaattggacagatgaccaacgggtttgtgcccttcttaagcgagcacactgctacggactccagttttaacagcaccttggccttcatgccagcctttccgatcagattcgtggatagttcgccgcttggtgaaatatgcgcaatgtccagcttcttgttgctgatgagtagcacatcgctggagtattcaatccatagaataactgcctcgtgcttgctacccatctcaggagctttggcagttccaaccaaactggagagcagcagggcggacaccttgccattgccttccactgtgtagacccagtcattggtggtcgcatcaatgcccttgaacaccacgttgattttctccccaacggagtattttgaaataggggcggaggcttcctcaaggcctgcctttatttgcgcaacttcatttaaatagctgtaaagaaattcaaagaataactaattaatgaactcaataagattttattttagacctacccttcgaccagttttgcagtgtcactaagatccccgctccagacatccgtaagctttgctgaaactgttagagtcttagtttccacctccttgctgagtacctttacccatagcagttgctcaggaactagctcgacgggcgcatttttcacggcattcagacgaagcatcttgacgtgaacctttaccggcttattgtagttgcgaacacacaccatgaggtccaccacctggtcggtggcgtgtttcacataagagcgtattatgtctcccacttgaaccgattgccaatccttggtgagctggccactgaagtaggggacatctcgtaagctgaagatgttctgcataatgcaggccgcatcggtgtaagagccagcgggatggacccgcatttgggcgtgcagcagctccaggtgatccgacaacaatcgcagtggaattaggcccacaaactcctccagctttggattcccatcttcatcctcttcgtcatcttcggcggcgaaggtgattttaacttccagtccagcgtctaaggcattggttatctcaacgggacagatctcaccaagctggaacttgtcctccggcaaagtcaaagtgatttggtccttgttgcgtgttaggatgcggaacttagttgtttgtccctcgaaaaatgagctattttcctttagattctgcctgtgcaaaactcctttgatgccgttgccgaacttcactaggacgtaagtgtcctcacatcggactactgtgcccatatagacgtttccaacgtgagcggacgcataatcagtcagaattttaattcccttgcccaaatactcggcacgattgctcacgtagcagatttttcgctcggcattaacttctaggacgcggcacttcaacgactgacccacatcgtagcggacattgggtgccagatagaactgttccagtattccgttgaccttgccgatcctcaccgaccagcccttgatcttgtcatccttcttgaatattttcgctgtgaccagatcgccggcattaatatcctccaggcagaacagcttttcgttgaccacgttgggatcatcggagcagtagtacaaggattcgatgacatcgtatcctaggatgcgaaccttatgcttcgtttttcttccgtatttggacaatacttcgtccttgtcataatttcccttgaaattgcctctgattgaaccgtatgagataatgccctttagtttcttattaagaagcagtaccacgccaccgctgcccaagcgcagaaccttggctttttccaccacggaacccacctttatgggctctacctcctgctcttcctcatcctgatcttttgctactgcagctccagttttgatatccagattaagagttaagtacactagtttggttaggggcatcacgtagagtaccctggcattgtaatcctcattcagctcgtaggcatccaaagtatccaaagcgttagctagatgatgttcgttgacgtaggcactaaaggattcattcatgatgctgcctttgaggccatccttcagatgcttggccaccttaaactttacaatgctgcctggcagaatgtagtcgagattcgtctcgttttgactcttgatgcgcagctggtcctgctccacctggacacaggtgcaggtgctctggtgggtgtcgtgatgaacggttttgacttttaggaaagccaactgccccacgtgtagcttctgagctggcttctcgcatggcacgaatgcctgaagtccttgtactcccgactcgatgacatagccgtgctccagagcctccgccacggcgccagagaagatgaaacccttcttaatgctcttgtgatgcagattaccgtgcacatcggccggcttgagggaaaggagcaggctaacccgaccggtgtccagcttttctgttttgatggccttgccgtagacgatgcggcccaactggaagagctcggtaaggtcgtggtactcgctggtgtctccggacatggccgccttggccacacgggtgtaggcgtcggatatatccgccaccaaggtgcgggcgaacatccgaccgggcaaagcgatctgcagtgcggtggctgtcaactccttgaccactcccatgaccagcatgtcctcctgcagcgtgtccatattgagcgtttccgcggagaaggcctccagttggccattttgttcctcggtttcgtagctcagaaggttctcttttactttcggcgccttcttcaccttcttctgcgaggcaccgaaaacctgtgggacagaaaagtatgtacaaagatctcggatatttcgctggctaaactcacgatattcaggctcacgtcgtcggttttgacttcgctgtggattgtcccgcctcggggaaagcttttctcgttcggcaccatccgggagctgtgtaatttagcgttttaaataacaaaatttgagcaacgtgcgttctacacgtgctaagcgccgatatagaaaatcagttcaataaatggtactaaattataccttaagatacggggcagtccgtagactcaaaccactgtgaccattgcggctgcagtgtgaacaggccttaggcagataataccgcagtcgaatcatgcacgggcctccctattccggcacacatgtgaaggtgtaacaattcgaacgcggttcaacaaaatgcaaactttacgcgaatttacgcgtaaaaccaagcgcggcaacattctgaagattgtacgggagcactatctgcgcgacgacatcggctgcggctccgagctgtgccgggagtgtttccaaaacgaggtataccagctcacctcgcagcacgcgaataagagcaccctcttcaaattcccgcactatctcgttttggacacaaatgtggttctggaccagatcgacgtgctggaggaggatgttttgcgcaacgtagtcgttctgaccaccgtgctcaacgaggtgaagcacaggagctccgccatttacaagcgattcaatgagatcgtccacgaccgcaccaggaacttctatgtgttcgtcaacgagcaccacaagtgggttaatggattttcttgggaaacctttataatatagtgcttcttctagggaaacctatgctgatcgcgaaccagatgagaccgccaatgatcgcaatgatcgggccattcgtctggccaccaagtggtacgatgatcacctgcaggcctcgcaatcctctaaagagttcgagcgcagtggcaaagctgctacgcgagttgttctgctcacagatgatgctgccaatcgtgctaaggccgaagcagaaggtattctggtgaccacagcagcggagtacgtgaaatctctcgaggattttccacttctgatggataagctgtcgcacaaaacattcgacagcgagaagaatggtctgccccagtacccgccgcatctcagcatgaaggagctgctggaaggactgcgccaaaata

SEQ ID NO: 12044 - DNA, 4542 bp, DROSOPHILA
cttagcacgtgtagaacgcacgttgctcaaattttgttatttaaaacgctaaattacacagctcccggatggtgccgaacgagaaaagctttccccgaggcgggacaatccacagcgaagtcaaaaccgacgacgtgagcctgaatatcgttttcggtgcctcgcagaagaaggtgaagaaggcgccgaaagtaaaagagaaccttctgagctacgaaaccgaggaacaaaatggccaactggaggccttctccgcggaaacgctcaatatggacacgctgcaggaggacatgctggtcatgggagtggtcaaggagttgacagccaccgcactgcagatcgctttgcccggtcggatgttcgcccgcaccttggtggcggatatatccgacgcctacacccgtgtggccaaggcggccatgtccggagacaccagcgagtaccacgaccttaccgagctcttccagttgggccgcatcgtctacggcaaggccatcaaaacagaaaagctggacaccggtcgggttagcctgctcctttccctcaagccggccgatgtgcacggtaatctgcatcacaagagcattaagaagggtttcatcttctctggcgccgtggcggaggctctggagcacggctatgtcatcgagtcgggagtacaaggacttcaggcattcgtgccatgcgagaagccagctcagaagctacacgtggggcagttggctttcctaaaagtcaaaaccgttcatcacgacacccaccagagcacctgcacctgtgtccaggtggagcaggaccagctgcgcatcaagagtcaaaacgagacgaatctcgactacattctgccaggcagcattgtaaagtttaaggtggccaagcatctgaaggatggcctcaaaggcagcatcatgaatgaatcctttagtgcctacgtcaacgaacatcatctagctaacgctttggatactttggatgcctacgagctgaatgaggattacaatgccagggtactctacgtgatgcccctaaccaaactagtgtacttaactcttaatctggatatcaaaactggagctgcagtagcaaaagatcaggatgaggaagagcaggaggtagagcccataaaggtgggttccgtggtggaaaaagccaaggttctgcgcttgggcagcggtggcgtggtactgcttcttaataagaaactaaagggcattatctcatacggttcaatcagaggcaatttcaagggaaattatgacaaggacgaagtattgtccaaatacggaagaaaaacgaagcataaggttcgcatcctaggatacgatgtcatcgaatccttgtactactgctccgatgatcccaacgtggtcaacgaaaagctgttctgcctggaggatattaatgccggcgatctggtcacagcgaaaatattcaagaaggatgacaagatcaagggctggtcggtgaggatcggcaaggtcaacggaatactggaacagttctatctggcacccaatgtccgctacgatgtgggtcagtcgttgaagtgccgcgtcctagaagttaatgccgagcgaaaaatctgctacgtgagcaatcgtgccgagtatttgggcaagggaattaaaattctgactgattatgcgtccgctcacgttggaaacgtctatatgggcacagtagtccgatgtgaggacacttacgtcctagtgaagttcggcaacggcatcaaaggagttttgcacaggcagaatctaaaggaaaatagctcatttttcgagggacaaacaactaagttccgcatcctaacacgcaacaaggaccaaatcactttgactttgccggaggacaagttccagcttggtgagatctgtcccgttgagataaccaatgccttagacgctggactggaagttaaaatcaccttcgccgccgaagatgacgaagaggatgaagatgggaatccaaagctggaggagtttgtgggcctaattccactgcgattgttgtcggatcacctggagctgctgcacgcccaaatgcgggtccatcccgctggctcttacaccgatgcggcctgcattatgcagaacatcttcagcttacgagatgtcccctacttcagtggccagctcaccaaggattggcaatcggttcaagtgggagacataatacgctcttatgtgaaacacgccaccgaccaggtggtggacctcatggtgtgtgttcgcaactacaataagccggtaaaggttcacgtcaagatgcttcgtctgaatgccgtgaaaaatgcgcccgtcgagctagttcctgagcaactgctatgggtaaaggtactcagcaaggaggtggaaactaagactctaacagtttcagcaaagcttacggatgtctggagcggggatcttagtgacactgcaaaactggtcgaaggctatttaaatgaagttgcgcaaataaaggcaggccttgaggaagcctccgcccctatttcaaaatactccgttggggagaaaatcaacgtggtgttcaagggcattgatgcgaccaccaatgactgggtctacacagtggaaggcaatggcaaggtgtccgccctgctgctctccagtttggttggaactgccaaagctcctgagatgggtagcaagcacgaggcagttattctatggattgaatactccagcgatgtgctactcatcagcaacaagaagctggacattgcgcatatttcaccaagcggcgaactatccacgaatctgatcggaaaggctggcatgaaggccaaggtgctgttaaaactggagtccgtagcagtgtgctcgcttaagaagggcacaaacccgttggtcatctgtccaattcggttgcaccccaacgatatcgaaaattctggaagtgccgagttgcgccaaggagatttctgcaatatagccttcatccatgacaaactccatatcgcagtgccagagactgtttggcgcctctggaggggagtgaagagaacggcgggcacagaggtcgcccctgtaaaagctaagaaggcaaaagtagaggagtcacctaaacaaaagaagactacaattgaggagacctctgcacagaagaaagtcaaagcgaaagctaaagtggaaactaaaacggaagcgaaagccatacctaccaagcgaaaggcagaagtggtagaaaaaattaccaatggccaaaagaagactcaacccctgaccaatggaattgtgaaagagaaacctaagcagaatggcaagctcttctttgaagataaaactccagccaaaaatgccaagtctgagacacccaaaagcaatggagcagaaggcaagtcgcgtttgcccggtgtgtctagtttctgggaggatgatgtgaaccagtccaaggaagggtccagcgacgaagacgaggagctgaatgtggcggaaacacaaaaaaatgcagccaaaaagaaacggctcagcgccaaggagaaggccaaggcggagatcaaggaagagcagcgactgcgggagatcgaggagcgcaatgcggatcccaaggcacgtctggagacaatcgaccagtacgagcgccttgtgattgcccagccaaacaacagtatatcctggctgaactcgcagggcgatatccacgatatccttccgggaaacacaggaactgaggaacatgtggagcgccttgctaaacatggaactcgtctacagcaacaacttcgatgatgtgctcaaggaagccctaaactgcaatgatcctttggagatttacattagcgttgtagacatcttaaagaagaacaagagaaaggaccgcctttcctccgtgctgaccacagtactcaacaagtttaaaacggagctcagggtgtggcccgtggccgccgaggcgtacttctggctgggcaagtctgaccaagttcacaatctgctccagcgcgcattgcgggccttgccaaatcaagagcacatcccctgcattgtgtcctttgccaagttgtatgcaaagcacgataacaatgacatggcgcagacgctgctcgatgatgtagtcacttcctatcccaaacgaatcgacatctggtcggtatatgtggacatgctaatcaaggcgggtctaatcgattccgcgagaaacgttttggagcgtgccgtggtgcaaaaactgaagccgaacaagatgcaagtcatatacaaaaagtatctgcagctggaggagaatcacggcacggatgcaacggtggccaaggtcaagcagcaggccgaacagtgggtgaagaactacgccaagacggtcaagtagtttcatcatgccccacctttttagtttgtaggattaggagtaagatcaagagttacatacagtgtttttcatgatactttattctaaaactattttaaatgaagtgtgattccgagtgctacctttaaatatatatgtatgatagtacctatatattatagaaatacatataaaacgttgctttggccatgccccctacacatagaatgtaggactgatgccaatattcaactt

SEQ ID NO: 12045 - protein, 1220 aa, DROSOPHILA
MVPNEKSFPRGGTIHSEVKTDDVSLNIVFGASQKKVKKAPKVKENLLSYETEEQNGQLEAFSAETLNMDTLQEDMLVMGVVKELTATALQIALPGRMFARTLVADISDAYTRVAKAAMSGDTSEYHDLTELFQLGRIVYGKAIKTEKLDTGRVSLLLSLKPADVHGNLHHKSIKKGFIFSGAVAEALEHGYVIESGVQGLQAFVPCEKPAQKLHVGQLAFLKVKTVHHDTHQSTCTCVQVEQDQLRIKSQNETNLDYILPGSIVKFKVAKHLKDGLKGSIMNESFSAYVNEHHLANALDTLDAYELNEDYNARVLYVMPLTKLVYLTLNLDIKTGAAVAKDQDEEEQEVEPIKVGSVVEKAKVLRLGSGGVVLLLNKKLKGIISYGSIRGNFKGNYDKDEVLSKYGRKTKHKVRILGYDVIESLYYCSDDPNVVNEKLFCLEDINAGDLVTAKIFKKDDKIKGWSVRIGKVNGILEQFYLAPNVRYDVGQSLKCRVLEVNAERKICYVSNRAEYLGKGIKILTDYASAHVGNVYMGTVVRCEDTYVLVKFGNGIKGVLHRQNLKENSSFFEGQTTKFRILTRNKDQITLTLPEDKFQLGEICPVEITNALDAGLEVKITFAAEDDEEDEDGNPKLEEFVGLIPLRLLSDHLELLHAQMRVHPAGSYTDAACIMQNIFSLRDVPYFSGQLTKDWQSVQVGDIIRSYVKHATDQVVDLMVCVRNYNKPVKVHVKMLRLNAVKNAPVELVPEQLLWVKVLSKEVETKTLTVSAKLTDVWSGDLSDTAKLVEGYLNEVAQIKAGLEEASAPISKYSVGEKINVVFKGIDATTNDWVYTVEGNGKVSALLLSSLVGTAKAPEMGSKHEAVILWIEYSSDVLLISNKKLDIAHISPSGELSTNLIGKAGMKAKVLLKLESVAVCSLKKGTNPLVICPIRLHPNDIENSGSAELRQGDFCNIAFIHDKLHIAVPETVWRLWRGVKRTAGTEVAPVKAKKAKVEESPKQKKTTIEETSAQKKVKAKAKVETKTEAKAIPTKRKAEVVEKITNGQKKTQPLTNGIVKEKPKQNGKLFFEDKTPAKNAKSETPKSNGAEGKSRLPGVSSFWEDDVNQSKEGSSDEDEELNVAETQKNAAKKKRLSAKEKAKAEIKEEQRLREIEERNADPKARLETIDQYERLVIAQPNNSISWLNSQGDIHDILPGNTGTEEHVERLAKHGTRLQQQLR

SEQ ID NO: 12046 - DNA, 2646 bp, DROSOPHILA
gtaggttctgtgtttaaatttatgaaatccaaaccgtctggcaacgccgcactttaagccagtcttacaggttcgttgaacaatgggcaaaaaataaagagcgaaaaaaaagagaaaaaggtctgttccagtacaagagcaggtctaagacttagactctatatgtggaacggaatggttctcggtctattgtgctcgaggtataatgacaacaaaaggagctcagcttgataacaatggagctgtatattaattaattcacgacatggtgttagaaaaaattaccaacaaacgttaatctttaaagccaggaagctactttcaattaataactaaaatataacacttaaacagttaattatgaagtttggatcatttaaattaatgtacatttacacactatctggcaaatttgacttgttgtgaatttcatacgtacgtacacttaaaagaaaaaaataaactagtttgtgcacagaaatgtgtggtacataccaatgatttctatttgtatatttgcagcgcaattaagtaatagcgtttttcgcattggagccggttttttggtagccaatggtagcttatgtgagctgcagcttaaatccttcagtatttaattaaactaaattaaaaaatttatttaactccgatcggttattaaaccaatatttagtgtgaacttcagtttaagacgcatcaatgccattttagccacttagatggaactcgaaaagtaaatattatgtggcggtggcaaatggagacattaagaactaaggcacataaatacgtatgcaaatgtatatatatacacaaaacaacataaaaaccagtttctttttatgagagtaaagtgcttttagtacttgagatgcgagggttgaagttgtatatgtgataaagtgctcatttattgtgtttctacctttacaacaatgcattatatacgaaataaacaaaaaatatatcagttttgcttacattttattaaaacttatttactatatatctggaatttgtatatttatttggctaataaccatcgatgagcttggctatgtttttgtctctaataaactggcatttctgttcgaattgctgtaacgattcttccatcctaaagaactccgaattaatcattttattgtttttacggatctgattcaggaatatatccatgggcgaagtgtcttcctctgagtgtactgcaaaatacatattatattatattatattaacaatatatgatatattatacaaaccttcctgattttgctgcacgatagctggggttccacttgaaatggtggatagattggaacgtccgattttctcgccactttctacgaactcagcgatggcgttgcggaatttctcgggtatcagaaatagtcgatcaacatttccctttttgtaacacagataggcgctcttcatttgaaaccattttctgcgtatttgggtgggcgacttgtttggaaaacccctttttttcatctgattggcgatttggatgaaggtgtactgggtggtgctggtggacagggctccctggcagttgttcacctccttaatcaggtcgagcatgcactctatttcggcggagacccaaaagtttcgtttcagtttctcggacttcatggtcttgacaatatttctaaaaacaaatgtttttcaatctcaagtttgttgttctacgaaaatagtgtgaccggatcaagagaactttaaaatatgcgaaacgatagaacataaacgaaattcgccgctgaaaagctaaaagaaaaatttgaaaaccaaaaattatgtattatgaattaacgtatgttaaattatttaaattaagttgagagtaagaataacttttaagtgcaatttccatagaatattttgtccttattttagagaacaaaataaaggcactggttaattgtttgatattcgagattcggacgaaatgtttaaaagtggctcgatttcaaataaatattttttgaattgttagtccttactatgcatattttgcatttgtaaacgatgcagagaagtacaaaatttcccaaataaacaaaaaaaaaaacaaatgaattgtgtaggataacatagaagttaatcatgtgaattaaattttctatttgttttaaaatattttataaactaaaaaggggattttagtatatacttacacataccattttcgctgacgctggcaaccctgctgtatttcgcacgcctgttgcttttcttctttcgtctgaaacttttataaaaaattctccgggctggggaactaaaactcttaggaaaataagtggcactggtaggcactaacgactaaacaataattttatctaaaaaaaatatatcaatgttttagtgtattaatcgaagacaaaaccttaacttgaatgtgcttgttgacttttcttccaaagaaacgtgctgcgaaagtgtaaataatggactccaaatactttgcaaccagcagaaacgatgctgtaggtccatcgcctgtgaagttctccttcaagcggaagtacgatgccatggcgaacagtcccatactggagaagaaaccccatgtggcccaaatcaagcagacaatagctcccattctgctgaccagcaaaagaacctccattgaac

SEQ ID NO: 12047 - DNA, 589 bp, DROSOPHILA
agaccatgaagtccgagaaactgaaacgaaacttttgggtctccgccgaaatagagtgcatgctcgacctgattaaggaggtgaacaactgccagggagccctgtccaccagcaccacccagtacaccttcatccaaatcgccaatcagatgaaaaaaaggggttttccaaacaagtcgcccacccaaatacgcagaaaatggtttcaaatgaagagcgcctatctgtgttacaaaaagggaaatgttgatcgactatttctgatacccgagaaattccgcaacgccatcgctgagttcgtagaaagtggcgagaaaatcggacgttccaatctatccaccatttcaagtggaaccccagctatcgtgcagcaaaatcaggaagtacactcagaggaagacacttcgcccatggatatattcctgaatcagatccgtaaaaacaataaaatgattaattcggagttctttaggatggaagaatcgttacagcaattcgaacagaaatgccagtttattagagacaaaaacatagccaagctcatcgatggttattagccaaataaatatacaaattccagatatatagt

SEQ ID NO: 12048 - protein, 183 aa, DROSOPHILA
MKSEKLKRNFWVSAEIECMLDLIKEVNNCQGALSTSTTQYTFIQIANQMKKRGFPNKSPTQIRRKWFQMKSAYLCYKKGNVDRLFLIPEKFRNAIAEFVESGEKIGRSNLSTISSGTPAIVQQNQEVHSEEDTSPMDIFLNQIRKNNKMINSEFFRMEESLQQFEQKCQFIRDKNIAKLIDGY

SEQ ID NO: 12049 - DNA, 6395 bp, DROSOPHILA
tgcattttttcggctgagccggcaaatcgaattgaatttttgaatccttgaaactgcggttgctttttgtgggtaatcttcataatttacataagcaaatcaaattgtaaacgtaatatgaagacaatggaagcgagcggaaaaaggagtctgagctcagctttgaatggaactatgttaagtggatggcgcagattttctctttttattttcttcttgtttttagaaatgtgtcagctttttccgaaagccttctttgttttagtcaatgtggcgtaggggaaatttagctcaagtggtaagtggagaaagttaaaaggattgccacccagaaagaaagagtgtgaatactttgaagtgaaagtgtccaataagtgtgccacttgtgcatttttttttttttgcccaacactagaaaacaatcgattttcagtgtgacattagacgcacttaccaatacttttggccagattcctatcgaattaggaatgacgagcacttttttttacttgtactaaccgtgaacaatcctagtgaaaatcgtgttaaatttctgtaccaactgtgtttgccatctgaaaacgtggatattttttgtaacaacggaccacgaaataggcgaatgttatctactcaaaaactaaaattgcggaagcaaaacaaattattgtagatcccaggcattaaacataatgaagcccttaaaaccggaccattaaggtatgaggaatgcgatagcacttgtaatatatattccctcatgtgggtctctggcttttccagagctctcgtttccaattgcccatctaagagcccgaaatttcgaggctccttgtctggccttcagtttgctgtcaactctttgcatactaggagtgacagattgaggtaccggacacacaacatattctttagcaatctgcgtttgcgtacgcacatatatatagatatatgtcgtttggctcgtgattaggccgtatcggtagctatgtccactgcaatggcaatggcagcagcggcatcgtcgagtgccgcggcagcaacagcaacaacaacggccattagcaactccacaaacactacagcgtcaccggcaacaacaaacaccataaacaccaccacgaagaccataacgacatcagaggtgccactggaaccagcttcaaatatggctcccaaagcactcgaaatcgaagattctggaaggaatgagcccgaagatttggagcatggtgctgcgaaaccactcgagcagcgcaaaacgacagtggtgcacacctgtccccgtccaccgggtggctacaagtactctatggagtttctctacgggatcggcagtggcatggccggcataccactgaatataccaacgccctcatcgataacacctcgcaccgtacgatccacggcccccttactaaccacccacatgcctttgctgaccaatatgggcgtggcaccatcacgtccgtcaggcattcgctacccaggatctgctggaggctcaaacggtaccacggtagcagcatccacgacaccatccactacagttacaacatcaagtggctctccgggatcgggagccgaggcaataacaagttcagtttcatctagtggcttgccagcagcgggcttgcaagctgctcagttcatatgccagggatatatgcccactggaccgcagcgtcgcttgtggcacgcagaaaacgcagtgtggcagtttgatagaaattatccttacaatcaggcatactcaccgccatatggaatacccatgatgccagtgggctttgagcatccgtatgggcagagaataatatacccgggctattacaatcagactcctccgggaattaatcctgctgcggtggcgggactgacaagaactaatcgtccggtgacccaacagccacatatactgactcagccagccgtgggaacaacggaaagtagcgaggaagctccagcgacacttggaaacgctccgcaggtgagcagcacgtggcgttacggaagaccaggaacacaccgcggacgacatgcggtgcccactgcagcagcaccagctttgttgcacagagattctaagagtttttacaacagcatcggcagtggtatggctaacggtcctcgatttaaagcaccctttgtggcaaatgtacgtaattttcaagcaggagctgtagcaactgtcgcagccggaggagccgcaaccacagcagtagtgggcacaagtgcacctgcaactggagcagctagctccagcgatcagaacgtggccaccaaacgcaaccatcaaggagctgcgacccaaaataatcacagaaatcgtcacaatgccaaaaaaggaggcaagaattcggttggaaaagagctgacatccaactcatcagaatcgctttccaattcatcctcaaagtcccagctaaacaagcgtcccagctcgagctcctctatttcaccaatcaagcatccacatcgcaattatagaaaccggatgcgttatactgcaacagagccaactgagcaaaaggcggcgaccacgaccgttccaataagtaactaccagccaccgcagcaatcgacatcaacagtgcgaagaacttctaagttccaaggatcaaatgcctatcaagcacatactgctgccggtaggcaacagtctcgtttctaccaatcgcgacacatggatggctatgtctttcaatctggacactatatggtatatgcagcgggagcaccgcctgtggggttaagaccaggaaaatcaccagtgtcagaagccaccggggcacctcctggagcagcagcagcaacagcagcagcagcaacagcagtagcagcaacagcagcagcagcagaaggtggaggagcagcagagggtggaggagcagcagcagctccagtcacagccagcagcgccactttggagggcgagcagccgctggactcggactttgatcagcgccaggaatttgctgacttgggtctggatccagccaatggcggcttctcctccgacctggagccgaacggtatcaagcaggacacctcggagctggacactcactcgtgcctgatatcgcatccaaattccgaagtcgatggcgatgataatcaatccctcgccagttttgctcctagtgtggagagcgatgattccgatagtgaactaagcgatgcttccgtggagtcggtggcgcgcgatatattggttagttgcctagcagtggccaccggggctgaggagcccgatttcagtggccccaatctggtgccctacggtgatatgcattatctcaaggagctggacaaaaagaaccccccaaccaatggctacagatcccacaggccatatcatcagtcgcattatgcttaccattcgcaaatgagtccaagaggattgagctgctgcggcgatatgttgaatcaacactctgaagatttggtgtttaaattggaccaaaatcagccggatggcattgaaagtgggaagaacattttcttgagggagataaccgagcagcctgacaacatctcggtggcctcaaatctctcctgcagtccatctgccagttccagcaagagtgtattggctcccatggcatccaagtccaacattacaatggtaggtgaactcaaaaatgtacttcttaatgggcaaattaccaagtttatttcttcgaaaagttattttttcctttcgtctgtttgtctgatagttcactttataagatttacaaaataaaatcttgcattattttttttcaagaaataaatgtggaaatgtcccttaatacattttgttggcaaaaaaaaaaaacttccgcacctttggcaaatttgttcattccacactcttatcctaatccccaaagccagaagaaaacaatgatgatgatgaactgcccttagtggttcacaatcgttattggcgcgaattctttggttacacgccagccgatcgctttttactccgagccaagtttgtggaaatgagacgtccaccgaaagtgatgggctgcaagaacaagtgggaccccttatccctgtccgtttggaagaagttcctcgagtctcagcagacacgtcacgtttacaagatcaagatgcgactgtggcgtgccatctacacagtggccatggtgagttccgttgggagtatttagtaaaatgcaatagttttcaactaaattacgctttacagaaaaactatccaagatacgggctttatttggtgggctcatccatttcgtactttggttcgaagtgctcggacatggatatttgcatgctggcctgcacaaatcctaacattgattctcgcatggaggccgtctatcatttgcatgttatgaaggagctgctgggccgcacgaatatgtttcaggatttcaatttgatcgaagcacgagtgccaatactgcgattcaccgaccgatgccataaagtggaggtggacataaactttaataactccgttgggatcaggaatacccatcttctatactgctattcccagctagattggcgagttcgtccgatggcattgaccgtgaagcagtgggcccagtatcacaacattaacaatgccaagaacatgaccatatcgagctactcgctcatgctaatggtcattcatttcctgcaggttggagcaagtccacctgtgcttccatgtctgcacaacttatatccggagaagtttggtctcctgcagcccaacgatttcggttatgtggacatgaacgaggtgatggctccgtatcagtcggataacagccaaactctaggtgatttgctgttgagcttcctacactactacagtgtatttgattacggaaagtatgccatctcgatacgggtgggtggtgtcctgcccatagaggtgtgccgggcagccactgcgcccaaaaacgatatacaccagtggaacgagctgtgcatcgaagagccattcgatcagacgaatacagctcgatcggtgtatgatacggatacatttgaacgcatcaaaaccatctttgtggccagctacaggagactggattcgacgaggaatctcagtgccatattcgaggactacgatggacccacaatactgatgcagcagccatcggtggactcagagatcgaactctacgagggtcaacaccaccgtttgctaccgaatcgaggctcctcgagatccaacagcgcaataccatcgccgcgtccttcaatactaatggtggacaaagccactacagccatttgggatgatatcaacaacaaaccagatcacccagtattaagccatagcaacaactatgatgcgaccaatgaatgtactggcaacggcagtctgatgggactcaaggataactctgtggccgacaagccaccaattgcgtaaaaactctcaattaaaccaaaaacactcggcacgttcaagacatactgaaaaggcaaagaaatatttttacgcgctaatgaggatgtgctttttccataagttgccggacgcttttaaaacaatttaaatttgacgttggataattatataagtatagtaggaaaatagccgattttcaaatcacaacgtgaagggaccatgtaaatatgccaaacgcctatctcaacacaaagtcggtcgcaaaaaaaacacaaatatctgctaaaaagcaacaaactgtttcaaatgtttgcgtaccaaaacggctaaagttgttttcacaagcttcatagcaagacaattgcaaaacaaaaaaaaaaaaaagaaaggaaaaaaaaaatcatagcgtgcaagaaaataataaaaatggcaaaaaaattacaaaatttaaaaatctaaaaaaaatatcagttttgtacagtgtaggaaagctaacattttattactacacaattcataagatttgtacgggaataggtttttaccaaaaactattaaaaaacacagaaaacttcacaaaaaaacacgtaaaacatgaaatatgtaacacaaaaaaaacgacaaaaattttgtaactaaataatagaaaatgtaaaatacgcgccaatcttcaaaaaagcttacgagttaaacagttgagttactaactcaaccaagaacataaatataatgatagcgccaaaaaaaaattatataaataaaatcctttgccaaaatgtcgttcgttactaaaattagttattttaaatgctaataatatcttagttttccaccaaacagcatacagcagtattcttccttcatacatgtgcataaatcaacccaatgaaatcatccatcatccagctattaagtcccgaatccgaatccgatcccaatctccatgccttcatttcaacacttggtctcgactctctggggtctcgaactatatgcgaatgaaattatttaggatgctcaa

SEQ ID NO: 12050 - DNA, 4083 bp, DROSOPHILA
atggcaatggcagcagcggcatcgtcgagtgccgcggcagcaacagcaacaacaacggccattagcaactccacaaacactacagcgtcaccggcaacaacaaacaccataaacaccaccacgaagaccataacgacatcagaggtgccactggaaccagcttcaaatatggctcccaaagcactcgaaatcgaagattctggaaggaatgagcccgaagatttggagcatggtgctgcgaaaccactcgagcagcgcaaaacgacagtggtgcacacctgtccccgtccaccgggtggctacaagtactctatggagtttctctacgggatcggcagtggcatggccggcataccactgaatataccaacgccctcatcgataacacctcgcaccgtacgatccacggcccccttactaaccacccacatgcctttgctgaccaatatgggcgtggcaccatcacgtccgtcaggcattcgctacccaggatctgctggaggctcaaacggtaccacggtagcagcatccacgacaccatccactacagttacaacatcaagtggctctccgggatcgggagccgaggcaataacaagttcagtttcatctagtggcttgccagcagcgggcttgcaagctgctcagttcatatgccagggatatatgcccactggaccgcagcgtcgcttgtggcacgcagaaaacgcagtgtggcagtttgatagaaattatccttacaatcaggcatactcaccgccatatggaatacccatgatgccagtgggctttgagcatccgtatgggcagagaataatatacccgggctattacaatcagactcctccgggaattaatcctgctgcggtggcgggactgacaagaactaatcgtccggtgacccaacagccacatatactgactcagccagccgtgggaacaacggaaagtagcgaggaagctccagcgacacttggaaacgctccgcaggtgagcagcacgtggcgttacggaagaccaggaacacaccgcggacgacatgcggtgcccactgcagcagcaccagctttgttgcacagagattctaagagtttttacaacagcatcggcagtggtatggctaacggtcctcgatttaaagcaccctttgtggcaaatgtacgtaattttcaagcaggagctgtagcaactgtcgcagccggaggagccgcaaccacagcagtagtgggcacaagtgcacctgcaactggagcagctagctccagcgatcagaacgtggccaccaaacgcaaccatcaaggagctgcgacccaaaataatcacagaaatcgtcacaatgccaaaaaaggaggcaagaattcggttggaaaagagctgacatccaactcatcagaatcgctttccaattcatcctcaaagtcccagctaaacaagcgtcccagctcgagctcctctatttcaccaatcaagcatccacatcgcaattatagaaaccggatgcgttatactgcaacagagccaactgagcaaaaggcggcgaccacgaccgttccaataagtaactaccagccaccgcagcaatcgacatcaacagtgcgaagaacttctaagttccaaggatcaaatgcctatcaagcacatactgctgccggtaggcaacagtctcgtttctaccaatcgcgacacatggatggctatgtctttcaatctggacactatatggtatatgcagcgggagcaccgcctgtggggttaagaccaggaaaatcaccagtgtcagaagccaccggggcacctcctggagcagcagcagcaacagcagcagcagcaacagcagtagcagcaacagcagcagcagcagaaggtggaggagcagcagagggtggaggagcagcagcagctccagtcacagccagcagcgccactttggagggcgagcagccgctggactcggactttgatcagcgccaggaatttgctgacttgggtctggatccagccaatggcggcttctcctccgacctggagccgaacggtatcaagcaggacacctcggagctggacactcactcgtgcctgatatcgcatccaaattccgaagtcgatggcgatgataatcaatccctcgccagttttgctcctagtgtggagagcgatgattccgatagtgaactaagcgatgcttccgtggagtcggtggcgcgcgatatattggttagttgcctagcagtggccaccggggctgaggagcccgatttcagtggccccaatctggtgccctacggtgatatgcattatctcaaggagctggacaaaaagaaccccccaaccaatggctacagatcccacaggccatatcatcagtcgcattatgcttaccattcgcaaatgagtccaagaggattgagctgctgcggcgatatgttgaatcaacactctgaagatttggtgtttaaattggaccaaaatcagccggatggcattgaaagtgggaagaacattttcttgagggagataaccgagcagcctgacaacatctcggtggcctcaaatctctcctgcagtccatctgccagttccagcaagagtgtattggctcccatggcatccaagtccaacattacaatgccagaagaaaacaatgatgatgatgaactgcccttagtggttcacaatcgttattggcgcgaattctttggttacacgccagccgatcgctttttactccgagccaagtttgtggaaatgagacgtccaccgaaagtgatgggctgcaagaacaagtgggaccccttatccctgtccgtttggaagaagttcctcgagtctcagcagacacgtcacgtttacaagatcaagatgcgactgtggcgtgccatctacacagtggccatgaaaaactatccaagatacgggctttatttggtgggctcatccatttcgtactttggttcgaagtgctcggacatggatatttgcatgctggcctgcacaaatcctaacattgattctcgcatggaggccgtctatcatttgcatgttatgaaggagctgctgggccgcacgaatatgtttcaggatttcaatttgatcgaagcacgagtgccaatactgcgattcaccgaccgatgccataaagtggaggtggacataaactttaataactccgttgggatcaggaatacccatcttctatactgctattcccagctagattggcgagttcgtccgatggcattgaccgtgaagcagtgggcccagtatcacaacattaacaatgccaagaacatgaccatatcgagctactcgctcatgctaatggtcattcatttcctgcaggttggagcaagtccacctgtgcttccatgtctgcacaacttatatccggagaagtttggtctcctgcagcccaacgatttcggttatgtggacatgaacgaggtgatggctccgtatcagtcggataacagccaaactctaggtgatttgctgttgagcttcctacactactacagtgtatttgattacggaaagtatgccatctcgatacgggtgggtggtgtcctgcccatagaggtgtgccgggcagccactgcgcccaaaaacgatatacaccagtggaacgagctgtgcatcgaagagccattcgatcagacgaatacagctcgatcggtgtatgatacggatacatttgaacgcatcaaaaccatctttgtggccagctacaggagactggattcgacgaggaatctcagtgccatattcgaggactacgatggacccacaatactgatgcagcagccatcggtggactcagagatcgaactctacgagggtcaacaccaccgtttgctaccgaatcgaggctcctcgagatccaacagcgcaataccatcgccgcgtccttcaatactaatggtggacaaagccactacagccatttgggatgatatcaacaacaaaccagatcacccagtattaagccatagcaacaactatgatgcgaccaatgaatgtactggcaacggcagtctgatgggactcaaggataactctgtggccgacaagccaccaattgcgtaa

SEQ ID NO: 12051 - protein, 1360 aa, DROSOPHILA
MAMAAAASSSAAAATATTTAISNSTNTTASPATTNTINTTTKTITTSEVPLEPASNMAPKALEIEDSGRNEPEDLEHGAAKPLEQRKTTVVHTCPRPPGGYKYSMEFLYGIGSGMAGIPLNIPTPSSITPRTVRSTAPLLTTHMPLLTNMGVAPSRPSGIRYPGSAGGSNGTTVAASTTPSTTVTTSSGSPGSGAEAITSSVSSSGLPAAGLQAAQFICQGYMPTGPQRRLWHAENAVWQFDRNYPYNQAYSPPYGIPMMPVGFEHPYGQRIIYPGYYNQTPPGINPAAVAGLTRTNRPVTQQPHILTQPAVGTTESSEEAPATLGNAPQVSSTWRYGRPGTHRGRHAVPTAAAPALLHRDSKSFYNSIGSGMANGPRFKAPFVANVRNFQAGAVATVAAGGAATTAVVGTSAPATGAASSSDQNVATKRNHQGAATQNNHRNRHNAKKGGKNSVGKELTSNSSESLSNSSSKSQLNKRPSSSSSISPIKHPHRNYRNRMRYTATEPTEQKAATTTVPISNYQPPQQSTSTVRRTSKFQGSNAYQAHTAAGRQQSRFYQSRHMDGYVFQSGHYMVYAAGAPPVGLRPGKSPVSEATGAPPGAAAATAAAATAVAATAAAAEGGGAAEGGGAAAAPVTASSATLEGEQPLDSDFDQRQEFADLGLDPANGGFSSDLEPNGIKQDTSELDTHSCLISHPNSEVDGDDNQSLASFAPSVESDDSDSELSDASVESVARDILVSCLAVATGAEEPDFSGPNLVPYGDMHYLKELDKKNPPTNGYRSHRPYHQSHYAYHSQMSPRGLSCCGDMLNQHSEDLVFKLDQNQPDGIESGKNIFLREITEQPDNISVASNLSCSPSASSSKSVLAPMASKSNITMPEENNDDDELPLVVHNRYWREFFGYTPADRFLLRAKFVEMRRPPKVMGCKNKWDPLSLSVWKKFLESQQTRHVYKIKMRLWRAIYTVAMKNYPRYGLYLVGSSISYFGSKCSDMDICMLACTNPNIDSRMEAVYHLHVMKELLGRTNMFQDFNLIEARVPILRFTDRCHKVEVDINFNNSVGIRNTHLLYCYSQLDWRVRPMALTVKQWAQYHNINNAKNMTISSYSLMLMVIHFLQVGASPPVLPCLHNLYPEKFGLLQPNDFGYVDMNEVMAPYQSDNSQTLGDLLLSFLHYYSVFDYGKYAISIRVGGVLPIEVCRAATAPKNDIHQWNELCIEEPFDQTNTARSVYDTDTFERIKTIFVASYRRLDSTRNLSAIFEDYDGPTILMQQPSVDSEIELYEGQHHRLLPNRGSSRSNSAIPSPRPSILMVDKATTAIWDDINNKPDHPVLSHSNNYDATNECTGNGSLMGLKDNSVADKPPIA

SEQ ID NO: 12052 - DNA, 3435 bp, DROSOPHILA
tcgcactaggaacaggcaaaagaagcgcaccagctcatcgggcagctgtaactcccggcagacgctcttgagcagcgcactggcgttctgctgcaccgagcagttgaccaggatgcgttcgcccgcgggattcgtatagacctgcacctccagctgctgttcctcgcaatcggtggcgacttggccctcggccagtgccgtgtccagttgggcgcgctgcaagaactgctgcaagtgggcggatcgggccagacggttgtcctgacccaccgcctgcaggtactgctccagggagctgcgacgcgcctccagttggccattggtgagcggtaggaggcgtttgggtggaaagggcggcagggggacgcccacacagtgcctgcgcagctggtcgttcagcgagtgcagctgtttgtagcgcaggacgcagtggtggatgccgttgatgtgtatgttgtaggccgtgtaggtgggcgaggagcccagctcctgggtgtccggtatggaaaagtgcatcctgctgctgtgcattggcacccggccagcggatcacacctgcattgtcaagcggctcctctgctaagcgcagcaattgctctcaattcaattaattcgcagcttcaattgttcacttttcgcccagatgtgtaaccgtactcgcatcgtcgcaaaataccatgcgcgtcgaaaataccaaaaaagagctgtttcaaacaaaaagttcgttaaaaatgtttaatttgaataagtataatagataaaatacgctcatttaatttgattacttttattagatatatatgtaaacctaaacattggcttgtagaggcttagaaataatattcattataaattgtgtgagtatttaatgttgaacctatacactagagaatattttattaaattgtcagtcgctaacgcagaaagggttgaattcaagttatggttaaattaatatcaaataatattatcataggcgatctcaacaaacatattgcatttacaagtcaactgggtactgaacttctccttttagcataaccacgcccgaaggatttaccttcactttgattttggtgttgggatataaaactccatagtcaacattttcgtaaaggtcctaaagggatgatagatataataagatatacaaaataagatcaagttaaggtcatatatttacctccactctgtagccagaaaagttaatcaagcccaattctttcaaagtaaccgaaatatccgatggagttccatcagttcttctattcacaaaggcaattgcgtaggagtaaaagttttgatagagcggtccaatcggtcttgaccagatctcaatgcccttgtgtttataaatccttcttccctgtattccaagcggatcttgatccacggcgattatctttcgattctgtagaatgtgtttaaactgcggacgaatcgttctcaaatcaaccgacatcaaaagtggagcggccaaaattgaccaaattgcgaattgggttttagcttgctcgtaactcagtccgaaatttccgataatcaactgaaatcggattgggaaaagatataaatatattattcaaaggtaaaacctattaatacccaccatatctggatcgttccaatgaccaggacctgcgttgggcgctattacgtcctggttgttgccataataatcgattatattctccacggatgcccacgagtcctggatgtcgtcatagttcctccacaggttgcagtgcgtttggatggccgagtagtttggctgtattcccgcataaatctgataaactggccagctgcaggaatacaccatcgatttgcccgtgctgttcagaagtcgaccgaaagtggagtagccatgatccatatcgtagggcagagcatagcaaccatctagcttcacgtagtccacattccagtccgcgaattgaagggcatccttctcctcataaccaataatgcccggatatccggcgcaggtgtagttgccgtagtcctcgtaaattccaaacttgaggcctctcgagtgaatcttcaaatgcaaatttaacataaacataatcgctttcttttaaattctatactcacataatcagacaaagctttaatgccgttcggaaaacgtttgcgatcagctaccaattttccatcgtgactgcgatgtttttccaaccagcaatcgtcgatatttatgtattcatagcccacagatgcatatccatccgccacaacaatatcagtcatggtttgaaatagttgttcactgtaattaccaatttattggtttaagttaactaagtttagttttgcaagctagacgcttacctaatgcaattatctggatcgttcacgcaatccgtgttgcaacgaaatctctcccaggaaagccaacccattggaggagttttggcaagcccattgtcgaggcatttaccgaaggtgctactcagtaatatgatccaaagagtagctaacatagttttctaaaaggaagtaaatgggagaatagattggtacttgcaaaagtgtttaaataaaaatgattaagttattaagcagtttgtagatagtcacttaagatacataaatgtattatatacgtattaatatattctttcataatttagttcttatattggatctgtaggttctgtgtttaaatttatgaaatccaaaccgtctggcaacgccgcactttaagccagtcttacaggttcgttgaacaatgggcaaaaaataaagagcgaaaaaaaagagaaaaaggtctgttccagtacaagagcaggtctaagacttagactctatatgtggaacggaatggttctcggtctattgtgctcgaggtataatgacaacaaaaggagctcagcttgataacaatggagctgtatattaattaattcacgacatggtgttagaaaaaattaccaacaaacgttaatctttaaagccaggaagctactttcaattaataactaaaatataacacttaaacagttaattatgaagtttggatcatttaaattaatgtacatttacacactatctggcaaatttgacttgttgtgaatttcatacgtacgtacacttaaaagaaaaaaataaactagtttgtgcacagaaatgtgtggtacataccaatgatttctatttgtatatttgcagcgcaattaagtaatagcgtttttcgcattggagccggttttttggtagccaatggtagcttatgtgagctgcagcttaaatccttcagtatttaattaaactaaattaaaaaatttatttaactccgatcggttattaaaccaatatttagtgtgaacttcagtttaagacgcatcaatgccattttagccacttagatggaactcgaaaagtaaatattatgtggcggtggcaaatggagacattaagaactaaggcaca

SEQ ID NO: 12053 - DNA, 1191 bp, DROSOPHILA
ctcgacaatgggcttgccaaaactcctccaatgggttggctttcctgggagagatttcgttgcaacacggattgcgtgaacgatccagataattgcattagtgaacaactatttcaaaccatgactgatattgttgtggcggatggatatgcatctgtgggctatgaatacataaatatcgacgattgctggttggaaaaacatcgcagtcacgatggaaaattggtagctgatcgcaaacgttttccgaacggcattaaagctttgtctgattatattcactcgagaggcctcaagtttggaatttacgaggactacggcaactacacctgcgccggatatccgggcattattggttatgaggagaaggatgcccttcaattcgcggactggaatgtggactacgtgaagctagatggttgctatgctctgccctacgatatggatcatggctactccactttcggtcgacttctgaacagcacgggcaaatcgatggtgtattcctgcagctggccagtttatcagatttatgcgggaatacagccaaactactcggccatccaaacgcactgcaacctgtggaggaactatgacgacatccaggactcgtgggcatccgtggagaatataatcgattattatggcaacaaccaggacgtaatagcgcccaacgcaggtcctggtcattggaacgatccagatatgttgattatcggaaatttcggactgagttacgagcaagctaaaacccaattcgcaatttggtcaattttggccgctccacttttgatgtcggttgatttgagaacgattcgtccgcagtttaaacacattctacagaatcgaaagataatcgccgtggatcaagatccgcttggaatacagggaagaaggatttataaacacaagggcattgagatctggtcaagaccgattggaccgctctatcaaaacttttactcctacgcaattgcctttgtgaatagaagaactgatggaactccatcggatatttcggttactttgaaagaattgggcttgattaacttttctggctacagagtggaggacctttacgaaaatgttgactatggagttttatatcccaacaccaaaatcaaagtgaaggtaaatccttcgggcgtggttatgctaaaaggagaagttcagtacccagttgacttgtaa

SEQ ID NO: 12054 - protein, 386 aa, DROSOPHILA
MGWLSWERFRCNTDCVNDPDNCISEQLFQTMTDIVVADGYASVGYEYINIDDCWLEKHRSHDGKLVADRKRFPNGIKALSDYIHSRGLKFGIYEDYGNYTCAGYPGIIGYEEKDALQFADWNVDYVKLDGCYALPYDMDHGYSTFGRLLNSTGKSMVYSCSWPVYQIYAGIQPNYSAIQTHCNLWRNYDDIQDSWASVENIIDYYGNNQDVIAPNAGPGHWNDPDMLIIGNFGLSYEQAKTQFAIWSILAAPLLMSVDLRTIRPQFKHILQNRKIIAVDQDPLGIQGRRIYKHKGIEIWSRPIGPLYQNFYSYAIAFVNRRTDGTPSDISVTLKELGLINFSGYRVEDLYENVDYGVLYPNTKIKVKVNPSGVVMLKGEVQYPVDL

SEQ ID NO: 12055 - DNA, 6175 bp, DROSOPHILA
aacatttatattaagtaacatttatattagcgtcttaatcataactctattttggctaagataatgtactgtgctatcattttgtggttatctactggatctttactttgtattaaagtagcgtttcaaacctgcaccagtacttcgttggtgccaacgttaacctcttgaccgtgctgcgggatgtacatgaccttatgggaagaatgtaccttgcccagacgcatgatgtccgtcctcgttagtgccgcactgcactgcttcctcgggcggcaggtgggcatccgataagctgtctctgtccagattcatgagcagagggtgctcgggaaaatccctgttattcttgtgagtcagaggacaggcttttaaccgggtacttctgcgaacaagttcgtcgtgaatgcacctgtggcccattgtctgttcgggaattagtttccgaatccggtatggcgatgggtcatttgtgggtgcttctcaattttccatttctttgctgttaccatccatatctgaatccctttacacactgagctttaaatacgtatggcgcacttgttttattttaaaattaacggatacgagctttatagagatggactttaagtagtgccagaaatactgttatttttatatttcgtaagtttacatggatctcaaacgcttataacatttaatttcaaactttttgctaatatttaggtctcaaggtttcagaacaattttgttttattttgttatagatttttactaaatagactaattaaagtgtatgccagttgttaaacaaatgtatttcataatcaggaagtcaaatatgtaatgtatatatataataaatttggattttatagctaaaaactaataaaaggttcacctgtgctcaataatagtttcaaatactgttcaggtcatttttaacacaagaatttataaatatttaaaattagctatcgataagtggcaccaggtacttacgatactcaaccgatctggcaacgacgcgcggtacgtggcttcgggacacggaaaacaattttacgggaaaagctaaacaaattatgtacaattcgcaataaatccgaaaagatatagggacaaacaccagacggagaagaggagcacaaaaggctgcatgaactgtaagtgccaaggaccagatacccgtttctttttctgcgttcacccgtatcctttcacttttaattgctaagttcaacatacaactacaaatggatattcagctgatttacagctagtgcggtttctcaatggctcaaattatgtttcccaaacttgccgccactccaatggaaacaagttaatgtgcgcataatatgcaaattttctgtttgttttggtttgccaaaatacaaacaatacatacatatgtacgcaagtacatagtacatatctatgtttggcacacacactgacgcattaactgcgctctttgtttgccgcctataaataaacgccaaaaaatgcgtacgagattatgccatttgttgcttttcagctgtgctttgcgtacgtcaacaaagctttattatataaacaaatacaaaacggcaatcagctgtttctaacaaaaaataaacggttgaatagccttgtcattatcattgtttattgtgctttgccatagatatatgtatgtatgtacaatggccatttcactattaaacgaaattattagaacggctaattaaactctctatctttggctctcttgtgtcttcttccaagcccctcttttgagatatgcacataattgacgcaaatattgcatcatgcgtttcgaggattcccctcatttatttcactatatgtattcatttgcagtattgcttaaatatgttttgaataattaagttacgaacgtttaaacaaataaaatcattatatatgtatgtatattcgtgcatattctaaagaaaaagaattagggaattcttgcgatttcctggaactctcttcctgcgctctcttcgttcactctctctcttcggagaacggagctagaacgactatagcaccatgcgaagcttccgatttcatcatccttatgagcggctataaaagcaaagactctgacttcttcaatttcatttcatcattacgatgcaagcagttaacacgcgccagaagacgaatgcacaactaagtcaaatgggtgtaggataggtcaggattttaccagcagtgtccaagcagcagaaccttctaacccgacgcacttgctctctattacctgcagaactcaccaaacatcaagcatcaccatcgacctgcacactcacacacagatccaaatgattccaaggatacagtgagacaacctataattaccagcaccatgaataacatacagagcgcaccaaatggcgtggccgtgggcgtgggcatcaaatcggcccgtagcaacattttcaacgtggacggtctgccacagcagatggccgccatgagtgtggactactccagcatccggggcaaggatgtcttggtgcagcccacagaggagcagattgagctgctacaaaagaggctgcaggaccgcatagccgacaactgcggggagaccatctacgagattggcgtaggggagggtgagtccaaaaatgcctaggcttcctcaccaaaaaccacatgaaataacccgttttcggaaaatacagatggcagtgacagtggcctgaacccggagcagtttgaggcctccgtggccacgctacaccttctagcggccaacatagatgcggatgtggtcaagctgcgtgagcggcgggcagaaaaaggacaatcggcgcagttcctcatccgaaagcatatcgacactaccgactttatggaaataaggtacttaaaataaccggaattcccaccgttgcaccattttaatgtatctccttttattagggttgccgtcgtaggcaatgtggatgcgggtaagtccacattactgggcgtactcacccacggtgaactggacaatggtcgtggacacgcacgacagcgtctcttccgtcacaagcacgaaattgaaagtggacgcaccagctctgtgggcaacgacattctcggctttgatggtgtgggcaatgtggttaacaagccggaccacggccacctggattgggtgaagatatgcgagaactcagccaaggtgatcaccttcatcgatctggcgggccacgagcgctacctgaaaaccaccgtctttggcatgaccggacatgctccggactttggcatgctgatggttagtacattcctctgattttgtagcgtgccgtaactcttgattttctcatcctagattggcgccaatgccggcatcataggcatgactaaggaacatcttggtctggccttggctctagccgtgcccgttttcgtggtggtcactaagattgacatgtgcccggccaacgtgctgcaggagaacatgaagctgctctttaagatgctcaaatcccagggctgccgcaaggtgccggttgtggtgcgttcgcacgacgacgttgtcctaagcgctacgaatttcgttagcgagcgtctgtgccccatcttccaggtgtcgaatgtgaccggtgacaacctggagctgctcaaaatgttcctcaaccttctcagcacgcgaatgcccggctccgagagtctgccggccgagtttcaaatcgacgatgtgtacgcggtgccgggtgtgggaactgttgtgtccggtacatgccttcagggcactattcggctaaatgactgcctgatgcttggtccagacgcggtgggttcatttgtgcccatcaccatcaagagcatccatcgcaagcgcatgaacgtggcacgcgtgcgctgtggccaaacagcaagctttgcgttaaagaaaataaagcgcgcctatctgcgcaagggcatggtaatggtgtcgcaggatctcaaaccgcaagcctgctgggagttcgagggagagatactagtgctccaccatccgacgacgatatcggcgcgctaccaggccatggtccactgcggcagcatccgccagacggcctcaatcatacacatgtcgcgcgactgcctgcgaacaggcgacaaggcacatgtgaaattccggttcatcaagcagccggagtacatacgcgccggtcagcgcctggtctttcgcgagggacgcaccaaggctgttggcaatatactgcgtccgctaccgaatgctgccgctagcccatatcgccccaagcccgccaagatgcagtcgcgctcacataacggcggcagcaacggcagtaacaaccagcaccgccagcagggccagggcagctcctcgggcgccggatgcagcaaggacaacgccgacgagaagcagaacggcgacaagcgcgagggtggcagccggcgaggtggcaagcggaaaagaaataatcgcccgactccgtccggcggcgttggggtggatccatccaatggctcggcctctttgggtctgcccctcggcgagaatccttcgtcgtcgtcctcggttgaagtcacaccggccgctctcaccgagtgaagtgcgccgcctgcatgttttggctctttctagttttgtaaactaaagtatttttttttcaaattcttaaagataattggatgaatttattttgcgaccttctaatctaaagtggcatgtgccccaataaactatttcgtgtcccgttcttgtccactgtacattgtgctatatgccaaaccaaattctatattttgtttgttcactagacttaagacaaccgacgtcactgcagcatggatttcatttgtcttttcactgaataaacgcaggttgaaccagatgctacttgtgtacatgatattaaattatctctcgataaacttaaatagacacgactttataaattggaatcttaaattaaaatcttatagtttaagatgagtttaatgtctatgcaaactgaaaatgaaaacaaatttgctgacgcaaattacgttgaaagcgttgtaaatgcagacattaggttattatttgatttttttgtaaaacgatagtttcagaatgacaatctgaagttctcttttgtttttaagtgttaagataaaatggcaatgaataaggatttctttgtttcctaattaccttaataaaagcaatttcctattctacaaaaataaggttcattcaccgaagataatgttctggcttcaatgtttattcatctgtgtttactaaaatttatcttgccgcgtatatacaattgtagttaaacaagttaattactgaaccctagttctttttcttgctattaagctccttcttcactccctccagctcttggcgcacgttgttcttaaacatgttaacgaaggatctacaatttggaaaatgcatgtcagattggcggattcagccagatgattctggcgattctttcactcacttgaaacgctctggcgtcatctcgtgcagtccctgctcccgggccaagtcttttgtgcggtacatcagggaaacgaccaactgggcagcgcgtctcatgggatagctctccgccatgcgctggatgagctgctcgttgttggccaggtagcgcattagcagtcgcagcaccatcttgcccttttttttattttgctgccgcctagaactctgtgtccttgtatttgcgaattagctgctgcttaagcttcagctgatttcgcagtagttccagtctctgttgctgctcctccttattgaaatcgatcccggggagctggcggatttgctcgcgtgccgattcgaagcgtttttgaagttcaaagatctacaaatcaagtatatagcggtggcaacttatgacgaaccaaggactcaccttgtggttgcaatcctgggactcgcgcagcttaacggcgttctccagaggatccttttccacgctgaaagacacaaagacgccaggttatataaggtgcggcattaattgcgcacttgttgctaaaatccgccgattttcggcattgtccgtgcaggggcaatgacacccggaatccgcatccgcgatgaccactcaccagcgcacaatgtcgtagattatcggcagaatctcaatgtccaactggtcaaccgtcagatggcactggccgccgattccgttggatgtttgcgtctcctgcgatatggtcggct

SEQ ID NO: 12056 - DNA, 2871 bp, DROSOPHILA
aacgacgcgcggtacgtggcttcgggacacggaaaacaattttacgggaaaagctaaacaaattatgtacaattcgcaataaatccgaaaagatatagggacaaacaccagacggagaagaggagcacaaaaggctgcatgaactaactcaccaaacatcaagcatcaccatcgacctgcacactcacacacagatccaaatgattccaaggatacagtgagacaacctataattaccagcaccatgaataacatacagagcgcaccaaatggcgtggccgtgggcgtgggcatcaaatcggcccgtagcaacattttcaacgtggacggtctgccacagcagatggccgccatgagtgtggactactccagcatccggggcaaggatgtcttggtgcagcccacagaggagcagattgagctgctacaaaagaggctgcaggaccgcatagccgacaactgcggggagaccatctacgagattggcgtaggggaggatggcagtgacagtggcctgaacccggagcagtttgaggcctccgtggccacgctacaccttctagcggccaacatagatgcggatgtggtcaagctgcgtgagcggcgggcagaaaaaggacaatcggcgcagttcctcatccgaaagcatatcgacactaccgactttatggaaataagggttgccgtcgtaggcaatgtggatgcgggtaagtccacattactgggcgtactcacccacggtgaactggacaatggtcgtggacacgcacgacagcgtctcttccgtcacaagcacgaaattgaaagtggacgcaccagctctgtgggcaacgacattctcggctttgatggtgtgggcaatgtggttaacaagccggaccacggccacctggattgggtgaagatatgcgagaactcagccaaggtgatcaccttcatcgatctggcgggccacgagcgctacctgaaaaccaccgtctttggcatgaccggacatgctccggactttggcatgctgatgattggcgccaatgccggcatcataggcatgactaaggaacatcttggtctggccttggctctagccgtgcccgttttcgtggtggtcactaagattgacatgtgcccggccaacgtgctgcaggagaacatgaagctgctctttaagatgctcaaatcccagggctgccgcaaggtgccggttgtggtgcgttcgcacgacgacgttgtcctaagcgctacgaatttcgttagcgagcgtctgtgccccatcttccaggtgtcgaatgtgaccggtgacaacctggagctgctcaaaatgttcctcaaccttctcagcacgcgaatgcccggctccgagagtctgccggccgagtttcaaatcgacgatgtgtacgcggtgccgggtgtgggaactgttgtgtccggtacatgccttcagggcactattcggctaaatgactgcctgatgcttggtccagacgcggtgggttcatttgtgcccatcaccatcaagagcatccatcgcaagcgcatgaacgtggcacgcgtgcgctgtggccaaacagcaagctttgcgttaaagaaaataaagcgcgcctatctgcgcaagggcatggtaatggtgtcgcaggatctcaaaccgcaagcctgctgggagttcgagggagagatactagtgctccaccatccgacgacgatatcggcgcgctaccaggccatggtccactgcggcagcatccgccagacggcctcaatcatacacatgtcgcgcgactgcctgcgaacaggcgacaaggcacatgtgaaattccggttcatcaagcagccggagtacatacgcgccggtcagcgcctggtctttcgcgagggacgcaccaaggctgttggcaatatactgcgtccgctaccgaatgctgccgctagcccatatcgccccaagcccgccaagatgcagtcgcgctcacataacggcggcagcaacggcagtaacaaccagcaccgccagcagggccagggcagctcctcgggcgccggatgcagcaaggacaacgccgacgagaagcagaacggcgacaagcgcgagggtggcagccggcgaggtggcaagcggaaaagaaataatcgcccgactccgtccggcggcgttggggtggatccatccaatggctcggcctctttgggtctgcccctcggcgagaatccttcgtcgtcgtcctcggttgaagtcacaccggccgctctcaccgagtgaagtgcgccgcctgcatgttttggctctttctagttttgtaaactaaagtatttttttttcaaattcttaaagataattggatgaatttattttgcgaccttctaatctaaagtggcatgtgccccaataaactatttcgtgtcccgttcttgtccactgtacattgtgctatatgccaaaccaaattctatattttgtttgttcactagacttaagacaaccgacgtcactgcagcatggatttcatttgtcttttcactgaataaacgcaggttgaaccagatgctacttgtgtacatgatattaaattatctctcgataaacttaaatagacacgactttataaattggaatcttaaattaaaatcttatagtttaagatgagtttaatgtctatgcaaactgaaaatgaaaacaaatttgctgacgcaaattacgttgaaagcgttgtaaatgcagacattaggttattatttgatttttttgtaaaacgatagtttcagaatgacaatctgaagttctcttttgtttttaagtgttaagataaaatggcaatgaataaggatttctttgtttcctaattaccttaataaaagcaatttcctattctacaaaaa

SEQ ID NO: 12057 - protein, 669 aa, DROSOPHILA
MNNIQSAPNGVAVGVGIKSARSNIFNVDGLPQQMAAMSVDYSSIRGKDVLVQPTEEQIELLQKRLQDRIADNCGETIYEIGVGEDGSDSGLNPEQFEASVATLHLLAANIDADVVKLRERRAEKGQSAQFLIRKHIDTTDFMEIRVAVVGNVDAGKSTLLGVLTHGELDNGRGHARQRLFRHKHEIESGRTSSVGNDILGFDGVGNVVNKPDHGHLDWVKICENSAKVITFIDLAGHERYLKTTVFGMTGHAPDFGMLMIGANAGIIGMTKEHLGLALALAVPVFVVVTKIDMCPANVLQENMKLLFKMLKSQGCRKVPVVVRSHDDVVLSATNFVSERLCPIFQVSNVTGDNLELLKMFLNLLSTRMPGSESLPAEFQIDDVYAVPGVGTVVSGTCLQGTIRLNDCLMLGPDAVGSFVPITIKSIHRKRMNVARVRCGQTASFALKKIKRAYLRKGMVMVSQDLKPQACWEFEGEILVLHHPTTISARYQAMVHCGSIRQTASIIHMSRDCLRTGDKAHVKFRFIKQPEYIRAGQRLVFREGRTKAVGNILRPLPNAAASPYRPKPAKMQSRSHNGGSNGSNNQHRQQGQGSSSGAGCSKDNADEKQNGDKREGGSRRGGKRKRNNRPTPSGGVGVDPSNGSASLGLPLGENPSSSSSVEVTPAALTE

SEQ ID NO: 12058 - DNA, 14372 bp, DROSOPHILA
gacaatgtcccgtgcccaggtgccagcctccaggccctccatctcctcatttagtttgccatggaaggcgaacagggtgatgccctcctcatcgggaattgagacctcgaatcccttgggatagaaaacatcgatcttagccttgggtacttcatacccctgaacgccaaggagcaggaacagcagttggaggcagcagctccaggccacaaagcgcaatgcatccgccattgtgggaataccaattaaaactgcgatgagcggtcagacaactcggacttgaaaatctgagaatcttatcaagaaccggtcgaggcttgtttgttaaaggtgcactgcaaaaaagtacacaccgtaaagtgctatcgcagattctaaagtctaaagcctatgttgaagcaagtatgtgccatcgtagctaaaaataacaatgggcgatttaatcaagaaaataaaaagtaaaatacaataattttggtgtttttatatataaatatctttaatggtagtattttctaagtgtaatatttatttgagatttttttgccaatgtttagagaagagcgacaacactcccacaagaagaatttgggatttacccaatcacagccattgagagtaagcttttagaagtatgagtaagaataaagaagaacatacggacaaaatgtacaaccttctattaaagatgattttagagattttaaaaagcccgcttaataaacagcgaagttgcccaactctaacgtgtcagctgtttgtggtattgtggtatatcgataactttgcttgcggtatatcgctgtagtaataagggcataagggcatatcagtgaaagattaaatttttttgttaatagtttccattgttgccattaggtaaatatttaaacaatacttctattctgaaataataagcttcgccgtgtagcaggcgacgaatttcgatgaaattctgagtctcgtccgtttccttgtcttattagctttcgttctctcgatagaaaaatttgtagaaaatatcacacacgggaaaaaacaaaaacatgaacatatttttgtaaaatatttaattagcgagaaggacacagcgtacacgtatattttgtggtttcgcatgttgttcgtcagtgtttttgtgcaattatttgaaagatttggccaaacgcgaaacgcaacagaaagaggagaacacaataagacaataacaaattcgcagcgcgtgtgtcgttgaatgtgcgtggttgtgtgcgtttgtgctgctgccaaaagaacgcggatataaacaaatatccatttggatcgttggagctgttttgttattgtaagtaatgcagatttatgtaattcacttgtgtgtgtgctctttttgaccagtctttgttgttgtttctgcgctatgaaaacagctgtggcgttgccagacaacatagcgctttatataattttctatagggctgaattacacataattgctgtgcttagcttaattattacaacattggggccattatttattttccttgctaattacgagtgacatgtaaagttatcgataaatcgattggctcgttggatggtttgttatggcagaaggggttccaaacaacgcactataggctgaatggtacctttttgtggccaaaactccattctgtaattgagtgttgtaaatagcgcttttaggtatattagctgaaacaaaaacttatgtttaacttgagatttaaactgaaaatagagaaatctcaataaaaaaacgagttaatttaatataaggggcggtgccacgaccagaatttttggtactataaaagatatgggctagtgtcacccaatgcaaataacataaacaaaatatctctccgatttaaagttattaattttggccacaaaaaggtaccattaagcctacagtgcatcgcacgaaagcaaaacaagcgagaatgattgatttttcgtcgtgcgtcttcgggcgagtggcagcttcgtggaaaagcgggcagcagtgaaaacttttggcatcacagtcgttgctgacgagcggaagggaccgcagctcgggaaaatcaggaaagaaaacaacgcgtcagggcgctcttcttaaatttgaaaattaaatgcaactaaatagcgtaaattagtcaaaagtgtaaatagttaaaatcgttttataaccaaaaattaccagtgtaaatcgcttattagtgctgtgttaaaaatagttaccgttgtacggaaagagagaatcgagtgcaaaggaattttcctacgtcacaggctgtgcgtttgtgtgagtgtgcacccccggaaatgtaacacgcacactggcgcaggaaaaacttgcacctgaaagttttcgtcgtgttttccatcttcgtgcgctctcggcattcgacataacacaaaaaaaaataaattgaataacgcagcaaaaggttagttatccgctattcagtgcacctgtcaaaaatcctatttaaaattcggacttatttgccccagtttttatccagggctggcattatctaccgtcagcgcgtgtgtatattaagtgagtgtgcgtgcgagtgtgtgtgtgtgagagagtgtgtacgtaaccaattggaactggggcaactggcaaatacggcaacgaatcggtggagcaaagcaaacgccgcaataaacccctaaaaaatctccaaccccgtgaagcaagcacgagaaaagctggctgaaagctgcaacttggcccagttactttggctctaattgcagacgtgataatagaagtgcacacaaagcataatatttccagaggggtgggtgtgggaccaaaaccaaaaaggggagaataaaaaacagcagcagcagcatgacaaacaaaaacaaacttcatttgccaagagcctttcaaccaaatttgtttgcacactcatagctacagatagagatacaaagatacaattgcatttcagttgaagatgagcggctcttccacttttctcggtttctgagctctcgagttggtaaacaaaatttcgaattttttggggtggcaggtagaataactggttttataaattaacacttggccacattcaggggtagttttttaatgggtttcttcgtatcactttaaagcattatcaacaaatacgagttaagatttactattcgctgctgcacaccctaaatggaaaaactaaataaattttgaaaacgatacaataaagaaatgttaaattcaataccaactaaaaaatacagaaaaccaaagatgtaaaaaaaaagaaaaactgatctagaaaataactccttaactactgccaagtatattttgtagaagaagctgtgaaacttgggaaagtacccctaaaataatgccccaatcctaagccgccgctctttttgaagctgagccaagcagtctgtgcttttggcggcacattacacttgtttacttttgaagtgtgcgtgtgatacgcctgtgtgtatgtgagtgcttcgtggtgtgtgtgtgtgtgtgcgctccatgggggcgttactgtctttgttgttgttattgctgtacgtcgtcgtcgttccttcttcggctattttttgggggtcgctctcgtctcgtttgtagggcaaaattgtgtattgattatgccagttttattttccttttgtctacatccccagcccagtttcaaaaactggaaaagtgtggggcacctgcggtctgtttttcatgcccgactgagccatttcattggcacagcgatttcgttgtctctccgcatttaactaattaagagcctctgtctgcccatctcccccctttttcagaacaatagacgttttccggtcgctcagcccaaaatgaagtgcgtgtccagggacagacgaaaagctttagaaattggatagtttagtgcactcaacgaaattttcagatactttgcatatcttatttttggacttaaaatgtaagaagcttaagaagaaaacaatacatatcatatgtaaatgctcctttaagtaggcaatattttgttcaaaaacagttttttttcgagtattttggaacaatactttatttatgattaaaatattttattgaattatttataataatactttgaccacattataatagtttaattttgatttaaattgcatattttgagaaactaaacatagcaatgtgtggcacctatttccctcagtgtttctatatgctgcgcgtattatatgcaaaacgggtagcatatttgaccgacatcgggaacagcgggctctgaaaatcgtttgcctccgggggtggcttttgtaattggaaaagcgatcaattgtaatccccccaccaggcgggttttcacttgactagcgctaccaatttagaactcgctataccccattatcaggccatatctacacacttttattactcatgcacaaaatacgaaaggcaaaagtttagaatagcacttgtttatttgttatttttggcccgtcgcttgccaagtttgcttttatcaataatatgattgattgctgttcggttccattgtttttttctttcacttttttcccacaacacgcattgcacattttgtgacccattttatctttggcttttcgttgttagcccgattaaagaacgtgaatagatagggaatttcttgttggccataaaaatagctcagtcacatcgaaacgcaattaccaatgcgctctgtgcaaaccgtcagtttctaatagccaatttagaatttaaagttcaatgggatatatacatttatcccagttttttaagcatatgcttatttagttgaatatattagtattttaatatacaatgttttgtcagcatattggagtgaaactattcacccaatttgtaacttatattttcttataaattttcctttcatcgttaaatggtaaaatgctctgcgaaaataaattttctttgaaatgattttctgatgagctggcgaagatcgtccaaacggtcactggtaaaaatgtattaagggttttaaaaatagcaaaataaaaattaatgtcaaatagctattgctgctgctttggtcgctttgttgttgctgccactgctgctttttttttcgccttttccccgtacgatttatttatttttaaacgcaattacgtgcggctctagtgctgcgatggcaaatgagaaagggggggggggggggtgttgtgcggcgaaaagtgggcgtgtggaggaggtggaggggctcgtttccccctaacaacacacgcatgacgttgacatttcgaaaacagcaagtgttcaggccaaaatatgatcaacatatcgcctgtctacctacctacctatatacccgcctaacgtttcgtctttctacttcactatcttttcatgtgccgctgattgatgtttgggacactcggattccgattgcgcggctccacaacgattccgatttccacgtgctccaattttcacattttcccatttcccccatttcccatgaagggcatctagggcagcagcggaactgaggcgcagcggagccgcccaagtgcagctgtagaaagtgttggtgcgggcgccatggactcgctcaagttaccaaagggtaagtgtccacacccggagatctcggcggaatttaacctgctcaagtggaaatcccttggtgtcacacagttaacttaatgtgaagataaataaatcaatgcccggtttgatttctcacgtttgcaaattgaactttttcaaatgtcaactaatcatttgttacttattatattgtctaatcgtatctttgattatatgtattgtattatttcgctttttgatcaaactgattaaaagtaattgaatttttttttataacaaaatggcactcaaaatgattttaaatgagcaagttatccaattccaagacacgaccccttcctgtgaattgctttcgattgctgacaacttaacccgtattttccattcaacagccaacagtgccaccagcagtgccagcggcagcaacagcaacctgtccggttcgacttccgcgtccgcatccgcagccacatcgcctacatcgtcaggaactgcagtgggtggcattctatccggtgccccaaaatcgccacctggcctgggcagcagcaccccgatctcggtgcgattcaatgccaacgaggagtccctggacgacatcctacagtccttccatcacagcaagcatagtcccagtggaggagcgagtggcggcggagatgcctcgcccacatcgaatctgctcgggatgaagaacaacgggctgggattggtcgtgggcaactgtgactccctctccagcagtccatcgcagccccagatgcatgccggatccgcatccctcttcggcgtaagtaaaaagtgcagcaatagtgaaatgctgtccaagaaataggaaaacgcctatctaagttatagatattatctttaattaacgcagcatggcaattattattagtttcgttgggagtccgctttaataggttacacgtgttggtatagtcacaactaaacatatctatccagctatcaaatatgcttattttgcaaattatttacggctagcagtttcaaacatgcttaaatagccatgactatagaaatttcattaagtacttaaatacaaaatgattttaggtttatagaaatttaatgagggaaagaattctaggtgtattctttggacacttcaaagcccatttatgtcgctgtataaaatccaactggaatggataggaaattgtctaatctagagccgttggcagtgaactcaatactttgtttattttccgcaccgttcgccctccctgggccccccttatcatttatcgaaacaggccgccacaaattatgattcatattcattcgtcgcgagtccaagtttgtcgcaattaaacataaattgtacagaacgcgccgcgtttgttcactgatcgttgtcggtcgccaattagcattcgcctggccaaattagtggaacacttatcttttgatttctgtgtacggccacaaatagtttcactttttggctgtccgatttcggattcgtattcagattcggattcacattcagatacaacgggtacggatgcgttggcttcgcagcgaacgtcgcgtgtggctatttcggtggtttcggggcgacataagtatgtgacttttgctgcaagcgcagaacatttgccaaaatttgcaacagatgtgccgctggcgattgcaaaattcatttggcattattactcactattgcaaaatgttcttttcgtttcatctctgccaatgacgatgcccccccccccaacaactgcaatgatgacgatgtggatgcttgatatgaacacagaacgacgaagttagtctgcgcaataatttcatgcaagccggtggtttcttcaatcgaaaaaggtgagtgccgaaattgtataacactttcctgggcggatgatgtgtgtccaagtgtgtagagttaacaaggaaccatcgtaacactaatgttgttgttgttgtcatgcgagctaatacatatcccacacaagatatatccatagttccatccacacaaaacaccggaaatacatgcattcgacacatttgcttagtgactcacagagcttagtgatcgcctcgaaagccaatcctacgagttagttgtatctatctatagggatgttttaattttaaatctccttgaaatgaaatctttgctcgtatggaaactttaaatttgcgcgcaaaaatctttgttctgtgatatgattttattttctagagttgccgctttgaaaactgcaagttatctggaatatagacgtaaaagattttagattgctacacatttaaaagccttattttgctgcaacccactttccttgaagtttttttttggccccaagttcgttgaccgttgacaacaacaaattacttggctgcagttttgtgactttgattttgtttatgcgcgcatatacacacatgaacatacatacatacatatgtatgtatgtatatcctgcaccattcgtgcatttttaatgcactccggctgcagccggcgtgtgccaatggccgtaaacttgcccgtccgtcggtctacgcttttgttgcttttgtcactgcacaactgcatttgttgttgctactgctgttgttgttcttgtttggagcatctgtggagtgcactagctaaaggatctgaatcagcagcggtggtgggtgcgctttgtttatgctgccttgcaatatgcaacatatatatacgtgtgtacctttttccttctttttttttattttgtatcctctgcccgtctgcaactttcagctcaagtgccgccccgtctggcccagtgggcggtggtttgttgtgggtgggtttgtcgtcaacgggacatcaacgtcaccaacgttccgctcaagttctgtttctgtctgctctccatttccatttgcttttttaccatttccctcgctcgcttttaaatattgaaaaaggcaagtctagctgggattttgctacctgagaagaagctattgccaccttcaaccgtttgacgtcattgcgcttgcctgattcgctttattgatttccgtgagctgatatcgtatgcaaacacgtctatagcgtctattggcggtcttgaagagcatttggctgtccgattttcaatttggccatcaatcagagttgactattttgtgtcgcctcgctttcgcagcacactgtattcattcatttccgttgcctttttaattaagtttccgggggctaattgcattttataattgcatttttcagcactgcctggtgccgttattatcgtatccaaacctctcgtttcgatgatggtgctactgactagttgtcgttgctttttgcctttccgttgctcttgttacgcgtgcccttatcattcagcttcacaccaccaccatccaaccatccatccagttagccacccacgcaaccacccaccgcctttccatgttgttgccgcttttttatctatttacacttgtacacgtttctacatgtttgttatacacacatttcatcatcgtcatcagcacccgcagcatcatcatcatctgcaacagcagcagcaacatcgggctgtggatgccaccttaagccacccacttcaccgcccccccccctacattttcgctatcgccccaccccatccaccagagacaccgcaggcccccagcaacgcaagttgtctcgtcggcgacgttttaaattaaaaatttccatgcaatttcatgtctcggtggccttacagttgggcatgcactgcacttggcccaatcaattagcatgaacgtgtcaaagcatcaacactcacacacttaaacacacacccaagtattggccaacagtatgcgacggcagcagcagcagcagcaacaacaacaacaaacataaacgtaacgaattgatacacatttgaactatacacatagtttagttttctattagcggacatgtgtactcgttacctcgtattaaccccttgccgcccactgtgccgcgcgactatttttggttggctttcagttgttacttttttctagaccaatgattgtccttttttcggttttcgtttgtttctctgggcaaattttttgactgcctcgaaacgtttgttgtggtgctaagtgttggatattttccctttcgtattgaaaatcatcaaaatcaaaaaggatacatacatacatatgtatataaagcaatcgatcgttcgcgggcacagtgctaaaaccgaactaacaaatccaaaaatatactcaactgctgtgccgatataactgcgcctctttcaaaaagataatatgctaaaccttcgccaaaaacaaacaaaaataaaccacaaagcgccagcgtaacttgaaattttcattttgattggatgtgtcgccaaagccaaagccaccaagccaccacaaaaagaaaagaaaaaaaaaagaaaaccaccaagacaaaactcgttccaccaccaccaccaccaccaaatgccacccacactatttaccacagcaacagtaatcctacaccacaaccgccaacaacaacaacaaaaatcgggaaaattatatatataacaaataataccaaagcaacgtcgagcataaagttaaattaaaaaggagcaatttaggatatgagaagataagttaggatagttcggatggtttaggaatttaaacaaataaataaattttacaatatttcattgcgtttcttgttaaactgacatcatagcagtaggctttaagaataatgtagtatattatagtagcttgtctcatattcgcataagtcatttctagttaatgtttcgacaaaacaatacccaaaattttgtgtgtgattgtgagtgtccgtaaaaatgtacaacaaatttgttaatttcatgtaagttccgccacgattactttcagtttttcactgttttcgtttacaatacttttaattttcgaacgccgggcggcaatgggttaagcctacacctacacctacactaaaccgaaccgaaacaaatccgaatccgaagcaaatccttgaacaaattgctcctttttcataatgcaacaaactatacagacctgaatcaatcagaatcacaatatcagtccaaaattcaaaaatcatccactaaaaattgccaatgttgtaaaagcctcttcatcttgttgtcccttcttcctgcagttgcggtggcctgccgaatctcaatctcaacaagccgccccagctccaccagcaacagcatcaacaacagcatcagcagcaccagcaacatcaacagcagcaacagctccatcagcaccaacagcaactgtcgccgaatctgagtgccctgcaccatcatcaccagcagcagcagcagcttcgggaaagcggaggatcacatagcccctcgtcgccgggtggaggaggcggaggatcgccgtacaacggctctcaggcgggctgcagcagcggcggcatctcgcccattcctccccagatgggcgtgtcgcccaaataccgtcgcagcatatcctttcccatcaagggcaactcgcccacagctatctatggcaatatgcacatggacggcatgggtagtgggcacatgaatataccgacactttcgattggaaacggtggtggtggcggatctactggcatggtctcagccggagcaactggtggcggagatgcgccctatttgggcaacagctatggcaacatgatgacgtccaatggacaaatgcaccacggtggcggcttggataactcactgtgcgattatatgcgcaacatgtcgctgggtggaaatggtggtggcgatggcagcaacagcatgtctttaatgcaggacaggatgcgtgtgatgggcggtccgaagcatctgagcgaggccgatgctatggccatagcagccagtggaaatgatccatccgtctacttaaatgccctcaaaatgggttcgccatcgaggctctctccacactcgccgcactcacccatccagggcggaaatggaggaaacgtcggcgatggcacggctcgcttctcccggaaggtattcgttggcggtctgccaccggacatcgatgaggatgagattaccacttcgtttcggcgcttcgggccattggtcgtcgattggccacacaaggcggaatccaagtcgtattttccgcccaagggatatgccttcctgctgttccaggacgagagcagtgtgcagcagctaattgactcgtgcatcacggatgaggacaagctgtatctatgcgtttcttcgccgacgatcaaggataaggcagtgcagattcgtccttggcgcctggccgatgcggactatgtgcttgatgctaccatgtcactggacccacgcaaaacggtgtttgtgggcggcgtgccacgtcctctgaaggccttcgaactggcaatgatcatggatagattgtacggtggagtatgctatgctggaattgacaccgatccggaattaaagtatccaaagggcgctggacgtgtggccttctcgaatcagcagagctacatagcggccatctcagccagatttgtgcagctgcagcatggcgatatagacaagcgggtggaggtcaagccctatgtcctggacgatcagatgtgcgacgagtgcgagggtcagcgttgtggtggcaagtttgcgcccttcttttgcgccaatgtcacctgtctgcagtactattgcgaacactgttgggccgtcatccattcgcgacctggacgcgaatatcacaagccgctggtcaaggagggagccgaccggccgcgtgcggtcccctttcgctggtgttaacggcggcgctggtaggccgcgctgcacgacgagagacgccaacagagggagcaacgacaccggttgttaaacgcagcgctggcagtgcccagaatcataacagaatcatcaggatcgggaggagtcgcagaaggagcgggagtggcagcactagatgccgctggcggagatgcggatcgaaggcgaagaatctagtagataaccattagagacaacacacgcaccaccaacacccactcacacacaacagtcggatactattctcataagcaaaagacaattgcccgggggaatcacccattccgaagggcaaggtgcaaatacaacgggagctggacaaaggtgtccctttgaatagccaccagagtctacagttttagaggcgagaaacgaaagcaacatagtttttagttcttatttattcggcaatcagttttttttttttgtttcgcgcttgctagttttacatttgcttaaccgaaattttagttttgattttgcgttcgatgcctgcacagtattttttgtactttatatttttagcaacatttatgtttgctaatatgttatttaatctcacaaaagaaaaaaaaaaggaaccctcgtagtcagccaatttcctcgcaaagggccgtttacatatattataatctttttgtaactagataacttagtagccatcatcttgtatgccaatcgaggctagtcctaaaattattagtgagctgctcaccctctctcgaaaaggctttttgcttgagtgtgcaggggctgtccttaagttcctaaattgtgacaaaatcaaaactacatcggtttttgtattagccctttccgaaattagatcaatttataaaattcttacaaaagactttagaaaagacaatatgcaaaatgtctgacatttgtatgctagccatttcttacgacacaattggtaagagatcgcttaatcatatcatatctgcatacagttataatccctatttatttttgtttaatccttacataatacggtctattagcattcccactgaagaatcgtatatattatctgtgcaatatattcgattgcttctccgttacatgctgctaattcttgcttatctaacacttatataattattgtatgtgaaaatcgtacaaagcttataaaacacacaaaaccaataggtggcgattgcttccccgttacatgctacttattcctgcttatctaattatataattagggtatgtgaaaatcgtacaaagcttatacacttactaaacgattcttaacttgttaccactcctgccaataggtggctttcactacgattttcacacgactccgttttatgttttgctggcacattgaaatcacactaattaatgagtttaaaccccacactctgagataggttcttctttcctaatattgatggctcatttttaattataatctagtccacactcatacatacacgtacgtacacagacaacaacaacaacacatttacactgaaagtctgtttgcatttgttgccatttggcttaatgaagaaaaaataataataaaaatatacatataattagaactaaaatgtagaaaaaaacaaaacagtcaaattgcttgtgttcagtattatgatttatttatgattttccactgaaatgtcatattttgtttatttattaaccaattgtttttgttatttaatttacggcgtgttgctaactaagggacagcgggctcacctcccgaagctatagaagaacgtatatattattgcaaatatataaatatatctgtaatgtaaaaagtaatttttatatacgacatacatctattaacactatgaatacttgtattagacaactttttatatagaaacttttgtataaacttttttttattactcttatgattattcagaagttagtttagtccaaacaactgaatacaaaaataaaaccaaaaacgcgaagataaatagacatgctaaaacatttaaagaaaattt

SEQ ID NO: 12059 - DNA, 3523 bp, DROSOPHILA
atagaaaaatttgtagaaaatatcacacacgggaaaaaacaaaaacatgaacatatttttgtaaaatatttaattagcgagaaggacacagcgtacacgtatattttgtggtttcgcatgttgttcgtcagtgtttttgtgcaattatttgaaagatttggccaaacgcgaaacgcaacagaaagaggagaacacaataagacaataacaaattcgcagcgcgtgtgtcgttgaatgtgcgtggttgtgtgcgtttgtgctgctgccaaaagaacgcggatataaacaaatatccatttggatcgttggagctgttttgttattggcatctagggcagcagcggaactgaggcgcagcggagccgcccaagtgcagctgtagaaagtgttggtgcgggcgccatggactcgctcaagttaccaaaggccaacagtgccaccagcagtgccagcggcagcaacagcaacctgtccggttcgacttccgcgtccgcatccgcagccacatcgcctacatcgtcaggaactgcagtgggtggcattctatccggtgccccaaaatcgccacctggcctgggcagcagcaccccgatctcggtgcgattcaatgccaacgaggagtccctggacgacatcctacagtccttccatcacagcaagcatagtcccagtggaggagcgagtggcggcggagatgcctcgcccacatcgaatctgctcgggatgaagaacaacgggctgggattggtcgtgggcaactgtgactccctctccagcagtccatcgcagccccagatgcatgccggatccgcatccctcttcggcaacgacgaagttagtctgcgcaataatttcatgcaagccggtggtttcttcaatcgaaaaagttgcggtggcctgccgaatctcaatctcaacaagccgccccagctccaccagcaacagcatcaacaacagcatcagcagcaccagcaacatcaacagcagcaacagctccatcagcaccaacagcaactgtcgccgaatctgagtgccctgcaccatcatcaccagcagcagcagcagcttcgggaaagcggaggatcacatagcccctcgtcgccgggtggaggaggcggaggatcgccgtacaacggctctcaggcgggctgcagcagcggcggcatctcgcccattcctccccagatgggcgtgtcgcccaaataccgtcgcagcatatcctttcccatcaagggcaactcgcccacagctatctatggcaatatgcacatggacggcatgggtagtgggcacatgaatataccgacactttcgattggaaacggtggtggtggcggatctactggcatggtctcagccggagcaactggtggcggagatgcgccctatttgggcaacagctatggcaacatgatgacgtccaatggacaaatgcaccacggtggcggcttggataactcactgtgcgattatatgcgcaacatgtcgctgggtggaaatggtggtggcgatggcagcaacagcatgtctttaatgcaggacaggatgcgtgtgatgggcggtccgaagcatctgagcgaggccgatgctatggccatagcagccagtggaaatgatccatccgtctacttaaatgccctcaaaatgggttcgccatcgaggctctctccacactcgccgcactcacccatccagggcggaaatggaggaaacgtcggcgatggcacggctcgcttctcccggaaggtattcgttggcggtctgccaccggacatcgatgaggatgagattaccacttcgtttcggcgcttcgggccattggtcgtcgattggccacacaaggcggaatccaagtcgtattttccgcccaagggatatgccttcctgctgttccaggacgagagcagtgtgcagcagctaattgactcgtgcatcacggatgaggacaagctgtatctatgcgtttcttcgccgacgatcaaggataaggcagtgcagattcgtccttggcgcctggccgatgcggactatgtgcttgatgctaccatgtcactggacccacgcaaaacggtgtttgtgggcggcgtgccacgtcctctgaaggccttcgaactggcaatgatcatggatagattgtacggtggagtatgctatgctggaattgacaccgatccggaattaaagtatccaaagggcgctggacgtgtggccttctcgaatcagcagagctacatagcggccatctcagccagatttgtgcagctgcagcatggcgatatagacaagcgggtggaggtcaagccctatgtcctggacgatcagatgtgcgacgagtgcgagggtcagcgttgtggtggcaagtttgcgcccttcttttgcgccaatgtcacctgtctgcagtactattgcgaacactgttgggccgtcatccattcgcgacctggacgcgaatatcacaagccgctggtcaaggagggagccgaccggccgcgtgcggtcccctttcgctggtgttaacggcggcgctggtaggccgcgctgcacgacgagagacgccaacagagggagcaacgacaccggttgttaaacgcagcgctggcagtgcccagaatcataacagaatcatcaggatcgggaggagtcgcagaaggagcgggagtggcagcactagatgccgctggcggagatgcggatcgaaggcgaagaatctagtagataaccattagagacaacacacgcaccaccaacacccactcacacacaacagtcggatactattctcataagcaaaagacaattgcccgggggaatcacccattccgaagggcaaggtgcaaatacaacgggagctggacaaaggtgtccctttgaatagccaccagagtctacagttttagaggcgagaaacgaaagcaacatagtttttagttcttatttattcggcaatcagttttttttttttgtttcgcgcttgctagttttacatttgcttaaccgaaattttagttttgattttgcgttcgatgcctgcacagtattttttgtactttatatttttagcaacatttatgtttgctaatatgttatttaatctcacaaaagaaaaaaaaaaggaaccctcgtagtcagccaatttcctcgcaaagggccgtttacatatattataatctttttgtaactagataacttagtagccatcatcttgtatgccaatcgaggctagtcctaaaattattagtgagctgctcaccctctctcgaaaaggctttttgcttgagtgtgcaggggctgtccttaagttcctaaattgtgacaaaatcaaaactacatcggtttttgtattagccctttccgaaattagatcaatttataaaattcttacaaaagactttagaaaagacaatatgcaaaatgtctgacatttgtatgctagccatttcttacgacacaattggtaagagatcgcttaatcatatcatatctgcatacagttataatccctatttatttttgtttaatcctt

SEQ ID NO: 12060 - protein, 704 aa, DROSOPHILA; identical to SEQ ID NO: 11961

SEQ ID NO: 12061 - DNA, 4362 bp, DROSOPHILA
gcgtcatctcgtgcagtccctgctcccgggccaagtcttttgtgcggtacatcagggaaacgaccaactgggcagcgcgtctcatgggatagctctccgccatgcgctggatgagctgctcgttgttggccaggtagcgcattagcagtcgcagcaccatcttgcccttttttttattttgctgccgcctagaactctgtgtccttgtatttgcgaattagctgctgcttaagcttcagctgatttcgcagtagttccagtctctgttgctgctcctccttattgaaatcgatcccggggagctggcggatttgctcgcgtgccgattcgaagcgtttttgaagttcaaagatctacaaatcaagtatatagcggtggcaacttatgacgaaccaaggactcaccttgtggttgcaatcctgggactcgcgcagcttaacggcgttctccagaggatccttttccacgctgaaagacacaaagacgccaggttatataaggtgcggcattaattgcgcacttgttgctaaaatccgccgattttcggcattgtccgtgcaggggcaatgacacccggaatccgcatccgcgatgaccactcaccagcgcacaatgtcgtagattatcggcagaatctcaatgtccaactggtcaaccgtcagatggcactggccgccgattccgttggatgtttgcgtctcctgcgatatggtcggctcgaagggggagttcgaagtctgaaccaggccgtcggcggttaggatgggttttctgtcctcgatctgattgtttggcgacaaatccatcataaaaaacacgaatcgaatttccagcgtcagaatcaataggaccttaccgacaacacgtaataataccaaagtaatgccctcacattctcttaattcgattaatatactaaagggaaaagtagtagatgcacaacctgctatcgaagtacgatagaccgatagagccaggcaaatgccgcctctgcttatcgataacaagcaacgaatcgtttagaatttataaagaagaaaaacataaagccaacatgagcgacagcggtgttttcgccttcgtaagtagctgcacaaataaaaaactcaatagattaaacctcgtttaatctatctaggagcttggcgatgacctagccacacgctgtggcaatacactcactggcgtctttgtgccgggctcacgaatcgcactcagcgcctaccggcatgtgacgcacagttcgcgggatgagcccacagagaatgctggacaggttccggtgctcatctacatggcgcaggagtcgacgctgttcgacgaacccgttctccgcagcgtactcgccgaggcgaatgccacgttcgccacgctgcaacagttgggttcgcgggccacacgtgccgagtatgtgaatatatcccgggcatacaggagcattgtgcgctcatgcctggagaagctggagcaggcaaaaaaatcgccggaggttcagacagatgaggcgcgcctgcaacgcttatgtgatgccatcgttgtgttctatgcggcagaatgcctgtggcatctcttcgagattctgtacattcagagcaatcagctggtggtgccgcagctgctcgactgggcgcgtttccactcgccgcacgcagaggacagagccacggatctactgctcatgggagaggaggccagcgaatctgatgactattggagcattgtcaaatcactcattatgctgggcgaaatagatgttacgagagcagttctctcgcagaatcgcaaagctggacaaacgagcttcaaggcggccgaacagatcctgaagtccatgccagtgtatcaagagggctatgccctgcagaagtttcactcgcagtgggagttctggcacgtggatacggaacgcaagattcagtccggcttatttgccacggagccggagctggagcagttgattcgtctggtcgccggcgacagcgagcagtgggatgctggcatcaaagagtcccaggatttctatgaatacctgccaggatacctgctctttaccaagcccacctgcaaaccctttgagctgaaaatagcggcagccaaatggctaaaccgatggtgtcttctccggccggaaagagagcagtgcagcatgaaccgcatggtttctcagcttatggatcacgatcttagactatttatatacgatgctcaaaaacttaacgacacacactggttctcaacgcatttgattgatcttatccatcattgtggtcagctgaagagctatttcgatcagaacaacatgtgagtttttttgtcagaagttatgttcaatcaatatgctatatattttatgcacccacagcgatcttccggccctgcgtcactcaatgatctatgagtacggcagctatctgatgacgtcccacaatatgtggcaactgggcatcgactatctggactgttgcaagcaggagggtcaggcggctatcgagctgcttttgccccgaatcactttgcgcagcgagcggcaagccaccaagcttattaacctggccaggcagcgcgggctcataagcgtagaacgggagatctgcaaggtgctttcaaagcgatcctacgataacgagcgttatggaaacgccctggaatgggccattcgctccaaggatgtgctgctggttacggcggtagctgactttattttaaaggtaaatataaactatttttgcataagtatttcattcaatttgatttgtatattgatctgtggcatagcattactcgaaaactggctgcatgctttgcccggacaccattgccaatgtcggtggccgaatgtttgcctcaccgcgcttggtgtttctctccaagtactttgagttctatgagttctaccgtacccgtgattttctttctgcctccgagctgctggtgaatcttttggaatccaaaattacgccagactagtaagttattgggtttactacgaacacatttaaaagtaacatatattcttccattagcttttggccatcgttgctcatcgattccatgccactgctagagtccaaagatccgaagatcttcgccaaggaaacggtggccattctgcatcacattgaaaccgatctggtgcccatcatcgaacgcgatgtgtccaaatatggaaaagtatgtctagcgttgcttgcgttttattgatgtctaataattgggctattccttcgcagcaccacacagaaaccgtgttcaaggactatcgggtggagaacgttgacgaaatcatgaacctcctgcgcctggcctgcgcacgcaatttggcccgagcattgatcattgagaacactttgcccgtggtgtgattttgaatgcatttttaatgtaatttattttgtatttttcgcttttccaatacatcgtaatttgttatagatcgcgcttgcattgctaacttgttattcatacgcattttgtttatatcttgtgcctctttgctatgtatttattgtaccaacaacactacttgactggctgctgccctttgactaaaaaggtaatccaagctgctggggggctggagggatgttcacagtacgcatttgtaaaataagtgttcccgtcgaacgatgtccgtcccggtcaactatgctagtttgaacggcgtgggtaaatctataggatacacttctcggttataggttaggcgggcaaacaaaggtgcttaggccgaacttagaacttaatatataaatcaaacactacgaaataattcagtatgttagctgcacatggaggaagttgattacacacgtatgcgacgcacctaagaactattaaacaacgcccagagtacaagggtagtacacatagtttgatgcatatgcgtggatatatatatatatataatctattatatatctgtggggtatgtatataattatcatatattgtggctgttacttgttatgagaatcgcacggccttgtacaaatgttcggttactacgtacggaattacatttaaagtcgcttgtctcttggcttggcccgcggaccgccaacggcattgtaaaatgtatcgttcgcttggtaaaaaacaataactaaactaaaccaaacttagacgataggccgcctggggggggagtcgcactgtatactatcattctaattcttaacaaacttctctcctaaacgttttgtatgccaaatcacgctaggcaacagaaaatactcaaataatcgcatccttttcacttttaagaagattttagattactttttaggattccaatctcgaactgacaatgaagtcgattgtataaatgagtaaatatcaaagtatatataaaagagactttta

SEQ ID NO: 12062 - DNA, 2061 bp, DROSOPHILA
ataacaagcaacgaatcgtttagaatttataaagaagaaaaacataaagccaacatgagcgacagcggtgttttcgccttcgagcttggcgatgacctagccacacgctgtggcaatacactcactggcgtctttgtgccgggctcacgaatcgcactcagcgcctaccggcatgtgacgcacagttcgcgggatgagcccacagagaatgctggacaggttccggtgctcatctacatggcgcaggagtcgacgctgttcgacgaacccgttctccgcagcgtactcgccgaggcgaatgccacgttcgccacgctgcaacagttgggttcgcgggccacacgtgccgagtatgtgaatatatcccgggcatacaggagcattgtgcgctcatgcctggagaagctggagcaggcaaaaaaatcgccggaggttcagacagatgaggcgcgcctgcaacgcttatgtgatgccatcgttgtgttctatgcggcagaatgcctgtggcatctcttcgagattctgtacattcagagcaatcagctggtggtgccgcagctgctcgactgggcgcgtttccactcgccgcacgcagaggacagagccacggatctactgctcatgggagaggaggccagcgaatctgatgactattggagcattgtcaaatcactcattatgctgggcgaaatagatgttacgagagcagttctctcgcagaatcgcaaagctggacaaacgagcttcaaggcggccgaacagatcctgaagtccatgccagtgtatcaagagggctatgccctgcagaagtttcactcgcagtgggagttctggcacgtggatacggaacgcaagattcagtccggcttatttgccacggagccggagctggagcagttgattcgtctggtcgccggcgacagcgagcagtgggatgctggcatcaaagagtcccaggatttctatgaatacctgccaggatacctgctctttaccaagcccacctgcaaaccctttgagctgaaaatagcggcagccaaatggctaaaccgatggtgtcttctccggccggaaagagagcagtgcagcatgaaccgcatggtttctcagcttatggatcacgatcttagactatttatatacgatgctcaaaaacttaacgacacacactggttctcaacgcatttgattgatcttatccatcattgtggtcagctgaagagctatttcgatcagaacaacatcgatcttccggccctgcgtcactcaatgatctatgagtacggcagctatctgatgacgtcccacaatatgtggcaactgggcatcgactatctggactgttgcaagcaggagggtcaggcggctatcgagctgcttttgccccgaatcactttgcgcagcgagcggcaagccaccaagcttattaacctggccaggcagcgcgggctcataagcgtagaacgggagatctgcaaggtgctttcaaagcgatcctacgataacgagcgttatggaaacgccctggaatgggccattcgctccaaggatgtgctgctggttacggcggtagctgactttattttaaagcattactcgaaaactggctgcatgctttgcccggacaccattgccaatgtcggtggccgaatgtttgcctcaccgcgcttggtgtttctctccaagtactttgagttctatgagttctaccgtacccgtgattttctttctgcctccgagctgctggtgaatcttttggaatccaaaattacgccagactacttttggccatcgttgctcatcgattccatgccactgctagagtccaaagatccgaagatcttcgccaaggaaacggtggccattctgcatcacattgaaaccgatctggtgcccatcatcgaacgcgatgtgtccaaatatggaaaacaccacacagaaaccgtgttcaaggactatcgggtggagaacgttgacgaaatcatgaacctcctgcgcctggcctgcgcacgcaatttggcccgagcattgatcattgagaacactttgcccgtggtgtga

SEQ ID NO: 12063 - protein, 668 aa, DROSOPHILA
MSDSGVFAFELGDDLATRCGNTLTGVFVPGSRIALSAYRHVTHSSRDEPTENAGQVPVLIYMAQESTLFDEPVLRSVLAEANATFATLQQLGSRATRAEYVNISRAYRSIVRSCLEKLEQAKKSPEVQTDEARLQRLCDAIVVFYAAECLWHLFEILYIQSNQLVVPQLLDWARFHSPHAEDRATDLLLMGEEASESDDYWSIVKSLIMLGEIDVTRAVLSQNRKAGQTSFKAAEQILKSMPVYQEGYALQKFHSQWEFWHVDTERKIQSGLFATEPELEQLIRLVAGDSEQWDAGIKESQDFYEYLPGYLLFTKPTCKPFELKIAAAKWLNRWCLLRPEREQCSMNRMVSQLMDHDLRLFIYDAQKLNDTHWFSTHLIDLIHHCGQLKSYFDQNNIDLPALRHSMIYEYGSYLMTSHNMWQLGIDYLDCCKQEGQAAIELLLPRITLRSERQATKLINLARQRGLISVEREICKVLSKRSYDNERYGNALEWAIRSKDVLLVTAVADFILKHYSKTGCMLCPDTIANVGGRMFASPRLVFLSKYFEFYEFYRTRDFLSASELLVNLLESKITPDYFWPSLLIDSMPLLESKDPKIFAKETVAILHHIETDLVPIIERDVSKYGKHHTETVFKDYRVENVDEIMNLLRLACARNLARALIIENTLPVV

SEQ ID NO: 12064 - DNA, 3529 bp, DROSOPHILA
ccctaactccattcaaacggatttaagttaataaattcaaaaatattaattaaataacatttaatgtacaaataaatgttatctggtttaattatattctccagagaatgataagtatagttataaaagtaatttatcaacagatttttaaattgtagtcacttaaattccattaaatatccgtttctctttatgatttaaacgttattaatacgatataattattttattccgcaacaataacttttaaatgccacttttgtgttccctttcactatgaacaatgatattcaaaaattatctagcttgaattcaatgacgtgctaaaatgacatcattttattaccattaaagaccctaaaaagatatttgctaaaaacgcagttcgaaacatttttgtcatttatttggaagtgagtcaacagataagggaatgtacattcatagttcattgtttagtttctttttcttttttgcttgaaatatccggttggactcgttccggatgccatagtcatcagtacatttatttttgtaaaatgcataacatattttcaactatctctaaagtaaagaaagttccacgtacatatattacaatacaagaaatgataaaagagataaaagtatccgtcgagcatccatttacagatcatttacaatagttcaacacgtagatctagatataatgatggtaaaacgtgccattcatcttgagcattcaattctttacaacacattttagcgccttcattcaattaaacttatgctgcgcaaatcccacttagttcgggcttcgtaacacttgcaagtagcagatagattaaagtcttttctattacacacacatatatataaaatcttcaaccttagtcgaatgagttaagctgctcctgcatccgcagacgcaatggttttctaaatagtttggcgcgccttttccttttcggaaaaaggactcgatttttggcaactcacggcaagcattcctttagcactctcatagatcatcatcgccgatgccctcgaacgcaccgttggccacgcgtgctccattgtccaccacgtcgttgcggaagaatacggctccgaaggtgcgcgatgtagtcaacctgggtttggatctgggcgccgaatcttcggacagaaacctaactggcggcgttgtgggcgcagtggatgtagaacacgtggaggatgcccatgtcgacgtggaacaggttgagctgggtgttgatgaggacgacgtgactgcattctgttcctgctcctcatcgctattctgatcctttccactgccagcgcctcgctgtaacaactcgtcgaccatggcctgcaggcacacggacatcagcatggcctgatcactgttaatagtgatccagcgcagcgtctgcttgccaatcagatattcaaaggccagctggagatgcgtgggttccagccgcgattccagcgtaatgtgtgtaacgctgacgcgccacgagcgcatcctagtcacccggaacttcgtctcgtagatcttaacgccacgtgccgtgcgcagagccaactccttgttgccaatgctaattaacgccattgtgtccggctccggatagtccacctgcgcctcatcgaactgcaggcagccgtaggagggcagctgacgcaccaggtccatgtactcacgcgctcttccctgcatctgcaggctgttcagttggcgaccctcgccgggcgtacagatgaccacccactcgcggttcacgtccgcaacggtctggttgtagagcaaattcaatgccactttgcttccagttagcttggcatctctactggagtcccagtagcaggtacgcagcagcagttcgcagggctgtacatgcagacgcgttatatacggcgactcgaaatccatgaggcgtcgcaccaggtgcagttcgccggatttcctttgacgtcgcactaggaacaggcaaaagaagcgcaccagctcatcgggcagctgtaactcccggcagacgctcttgagcagcgcactggcgttctgctgcaccgagcagttgaccaggatgcgttcgcccgcgggattcgtatagacctgcacctccagctgctgttcctcgcaatcggtggcgacttggccctcggccagtgccgtgtccagttgggcgcgctgcaagaactgctgcaagtgggcggatcgggccagacggttgtcctgacccaccgcctgcaggtactgctccagggagctgcgacgcgcctccagttggccattggtgagcggtaggaggcgtttgggtggaaagggcggcagggggacgcccacacagtgcctgcgcagctggtcgttcagcgagtgcagctgtttgtagcgcaggacgcagtggtggatgccgttgatgtgtatgttgtaggccgtgtaggtgggcgaggagcccagctcctgggtgtccggtatggaaaagtgcatcctgctgctgtgcattggcacccggccagcggatcacacctgcattgtcaagcggctcctctgctaagcgcagcaattgctctcaattcaattaattcgcagcttcaattgttcacttttcgcccagatgtgtaaccgtactcgcatcgtcgcaaaataccatgcgcgtcgaaaataccaaaaaagagctgtttcaaacaaaaagttcgttaaaaatgtttaatttgaataagtataatagataaaatacgctcatttaatttgattacttttattagatatatatgtaaacctaaacattggcttgtagaggcttagaaataatattcattataaattgtgtgagtatttaatgttgaacctatacactagagaatattttattaaattgtcagtcgctaacgcagaaagggttgaattcaagttatggttaaattaatatcaaataatattatcataggcgatctcaacaaacatattgcatttacaagtcaactgggtactgaacttctccttttagcataaccacgcccgaaggatttaccttcactttgattttggtgttgggatataaaactccatagtcaacattttcgtaaaggtcctaaagggatgatagatataataagatatacaaaataagatcaagttaaggtcatatatttacctccactctgtagccagaaaagttaatcaagcccaattctttcaaagtaaccgaaatatccgatggagttccatcagttcttctattcacaaaggcaattgcgtaggagtaaaagttttgatagagcggtccaatcggtcttgaccagatctcaatgcccttgtgtttataaatccttcttccctgtattccaagcggatcttgatccacggcgattatctttcgattctgtagaatgtgtttaaactgcggacgaatcgttctcaaatcaaccgacatcaaaagtggagcggccaaaattgaccaaattgcgaattgggttttagcttgctcgtaactcagtccgaaatttccgataatcaactgaaatcggattgggaaaagatataaatatattattcaaa

SEQ ID NO: 12065 - DNA, 1529 bp, DROSOPHILA
gcgcttagcagaggagccgcttgacaatgcaggtgtgatccgctggccgggtgccaatgcacagcagcaggatgcacttttccataccggacacccaggagctgggctcctcgcccacctacacggcctacaacatacacatcaacggcatccaccactgcgtcctgcgctacaaacagctgcactcgctgaacgaccagctgcgcaggcactgtgtgggcgtccccctgccgccctttccacccaaacgcctcctaccgctcaccaatggccaactggaggcgcgtcgcagctccctggagcagtacctgcaggcggtgggtcaggacaaccgtctggcccgatccgcccacttgcagcagttcttgcagcgcgcccaactggacacggcactggccgagggccaagtcgccaccgattgcgaggaacagcagctggaggtgcaggtctatacgaatcccgcgggcgaacgcatcctggtcaactgctcggtgcagcagaacgccagtgcgctgctcaagagcgtctgccgggagttacagctgcccgatgagctggtgcgcttcttttgcctgttcctagtgcgacgtcaaaggaaatccggcgaactgcacctggtgcgacgcctcatggatttcgagtcgccgtatataacgcgtctgcatgtacagccctgcgaactgctgctgcgtacctgctactgggactccagtagagatgccaagctaactggaagcaaagtggcattgaatttgctctacaaccagaccgttgcggacgtgaaccgcgagtgggtggtcatctgtacgcccggcgagggtcgccaactgaacagcctgcagatgcagggaagagcgcgtgagtacatggacctggtgcgtcagctgccctcctacggctgcctgcagttcgatgaggcgcaggtggactatccggagccggacacaatggcgttaattagcattggcaacaaggagttggctctgcgcacggcacgtggcgttaagatctacgagacgaagttccgggtgactaggatgcgctcgtggcgcgtcagcgttacacacattacgctggaatcgcggctggaacccacgcatctccagctggcctttgaatatctgattggcaagcagacgctgcgctggatcactattaacagtgatcaggccatgctgatgtccgtgtgcctgcaggccatggtcgacgagttgttacagcgaggcgctggcagtggaaaggatcagaatagcgatgaggagcaggaacagaatgcagtcacgtcgtcctcatcaacacccagctcaacctgttccacgtcgacatgggcatcctccacgtgttctacatccactgcgcccacaacgccgccagttaggtttctgtccgaagattcggcgcccagatccaaacccaggttgactacatcgcgcaccttcggagccgtattcttccgcaacgacgtggtggacaatggagcacgcgtggccaacggtgcgttcgagggcatcggcgatgatgatctatga

SEQ ID NO: 12066 - protein, 490 aa, DROSOPHILA
MHSSRMHFSIPDTQELGSSPTYTAYNIHINGIHHCVLRYKQLHSLNDQLRRHCVGVPLPPFPPKRLLPLTNGQLEARRSSLEQYLQAVGQDNRLARSAHLQQFLQRAQLDTALAEGQVATDCEEQQLEVQVYTNPAGERILVNCSVQQNASALLKSVCRELQLPDELVRFFCLFLVRRQRKSGELHLVRRLMDFESPYITRLHVQPCELLLRTCYWDSSRDAKLTGSKVALNLLYNQTVADVNREWVVICTPGEGRQLNSLQMQGRAREYMDLVRQLPSYGCLQFDEAQVDYPEPDTMALISIGNKELALRTARGVKIYETKFRVTRMRSWRVSVTHITLESRLEPTHLQLAFEYLIGKQTLRWITINSDQAMLMSVCLQAMVDELLQRGAGSGKDQNSDEEQEQNAVTSSSSTPSSTCSTSTWASSTCSTSTAPTTPPVRFLSEDSAPRSKPRLTTSRTFGAVFFRNDVVDNGARVANGAFEGIGDDDL

SEQ ID NO: 12067 - DNA, 3178 bp, DROSOPHILA
ttcaaaaagtggcccgatcacggcgtgcccgaggatcccatgcatttgattatgtttgtgaagaaggtgaaggcggagaagcgacccagttactcgcccattgtcgtccattgcagtgcgggagtgggcaggacgggcacgtttattggcctggatctgatcatgcagcgattgaagagcgagtcgaaaatcaacattttcgaaacggtcaaaaagctgcgattccaggtgggtttttttttcagtgccattgtggatttatctcattacttctccactacttcagcgcatgaaaatggtgcaaacgcagcagcagtacacattcctctacgcctgcacctatgagctggtcaagcataagatacccagagctgcgttgaaaatggatgggcgtcccaagtccgtgaccgtgcccgccattccctctcccaaaaaggtgagctttccggacgtggatgtgggcagtgagtatgtgtcatccgcaccgatcaccgatttggatgacggtaggcccatcgtgcagctgccttctaggttctccggactgcggaggaatagtccaccgggcgaaaacgataacccaactagcagcagcaatatgtgagatgagctgtgttcttgtaacttttgtattaacgatgtgttgacaacgcagcagcaataatagccaaagaaatatgtatctaaattgtatattaagtggaaagtgtggatataaatttggtaattgcatttgaaaaactgtttttgtacataaatgttatttataaagaagcgcatgtatagcagaaaactataagttattgaacttatttattaaattgggcaatgagcaaagaatttacaaaaagaggtatcgtgtataacagtttataagagtttttattaaattcaaatttggcggtaaatgcaattacaaaaaaaggtaggagcgagacaactatattttcacaacggcggattacgcctttgagcactgtttactgcacacattttacagcactgttaggcagataaataaattgtatttattttagtaagaaataaatcgtagtcttcaaaatgtccgagcgaaaggtcttaaacgtaagtaaatacatcttaagctaatagatcgccacctgaccgactcctctgcagaaatactatcccccggacttcgatccatcgaagattccgcgcatgaaactggccaaaaaccggcagtacaccgtgagattgatggctccatttaatatgcgctgcaaaacgtgtggggaatacatatacaagggcaagaaattcaacgctcgcaaggaggacgtggagaacgaaacgtacctgggcatcaggatctatcggttctacatcaagtgcacgcgctgcctgcaggagatctccttcaagacagatccacagaacacggactacgagattgaggcgggggccaccaggaatttcatggcactcaagttggccgaggaacaggcacgtcgcgaggagcaggaattgcgcgatgaggaggccaacaatccgatgaagctgctcgagaatcgcacccaacagtcgcgcaacgagatcgaaacgatcgagagcctggaggagttgcgtgatctcaaccggcgtcagcagacagtggactacaacactctgctgcagcagtacaacacggtggagacggagagagagcgccaggagcgggaggagcgcgaagacgaggattttattaagtgagttctctactaggtattctatttggtcggtgtatttaacacattacatttccttaggtccgtaaactttaagaacaagccagaaggaagctctcgtgttgtcgctgaggaaatcattgaggagatcaaggatgaaccgttggacacaccgtcagctcctccaccagccaaacaggccaagcccagcacgatcagtctttccgccacatcctccagcaaagcatccgcagcgcagtcaatggttaaaaggaagacaccattggtgctggtcaagcccaaggcaaccgcagtagcaaagcccacggtagccactggaacgacgcaagttgaatccaaaccagccgcaaccacgccctcagttgtgtctgcaccagcggaaactaaagctacaaatcagccagctgccgctccagctggactttccctcttggctgcctacagtgacagctcagaggattccaactgaccaagcatttacctgatgacacacttacaactcgaagacagattaaagcaagttcaaataataaaagcagtcgatggttttattttactaaacttgaaatatgccgcaatccaccaagatccccattgactgaaaattccgataaagtattggaataatgcatcattttattaaatattttgactttgtttcattttgtattctttcaaatttttttcaaggccaaacttaaggcaaactcatttcaaattcaaacagaaaattaatcaaagcaaaaggtaactgcaaagtattcttctaaggtacactcccactcatttggagctgtcatagccgatttactggcaaccatttgataaacgagtgtgtttccacgcacgaaactgatatcgactacaattaaagtctaagtgatatatatacagtggtgaatgtattacgtctaaaactcgggcaatcaaaataataaataatatcacaagcgaaagaaaattataaatatacatatacgataattaaatattatgcattacaagttaatgataatcgattctaacgattaatttcataaattacgaagacactggtatgtttctctagctgtcctatttccatagcaaaggcatcaataaggccgcctgctctatggtcgtggccagtccaaaagtctgggccaccatctacgaattataattacgagttaaacagtctttgtgttcgttttgggggcggactgcggttggggttacggtgcagcctccagtttttggtatatgatcctgatcatcctgctcatttggttaagccaccgctcaaatgtccactgttgtgcactgttggatggagctgtagttgctgccgctggcaccagcgctgcatttgcggagcagcgcgttgggcaccattttgttgaccccaccagcaacgccaatcccgccaccgtcgtagttgtgattgttgttctgcagaaagagatgctgctcgggttcagcataattca

SEQ ID NO: 12068 - DNA, 1004 bp, DROSOPHILA
cactgttaggcagataaataaattgtatttattttagtaagaaataaatcgtagtcttcaaaatgtccgagcgaaaggtcttaaacaaatactatcccccggacttcgatccatcgaagattccgcgcatgaaactggccaaaaaccggcagtacaccgtgagattgatggctccatttaatatgcgctgcaaaacgtgtggggaatacatatacaagggcaagaaattcaacgctcgcaaggaggacgtggagaacgaaacgtacctgggcatcaggatctatcggttctacatcaagtgcacgcgctgcctgcaggagatctccttcaagacagatccacagaacacggactacgagattgaggcgggggccaccaggaatttcatggcactcaagttggccgaggaacaggcacgtcgcgaggagcaggaattgcgcgatgaggaggccaacaatccgatgaagctgctcgagaatcgcacccaacagtcgcgcaacgagatcgaaacgatcgagagcctggaggagttgcgtgatctcaaccggcgtcagcagacagtggactacaacactctgctgcagcagtacaacacggtggagacggagagagagcgccaggagcgggaggagcgcgaagacgaggattttattaagtccgtaaactttaagaacaagccagaaggaagctctcgtgttgtcgctgaggaaatcattgaggagatcaaggatgaaccgttggacacaccgtcagctcctccaccagccaaacaggccaagcccagcacgaagacaccattggtgctggtcaagcccaaggcaaccgcagtagcaaagcccacggtagccactggaacgacgcaagttgaatccaaaccagccgcaaccacgccctcagttgtgtctgcaccagcggaaactaaagctacaaatcagccagctgccgctccagctggactttccctcttggctgcctacagtgacagctcagaggattccaactga

SEQ ID NO: 12069 - protein, 313 aa, DROSOPHILA
MSERKVLNKYYPPDFDPSKIPRMKLAKNRQYTVRLMAPFNMRCKTCGEYIYKGKKFNARKEDVENETYLGIRIYRFYIKCTRCLQEISFKTDPQNTDYEIEAGATRNFMALKLAEEQARREEQELRDEEANNPMKLLENRTQQSRNEIETIESLEELRDLNRRQQTVDYNTLLQQYNTVETERERQEREEREDEDFIKSVNFKNKPEGSSRVVAEEIIEEIKDEPLDTPSAPPPAKQAKPSTKTPLVLVKPKATAVAKPTVATGTTQVESKPAATTPSVVSAPAETKATNQPAAAPAGLSLLAAYSDSSEDSN

SEQ ID NO: 12070 - DNA, 4792 bp, DROSOPHILA
tgcgggaagaccaagttagctactgccattgacatggagcactaatcccaaatactgaccatcacatccggataactgacgatcactcggaggtcgaagtagaccggcgaatttatgcccactttcatcttgaagtcgccgaacttgaaggcattgatctcgaagagcttcagggccagggcccgcattttgtcggagttctgggcaaccatgctggcaattctaaatctcgatcttaattcttcacacacgtgctagctaggctccaataagaaccgtccaattgggagtctacgctttttaaacatgctgccagtgtgcacgtatctgctgtgacattggggcacatttcgaacaccctaattaaggtacaagttctggttgcgccgcctgggtggttaacttcgctatgccgccaaacttatcgaagttcaaattattataaatgtcgtagattttatcaacattggcttcgaattaataaacgtttattattagttatagggtaacaaagtagcataagtgttaaggttttgaaataaactattttgcatgtgaaatatttcccaaattcataaaatatataacctttagtttctgagaagtcttaagaaatttcaaggaaatgaatggatggattatatacaatattttgtccgctgcattgctgtattgttcactacttagcatttgtaatctgaaagctttggctccgcccacaaacccttgactgcaacttcaaggggaggagtctagtcattttgcaaccaccaatgacagtcctgtaagctcatattgcaaaatgaaagccaaagcgcctgcgtaagtcaacaaagtttgcgccattcattgaaacaattccagatcctttggcgcgtgtttccaaaatttagtttcttttcgctggtctccaaataagtcgcaaatttgtgctccaaaagcggcaacttcttagtcgaaaaatcggttttctctcaatccatttctcgcctgcgttgcgatggccagttcaagtggtgaacctgctgatgaagtggctaataagcgtcctcgtcttgtggctaatcccaaggccaccaaaatagttgaacccacaccggccaaggtcaccaatcgggtgcccaagtgcgcccgctgccggaaccatgggatcatttcagagctgcggggtcacaagaagctctgcacctacaagaactgcaagtgcgccaagtgtgtcctgatctttgagaggcagcggatcatggccgctcaggtaagttaggatttatatgcacgatgacaagcaatcctttctgcttaattggcaatcattgacattactatcctcattttatgattactgcccacttgctaactttaatgtcatctatcctggatggtaaaatcgctatcccaaaaatagctttttaaaaattcggtgcattcgaatacagaaaattgcctggttagatccatccatagacatccaaaccatccagaccagatatattgctctaacattcggagactttattcccagtcctttagaaaatttcttcttgtaaaaacatattccctttattagcatttacttaaaatgacatatcaaatattctcaaaagccaaaagttttctaaaataacttcaggatattaatgtataaatgtataagcataaacgtaattgtgtttcatgttgtattgttcgcaatggattccgtgatcgatttttactaggtataactttgaaacccaatttaagcctttcgattataatttaacttgattaatgtcactgttatatttataatttactaacctgggacgacaaacaaaaacacctattagcaaggggagcttaaattaacaatagcaccgaaaactccgacattttcttatatcgtgttttgtgactttgaataacattttggaaacattaattattttggatttctgcgaaaattgttttttacaaatgatgtaaaagaactgttaataggaaatacctttccaacatatagcacgtttaacttaagtcgttcaaaaatggtgtgcgcggaatatatagctgatccaaacatcttaggagactttcaataacacggtttattatagtagcaaatgcaatagaatatagattattatgtccatatattatattggaatgcagattatattccagcctgccgtcgctgtaattccaacacacaagttcagaatcaactcaattcaagaataattcaacaattcaacatagaaggtggatagttttcccagctatttgtatctggcacataatatgtaagccaccccatccggattcaatcaatctgtgtaactgaattcaattgccagctttcttggaaaaatagttagcaatgccatttatattgtgtttagattaagcgctggccaagttctcaattcgaaacacaaatagccgatggacacaccccactccagtgccaagtcaaacagccaatgaaacggaatacggggaacaactccaagcagaacaaggacaaccagtcctcccctttagacgatgacgatgatggtgatgatggaaagttgtcaaggcgtaggaacaaatcgaccaaaatatccgcttaccgaaactgtttgcacaagtgtgtctacgtctcgcatttcattagatcgctgtggatgagctaggatgtgctaggatgtactaggatgtgctaggatgtgggtgataccccaaggaattgctgtggcctttgtttgcggttaagtcaaacagcagcaaacggaccaagatgttcacttgtcgcatattaatttccatttgtgggctttcaggttgccctgaagcgccagcaggcggtggaggatgcgattgccatgcggctggtggccaacaagacgggtcgttccatcgatgcactgccgccaggcaacatcttcggtctgaccgtcacgcagcctagttcgccgcgtgccaagcgggaggatgatcaggtggagaagaccatttcggaggtggagcagcagcatttgaagcagagggaggaggagtacagcgaatcgccggcggtggcgcaggatctcagtgctccccgaagagataacgtctcccaaacggccattgacatgcttgcccagctctttccgcagcgtaagcgatctgtcctggagttggtcctcaagcgctgcgatctcgatctgattcgggccattgagaatgtctcgcccactggcaagtcctcgccagtggatgtcaccagcaaccagttgcccagccaggagccgggcatgttgaccactatgccacagcccgcgccgcccaggagcagcgcctttaggcccgtgataacagatcaggtaagcgacctaactgcatagtgcaaattgtataaagtaccttttagttataagtgtacttaagtgaatataccggttatttctatagtattatattctatagtatacagcaaatctgtaacaggtgttttgtgtttttacttaagttcaacggtctgtatttccgcttccagaattcaatcaagtcacgatttgcgtggtccatggaagtaggaagtacctaatgaaatatttatttaagtacatacaaaatcttacctttcagtaccagagcaaatcggtggtggagctaaagccgccggtctttggaggcagtgcatcagcggcggcggcagcggccatttgtgcgtaccccaagtggtttgtgccgctatcctttccggtgaccatgggtcacctctccaatctggcgccaagatgcaccttgcccaattgcgcctgcttggacagctaccagttccactaggagaccacccatctagtacttactaactcgcataactatagttctaataaaataaatttatttatcctaactacaagctaaactaacttatgagtcaatgggccatcctctagcttcacttgggcgtctcatccgcctcgccttcgtcttcgtcgtcgtcctcatcgtcctcggacagatacatccgatcctcctcgtcgctttgttggccacacctgcttccgctgccaagattcaacacgggaacactgctgctcgaggcgctggagggtgatcccacggcagcgcctgctatgggtccttgggcggatgcactgcgcttgctgagattggctcgtcgccacttggcgcgccggttctgaaaccaggtcttcacctggcggtcggtcagcttgagttggagggccagatgacgccgttcctccggcgacaggtacttggagctggcgaagcgagcctcgagatttttggtctgctgggaggtgaatctgatctggccgccttttcgcttcacgccgaagttcgacatgtagaagctggccgccggataggcattgcagtagagggcggctgcagcggaggcaggattggggaatcctatggattaaaaaggaagacagtttgttttagattacaattgctgaagaggttacagaactaacttattgttaacacttcactttgtgaacaagggtttcctatatcagatgagaaatatttaaactaaatatttcattgttaatacgatcttaattaaagaactaatgacattatagacccacttcagagtttatcaaaagctgccatgaaaaagtcgaggacaatcgatttctttgaataacgattttgaaccatctgcccgatataaagtggcgcaatcattggattgtgattggtggctccattggcccggttttccctatctccgcccacccgctcttatcaaagtaatcggacacaacaattgcgagtggtacaagtgtatgggtgttgtatcagt

SEQ ID NO: 12071 - DNA, 978 bp, DROSOPHILA
atggccagttcaagtggtgaacctgctgatgaagtggctaataagcgtcctcgtcttgtggctaatcccaaggccaccaaaatagttgaacccacaccggccaaggtcaccaatcgggtgcccaagtgcgcccgctgccggaaccatgggatcatttcagagctgcggggtcacaagaagctctgcacctacaagaactgcaagtgcgccaagtgtgtcctgatctttgagaggcagcggatcatggccgctcaggttgccctgaagcgccagcaggcggtggaggatgcgattgccatgcggctggtggccaacaagacgggtcgttccatcgatgcactgccgccaggcaacatcttcggtctgaccgtcacgcagcctagttcgccgcgtgccaagcgggaggatgatcaggtggagaagaccatttcggaggtggagcagcagcatttgaagcagagggaggaggagtacagcgaatcgccggcggtggcgcaggatctcagtgctccccgaagagataacgtctcccaaacggccattgacatgcttgcccagctctttccgcagcgtaagcgatctgtcctggagttggtcctcaagcgctgcgatctcgatctgattcgggccattgagaatgtctcgcccactggcaagtcctcgccagtggatgtcaccagcaaccagttgcccagccaggagccgggcatgttgaccactatgccacagcccgcgccgcccaggagcagcgcctttaggcccgtgataacagatcagtaccagagcaaatcggtggtggagctaaagccgccggtctttggaggcagtgcatcagcggcggcggcagcggccatttgtgcgtaccccaagtggtttgtgccgctatcctttccggtgaccatgggtcacctctccaatctggcgccaagatgcaccttgcccaattgcgcctgcttggacagctaccagttccactag

SEQ ID NO: 12072 - protein, 325 aa, DROSOPHILA
MASSSGEPADEVANKRPRLVANPKATKIVEPTPAKVTNRVPKCARCRNHGIISELRGHKKLCTYKNCKCAKCVLIFERQRIMAAQVALKRQQAVEDAIAMRLVANKTGRSIDALPPGNIFGLTVTQPSSPRAKREDDQVEKTISEVEQQHLKQREEEYSESPAVAQDLSAPRRDNVSQTAIDMLAQLFPQRKRSVLELVLKRCDLDLIRAIENVSPTGKSSPVDVTSNQLPSQEPGMLTTMPQPAPPRSSAFRPVITDQYQSKSVVELKPPVFGGSASAAAAAAICAYPKWFVPLSFPVTMGHLSNLAPRCTLPNCACLDSYQFH

SEQ ID NO: 12073 - DNA, 2527 bp, DROSOPHILA
attttataagacctactgaacttattattgtgttactttttctttaaattttttgttgcaacacctcaatctcagtgcaccttgtggatttgctggccagaaaacgaaacagtttcggggccatcggtgcctttttggtaacacatgatatgtcgcctacctgggcgatgctctggccaggagttggagttacagtttctgggattcagggattcgggtacaatgacgacgagaaggggcagccagagagaagcactcgctgagtggagaacaatggagaccggcatggagcaacatgacactcgagtctcgaatctccagtcggtggataaggggttatactatatagtcgcagtggcgaagccaaagctaaaagctacccattctcatacagaaaggccactggtcagcggagagttggtgttgagcacttggatctggatgagaggagtccaaagaccgaaggtggagttgctgctttgcctctgtttaaatgttctccattttactgtcaagtgcggaccggaccgggttgacatttgccaacgatgcaactgcccctgggatccccttctggtattcctttgcccttctccattatttgattctgcttcgcatgtcgagaattttaatttaagtatgtaaactgacattgaatagtttttcgccagggagcagcacagctcgttcgcttctctttcttgtttttttttttcttttatcctgttgtgggcggcaatggaattggtgggttcaacaccggaacccaacccaaatatgagggggggttatttcatagtttaggggaccgggcgagtgcaatttcagttttgtttgcaattggatttcgtaatagaaagctctggccaaagtttagcctgcagcgggtatgtgcgggttatttcagcatgctggattgaaagttttatgacagcaggcagcaggggcagatacttttaatagatatttaaaccctcgctcgccccaaatatattccgtatcagccaggggagtcgaatttcggcatgttaatgatgctgatgctcggcacgacttttccaagttgaattttctgcagttcaactttagtattttgcgggaaaggattcaaagcggcttaaattgtgaagtaacccacacttagtataaattaaaagctaaacttaccggtgttgagtatggatgcgcggtcagccggactccgtccgtctctagctgctcccgcaggacgagctccagttcgttgttgggtggtgtttcgcagaggatctccatgctgcccgagagcgagttgggatcgttgagcataaagtaaacggatgcggcgcccttttccctcagcgatcggatgctcttgagcagcttgtgtctatgggcaggattctcgacgccgatggcatctagatcgggatcaccgacctgtttacagatctccaggtcgtcgtagccattgtccaggaagctctcggcgtattgggccaggcccaaagctcttagccactcgcagacaatattgctaacggccatgttgatgatgatgatgatgaggtgagtgtatggtttctgcttgatttccaagtgtcagatgggtggtgtttttacgtaagacgtagctgtgctgcgtttacgtgtgtcctgcgaattagcgctacaaaatggcttatattagtttcgctgttggcttggtgtgcgcgtcacgtgctcggggggcgtacagtgccacgcctcctggttgcatgcaatttccgtttgccactttaagctattgtattgttttaaatcgtcctccctgtggcattttctctaatttattttccccgcccccagacagtcgtaaaaattcagcgcgtacactcataaaaatttatattgcactttgagcatttttagcataatcccagaaggctccaacgctggtttatcctcacattttgtttggcgccaccgcttcgccgcattgctcctgcaaaaatggataaaaattgtgtgtgagcggggaaaattttagtagtcagcgaaaaacgtttattttcaataatttagagagcggccggaaaattgcataaatttcaaatggctggccgcatatggtgagcccgcatatgtctatgcaaaatagatgatataactacacgtcccccactcccctagcaaccatccaccagtcccatggccaagggaaacctctcggaaaatctggcattcccaccataatatatctcgcacaaatcaatagagcccgcggctattgccacaattgatgttgatgacgttcgttgcgctgccgagattcaaatcaaactcagaatgctagaaaattaattaaatgcagtagcagctgcggtttgttcaactgcatacgccctctcacttgatttcgccaccccatcggaaattcccacaatctttcggctgggaacgaagttcttatctaggtaaagggcttataacgcgtgcattcctgctcatgcacacatatcgctccatcatgggttggaaccccctccaaaacttgcttccgctttcg

SEQ ID NO: 12074 - DNA, 432 bp, DROSOPHILA
atggccgttagcaatattgtctgcgagtggctaagagctttgggcctggcccaatacgccgagagcttcctggacaatggctacgacgacctggagatctgtaaacaggtcggtgatcccgatctagatgccatcggcgtcgagaatcctgcccatagacacaagctgctcaagagcatccgatcgctgagggaaaagggcgccgcatccgtttactttatgctcaacgatcccaactcgctctcgggcagcatggagatcctctgcgaaacaccacccaacaacgaactggagctcgtcctgcgggagcagctagagacggacggagtccggctgaccgcgcatccatactcaacaccgaaaattcaacttggaaaagtcgtgccgagcatcagcatcattaacatgccgaaattcgactcccctggctga

SEQ ID NO: 12075 - protein, 143 aa, DROSOPHILA
MAVSNIVCEWLRALGLAQYAESFLDNGYDDLEICKQVGDPDLDAIGVENPAHRHKLLKSIRSLREKGAASVYFMLNDPNSLSGSMEILCETPPNNELELVLREQLETDGVRLTAHPYSTPKIQLGKVVPSISIINMPKFDSPG

SEQ ID NO: 12076 - DNA, 3572 bp, DROSOPHILA
cgccgagccctacatcacctggggctatcccaatctgaagtccgtgcgggagctgatctacaagcgtggattcgtgaagcataaccgccagcgcgtgcccatcaccgataacttcgtgatcgagcggaagctgcgtcaggcgcaccaaattcagtgcgtcgaggatcttgtccatgagatcttcaccgtggggcccaacttcaagtacgcctccaacttcctgtggcccttcaagctaaacacccccaccggcggctggcgcaagaaggccaaccattatgtcaacggtggtgacttcggcaaccgcgaggaccagatcaaccgtctgctgcgcaagatggtctaaggactccttttgatttatgtgctgaaacgacaactgcagcggttcgatgtaaacagtgagagaaataaaagttacttttataaacccacgaaatgccgttcagtacaaaaacgcagtgttttcgcttcgattcgctgatttagtcattgcgacttaaattggaaaatatcagtgaagagagagaggacttttttaaggaacgtttagttaaatgtaccaatagtttcataacaactttaaatttagtaattttctttcattttaatgttacatttttactttaaagaattctgcggtactccagaaagtcttgccctttgctaagattaaccccacgttcagtataattttttggtttgctaatcgttaataattcgatgtatagcaatatttaaatttaaaatttagacagtttgcttttgtaggcccattatttgaaatgaaaacacaggattcttgttaatttgtctacgctctagattgtttattgttgttctggtcaaattttaagcgcgcttagtgcacaacacttaaatgcagatagcaagctagattcagggtgccagggataaaaatcgtttgccaatgtacactttattgaatcatggtttgcctttcagctggcagtggatttaaatcgttttttttttttttacacacacaatagtccaaagcagttagcaaacaaacataaattgtaaattccaatagcatggaaattagtcaataatcgggaggaagctggcaccctttttaaatgtataatttaattaatcgttaccacatggagcacatgccgttgtccgctgttcagattcccgcttctactggtgtccaccggcctgcgtggtggtcacatggatgttctgcaccaggcgctggccccagtactcctccaaatcgaatggcttaaagttcttcagctgattgtcggattcgttgcagtacagcacaggtggaccctgttcgtagacctggagagagagcaaagcatgaagagcaaccgacaatttggaccggggaccgcgaatctcaatggttttcaccatcaaaatgctcttgaatattttagaaagatacctaaaggtaacttgttggactcgaggttggctatttctaaactagatcttgatgcctaaaatgcatagaatgatcctgctgatcgaaattggaattatccactatcgtttcctattcttctaaagaaaagattggactgcaaagtctgaataacgagcaagtgttcacggtccctgatgtccgcgtgcgaaaagcgaagcagggtgacaaaggagcggccttttggatccaagtaagctgctcaccttgatccatgccccccggatgtaccggatgagctcatcgtgctgcgagattggcaggctctgtggttgctgttgttgctgctgctgtccggcggcggaggcgtagagcggattgctgttgttatggccaccgacggacggagagtttccggcactgtggttattgtatcccggcgaattggacgcccccgccgccgaattgttgttatggtggtgatggtagctgtgcggcgcattgtgcccgctgttctgccgcctaatgttgtagggatagcgtctaaagcgtaaataataatatatttagttcttatcattaactttatgaaagcgaagcaaactccttgattgaaagctgcactgtatttgttgtgctgatattaaaaaaaaaaaactttttatgaccatgacctactttaagcattattttaaatacagtttagcaaatgagttttccaaattaaccaatttacactttaatatgaacttcaaaaactgtcttttgaaattcctgaattattaagatcctatggcatctatatatgctggttaataacctgctaatcaaagtaattaggttagaaatgcttcttccccaatatttttaatatttaattcgcagttttatatataacaaaatagcagtaacggttaatcgtttggaagatcgcacatacatacatacatgcgtatgtgtgtaaacacagtcttttgtcgcttgacgcacacaggttaaattcgagcgaaagtaacgattttgggtgcgtgcactgtatatccaaatacattacccattattgcgatccatgttgtcaggtgcttgagtaaaattaatctccccaagttgtcttgtttatcgccgaaaatttatttatattccgtataaatcttttctcttcagtcgcagtgtgaccgcggctcaatggtccacctataccaagaaattataccaaaataatggtttattggcgcccatcggttcgaatacccctaactccattcaaacggatttaagttaataaattcaaaaatattaattaaataacatttaatgtacaaataaatgttatctggtttaattatattctccagagaatgataagtatagttataaaagtaatttatcaacagatttttaaattgtagtcacttaaattccattaaatatccgtttctctttatgatttaaacgttattaatacgatataattattttattccgcaacaataacttttaaatgccacttttgtgttccctttcactatgaacaatgatattcaaaaattatctagcttgaattcaatgacgtgctaaaatgacatcattttattaccattaaagaccctaaaaagatatttgctaaaaacgcagttcgaaacatttttgtcatttatttggaagtgagtcaacagataagggaatgtacattcatagttcattgtttagtttctttttcttttttgcttgaaatatccggttggactcgttccggatgccatagtcatcagtacatttatttttgtaaaatgcataacatattttcaactatctctaaagtaaagaaagttccacgtacatatattacaatacaagaaatgataaaagagataaaagtatccgtcgagcatccatttacagatcatttacaatagttcaacacgtagatctagatataatgatggtaaaacgtgccattcatcttgagcattcaattctttacaacacattttagcgccttcattcaattaaacttatgctgcgcaaatcccacttagttcgggcttcgtaacacttgcaagtagcagatagattaaagtcttttctattacacacacatatatataaaatcttcaaccttagtcgaatgagttaagctgctcctgcatccgcagacgcaatggtt

SEQ ID NO: 12077 - DNA, 816 bp, DROSOPHILA
cgactgaagagaaaagatttatacggaatataaataaattttcggcgataaacaagacaacttggggagattaattttactcaagcacctgacaacatggatcgcaataatggacgctatccctacaacattaggcggcagaacagcgggcacaatgcgccgcacagctaccatcaccaccataacaacaattcggcggcgggggcgtccaattcgccgggatacaataaccacagtgccggaaactctccgtccgtcggtggccataacaacagcaatccgctctacgcctccgccgccggacagcagcagcaacaacagcaaccacagagcctgccaatctcgcagcacgatgagctcatccggtacatccggggggcatggatcaaggtatctttctaaaatattcaagagcattttgatggtgaaaaccattgagattcgcggtccccggtccaaattgtcggttgctcttcatgctttgctctctctccaggtctacgaacagggtccacctgtgctgtactgcaacgaatccgacaatcagctgaagaactttaagccattcgatttggaggagtactggggccagcgcctggtgcagaacatccatgtgaccaccacgcaggccggtggacaccagtagaagcgggaatctgaacagcggacaacggcatgtgctccatgtggtaacgattaattaaattatacatttaaaaagggtgccagcttcctcccgattattgactaatttccatgctattggaatttacaatttatgtttgtttgctaactgctttggactattgtgtgtgt

SEQ ID NO: 12078 - protein, 163 aa, DROSOPHILA
MRRTATITTITTIRRRGRPIRRDTITTVPETLRPSVAITTAIRSTPPPPDSSSNNSNHRACQSRSTMSSSGTSGGHGSRYLSKIFKSILMVKTIEIRGPRSKLSVALHALLSLQVYEQGPPVLYCNESDNQLKNFKPFDLEEYWGQRLVQNIHVTTTQAGGHQ

SEQ ID NO: 12079 - DNA, 4964 bp, DROSOPHILA
agatagatgttggagtcgcgcggcagcagatcgaccttgttgcccaccaggaagacgggtcgctttgcgcccaatatgttttgcatgcccggccaaatggagcagggaaaatcgagaaggtccaccagaacaatagccagtgcaaatttgtcttgaatgcgggatatggtgtccacataggtcgatggggccaccaccacatccaatgcgatgttgtagtggttcagaaagtgacaacgcttgcaggtgatcgtttgcagttcctgctgcgtcctatccctgaatatttcacttggtatatagcctggcagggaggcattcgtgcaatgaaggtctgcgccgcagccgttgcatggaacctttgaggcgggtaacgaaggatccggtgtgccctgcttattccctccctcctgggcgccctgatagaactcgtagtcgtccatccagtcgtcgggcaaatgctgttgtgtctcaggaatcgagaaagagggttttattttggtctccagaacagagctgtaatgaacgtgctcatgatccttgtaccgctctctggcgagcagccacgccctctgccgaaagctctgtcccacttcagcggcggtattctgccgcctcgaacatgtgataaccacatttttatttataattttatataaacgtgtggttttaaacattttgcaatgcccacaagaattctcacagtgtcagactaaagccgtttgctacgaaaccatttacatagtcagggctgctagccgatagatctgaacgattgttatattatttggcgtacaaaataacaagcatcaattcaagcaatgctttttgtgttataaatcgaataaaagatatttcagtacattaatttgtgttcattaactggaaaaaaacaaaacgcatcgaaattaggccgattcatatcgaacaatcacgagtgtatcgaaaatcgaaatcggtgaaagagaaaaaagaaagcagcgttagcgagaaagcagaggtgagttaagtgcgggacaaaaaaaaagcgtgtatgtattaaaattgaaacaaaaagatatagaaaaagcgtgtccacggcgcaattagcgtgctcctgcggcggtcggcaggcgatatacgcattggtaaaagtacagagtacacgccgagtaaaaagcagcagcgcacaacaaataaaatgattaggaaagtgtgtggaaaaaagacaagtgtatgtgaacggcgattgtatgtgtgcgtgacgtgactgtatgcgtgctgctgctgcgtgtatatgaaataaaaagtaacgcgaagcgcgacctaattttaaccaaatattacaataatatttgcataaacaaaggcggctcggttaatgtgacgccaggcattttggtggttcctgcggctttccacgaacgtttgccgacgccattgtctgaccaaaaacaaaagaaaagaattgaaatagaataaatctcagacgagcacactattccgtcgagtgtagagttcttcccgattgagtaatgcaataacaacaaacggagctgctcaaattgttgagagtgttgcaactttcgttggaactcgttttgaaccgttgttgttgttgttgttgttgattttgtcgctcgcatcgctcactcacttactcaccgactcactcgctcctttccattctcctgatgttaccaaaactggtcttcaagaagcaacaatgcagtttcttgacggggaaggggaaaaatcaatagttcggaaattagacaactttcaacatccatgattcaacgaaatgcactcagcctagaagaagctaccgataaccccgggcgcaagagcaagcgagatagttgccgccgcctacccacactcgcacacagccacacacttacacttatgcagctgaatttccagcgatgtctgctctgccttttaagttgttgttgttgtaatgtaattgcgaaatcataacggcagttgaaagttgagagcgcttagcgaaagagaacgagggacacagagagcgtgagactaaagtttaagctctggcggcaaactatatgccctgctctcccccgcccacgcagaaacatacagccggctgccagtgtagcgcatatgagagtcgcatcaacaacaacgctatttcctcaagaagaaaaacacatgttggccgcacagtgggatggagtgggagtgaaattaagacaaagtcactgaatggaagtgcgaatggtgccgccatcttggttcttttttggtcaaaaatcacggaatgaatgctatttaactggagtgcgcctaaaaatacattgccatcggcagctgcagcgtgcatcgcgtgcaacagactaattccgcgttctaagccactgtgccgcatacgaattcaaataagcaataagtacacatgtgtgtacgactgaaaatgcagaaattgccttgaaaagtgaaaggcattcaacagagcgagccagcgacgatttgatatttttgcctctttgcttaacctttgctggcagctgtttgctgtttttatttagcgctgtctcagcactttgacattttccagctcactcacacatgtacagagtaacaacgctgtgcattccgaactcccatttcccactgcacaaacgctgcacatgcgccgcagcacatttatatttgcagaatacttttggccaagagacgtgctgttttgcaatgctctcgtaacgttcactgctaatttcgccaagctgttgtttgtttgtcttactctgccttgccgttaccgttcgttcactaatgctgtctgtttacttctcttgcagagtgcgtcaaagaaaacccaagcgaaaacccacggattaagcggtccgctgcgaattaagaccatctaacggtgaacctttcggtcactagtccaaattaagcctcctgcccacccccctcccagcattctgttcagcgagcgcgacgcccccacaaaacaaaagcttcttcatgatgtcgtcggatcaacagttctttctaaaatggaacgattttcaaacgaatatggtgacctcgttccgtcacctgcgcgacgagaagagcttcacagatgtgagtaaccaaatgaaactttccagaagcggcgatggaaaaactattgcagtcgaactattagttagaatgatgatattagatgtcaatatattttgaagttacttataaattcagtcaaaatcaagccatagaagttcgactgtagttaaccagtcccaggggcgcgctgaggtttattatgctactcttggcccgattggctcgcggccgccccttgtggagggtcagtcaccggctgagctcagttggtctgagtagcagatacctggccctcacgctattttcaattcgtttttcttttacctgtgttcgttcttcgctctgcgtttttgttcaatttgttgcggtgaaaatgcctggcggatcttactgatttcccaatgcttattgttcacaggtaacactcgcctgcgagggccaaacctgcaaagcccacaaaatggtgctttccgcttgcagtccctactttaaagcgctactggaggtgagtttttcacgcggtaataactaagcaatcgtttgataatgtaatgtatgcacccgcaggagaacccatcgaagcatccgatcattatcctgaaagatgtctcctacattcacctacaggctatactggagttcatgtacgccggtgaggtgaacgtgtcccaggaacaattgccagcatttcttaagaccgccgatcgcctcaaagtgaaaggcctcgcagagacacccagttcgataaagcgggaaggttgatggtattaaacaataatcgaaacaaaaaatacataataaataacaacaaccaactataagaaacttatatgtacgcaagaaaacaaaattccaaccagcggcaaaagaaacaacattacgagaacgacatttggtatacaaattcatataagagtgcacgaggaggatgaagaacgccaacaaatgaccacacaaagctaaagctggacagattgaaatgattagcctgtaaagtagaggtggaggccaaatccgcccgcccactcccacacccgctcattcacatctgatcaaccaaattgcaaaaaaaaaaaaaacaacacttaccgacaaccccacagaactcgatttgaattctttttgtttaatttctgcataaaatagtttgtaatatattattaacaatacaaaccactctgtataaataaaacgatatggacagcagcccctaaagcaaaacaaaacataacgaaacgaaacaaaacaaaaaacgcacttttgtaaagtaattaaagaagatccatttaaaatatataaagataattataaatatagtgtgaaatgtgcaagtagatggaaaaagccacgacgggcgcgaatattacaacacattcggttagtttttaagccactaactacaaccccagacatgccacgcctccagacagacaaactcattttcatctatatttaaacaataaaatagaaacaaatgcaaaattgtacttcaattaattgtgtgtggacaagcgcgtttttccccaacttctgatcatacgcgagatacatacatatattgtattaataacaaaacgaagaaaaggtgtttcagtgcgaagctagcagttctacacagtttaaacaaaagagtaaggaaatacgttagaatgaaaaatacaacttgagtaaaaactatacttgaatattattacataaagtaaaatatttatatgtatgtatatgtatacatgtgagcatagatttaaagaaactacggtaaataaacagaataattaaaacaaaaaaaaaaaaaaaacaaatgcaaatcatcctgagcttttcattaaattacgattcgaaaaccggtcgatttgcatgtctgcatttattttaatagtctttcataacatccttcataa

SEQ ID NO: 12080 - DNA, 726 bp, DROSOPHILA
gtgagttaagtgcgggacaaaaaaaaagcgtagtgcgtcaaagaaaacccaagcgaaaacccacggattaagcggtccgctgcgaattaagaccatctaacggtgaacctttcggtcactagtccaaattaagcctcctgcccacccccctcccagcattctgttcagcgagcgcgacgcccccacaaaacaaaagcttcttcatgatgtcgtcggatcaacagttctttctaaaatggaacgattttcaaacgaatatggtgacctcgttccgtcacctgcgcgacgagaagagcttcacagatgtaacactcgcctgcgagggccaaacctgcaaagcccacaaaatggtgctttccgcttgcagtccctactttaaagcgctactggaggagaacccatcgaagcatccgatcattatcctgaaagatgtctcctacattcacctacaggctatactggagttcatgtacgccggtgaggtgaacgtgtcccaggaacaattgccagcatttcttaagaccgccgatcgcctcaaagtgaaaggcctcgcagagacacccagttcgataaagcgggaaggttgatggtattaaacaataatcgaaacaaaaaatacataataaataacaacaaccaactataagaaacttatatgtacgcaagaaaacaaaattccaaccagcggcaaaagaaacaacattacgagaacgacatttggtatac

SEQ ID NO: 12081 - protein, 127 aa, DROSOPHILA
MMSSDQQFFLKWNDFQTNMVTSFRHLRDEKSFTDVTLACEGQTCKAHKMVLSACSPYFKALLEENPSKHPIIILKDVSYIHLQAILEFMYAGEVNVSQEQLPAFLKTADRLKVKGLAETPSSIKREG

SEQ ID NO: 12082 - DNA, 5962 bp, DROSOPHILA
actctgaaaagccgaggagcagcctaattaatacttggccactatgctggaggaagtttactgaactgaattcgagtaaggaaaatggacaataattgatataatatggtgagcttcttgctggactttgaaatcgtaaaatttaagcgaacacacttcaaacgcatccatttaatttgtgaatgtttgcagtcccacttttaataagcacccaatattaacgataacgccactctaatcaaaattttccaatagtcagggttgaaatactgatcaatcacgctgccaacatttcggcagaccaggtgggtaatgagtttaaaatggttttgcgtaatgggattaatcgaatttcattaaggaagattagattgccgtctttggaagtgatcttttatagtggctgaccataaaaattgcattgcaaatactaatttaagcatacatgctatataaccgataagatgggcgagcgtcaaggcaaaaatagttgaccgtattaatagtttaatcaactagcttcaagttaatttataatgcgaattaggaagcactctggcatgctattaaaaacttaagaactgataaacgaaacttaattcctaaaataaaaatgtacctaattacttttatatactattataaataaaattgtaccatgtatcgttaaatttgatttagttaccaagtggtatttggtacgtggcagcatgaaatagctactactgctagtctggctgattagccagcactctcaataaactaagtgcagcgttttgcatttatcaggatttttggtactctaaacacacacttagatcccaatcaccccacagaataagttgagcaaaccaaaccgagctgattaccacagtagacatgatgattagccgctgctttatttactagtggataatctactaagcgacgcatgaataaaaactcgagcgatatttttccactttgcagtcgctcgaaagcctttgtttcgtctctcaatatgtgctgcagctgctgtggggtgacccaacaaaaggcctgggtcttcggcctgggaacctttttcgcggtctccggactcctggccataatatgctggcctggctttatagactcagggattatgaaggtgagaggcggtgtataaaaataaaattaaggaggagtactaatcgatttattaaaaaggccttgccgttgacacccacttcaaagacttttgaaaaatgggaggagctgcccattccggtgtatgtctacatgtatctttggaactggacaaatgccgcagatgtgcaggctaatggagtaaaacctattttcgcgcaacttggaccctatgtttatcgagaggagaggaagaagatggatcttgagtggcacgacaatggcacagttacctttaaccccagaagaacttggttctgggaagaggagctctctggcggcaagcaaacggatttaattaccgccccacatttaccttcattggtaggaaataagcagttattaaaaaacaatttggtctaaaagaagttttcctttttcactttttgcaggctgcttcaaaccaaatgcggaatagcaacgtcttcctgaaattcatgttcaacgaggccctaaatgcgaatggtggacatctctttgtgacccacacggcagctgaatggctgttcgaaagtttctacgacgaatttttgcattacgccatgaccctgaataatccattggtcccaaaaatcgagtcggatcactttgcctggttcctcaaccgtaacggatcgaaggacttcgagggtcccttcactgtacacaccggagtgggtgacatcaaggagatgggtgaaattaagtattggaagggccagaatcacacgggatggtacgatggagaatgtggacgtctcaatggcagcaccacggatctttttgtgcccgatgagcccaaggagaaggctttgaccatcttcattccggatacttgtcggatcataaatcttgagttcaccggacagagcgaaacaattcagggcatcacgggttggaagtacgagataacgccgaataccttcgacaatggacagatcaatggtaacgcgaagtgctggtgtcctttggagcgccagccagataattgtcctgcaaccggagccactgacctaggaccgtgtgccgatggagttcccatgtacctttctgcggatcattttatgtacgcggacgaaagttatggcagcacgataagcggctacaatccgaattacgatcaaaataacttttatatcatcatggagcgcaagatgggagtgccgttgaaggtcaatgccaatgtgatgattaccttgtacatagagccagacagcgttatagagtaattatttacaataattgttgcctaccatatatatgacttgataaacacattttttcctagcatactgaagggcctgcccagcttctatgcaccactttttaccactgctagtcgagcggaaatcgacgaagccctcgcctcagaacttagggtatgttttagagcttgttgaactacgttgatttctattttaaataatgcattttgtcttttagttggcactgaatctaccggctatagggagatatactggagtgggattcctgtgcctgggctgcattcttatagcagttggcatcttacttaccattaagaggaagtggtatggccaggccgagttggacaaactggctctcaaggataacgaggaaactccatatgaaccggaagttccggccaacgtggtcgaacgaaacttttaatttagtattaacattttttttaatgagcagcacacggatgtgattcaaaaaacatatatgtgataaataactctaaacattttttattctagctttaaaatataaaacttctaaacaactgaaaaaattaataaaatttaaaaaactcatataactattgtcttcattttacaataattaaattagttaaagcttatatttatctatgtggttttttaaatgattgagtgaatgaatttatagaagcttgtacacaaatttaaataggctctttaaataaaggttttattttagaacattttttaattgtttttaaaattaaaattcaaacatcatctgtgtgtcttttttagtttataattaattcatatacacaaaagaaaaagaaaattaaataaaatcattaaaattaagatttaaaaaactcaacaaatttgtataatagttatgtgattcctatacctatttaaacgatttcgtatctcagttgtattttcttttttacagtgcatctaatgatttatctaatgagtgaaacgaaatataatcacaaaacttcgtataacatttaactcaggccgtaaaacaagccacttgaaaaagctttcggagattagcctatcagaagcgttccaagtggagaattcaaaacaaatataaaaataaaaaaatcacctgttaatttgctcttgaaatctaatcttgcattcccattattgaacatcaatgtatcccaaaagtgggctcgcttataaatatccccgtttaaattgcttgacgtaccagtatcgaaatcgatcggaggcgatgcgttgtggttgctgcagtgtgcgccagcaaaagatctgggtcttctccatgggaggcctgatcctggcaattgggatttttctggcctcagcctggccagccgtatctcggcaatggattcgaagtcttttgcccctggctcccaactcttttatctacaatcgctgggtgactacgcccacgccggtatatagcacagttttcctcttcaactggactaatccgggggatttgaacaccgagggcgttaagccgcactttgagcagctggggccttacactttcagtgactttaaggtcaaggaagatttggaatggaatcagccccaggtgacctacttcggcaaacgtacctggcattttctaccggaaaagtcaaatggatcgcttgatgatgtagttatagccccacactttcctactttggtaagtctgattaaaggttgagtgctatgctatttgacggcaaaacttacattaagaataccgaatatctctgtccgaatatctgtcgccacatccagtaatcccctctaatcccgctatacgctttagacagctgctttgtactcgcgccgattgcgccgcatcctgcgcaaggtcatgaactttactctcaatcgcgaaggcggcgccacccatatgacccacacagctggccagtggctctttgatggctattatgaccatctgcttgacttcgtggagcagctgcattcgcccctgctcccggtttacgacaacacctttggctggttctacgagaggaataactcaaagacggccgagggaaactttacactgcacactggccgtggggatctcagccagttgggagatctgctcctgtggaatggagagaacaccaccggcttttatcccggcgaatgcggcaaggtcaatggcagcacgggggaactctggtcgccgtacaggacgtgggatcagcccaccaccatattcctaccagatgcagcgcggtacttgaacttgtttccaaaggaaaatctcaccatagacggcattgatgtctggcgatacgagtccaccaatctcaccatcgataatggccagctgtcgccggacactgagtgcttttgcctcaagaatcgcgagtgcccgcgcaacggagtcctggattacggtcctcccgccttcaatggcccgttctacatgtcgcatccgcacttcttcctcacagatcaaatgtacagggaaaacaccactggcctgcagcccgaggaatccgagcacggcatgtatgtgataatggagcccactctcggcattccattgagcttgagggggcagcttatgattagcacgaaagtggtgcgcgacgaggccattgagtgagttttttatttgacgctgcccagtctccaaaaccatttgttcaagaaaagtacgattaacacagactaatttacacaggaacgtaaaatcgtccttcttgtacctgtgaaattgtcactattaacatagatagtatcagcttaaagacaaagaaaatattaatatcaatgtagggtcaagatctaaaccaaaaacttgttttttctccttatccagcttgttcaagaacgtggcctatgatcattatgcacccctatttacaatgagattgcatgcggaattagacgaagggctcacaaaactattgaaggtaggatggaaagcatggaaaatatctacatatgaataacaaaatgtaataccttatttaatagcttgccctaaatgctgcgattattggaatgtatacaggaattggcttagttcttttgggaatgtcaatagtcgtaactggaatattcatcacaaaaaaacacaaatggcacagcgaacaaaggcccgacaaacatttgcaatgcactcaaaactgataagactgtttaggctaacaaagccataatctcgctaatcaatgggaatatttgggcattgtttaaggccataatcagtcagggctctttaaggcccggccataaaaaatgcaaattacgtgcttggctggattatccaatttccctcaggtgttgcccagctgcaggcatctagaattacactaaattatggcctttcaaatatgctaaaatttattaatatgttaataattgttttttgctgctcgttcatgctatgctaagaaggcgggaagggagaaatccttgagcacgtaagctgcatactttatggcgtacgaactctttcaccaggcagagccggcaaataccgaactggaaatttgaaaaatgccaaaagaatattataagcgactaatttatatgcaccaagcacgcaaacttacgttttgcacacacattgttcgtggcccacgaaaagggcgaaggaa

SEQ ID NO: 12083 - DNA, 2586 bp, DROSOPHILA
atgtgctgcagctgctgtggggtgacccaacaaaaggcctgggtcttcggcctgggaacctttttcgcggtctccggactcctggccataatatgctggcctggctttatagactcagggattatgaaggccttgccgttgacacccacttcaaagacttttgaaaaatgggaggagctgcccattccggtgtatgtctacatgtatctttggaactggacaaatgccgcagatgtgcaggctaatggagtaaaacctattttcgcgcaacttggaccctatgtttatcgagaggagaggaagaagatggatcttgagtggcacgacaatggcacagttacctttaaccccagaagaacttggttctgggaagaggagctctctggcggcaagcaaacggatttaattaccgccccacatttaccttcattggctgcttcaaaccaaatgcggaatagcaacgtcttcctgaaattcatgttcaacgaggccctaaatgcgaatggtggacatctctttgtgacccacacggcagctgaatggctgttcgaaagtttctacgacgaatttttgcattacgccatgaccctgaataatccattggtcccaaaaatcgagtcggatcactttgcctggttcctcaaccgtaacggatcgaaggacttcgagggtcccttcactgtacacaccggagtgggtgacatcaaggagatgggtgaaattaagtattggaagggccagaatcacacgggatggtacgatggagaatgtggacgtctcaatggcagcaccacggatctttttgtgcccgatgagcccaaggagaaggctttgaccatcttcattccggatacttgtcggatcataaatcttgagttcaccggacagagcgaaacaattcagggcatcacgggttggaagtacgagataacgccgaataccttcgacaatggacagatcaatggtaacgcgaagtgctggtgtcctttggagcgccagccagataattgtcctgcaaccggagccactgacctaggaccgtgtgccgatggagttcccatgtacctttctgcggatcattttatgtacgcggacgaaagttatggcagcacgataagcggctacaatccgaattacgatcaaaataacttttatatcatcatggagcgcaagatgggagtgccgttgaaggtcaatgccaatgtgatgattaccttgtacatagagccagacagcgttatagacatactgaagggcctgcccagcttctatgcaccactttttaccactgctagtcgagcggaaatcgacgaagccctcgcctcagaacttaggtatcgaaatcgatcggaggcgatgcgttgtggttgctgcagtgtgcgccagcaaaagatctgggtcttctccatgggaggcctgatcctggcaattgggatttttctggcctcagcctggccagccgtatctcggcaatggattcgaagtcttttgcccctggctcccaactcttttatctacaatcgctgggtgactacgcccacgccggtatatagcacagttttcctcttcaactggactaatccgggggatttgaacaccgagggcgttaagccgcactttgagcagctggggccttacactttcagtgactttaaggtcaaggaagatttggaatggaatcagccccaggtgacctacttcggcaaacgtacctggcattttctaccggaaaagtcaaatggatcgcttgatgatgtagttatagccccacactttcctactttgacagctgctttgtactcgcgccgattgcgccgcatcctgcgcaaggtcatgaactttactctcaatcgcgaaggcggcgccacccatatgacccacacagctggccagtggctctttgatggctattatgaccatctgcttgacttcgtggagcagctgcattcgcccctgctcccggtttacgacaacacctttggctggttctacgagaggaataactcaaagacggccgagggaaactttacactgcacactggccgtggggatctcagccagttgggagatctgctcctgtggaatggagagaacaccaccggcttttatcccggcgaatgcggcaaggtcaatggcagcacgggggaactctggtcgccgtacaggacgtgggatcagcccaccaccatattcctaccagatgcagcgcggtacttgaacttgtttccaaaggaaaatctcaccatagacggcattgatgtctggcgatacgagtccaccaatctcaccatcgataatggccagctgtcgccggacactgagtgcttttgcctcaagaatcgcgagtgcccgcgcaacggagtcctggattacggtcctcccgccttcaatggcccgttctacatgtcgcatccgcacttcttcctcacagatcaaatgtacagggaaaacaccactggcctgcagcccgaggaatccgagcacggcatgtatgtgataatggagcccactctcggcattccattgagcttgagggggcagcttatgattagcacgaaagtggtgcgcgacgaggccattgagtga

SEQ ID NO: 12084 - protein, 861 aa, DROSOPHILA
MCCSCCGVTQQKAWVFGLGTFFAVSGLLAIICWPGFIDSGIMKALPLTPTSKTFEKWEELPIPVYVYMYLWNWTNAADVQANGVKPIFAQLGPYVYREERKKMDLEWHDNGTVTFNPRRTWFWEEELSGGKQTDLITAPHLPSLAASNQMRNSNVFLKFMFNEALNANGGHLFVTHTAAEWLFESFYDEFLHYAMTLNNPLVPKIESDHFAWFLNRNGSKDFEGPFTVHTGVGDIKEMGEIKYWKGQNHTGWYDGECGRLNGSTTDLFVPDEPKEKALTIFIPDTCRIINLEFTGQSETIQGITGWKYEITPNTFDNGQINGNAKCWCPLERQPDNCPATGATDLGPCADGVPMYLSADHFMYADESYGSTISGYNPNYDQNNFYIIMERKMGVPLKVNANVMITLYIEPDSVIDILKGLPSFYAPLFTTASRAEIDEALASELRYRNRSEAMRCGCCSVRQQKIWVFSMGGLILAIGIFLASAWPAVSRQWIRSLLPLAPNSFIYNRWVTTPTPVYSTVFLFNWTNPGDLNTEGVKPHFEQLGPYTFSDFKVKEDLEWNQPQVTYFGKRTWHFLPEKSNGSLDDVVIAPHFPTLTAALYSRRLRRILRKVMNFTLNREGGATHMTHTAGQWLFDGYYDHLLDFVEQLHSPLLPVYDNTFGWFYERNNSKTAEGNFTLHTGRGDLSQLGDLLLWNGENTTGFYPGECGKVNGSTGELWSPYRTWDQPTTIFLPDAARYLNLFPKENLTIDGIDVWRYESTNLTIDNGQLSPDTECFCLKNRECPRNGVLDYGPPAFNGPFYMSHPHFFLTDQMYRENTTGLQPEESEHGMYVIMEPTLGIPLSLRGQLMISTKVVRDEAIE

SEQ ID NO: 12085 - DNA, 10963 bp, DROSOPHILA
ttcaaattaacaaattgctgccggttgtgtctgcgttatcacgattccttgatggcatggctgatggtaattggttattggccagcctgtttgcttattaaacggctcgtttggccaccgttttcgtttcgctcaattctcaatcacaacacacttgcttcagttttaccggctttttcagtttcaatttcacgcgaatagaccgctcgagctggttttcaaaacgaccggatctcgaacatttcgacgactgaccgcgcggcgataaatgcgttcgtatatattcgtatatgttgcttgctccatctggcatttttagcatcacagccgagctcgcgaacggtcactctcttggttcgatgcaaccgatttagttcgagttcgaagggtttcgaacttacgtttcttatattaaaagaagtgcacaaaaattcaataaattgtttgtttctatttatatttcataattagaaaagtacaattattgtttaccgttttcttgcccgtagatcatttaaatttagccgcgccacaattgcattcttatatttgaaatacgtactaattgggcgaatttagttcatttagtacaattgatgcgcatgcgtctctcttgaaaattaaattctctcgcatttacagtgccaagataactgttaagctaacagctgttaagtctaagcaataaataaaaaaatagtaaactgtataaatatcagtattattaaaaatatttacatttatttcgtttctttttgtttttggcggtttcagaaaccaattcagaaatttaatttacaatttttatgagttcaagctttgagcgatttgattgagtggttcgatttccgtatccagcgatacagagggcagcacatgaagcaccaaaagcacccgggatcacacacacatccttggtcctggaacatccactcctggggatctcgaagaatacagccacaaaattggaagatctatgtatatagaaagttttgaccgctcacacggcggtgatgagatgggcgtcatcctcgttgattcgatccgactttccattgacctcgatcgtgtgattggactcggtgtcgctgggttcctgctcgacctcctcatccgcttcatcgtcctcgtccccctgggaggagttctcaccattttccttgtcgggcgattctcgctcctcgttttcctcgtatatgacgtcacagctggtggctattgatttgggcggcggcttctttaccgcttttccaccgcctttgcggtcaccattttgttgcatctcggacatttgaatctgcatttcccgcaggcgatcggtgagcacatacaaatcccgctcctgactctcgcatcgtgtcctcaattcggttatctcacgcagatcctcggctcgaggatctcgtctttcgtatcgcatgcgcatctcctcaaatctgcgcaaaaaggattgcaaaattccttaaatatttactatattcactactaaactaccaaaaaggataatggtgaattcaaggcggatgctggatactgacttggcgtacaacatcccacaacacggacaagcaaaagtaagataaatttgtgttaaagataaaaagagttaaaaggtcgagctcttaaatccctttcctttccgattttatttttttatttttcaaaattatataaagataagaatcttatattttagcaaaattcgaaagtttcgaatcataattccatagatctgtggtctcaatcacactcaatcttttaattaactttccttagacttaggaactcgaccttggggaagatgggtcagggtggctggtggtttttggggaatgggtgcacttacagattggtcaggcagcggcacttgcgatgcagctgctcgatctcgttggcgttgctgatgtcgcgcttgtccagcgccgccttctcggcatcgtaggccgccttcaggtccttgagattgcgctggtgccgaagttctacatcgctgcggttgcggatgcggatacgaatgcgtacgcggatacggatgcagattcggattcgggttggggttattcaggttatatagagtggtcagaggttgaggtggatacacacacatagcgagaaagagaaagtaaaatattaggagaatcgcaccagaaggacaacgtttgacaagctgcatgccagataaaaacatattttttttcttatgggttttgttcgcatttcaaacatttcaataccaatgtcttatgtctaacaagagattttcgatgatggccagtcttaaatttaaatcaagaatcattttaagcgtgaaaagggggattaatattttattggcgcgctaggaggtggcgatatttgatatagatcactgcgacaatattgaacaccaagcatgcaatggcgatcagcggcgacatggtcagatatagcacatatagtgtgggcatatacggccacgccccctttgcaaacgcccacagggctggagaggctgtcgatcgacctaaacgctgatccatgctgatccaatgaatgaaatgtgaaacgaaagagaacagaatacaagttcatgtgataatggatcgagttcaaggactccaatgtgacaaatgtggcaaatgagtaggatgcagacattcaatgcaagccaatggatcctgcttcaatttagtggggagcagcggtcagggggcactattaaggtaagtatgcccatggggcggggcatgccacattgcattcactcacttgattcgttcatcggcagcggccatttttgcgcgatgtcgctccacaagttcctgcaacgcctcctccttctccgcctgcaacttggccttttgtgagtctgccgattgatataatcaattatataattatatataataataatcaatatacacatgtatctttacccagctcctttcgatgtgattcgaccatttcctgagtggagagctgcagttccttggcaaactcctccttaacttgaccgagacgttcgcggaacttctcctccatttcggccttctccgcctcgaactccttctggagtcgttcctccagctcgacacggcgatcctcctcgcggcacatggcattctggtactcgcgatcggccttatccaaatgcattcgggtctgaagcagggcgttatccgaacgttcgcgcaggctgaggaaatcctgtttcttttgctccaggctctcgtgcagatcgtcaatctaaatgatggtttataaaatgcaaatatgcattcgattgcagtttatctataacactatgaacccacctcagatcgcagttcctcctcgttggccgtgtatctgttggtcagggccctcagctcctcgatgtgctcgttctgcagtttgtccaacgcctcgcgacgctcgtccacatacacggactccagttcatttgtcagtcttgtcatctctgtgctgaaggcataaaagttcaatttggagcactcaatatgatgacttgtgacttactaaagtttgttttcccagaaggcggctgcctcatttcgcacctcatcgattttgtagatcatttggcgttccttatcatagatggcactgtaaaaaatataatcattacaatcaaattccatggataattcccaattatacgcacttatcacactgatacttgatcttgtgcaccgcctcgatctgggcctcgaggttttcattggccgactgtagatctcccttcaggttctcgatgcgatccattagcgtctggatggactgctcctgttcgctgaccacgcccctcagcgaattcacctgcgcctggcaggtgcgcagcatctcggactccctacggcgggactgcaactccagttccagctcctccgccttggcggtcgcctgctttcgctcgtagttggacttgtccgtcttgtccttgcactgccgctgcatctgccgcagttgccactcgcagtccgtcatcaaagtttcctcgcgctctataattgatataagatattatttaatagctttatttataatttatacgcttgtttagaataatgatttctcacctcgattgtgtgtcctgagcatttcgaactccttctgccatttgtcctcgcagatcttgcgttccgcctccgaattgtccagtgcgttcttcagtatgcgtatttgctcctccagatccgtccggatcttctccacctgctggcgccattcctcagcctcgacttgggcacaggccaattgggtttgcaaacttttggccaaaccctgcgtcactttgtacttctcggttagttcgttgtactgagcttcgagttcgtctgaaaaaaaaggttacaaatttatttgaatggaaattaattactcaataaatgtcattatataatcgcgtaaaaacggaatatttgaataatggaaaatgttattatattatggttcaattaaacgcactaattcatcagaagctattaacctaattaattattaattatgctcaccatatttgttttggaattcatcttgattttcgctgtatttgtgccgtagaataaccttttcatcttccagaagtttcagcttttttcgcacatattcatcgtccttgtgagccgcactcagttcaccctgtaatcctaagaagttaaagatatgatttgaatggctcccagaatgctttcaatatgatatgatacttactctccacattccattgcttgaccgacagctcctgctccaatttctggatcttgaactgcatatcgccaaccttggcctccagttggctggcatttttgtgcgcctcatccaattggctggcaaatcgagccttctgctgttttagctccttcctgggaaatcgagtacgaggatgagtaatagtgggaatagaaacataaatccctagacagttcagctcaactgtcagacgaatttttcaaacaaatcttgtcactgaataatccacaacacaaacaaaatgaatcacaaacgttttccgcgcacgcagcacgaacggcataaataaatagaagcaaagccacagaaatataataattattatttttttatttttaatatcccagcgcttttacctatagctagacattggactgacgtaatttgaatggaaaagctcgttaaacgtgaatgaggtgtaaagacagtggcaatgtcttcctcaaccataatttgttgagatacaatacgtaccgagatatagctacagatacgctgtacgtagacaaagatacagatacattttttttatataatatgtattggcttgtgctttgttttgttttggcttttcaacgcaataatgaaatacgttttaattgaatttatcctagtcgattctcggttgctgcgaaaatgcgcaaagtttatttataaatcaacgtttttccgtcgttttcatgcgcgcattttgccaactctcagtcgctctctattaaaaatacagtgcgtttcaatagtgacaaattgatgacaaagggctaatacttgtaggaatatcaataaaatgtcattaatgatttcattagtatatactatgacaaactgcattaagttccaataaagctgcttaatgtctataaagtttaataacaaaattgaacttaagtcagaggatcacttatcagttttagatttcataataattattataatttcctacactgtccgcattatgcgcccataagtttagtatagacaatgtgaatttatcaaattttgagacacgcgtttctgtgttgtctctacagacaagttggagataaagatagacgtagagatgcagagaatgagaatacgttgaatatacaaaaggacagatgcaacttgtgtacttagatttaaagttatttgaattatttttggcaagagcatctctgccggtgcctgtgaactttccgaggcaaatgcatagttgccagcttggattcttttgttgtttatgcccaagttgataattaaatcggattagataaacaaatggtggcgaagagaaggaaacagaagccgaagcttcgggaaagatgcccattagttattcgaggcaaattacgcatacgccgcatgtgccggcggaataaacaatctttcaatgctagctagccaagtggaggatgcgcacctacccacccgcatgcccaatcaattatccaccaaaatcaagaacaacccaaataaaattccacaagtgctcgcccccttcttatctatttcctcaaacaagtttgctctaaatatgaacgttttaaaatttacttgtcttttttttttgcacagcgcctaaaataagcaaggcgaataaaagtagagcaggcagatcgtgttctatgcacatgagaaaatatgattgagggaaaatgctgaagtgcagataaaccgaagcaagggatactctggaaaaccaattaataggtacattgaaattataattaaatttgagaaacaactcttgaataaaaaactgcaaatggaactttagaattaaaatgaaagtagcacatttaaacgaagtgtcttgaatgtacaaattgcggatttaattccagtactcttacagtacaaactattctaaacatctagtttaaaatataagtcgcaagtgatataccccctgcctgagtgcgcaataaacaagcgtgggaaatgaccaacatgttgccaacaaaattgcaaataaagcgaaagaaagccaaacgagaaatgacgaagtgaatttatttttgcccccgttctagtgttcaacaaattgaatgtttattattttaaacacgagaatttacataaaaatataaaatgtagaaataattgtcgccatttggctatgagacacttgccgcacggctgtcataatctgtcattttggcgaaggccaaacaatgccacctatcacactgcgtatacgtaatgcgagacactaggcaaaacaagtgggattttctaaggaattcgtttctatagatatgaaagtaaagtattttgtgataaatactaagactttttaaaataataagcttttataatttttaaactagtccctacacaaatctttgaatggaatatgccaaaaaagatattttactaatcaaattaggtatacaatttatatgttctgatccatttaaaaatagtcgtccctgactggaaaactcaacgcaaatcgaattggcggaaaaccaaaaccacaaagcaaatgagaggaaaattttcgctgatggatttcccagaaagagaaaccagatcacaaggcatgttccatgacacaaagatcaagataaattggctgcatcttgccatgttaatggtcaaattgttggcatgcgcttgtgattaaataaatacgccgcacttgatgccgcagctgctacaactagcaaatatcacgtatacgtcactagatacattcaagaagaatagaatacttcctgaagtagcttttaatataaaaacatttattactgaacaataaatgcatttttttggggattatatgaattgcttgcgtttaggatactacaaattattattggatttctattttatcaaattataatctctttttgtttgctgcaataatattttatatccctcccctttgttttttaatttagctcacctgagttcctggttgtcgagggggctctcctgtcgcactggcttgttgagcacactgccatcctcgacgatctcgatgcagggcgtcatgtcctggccaagacaactgtcgtcccggctgcgttgcttgggactattgctgcgactgcgaccctcgacgtggatgggtatgaagtgcacattgcccaggctattgccccccgctccattggcaatattgatgttgatctgcgcatcgccgccatttgtggttgtagatgatgatgatggtgctgctgctgctgctgctgctgctgctgctgctcctgatgttcctgatgtggatgcattgacggtcgttgactcgacaaccacatccggcagactgatgctctcgatgcataccaatcgctcgctgaactcgctaaaacgctcaatgtcgtcgagttcgtcgcactgcagaaaggtctcctcgcaatccgtggagttgccatcgcgtataaaggtgtggttcacattttggttggttgccatgtgcgaggagctgcgtggcggtggctgcggtggttgctgctgatgctgctgcgtctgtggtgcattcaattcctgctcaccgatcccggaatcggcataactgctgctcaaattggagtcacttttcagggcgctacgttcgctgctcgccgattgccttgagttgccattcgtctgactgctggacatatgcggctcatagtccagatccacagcctcgtcaatgtcgtccatttcctgttcgtccacctcatcctcggcttcctcctgcacattctccagctttacatgactcagccgcgtccagggacgaccgcttgagttttgatagatagtagctggtatatccgaggcaaagacctcatcttctagtgtttcgatatgcgcctcgttgagttcctcgatgtttagcgagtcttcagctggctcatttagttcgtagaagatttccggcgttttggctggctgctcatcgtcatccggaaaactgcaatcctccaccgtgattctgggcacttccggtgacttttgttggcggggcggcgcctgcggcggaatcacgaccgactcacgaaactcacgcggcgtactggcacgcgaactgtgggccgaactgatttcgttcggtttggcactagtttggcccatggttatgtcacttaattgctgattttgttgctcttcctgatcttgttgctgctgctcctgatgttgctgctgctcctgatgttgctgctgctgatgttgctgcttggtggccagatgttgctgcggaacagcacttgcattgccgtgctgttgctgctgctgttcggcaattgctgttggccgctcaacgtttgccgcttgaatgaaagacgaacgcatgctggctgctcgcggctctttttccggctcgatctggcgaggaaaactctcgttctctgcgggaaaatgaaaactctgtgtgcgttgctcttcccacaccagcactccagctggcttacttttctcttcgttcgctcttcgttggccgctattctctgggctattattagccaaagtcatttgataagtagtcgtagatgcgagcgcggggtcggagttcgtttcaaggtgtgttgcggtggcgatgattacgtctttggcattacttttattcgatttggctgctgttgcggcaatttgctgcttctgctgctgctgctgttgcttttggcgctgatggtttcgaccacgcgccatgaaaatgtcgctaagaaaatcgcgactcttttgcagagtttttcgctttttcgactctttttcggaagtatctttcggattgctcaacttgaaactgccaatggagagcagggattgccgcttttgcgtttcaccttcgttgcgatttcgatggcgatgtgttatggttatggggccatcgatttcggtctcaatagtgccaattagttgaccaccaatgcttttgctcgcgatcgcgctggctgcctcgttttgactgctgggagccgcatttcgatcagcggccgaggaaaacgtccacgtcctcccatctccgaccattttatttatatacaaattgtcggagcggccattagcagctgtttttgctaattttaaacgctcttcgtcgccgctgctgtcgttgccgttgtcaaagtcgctggcaaagtcctccagctcttcgatcaccgcccgtcgtgctctttccggcgactttgccgctctttgagcattagatatctgcccaatttgactgtatctcaagggtctatctccatcttcctcatcgatgatcttgtgctgcgcttttccacgacgcgatcttcgcagcaaattgaacatatttcgctctttctcttaatgatttaccctgcgcctctgctaatttctattaatttatttttatatccatttattctccttcgttggggctttgctcgtttgtgtgcttttcgtttaataaacaaatcgttgttgctttgttgcaattatttcgaatattgttgtattttaaatgctttcaacctgttgaaaatattttcacaattttatattagttttggcggctagtggatgggcggtttaattgtcgtcaattagtttaaccgcacgcactcagcatcacatacatatatatatatatatatgtatatatatatatatgatttggcgggattcactgactcgacttggtcggcggataaactgcgactgtcgctcagtcggcaatccaagcgatgcgacttctacagccataatgatcgccatcatgattattaggataatcacgatgatgacaataatgctggacaaatatgagtaacaacattgcgcgcgtgtgagtactggtacacttcaaaaaaattaggaataaaacaatatcaagcaaagacaaaatatacaagtgtaattagaaaaaattgttttaaagattaattagatttagcagtactaaaaaaacattttttttttcggtatgataaataatcataatatatttttctaagtgccatgtaggcacatggcataatttgttttaattattttacagaaggaagaacacacgctcgcaggggtataccgcctttggtaaacttgataattgcttatgcatattaattgatgaatagaaagtgggggccatttactctatagtccaagtaatgcgtcattatgtgtcattcgatgagcaacaacaatttcctaaggcattcaaataagcacaatggaaaagtgaaacctattcatctaattgggttattaaaatgatttcattcatagttttattaagttttaaaatcatcttaatactgagtattaatctgttggcataacttatgtt

SEQ ID NO: 12086 - DNA, 4452 bp, DROSOPHILA
atgttcaatttgctgcgaagatcgcgtcgtggaaaagcgcagcacaagatcatcgatgaggaagatggagatagacccttgagatacagtcaaattgggcagatatctaatgctcaaagagcggcaaagtcgccggaaagagcacgacgggcggtgatcgaagagctggaggactttgccagcgactttgacaacggcaacgacagcagcggcgacgaagagcgtttaaaattagcaaaaacagctgctaatggccgctccgacaatttgtatataaataaaatggtcggagatgggaggacgtggacgttttcctcggccgctgatcgaaatgcggctcccagcagtcaaaacgaggcagccagcgcgatcgcgagcaaaagcattggtggtcaactaattggcactattgagaccgaaatcgatggccccataaccataacacatcgccatcgaaatcgcaacgaaggtgaaacgcaaaagcggcaatccctgctctccattggcagtttcaagttgagcaatccgaaagatacttccgaaaaagagtcgaaaaagcgaaaaactctgcaaaagagtcgcgattttcttagcgacattttcatggcgcgtggtcgaaaccatcagcgccaaaagcaacagcagcagcagcagaagcagcaaattgccgcaacagcagccaaatcgaataaaagtaatgccaaagacgtaatcatcgccaccgcaacacaccttgaaacgaactccgaccccgcgctcgcatctacgactacttatcaaatgactttggctaataatagcccagagaatagcggccaacgaagagcgaacgaagagaaaagtaagccagctggagtgctggtgtgggaagagcaacgcacacagagttttcattttcccgcagagaacgagagttttcctcgccagatcgagccggaaaaagagccgcgagcagccagcatgcgttcgtctttcattcaagcggcaaacgttgagcggccaacagcaattgccgaacagcagcagcaacagcacggcaatgcaagtgctgttccgcagcaacatctggccaccaagcagcaacatcagcagcagcaacatcaggagcagcagcaacatcaggagcagcagcaacaagatcaggaagagcaacaaaatcagcaattaagtgacataaccatgggccaaactagtgccaaaccgaacgaaatcagttcggcccacagttcgcgtgccagtacgccgcgtgagtttcgtgagtcggtcgtgattccgccgcaggcgccgccccgccaacaaaagtcaccggaagtgcccagaatcacggtggaggattgcagttttccggatgacgatgagcagccagccaaaacgccggaaatcttctacgaactaaatgagccagctgaagactcgctaaacatcgaggaactcaacgaggcgcatatcgaaacactagaagatgaggtctttgcctcggatataccagctactatctatcaaaactcaagcggtcgtccctggacgcggctgagtcatgtaaagctggagaatgtgcaggaggaagccgaggatgaggtggacgaacaggaaatggacgacattgacgaggctgtggatctggactatgagccgcatatgtccagcagtcagacgaatggcaactcaaggcaatcggcgagcagcgaacgtagcgccctgaaaagtgactccaatttgagcagcagttatgccgattccgggatcggtgagcaggaattgaatgcaccacagacgcagcagcatcagcagcaaccaccgcagccaccgccacgcagctcctcgcacatggcaaccaaccaaaatgtgaaccacacctttatacgcgatggcaactccacggattgcgaggagacctttctgcagtgcgacgaactcgacgacattgagcgttttagcgagttcagcgagcgattggtatgcatcgagagcatcagtctgccggatgtggttgtcgagtcaacgaccgtcaatgcatccacatcaggaacatcaggagcagcagcagcagcagcagcagcagcagcagcaccatcatcatcatctacaaccacaaatggcggcgatgcgcagatcaacatcaatattgccaatggagcggggggcaatagcctgggcaatgtgcacttcatacccatccacgtcgagggtcgcagtcgcagcaatagtcccaagcaacgcagccgggacgacagttgtcttggccaggacatgacgccctgcatcgagatcgtcgaggatggcagtgtgctcaacaagccagtgcgacaggagagccccctcgacaaccaggaactcaggaaggagctaaaacagcagaaggctcgatttgccagccaattggatgaggcgcacaaaaatgccagccaactggaggccaaggttggcgatatgcagttcaagatccagaaattggagcaggagctgtcggtcaagcaatggaatgtggagagattacagggtgaactgagtgcggctcacaaggacgatgaatatgtgcgaaaaaagctgaaacttctggaagatgaaaaggttattctacggcacaaatacagcgaaaatcaagatgaattccaaaacaaatatgacgaactcgaagctcagtacaacgaactaaccgagaagtacaaagtgacgcagggtttggccaaaagtttgcaaacccaattggcctgtgcccaagtcgaggctgaggaatggcgccagcaggtggagaagatccggacggatctggaggagcaaatacgcatactgaagaacgcactggacaattcggaggcggaacgcaagatctgcgaggacaaatggcagaaggagttcgaaatgctcaggacacacaatcgagagcgcgaggaaactttgatgacggactgcgagtggcaactgcggcagatgcagcggcagtgcaaggacaagacggacaagtccaactacgagcgaaagcaggcgaccgccaaggcggaggagctggaactggagttgcagtcccgccgtagggagtccgagatgctgcgcacctgccaggcgcaggtgaattcgctgaggggcgtggtcagcgaacaggagcagtccatccagacgctaatggatcgcatcgagaacctgaagggagatctacagtcggccaatgaaaacctcgaggcccagatcgaggcggtgcacaagatcaagtatcagtgtgataatgccatctatgataaggaacgccaaatgatctacaaaatcgatgaggtgcgaaatgaggcagccgccttctgggaaaacaaactttacacagagatgacaagactgacaaatgaactggagtccgtgtatgtggacgagcgtcgcgaggcgttggacaaactgcagaacgagcacatcgaggagctgagggccctgaccaacagatacacggccaacgaggaggaactgcgatctgagattgacgatctgcacgagagcctggagcaaaagaaacaggatttcctcagcctgcgcgaacgttcggataacgccctgcttcagacccgaatgcatttggataaggccgatcgcgagtaccagaatgccatgtgccgcgaggaggatcgccgtgtcgagctggaggaacgactccagaaggagttcgaggcggagaaggccgaaatggaggagaagttccgcgaacgtctcggtcaagttaaggaggagtttgccaaggaactgcagctctccactcaggaaatggtcgaatcacatcgaaaggagctggactcacaaaaggccaagttgcaggcggagaaggaggaggcgttgcaggaacttgtggagcgacatcgcgcaaaaatggccgctgccgatgaacgaatcaacgatgtagaacttcggcaccagcgcaatctcaaggacctgaaggcggcctacgatgccgagaaggcggcgctggacaagcgcgacatcagcaacgccaacgagatcgagcagctgcatcgcaagtgccgctgcctgaccaatctatttgaggagatgcgcatgcgatacgaaagacgagatcctcgagccgaggatctgcgtgagataaccgaattgaggacacgatgcgagagtcaggagcgggatttgtatgtgctcaccgatcgcctgcgggaaatgcagattcaaatgtccgagatgcaacaaaatggtgaccgcaaaggcggtggaaaagcggtaaagaagccgccgcccaaatcaatagccaccagctgtgacgtcatatacgaggaaaacgaggagcgagaatcgcccgacaaggaaaatggtgagaactcctcccagggggacgaggacgatgaagcggatgaggaggtcgagcaggaacccagcgacaccgagtccaatcacacgatcgaggtcaatggaaagtcggatcgaatcaacgaggatgacgcccatctcatcaccgccgtgtga

SEQ ID NO: 12087 - protein, 1483 aa, DROSOPHILA
MFNLLRRSRRGKAQHKIIDEEDGDRPLRYSQIGQISNAQRAAKSPERARRAVIEELEDFASDFDNGNDSSGDEERLKLAKTAANGRSDNLYINKMVGDGRTWTFSSAADRNAAPSSQNEAASAIASKSIGGQLIGTIETEIDGPITITHRHRNRNEGETQKRQSLLSIGSFKLSNPKDTSEKESKKRKTLQKSRDFLSDIFMARGRNHQRQKQQQQQQKQQIAATAAKSNKSNAKDVIIATATHLETNSDPALASTTTYQMTLANNSPENSGQRRANEEKSKPAGVLVWEEQRTQSFHFPAENESFPRQIEPEKEPRAASMRSSFIQAANVERPTAIAEQQQQQHGNASAVPQQHLATKQQHQQQQHQEQQQHQEQQQQDQEEQQNQQLSDITMGQTSAKPNEISSAHSSRASTPREFRESVVIPPQAPPRQQKSPEVPRITVEDCSFPDDDEQPAKTPEIFYELNEPAEDSLNIEELNEAHIETLEDEVFASDIPATIYQNSSGRPWTRLSHVKLENVQEEAEDEVDEQEMDDIDEAVDLDYEPHMSSSQTNGNSRQSASSERSALKSDSNLSSSYADSGIGEQELNAPQTQQHQQQPPQPPPRSSSHMATNQNVNHTFIRDGNSTDCEETFLQCDELDDIERFSEFSERLVCIESISLPDVVVESTTVNASTSGTSGAAAAAAAAAAAPSSSSTTTNGGDAQININIANGAGGNSLGNVHFIPIHVEGRSRSNSPKQRSRDDSCLGQDMTPCIEIVEDGSVLNKPVRQESPLDNQELRKELKQQKARFASQLDEAHKNASQLEAKVGDMQFKIQKLEQELSVKQWNVERLQGELSAAHKDDEYVRKKLKLLEDEKVILRHKYSENQDEFQNKYDELEAQYNELTEKYKVTQGLAKSLQTQLACAQVEAEEWRQQVEKIRTDLEEQIRILKNALDNSEAERKICEDKWQKEFEMLRTHNREREETLMTDCEWQLRQMQRQCKDKTDKSNYERKQATAKAEELELELQSRRRESEMLRTCQAQVNSLRGVVSEQEQSIQTLMDRIENLKGDLQSANENLEAQIEAVHKIKYQCDNAIYDKERQMIYKIDEVRNEAAAFWENKLYTEMTRLTNELESVYVDERREALDKLQNEHIEELRALTNRYTANEEELRSEIDDLHESLEQKKQDFLSLRERSDNALLQTRMHLDKADREYQNAMCREEDRRVELEERLQKEFEAEKAEMEEKFRERLGQVKEEFAKELQLSTQEMVESHRKELDSQKAKLQAEKEEALQELVERHRAKMAAADERINDVELRHQRNLKDLKAAYDAEKAALDKRDISNANEIEQLHRKCRCLTNLFEEMRMRYERRDPRAEDLREITELRTRCESQERDLYVLTDRLREMQIQMSEMQQNGDRKGGGKAVKKPPPKSIATSCDVIYEENEERESPDKENGENSSQGDEDDEADEEVEQEPSDTESNHTIEVNGKSDRINEDDAHLITAV

SEQ ID NO: 12088 - DNA, 6025 bp, DROSOPHILA
ctatacatatacttacgtctatatatatatatgtacatatatataatgtttagtactttgaataaactgaaattgagcgcccttactaatgtattccttttagcaaaatattcagaaaaaaaaaaaacaatacaaaccaagcaaaggcatataattttttagcattatacaagtggaaatataacagacaaaccatataaatagtaaaccaaaaaccagttggcagatatgaaaactatatagtgaatcaaataaatatatatatatatatatgacacgtaatctttatgaagcgtataaaaacaagaaactagcggaatattccatattttatagtaattttcaataaacgtaatttttttaatttttacaaaattaaagttgaaaaaatggaaaatcaataaaaaatatttgtagttttctaaagcccgaaaaatcaatctgaagggaaaaaaactgatttaacataatatttgtaaacagtttcgattttcttgcgtgtttttgctccaggcattgaagcgttttcaattaaattaccggaaaaaatgttacgaaacacaaaaaaaacgaaacagaccatagattaaaagtatgtactaaaataaaataaacaggaatagaagtcaatgacgaaatccaaacctaaaacatatattagagacattcgcgatttttcaaaataataataaagtcaaaaaaataaactgtaatagcaaaccaagatatcagcagtactccaatgcaatatttcaaaggaaaacgaacaaggataacgaagtaaacagaaaccaaaccataattccagcaagtcaaatatgaaattaattaatacaaatatgtaattccgtacagaggaaagtatacatataggattatattataaacaaaatgtattcaagaacaaggtcgttttttaagcgattatatacgacaaaacgaaattggaataacactaaacaccccacataaacacacactctcagtcactgaggcaaaaatgcaggttatgaaacaagtaaataaacaaataaatgaaaaaaaaaaacatatatcttctcaaataaataaaaatactttttctggaataatacaaagccaacgtttttctatattctgcttagttttgggaaaggaatgatgaactttaggaaagtgttcttttaaaatcatcaacattgattgaaattcgtagcatactttctgggcaacatttacttacacgtctccgtttatttagtcaataatgacaaaacaaacaatgaatatatctagaacttacaataaaataaccaaaaacaaattcaaaatttcagatccggcagcattgaaggtgtatcaccgacgtccagcggtccaagtatcatatccacattgtcgacggccagtgcagcaggtggaggaggcagctccgtgggccggagctgtcgccgctggcgatagcaactccagcggtggcacctggcgactaattaagggcaaggtcacacaaaccatcgaggagatcaagtcctcaaagctgccaccaactgcagccatacctattatagtagccgatccaccatcaacaggctggagcaacgatcccgactcggacaccgagtgcctcaccgtgaacacatccattagtgaggagcttcccctggacctggaacacaaacagaactccgattcggacgtggaggccgagctgctgcagcacgatagcataagtttgggcagtggcgacgtgccaacagtggcagccactggccactcggagcgatctcgtctgcgacgtggcctggcccacattcgatccaaggtaaaggccaaacaacaagcggcaccggccatgaacaaaaaagatgtcagtcccagtggttcaacagtgccggcaacatcggtgcgaaccggttttctgcggcggcgcaatgtggtggaggcgggcagcgagccttccactagccagcaggcggagattgctatcgccagtggcaaggtgaagaaacggggcatcctgctggcccgcaaggacgtggagatcgagtccggcgtggaggtgctcgaggatatgattccttcaactgcagtgcacatcgatcactcaaaggatgtcgctaataagcgagcggaagaagtgaccgatgctggagctgatgccgattctcgagctagtctaactcttcctgtggcgccgggctttagtacgcttgccagctcatatgtggaaaaagaatcaggtgttcgggacaccaggagcaggatcagcttcttctccaacttaagcatgctcagtgtttctcagtggcgagagaagcatcagggcgccacggcatttgccttgccagtgcttctttccgtcttactgatcttactgatgattttgccagtgcccgattttctgcgaggagtcttcgccaccctcttgttcttcacggttatggactgttgtggtggtcatttgagagctttgctcgaggacttcatgctgaccacgcatccggaacgagtggccttcgccattcccaattacaaattcatgccgatttgcgagattcctgccgttgaggagcacaagacgatcaaaacatatgcgggatggatgaatgagattaacagctatgaccccaacacgttctcctttagcctcacaagagcggtttatgtgcgtttggatggcagtatcctaaagatgtcgggtacaaatgcccgcatacccaagcgacgcatgtggaacgagccgccaatcgatcgtcacaagatcccgtttacggatcatcgttcatatgatctcagagactgccggatagaactactgcctttgggtctcgccaataagcggtaagtgctttggctctaatttatagtttgggttactcacagtatttatgtttcccttcagtttctttaatcgcaaatatcccatacaactgatcatcaagagtaacagggatgtgcccgatgagcaaagctccgttgaaagccagtcagaggcaacggttaagacggatgccaaagaagctaaagctgcttcatcatcgggaactacaccacccggaggagaggaggagaagttagtggactttgcgggcacggttatgcaggcagatgtaatataattcttaatgattgatttaaaaattattcattttgattattatccatagttacagcaactgcggaacacggttaatccggataaggagctcaacgacattaccgtgccctgtggcgatgaggtgcgtttactgctcttctcgagatgtgatcgggaaaaagaagactggtatcgacgcttcacaaacgccagtaggggcttagttcacgaacaggaccttcaggtgccaatggcccgattcgtggaggattctgatcttcaggcggcggcagctagacaggctttgcttctggtcactggaatgggaaaggctggcgtcaaggtaagcgaacaggaatggaattcaagagttttttccttatgtttgaatctataccgttttttttttcagtctgaagatgaaatttcggctgggaaaggtaatgatgaaacagatcagcagacgccagatgggcagtttgagactatcaccgaagaggatttactcgacacacccaaggaggagtccttcgatggcatgatcatgagtgccaatgtggccaggaattcgccagactacgttcgattcatggccgtttaccaggtacgcaactggctagctacctttgtttgtagtcttttagttttgatttatttgatttattattatttattatttctaattggcttttggtagaaggcttgtaaccagagcactattcctgttacccgaagttccgttggaacaatgcgtaccactgatcggcggccaagaaaagtatgtttatatggtttttttttttgaattttcattatatgaaagatgtcaatttagtaagcagaaagctaatcaataaactatttgcagtctcgccgtgccaaacgtcaggaagatgagctgtggaagggcattgatcagtcgctgttcttgggtccttccggcagcattgtgtgggctaatgtactactgggacgatgcctatacagctggctacacgatgccatgctgcacgagaagctcaaggaggttttgcaaaagaaattaaactctattaagctgcccagcttcatggaggaggttatcatcacaaacatatatttgggtgagtccccattactatgtcatcgtgtctcccaaccgatgctggatgaacgcggtgtttggattgatgccgatgtgacctacgagggattggcacacataacagttactaccaagctgaatctgctgcgcatacgcagcaagacaaagtcaccaatggccaccgataatgtgcccaccacctcgatgctgccggagcaatcacaggatttgcgcagcctttcagaggtaaattcggagaacgtcatctatgacagtgatgcggagagctcgggcggttcatcaactgaatccgagagcccaccgccgggaaatgccccagagaatgcggctggaacggagtgagtatagaaaatattgcaactacttgtttcgttagtgcttacaattctaatatcttttcacctttttttccagattttttcagaattcacccggtaatgcgcgtcgcatctttaagattgtcgaccgcatagccgcctctaatctatttcaatacgccaccgagctgccgtacgtgcaacgagctatggagaacatgaacgcgaatatcacactgcgcgtagatctcaagggtttggtggcccgtggcactttaaatgtgccaccgccaccatccgatcgagtgtgggttagctttcgcggaccgcctcgcctttggatatccaccaagccccaagtgggcgacaaatccgtcgattggtccattgtgaccaatgttattgagagcaaactgtgcgaggctgtaaacaagtttctggtctatccaaatatggtagacttctccataccattcctgagtaaccccaactttgatgaggatcaagggaacgcagccaactaaataccaaaatatagaggaaaaggcagggaataagaaaagagatacaatttatattcgatgaatttaacacaaagtgtgagcgagattttttatgtttaccttgtttatttttgatataaacttcaagcttagattaaattttcgatctccagttccggtttcgaatacttaatcgcattaaatgattgatgagtacaagggacgaccgattccgaatgacaagttacaaaacgcttattttcatcacattctgctgaaactccagaacaattccaatcttagctacaataattttcacctacaaatatcaagaaagtcgcataagatgaatatagcatattgaatatgccgcaacagccgctctgtgaggtcatcaggacaagtattccaataggataatgcaggcatctacagctctataagtaatccactattaacgaacaactacaatatacacacctatacatatatatttatatattccaagtagattagtcctagaatgcgtgtgaattttaaataagaaaatctaattttatttgcagtatgtggttatttgatcgatgatcaaccataaaatgtatgtacttaagcgtttgtactattaaaaagaacgctactaaattatgaaatagcggaaatggatccgcatattttgccaaatgagaacgaaactattttcttgggttccaatttatacaataactacgaaatatcatttacacggttgtttccaggctacacaactaagtaaatcattttagctccacgtatatataaatatatttaaaagtttttcataaataaatgatagcaaagtgctagcacaaaaatgagttttacttgattcaaaactggcgcctttcatattggagcttttaagctcttgttaacatactgttaactgtactgtttgtgtgtcgctgttattaagatgcgcaaacttccaaaaccggaaatgaccatattttccatacacataaaccattaaaatttcatt

SEQ ID NO: 12089 - DNA, 3183 bp, DROSOPHILA
atgcaggttatgaaacaagtgtatcaccgacgtccagcggtccaagtatcatatccacattgtcgacggccagtgcagcaggtggaggaggcagctccgtgggccggagctgtcgccgctggcgatagcaactccagcggtggcacctggcgactaattaagggcaaggtcacacaaaccatcgaggagatcaagtcctcaaagctgccaccaactgcagccatacctattatagtagccgatccaccatcaacaggctggagcaacgatcccgactcggacaccgagtgcctcaccgtgaacacatccattagtgaggagcttcccctggacctggaacacaaacagaactccgattcggacgtggaggccgagctgctgcagcacgatagcataagtttgggcagtggcgacgtgccaacagtggcagccactggccactcggagcgatctcgtctgcgacgtggcctggcccacattcgatccaaggtaaaggccaaacaacaagcggcaccggccatgaacaaaaaagatgtcagtcccagtggttcaacagtgccggcaacatcggtgcgaaccggttttctgcggcggcgcaatgtggtggaggcgggcagcgagccttccactagccagcaggcggagattgctatcgccagtggcaaggtgaagaaacggggcatcctgctggcccgcaaggacgtggagatcgagtccggcgtggaggtgctcgaggatatgattccttcaactgcagtgcacatcgatcactcaaaggatgtcgctaataagcgagcggaagaagtgaccgatgctggagctgatgccgattctcgagctagtctaactcttcctgtggcgccgggctttagtacgcttgccagctcatatgtggaaaaagaatcaggtgttcgggacaccaggagcaggatcagcttcttctccaacttaagcatgctcagtgtttctcagtggcgagagaagcatcagggcgccacggcatttgccttgccagtgcttctttccgtcttactgatcttactgatgattttgccagtgcccgattttctgcgaggagtcttcgccaccctcttgttcttcacggttatggactgttgtggtggtcatttgagagctttgctcgaggacttcatgctgaccacgcatccggaacgagtggccttcgccattcccaattacaaattcatgccgatttgcgagattcctgccgttgaggagcacaagacgatcaaaacatatgcgggatggatgaatgagattaacagctatgaccccaacacgttctcctttagcctcacaagagcggtttatgtgcgtttggatggcagtatcctaaagatgtcgggtacaaatgcccgcatacccaagcgacgcatgtggaacgagccgccaatcgatcgtcacaagatcccgtttacggatcatcgttcatatgatctcagagactgccggatagaactactgcctttgggtctcgccaataagcgtttctttaatcgcaaatatcccatacaactgatcatcaagagtaacagggatgtgcccgatgagcaaagctccgttgaaagccagtcagaggcaacggttaagacggatgccaaagaagctaaagctgcttcatcatcgggaactacaccacccggaggagaggaggagaagttagtggactttgcgggcacggttatgcaggcagatttacagcaactgcggaacacggttaatccggataaggagctcaacgacattaccgtgccctgtggcgatgaggtgcgtttactgctcttctcgagatgtgatcgggaaaaagaagactggtatcgacgcttcacaaacgccagtaggggcttagttcacgaacaggaccttcaggtgccaatggcccgattcgtggaggattctgatcttcaggcggcggcagctagacaggctttgcttctggtcactggaatgggaaaggctggcgtcaagtctgaagatgaaatttcggctgggaaaggtaatgatgaaacagatcagcagacgccagatgggcagtttgagactatcaccgaagaggatttactcgacacacccaaggaggagtccttcgatggcatgatcatgagtgccaatgtggccaggaattcgccagactacgttcgattcatggccgtttaccagtctcgccgtgccaaacgtcaggaagatgagctgtggaagggcattgatcagtcgctgttcttgggtccttccggcagcattgtgtgggctaatgtactactgggacgatgcctatacagctggctacacgatgccatgctgcacgagaagctcaaggaggttttgcaaaagaaattaaactctattaagctgcccagcttcatggaggaggttatcatcacaaacatatatttgggtgagtccccattactatgtcatcgtgtctcccaaccgatgctggatgaacgcggtgtttggattgatgccgatgtgacctacgagggattggcacacataacagttactaccaagctgaatctgctgcgcatacgcagcaagacaaagtcaccaatggccaccgataatgtgcccaccacctcgatgctgccggagcaatcacaggatttgcgcagcctttcagaggtaaattcggagaacgtcatctatgacagtgatgcggagagctcgggcggttcatcaactgaatccgagagcccaccgccgggaaatgccccagagaatgcggctggaacggaattttttcagaattcacccggtaatgcgcgtcgcatctttaagattgtcgaccgcatagccgcctctaatctatttcaatacgccaccgagctgccgtacgtgcaacgagctatggagaacatgaacgcgaatatcacactgcgcgtagatctcaagggtttggtggcccgtggcactttaaatgtgccaccgccaccatccgatcgagtgtgggttagctttcgcggaccgcctcgcctttggatatccaccaagccccaagtgggcgacaaatccgtcgattggtccattgtgaccaatgttattgagagcaaactgtgcgaggctgtaaacaagtttctggtctatccaaatatggtagacttctccataccattcctgagtaaccccaactttgatgaggatcaagggaacgcagccaactaa

SEQ ID NO: 12090 - protein, 1060 aa, DROSOPHILA
MQVMKQVYHRRPAVQVSYPHCRRPVQQVEEAAPWAGAVAAGDSNSSGGTWRLIKGKVTQTIEEIKSSKLPPTAAIPIIVADPPSTGWSNDPDSDTECLTVNTSISEELPLDLEHKQNSDSDVEAELLQHDSISLGSGDVPTVAATGHSERSRLRRGLAHIRSKVKAKQQAAPAMNKKDVSPSGSTVPATSVRTGFLRRRNVVEAGSEPSTSQQAEIAIASGKVKKRGILLARKDVEIESGVEVLEDMIPSTAVHIDHSKDVANKRAEEVTDAGADADSRASLTLPVAPGFSTLASSYVEKESGVRDTRSRISFFSNLSMLSVSQWREKHQGATAFALPVLLSVLLILLMILPVPDFLRGVFATLLFFTVMDCCGGHLRALLEDFMLTTHPERVAFAIPNYKFMPICEIPAVEEHKTIKTYAGWMNEINSYDPNTFSFSLTRAVYVRLDGSILKMSGTNARIPKRRMWNEPPIDRHKIPFTDHRSYDLRDCRIELLPLGLANKRFFNRKYPIQLIIKSNRDVPDEQSSVESQSEATVKTDAKEAKAASSSGTTPPGGEEEKLVDFAGTVMQADLQQLRNTVNPDKELNDITVPCGDEVRLLLFSRCDREKEDWYRRFTNASRGLVHEQDLQVPMARFVEDSDLQAAAARQALLLVTGMGKAGVKSEDEISAGKGNDETDQQTPDGQFETITEEDLLDTPKEESFDGMIMSANVARNSPDYVRFMAVYQSRRAKRQEDELWKGIDQSLFLGPSGSIVWANVLLGRCLYSWLHDAMLHEKLKEVLQKKLNSIKLPSFMEEVIITNIYLGESPLLCHRVSQPMLDERGVWIDADVTYEGLAHITVTTKLNLLRIRSKTKSPMATDNVPTTSMLPEQSQDLRSLSEVNSENVIYDSDAESSGGSSTESESPPPGNAPENAAGTEFFQNSPGNARRIFKIVDRIAASNLFQYATELPYVQRAMENMNANITLRVDLKGLVARGTLNVPPPPSDRVWVSFRGPPRLWISTKPQVGDKSVDWSIVTNVIESKLCEAVNKFLVYPNMVDFSIPFLSNPNFDEDQGNAAN

SEQ ID NO: 12091 - DNA, 3671 bp, DROSOPHILA
gcaagaaaaaagggtctcgttcgggtcgttgatgtcgtagacgtagatgaacttatccgctgcacacgtagccacaatgctgttgttggtcttgggcagaaattttacagagaacacattgcccagatgcttggtcctgatgacatgaacaagcttctttcggaacggatcccagatcatcacacgatagtcgtcggatccggaggccagccacataccatcagtggtccactccagacagttgacgcagccctcgtgaccgacgagcactgcctcctgctccagcctgtccacgtaggccggcgatgccagcagacgtcgccggagcatctcgtccagctcatgaccgtattgctggcgctgccaatgcaaggagctggcgttcaagggcgtgtgctggcgctgatagcgcgaactagagtactttacgcgatacagttcatcgctcgacattatctccgactgctgtggataggattatgacacttgtttccgtttgttttcgtctcgttctccgtttaattcattttgcattcgctgatttcccctgccccgcttcgccccccttccatcaacaactttgctgttgttgacacctgtgcgcggcgttgccaggccagcgcgtatcgccgtaacggtttgcgttagcttacgggatcgaacaaccaaatttcagttatggaaaaagtatttctttttttaaacacccgagaagtgaaagattaagtagagtctagcacacaactgacttaaaccgcctacgaaggcaaacgtaaattcatttataaaacctcttaaactctattatggcttaaaaaaagaacaaacaaaaaaaaacaggttttacgtatagtaaaaaaatgtaagccaattgcaagttccgctctagccgaccgtttttaagggctggaaaatggtggaaaacatttgagggattataacagttttaccatctggtaacactgccagataaactaaaaaaatcgaattgatttatttaattccacggaagacgcgacgttgactgaaaagctaagacatgtccaaagaaaaggaggacgagtgcgacaagcacaaacagcaggcgacggcggacgccaagtccacgtcgagcgaggattccgatgagtaccaatcggccggtgagggcgaggatggagacggcgatggtgacggtgattccccagcggagcgcccgcctgacaaaaccagccccacggtcgccgttgcgcccacagcaaaggcagcatcgccactgcccactgtgaagccagcatccgaggccctggactttcctatgcaccggagtgttttcgaggacgacatcaagtcgctgcagcgacgacttctattgagcacggcccaagacgaagtgggtagaaaggataagcacggcaatacgccactccatctggccgtaatgctgggcagaaagcacgctgtccgtttgcttctggcccaaaacgcccccgtaaagatcaagaacaatgagggctggtccccgctgtccgaggccattagctacggcgaccgccagacaatcacccaggtgctgcgaatgctaaagctgcagtcccgcgaacacatggagagtcggcgcgagaagctggtcaatgcgctgcgccagatgcaggacttctacatggaattcaagtgggattttcaatcatggctgccactggtttcccgcatcctgccctcggacatctgccggctttacaagtcgggcgcctccattcgtttggacaccacactggtggacttcaatgatatgcgttgggagcgaggggacatatcgttcttgtttagaggtgaggcgccggcaagggaatcgctggttctgttggacaatgagcaggaatgctttcagcggctgcgatacgaggaatcagacatggaggatgaggtggatgtgctcatgtcgaccgatatactggccacccagatgtccaccaagacgattcagttcgcacgggcgcaacgcggatggatattccgcgccaatcgcaaggagctcattgggggccaataccagtgcgaaatttacaccatccagggcttaatcctgaagcagcgtaagaggcgggaacacctgtcacacgaggatctacaaaagaaccgcgccattgtcgagactattaccaagggtgccagccagcagccggatacgcgtcgctccagtctaggcagccagcacacggccacgccgccggagaccaatacaccaacggctccgaatggcatctcactgccggagctgccgcgtcgcagctcgctgcaggccccgccgcctcccacagtcacctggcgacagtatctcgatgcggaggtcggtaagtgcccgcaactgggtcggacacccgtgcacaagcaatccaacaagacgctgcgagcaacggtagccatgagcaaggactttccacttagcgtggatatgctgctggacgttctggaagtcgtggcacccctaaaacacatcaacaagctgcgcgaattcgtcacgctgaagctaccgacgggctttcccgtgaagattgagatacccgtactgcacacggtgaccgccaaggtgacgttccaaaaattcgagttccgcgacaacatccccgccaagatgttcgaggtgccatcgcactattgggaggatgtgcgtcgctttcaggacttatgaccaggcgacggagaagccgcgccaaaggccaaagcagcaaccggcggaccgactggagcagcgactggcgttcatgtcgacttgaatcgcaatgcgtcctcgccctccattgcggagttcgattgatgaggcgtctaccgcgacacacgcctctcattctgcctgtccgcctgtcccacacatttcatgtcgcgtttagtgatcactccagcaaaagtcggaggatacagctcgaacgcgggcggcttgtttatgtatgtatgcttaagaggaaaacacccacacacaaaattgcaattttcaccatgagtgaatcccatactctcccggtccaaatccaaattggacgctctgaaaattgcaattttacatttacgttttgttatgtactgtatttgtttttagtcgccttcgcaagaagggtcattacttagtagtatttattatgcacaggctcgtcatttttaacagcccgagtgaatcacatcaacttcaaatggtgttttcagattgccaccctaattggtggggtgcggtcccaaaacagctgctccactggcgaggaatccagaagatcactttcccaaattgcctttcgtatctgccgataatcgcggcggtacgaaggtaaaactaaatgtccaatctgcagaattgcttgctgatagccacgttgacagcagcaatttgctaagtttttagtttgtaagtgattagatgttgtccaatatccgatcgtttcgcaaaacgtttatcattttatttatgtccataccccctttccgtgtttagtgcaatttcatacatagttttaaggtcaactgggaaagaagacagatgtttgttttcgaaatcgaaaaaaaaagaatccacgtaaccgcttgaagaacgttcatcaaacaattgcgttcttcttctacttaggctatgtgtactagagaatcgatcgcaaaaccatttccatttcgcctttcctcgcaatagtctcaagtatttagaa

SEQ ID NO: 12092 - DNA, 1671 bp, DROSOPHILA
attccacggaagacgcgacgttgactgaaaagctaagacatgtccaaagaaaaggaggacgagtgcgacaagcacaaacagcaggcgacggcggacgccaagtccacgtcgagcgaggattccgatgagtaccaatcggccggtgagggcgaggatggagacggcgatggtgacggtgattccccagcggagcgcccgcctgacaaaaccagccccacggtcgccgttgcgcccacagcaaaggcagcatcgccactgcccactgtgaagccagcatccgaggccctggactttcctatgcaccggagtgttttcgaggacgacatcaagtcgctgcagcgacgacttctattgagcacggcccaagacgaagtgggtagaaaggataagcacggcaatacgccactccatctggccgtaatgctgggcagaaagcacgctgtccgtttgcttctggcccaaaacgcccccgtaaagatcaagaacaatgagggctggtccccgctgtccgaggccattagctacggcgaccgccagacaatcacccaggtgctgcgaatgctaaagctgcagtcccgcgaacacatggagagtcggcgcgagaagctggtcaatgcgctgcgccagatgcaggacttctacatggaattcaagtgggattttcaatcatggctgccactggtttcccgcatcctgccctcggacatctgccggctttacaagtcgggcgcctccattcgtttggacaccacactggtggacttcaatgatatgcgttgggagcgaggggacatatcgttcttgtttagaggtgaggcgccggcaagggaatcgctggttctgttggacaatgagcaggaatgctttcagcggctgcgatacgaggaatcagacatggaggatgaggtggatgtgctcatgtcgaccgatatactggccacccagatgtccaccaagacgattcagttcgcacgggcgcaacgcggatggatattccgcgccaatcgcaaggagctcattgggggccaataccagtgcgaaatttacaccatccagggcttaatcctgaagcagcgtaagaggcgggaacacctgtcacacgaggatctacaaaagaaccgcgccattgtcgagactattaccaagggtgccagccagcagccggatacgcgtcgctccagtctaggcagccagcacacggccacgccgccggagaccaatacaccaacggctccgaatggcatctcactgccggagctgccgcgtcgcagctcgctgcaggccccgccgcctcccacagtcacctggcgacagtatctcgatgcggaggtcggtaagtgcccgcaactgggtcggacacccgtgcacaagcaatccaacaagacgctgcgagcaacggtagccatgagcaaggactttccacttagcgtggatatgctgctggacgttctggaagtcgtggcacccctaaaacacatcaacaagctgcgcgaattcgtcacgctgaagctaccgacgggctttcccgtgaagattgagatacccgtactgcacacggtgaccgccaaggtgacgttccaaaaattcgagttccgcgacaacatccccgccaagatgttcgaggtgccatcgcactattgggaggatgtgcgtcgctttcaggacttatga

SEQ ID NO: 12093 - protein, 543 aa, DROSOPHILA
MSKEKEDECDKHKQQATADAKSTSSEDSDEYQSAGEGEDGDGDGDGDSPAERPPDKTSPTVAVAPTAKAASPLPTVKPASEALDFPMHRSVFEDDIKSLQRRLLLSTAQDEVGRKDKHGNTPLHLAVMLGRKHAVRLLLAQNAPVKIKNNEGWSPLSEAISYGDRQTITQVLRMLKLQSREHMESRREKLVNALRQMQDFYMEFKWDFQSWLPLVSRILPSDICRLYKSGASIRLDTTLVDFNDMRWERGDISFLFRGEAPARESLVLLDNEQECFQRLRYEESDMEDEVDVLMSTDILATQMSTKTIQFARAQRGWIFRANRKELIGGQYQCEIYTIQGLILKQRKRREHLSHEDLQKNRAIVETITKGASQQPDTRRSSLGSQHTATPPETNTPTAPNGISLPELPRRSSLQAPPPPTVTWRQYLDAEVGKCPQLGRTPVHKQSNKTLRATVAMSKDFPLSVDMLLDVLEVVAPLKHINKLREFVTLKLPTGFPVKIEIPVLHTVTAKVTFQKFEFRDNIPAKMFEVPSHYWEDVRRFQDL

SEQ ID NO: 12094 - DNA, 4989 bp, DROSOPHILA
aaaataaaatatttcatatattcataatctctttgatttctttgtattcgtgttgtttgcttgagattaccacccttgacatatccatttagttcgtttccttcagatttgataagcgtatatcgctttaattttgttaattttgatatctcattcctgtaaaaaaatctaaatgctgcaatttatatggtaaatgcggcaaaagtgccgtattttctcgtatgaagagctcaacagcttttatgttaaattttttttcaagtaaccttaaggttttcaaaacgttaactttataatataattaattactttaacttcttaattatttcaaggaggtagaattgttaaagaaatgcttttaatcagcagattacagtaatagtttttgcatgctgaggtcatcatattctaaattttttgtatatatgttttttggcattaaccttaacttaccaaaatatgtttttatattttcattttgtactttcagtgctttcagtttgtaattttagatatttatctaattgaattgttatggtacgtgtaagctcaatcatggtaaaaattctcgataatatattttcgcgacactatcttaaaaatttgattgactgatgtccttgaattttcataacgcattcggtatattgcattttcgtttagtttttatcctgagttttgttgatcaggtatacttggcactttgataatcgcttggcgattaattgttctatgtatttgttgtaatcgtttcgtaaatacttaaaactctgttatttcattcatttgtctctcatttttcttgacttgtatgcttgcagtgcagcttcggttcgtgaatatattcagtcttacgtttttttttcacatttttcactcattattcgtcttttgattgattgttttgcttaataatttgcagttttactgattgatttcttttaaacaaaatattttaaataataatatgtacgcttaaataagtttaatgcattaaacacatttttgaacattattttattgactttgattatggttatggtttttgcatctttttctaatatactttgtgtatttcgttacttgttttttttttcagcttaaatttaaggagttacattattacgaacttttttttttgcttaaattgtcactataagaggtttttgtaaaacaaaaaagtaataagtcacgcttttgtcacgtttttgtcattcataaagaaaaaaacacaatcttgcaaaatcataaacgctttcagatgcatgtgggatagaaaataattgtgtcgagagtggattgcggttttcagcttaaaaactaaaatatacattgcattcatttgtatacaattttacatgattcacaaaatgtttaaatttagttcattcaaaagatcatgttacgtactctcatttttccgtcatataaaaaatatgattgtagcatactttggtcacagttgacttgtaattgtaaatggaactaaggaggagcacatttaattttcttaggctggagctcagtgcagtctagctccgtttgtctatttagagaacattaaacaacaggcaaggcggattatttcaatatatctgttcagtactcatggggagacgaaacggaaacaaagggggatgttaatttggggtgggggtttatgtagaaagacgtcgaaacactagtttgcttaaatgctaagaaaaagagaactttatacttaaaactaaaattgtatgctttgagtgaccgcgtatgtgtgtgtttgcgtgttatgtatagcaagttaattgttgcattaaacatatattcccttccatgttactctgccctagtcccttcttatttggttttttggcctatcgaagcacgcgcagcgttctgttctctagtgtgccgtcaggggtgggagtgggaagtggttgtttagtagtaggcggctgcatttgaatagttctgcgagtacgcctgcgaatctgaaagaagacaccgatgacggatgatgcaactggagggaactgaaataacctaccataacccgcgtaggcacgctcatcgtagccagtgctttgcgctccgtgctggctgtagtccgcttgtccggtagcattgtagtccactgcagtcgagccatactgttggctgtagtcctggctgtacgactgataccgtgtatcctgcggtgcggcatagcccgtcgagctgtttggaagcacaaagcaatacattagcacttgcgtggcccaattgaaggcaagaaacgtagagagagagacgtcaagattaggtaacccacttgtagttctgatactggctctgatcgtattcggtgctgtggtgggctccgtagctgctgctcgccggagcacttgtctgcgatgtgtgagccgcatagctgctgctaccgctctggccatagccattgtatccctgctgggtggtctgggtgctgtaaccgctctgcgcgtaggggtccacttgttgggtctgctcgtgtgtctgatagctgtgatggctgataaagaacagcgtcaaaaaatgtaccaattatttttgcagatttagaaagtgtgcactatattgatttgattatataatatttgaaaattcgatgccttacctttgttgtggcgcatggtgacttggcggcgagccataagaggactgcgaagacatgccgccgcctcctccaccacccatatgctgctgtgttgaatggtacttgggcgtcatgggccgttggccatatggaccgccctcgtagcgaccgcgtttgggaccaggaccaccgggagcgccgcgtttgagagctggtaccggtgcaagttgtgtattgggattatgtgcctgatggtgatgcaagggtggccgactcataccttgattgtagccgcccctgccccgaggacctccgcgcctgggcatcgaaccgtgctcgctgcccggaccgccgcccatggaattgccgtggtggctgtgggagccaccgtacatgctgccgcctccactgccgttcatgtgcgaattgtagccgccgccaccacgtccacgtccactgaagggaccaccacgtccacgtccacggcccagatatggaggaggtcctcctccgttgctgcccccaggagcggaactgccgccatgcgagttgcccgaagacgggacgaccgctgatgtctggccatcggtgacctcatcaccggctgcttcaaccgctggctgttctccactgatcgccgaggtgggcactggtgatacggtcttgttgttctcggcacctgtgtgttgtttgggagctaaattggattggattggatttacaaggtatggcaggaagtcgagggttgtctgcggaaacttacgctgcgagtacaaaggtgggcgaccgccccgcatgcccatgggagcgccaccacgcggctgataaccgccgccgcgtccctgatagcccattccaccacgggatccacgcattcccctcggaggacccgacatcatgccctgcatgggcggtcctccgcccattccgctgccgccgcctccgcgcatgccacccataaagtgtccacgaccgccacgaccacgtccgcgatcgaagccaccgcgcataggcgctccaccgccccgtccacggaaaccgcctccacgtggaccgcccatcgatggcgaggacactgagcctccttccatgctcctctctcgctgttctcgtacactagatcacacgcactaccacttgcactggtattcttcgcactcggacgcggattttaagactgctgaagccggaggaagaagaagaagcagcgttaggatgccgcagattgacgattcgaggaactattgctagcgactaatcgtttctattgatgcttactggtcacttggtcactcggcgcactttcaacagtagcttatcttaaataacttatttaacttaacattattcggtgtgcgaagcgcgttggtcttcattcagtgaaaaaatatggcggcgactattgatttttgttgcagcgctgcccactcgtcgctcttttgcgccagtgttgtcatccttcagcgacaatatagctatgaaaacttgttattataattttccaagagttaatatacaaaacaggttaatacgtaatgaattaatttatagttcaaacaaatagagtctagtccataaacatgcattaaagatatattcaaactccggagggaatgagtttaagcaaattttagttggaatggtgatcgctagtagttagtttagaattgatggaaacacttaagatgattattgcttaatgatttaagaaactgctccactctcattcaaaaaagcaaattaaaacattgagcagtcccagcacaagtaactaatctgtaggtaatttgcaattcacggaccacggccacacttggcactgggaaaaatggaaaacacaagataaaacgtgaaccctttggtcgaaattcggtggtcacaatctggtatctggtgaaaagggacgacaggcgagtgcgacaggatgccgggcaaggtgggggtgaagattaaggcggcgcgcaacctgcccgtgatggacaaaagcagcgaaaccacggacgccttcgtggagatcaaactggcctcggtgacccacaagacggatgtcttccgcaagagtttgaatcccacctggaataccgattggtgaggtctgaccattcaatagctccatatattgtaacatttgctttctgataggttccgttttgaggtggacgacgctgagctccaggatgagcccctgcaaatccgcctgatggactacgacacgtactctgcgaacgatgcgattggaaaggtcaacatcagtttgaatcctctgtgcctggagagctctagtcaagcggtgcacggcaagggtaccgtgttatccggctggattcctgttttcgacactatgcacggtattcgcggcgagatcaatgtgattgtgaaggttgacctgt

SEQ ID NO: 12095 - DNA, 2668 bp, DROSOPHILA
tattttttcactgaatgaagaccaacgcgcttcgcacaccgaataatgttaagttaaataagttatttaagataagctactgttgaaagtgcgccgagtgaccaagtgaccagtaagcatcaatagaaacgattagtcgctagcaatagttcctcgaatcgtcaatctgcggcatcctaacgctgcttcttcttcttcctccggcttcagcagtcttaaaatccgcgtccgagtgcgaagaataccagtgcaagtggtagtgcgtgtgatctagtgtacgagaacagcgagagaggagcatggaaggaggctcagtgtcctcgccatcgatgggcggtccacgtggaggcggtttccgtggacggggcggtggagcgcctatgcgcggtggcttcgatcgcggacgtggtcgtggcggtcgtggacactttatgggtggcatgcgcggaggcggcggcagcggaatgggcggaggaccgcccatgcagggcatgatgtcgggtcctccgaggggaatgcgtggatcccgtggtggaatgggctatcagggacgcggcggcggttatcagccgcgtggtggcgctcccatgggcatgcggggcggtcgcccacctttgtactcgcagcctcccaaacaacacacaggtgccgagaacaacaagaccgtatcaccagtgcccacctcggcgatcagtggagaacagccagcggttgaagcagccggtgatgaggtcaccgatggccagacatcagcggtcgtcccgtcttcgggcaactcgcatggcggcagttccgctcctgggggcagcaacggaggaggacctcctccatatctgggccgtggacgtggacgtggtggtcccttcagtggacgtggacgtggtggcggcggctacaattcgcacatgaacggcagtggaggcggcagcatgtacggtggctcccacagccaccacggcaattccatgggcggcggtccgggcagcgagcacggttcgatgcccaggcgcggaggtcctcggggcaggggcggctacaatcaaggtatgagtcggccacccttgcatcaccatcaggcacataatcccaatacacaacttgcaccggtaccagctctcaaacgcggcgctcccggtggtcctggtcccaaacgcggtcgctacgagggcggtccatatggccaacggcccatgacgcccaagtaccattcaacacagcagcatatgggtggtggaggaggcggcggcatgtcttcgcagtcctcttatggctcgccgccaagtcaccatgcgccacaacaaagccatcacagctatcagacacacgagcagacccaacaagtggacccctacgcgcagagcggttacagcacccagaccacccagcagggatacaatggctatggccagagcggtagcagcagctatgcggctcacacatcgcagacaagtgctccggcgagcagcagctacggagcccaccacagcaccgaatacgatcagagccagtatcagaactacaactcgacgggctatgccgcaccgcaggatacacggtatcagtcgtacagccaggactacagccaacagtatggctcgactgcagtggactacaatgctaccggacaagcggactacagccagcacggagcgcaaagcactggctacgatgagcgtgcctacgcgggttatgattcgcaggcgtactcgcagaactattcaaatgcagccgcctactactaaacaaccacttcccactcccacccctgacggcacactagagaacagaacgctgcgcgtgcttcgataggccaaaaaaccaaataagaagggactagggcagagtaacatggaagggaatatatgtttaatgcaacaattaacttgctatacataacacgcaaacacacacatacgcggtcactcaaagcatacaattttagttttaagtataaagttctctttttcttagcatttaagcaaactagtgtttcgacgtctttctacataaacccccaccccaaattaacatccccctttgtttccgtttcgtctccccatgagtactgaacagatatattgaaataatccgccttgcctgttgtttaatgttctctaaatagacaaacggagctagactgcactgagctccagcctaagaaaattaaatgtgctcctccttagttccatttacaattacaagtcaactgtgaccaaagtatgctacaatcatattttttatatgacggaaaaatgagagtacgtaacatgatcttttgaatgaactaaatttaaacattttgtgaatcatgtaaaattgtatacaaatgaatgcaatgtatattttagtttttaagctgaaaaccgcaatccactctcgacacaattattttctatcccacatgcatctgaaagcgtttatgattttgcaagattgtgtttttttctttatgaatgacaaaaacgtgacaaaagcgtgacttattacttttttgttttacaaaaacctcttatagtgacaatttaagcaaaaaaaaaagttcgtaataatgtaactccttaaatttaagctgaaaaaaaaaacaagtaacgaaatacacaaagtatattagaaaaagatgcaaaaaccataaccataatcaaagtcaataaaataatgttcaaaaatg

SEQ ID NO: 12096 - protein, 480 aa, DROSOPHILA
MEGGSVSSPSMGGPRGGGFRGRGGGAPMRGGFDRGRGRGGRGHFMGGMRGGGGSGMGGGPPMQGMMSGPPRGMRGSRGGMGYQGRGGGYQPRGGAPMGMRGGRPPLYSQPPKQHTGAENNKTVSPVPTSAISGEQPAVEAAGDEVTDGQTSAVVPSSGNSHGGSSAPGGSNGGGPPPYLGRGRGRGGPFSGRGRGGGGYNSHMNGSGGGSMYGGSHSHHGNSMGGGPGSEHGSMPRRGGPRGRGGYNQGMSRPPLHHHQAHNPNTQLAPVPALKRGAPGGPGPKRGRYEGGPYGQRPMTPKYHSTQQHMGGGGGGGMSSQSSYGSPPSHHAPQQSHHSYQTHEQTQQVDPYAQSGYSTQTTQQGYNGYGQSGSSSYAAHTSQTSAPASSSYGAHHSTEYDQSQYQNYNSTGYAAPQDTRYQSYSQDYSQQYGSTAVDYNATGQADYSQHGAQSTGYDERAYAGYDSQAYSQNYSNAAAYY

SEQ ID NO: 12097 - DNA, 4803 bp, DROSOPHILA
ctcttaggcgcacgatcatccactcgttgttcgccagaaaactggtcagattcagcatgaaggatatcaccttcgggtggatctttttgaagtcctcggtcaccgccgtgatgcacctgtccacccattccaccacgaatggggcctgcagcacaaaggcattctctgcggacagatgggattcatttgaggatttaagggcagattgcggggccactccgattggtaaactcacccttggcctgcaagtgcgtgaggagcttctcaaagtaaacattgttcgtagtggaaaagttctcgcgtaaaaatatgtcgaatatcgttcgcaggcgcgacagcgtctcttcttgcttttgcatcttgctgtttccacactgactgcttaaatggcgactgccccttatggcatagttttggagcttgcaattgatccaccgaataatgaaatcgttgattgcgggttctggttcttatcacaccgaaagacacttgttttgtattgagtggccgtgtacgtttgcagtcgaaatccaaagcgcattcgccagggttgccaggtgagcggtcaaagtcacgcatcgaaacatataacggtgcatagtttcccttttattctttgctaataagtaataccattactaccattaattaaaattacctaattatactacttaatattgcagaaagaagaactctgtacaaaacattttcgttatgtttatacctcaaagattacggtctttattaaatattttttaattacataccttttttccatatttctaaaagcttttgcatagaaaaatgtcttgaattacgagttttcatttttaatcatttatatctcttgatcgactcgtcggaactatactaggttcactcttctccacaagtaatgggtatcaatatggttcggtttcgcaccagtcacttgatcacgatacgctctcatcactaccaagaagtgtcgtgcggtgaaagccgtaaatagttgccatggtcacactgtttttgatgcaaaataatataatgacgctgacatagaatcggctctagggaacgtatgatggataacaatgtagagcaattagcaggaaagagccaaactgaaacagccgagtccacagcagcagcaacaggaacagcaggagcaggtgtagcagtagtaaccgtggcaagtggagccggaccaacgcccggcgcaaactcctcgaccttttggaaaaacagcggacgtcgagtgcccggacgacccagtcccaagcgggagctcgagaaggcggcggcagttggggtagcggtcggtcgcggcgctgcccccggatctggcatggtgtccaccttcaccgagtaccagaagtcggtgagcgatgcctgggacatgggtgacgacgagttctgcatcatcagcagcacggaggcggctgccgcggccgttggagctggcggtgggttccgcaaccccgatggttttcctcaacctctgatctcgttttgatcccccaacagatgcggctcatttctcccggcaagtgtcgcagacggtggctctcaacgtgatcgagacgcactctcgaagcaaccagaaccataatgcatcccggtcagcaaacgaaagtggcgcagatttggtcccagtcagcagtagctcgacggacgactgcaaggaagaccgtagatctctgccggacagtaatgaaaacaggtgagcggcgccaactcaactgggaagtcaaaaagaaagttgaacccaatgcctgcagttgtgcaaataagtcaggggtgtagagcggatcgaacccgctttctgaattatttcctaggtgctatttaaaaagcattaacgtgtttattatcaaagtagaaactaaagatatgaagaattccgtcatatgggagttgaaatacttacaatagattcaaattttgaaacggtactttacaatatacaatatacaatattactatgtaattaggttaaaattacctatatatgttgttaatcattggggcgctcctaacttattattgccattcgccacgttttaacgagtattaacaccaacttggcaaccgctcctgaagcatttcactttcttaactgatagccactcccagctattcccacagagcaatgtcgggagacgcggaactaagaccgaaagtaatcaagacttcaacggttagtaatatatattgccatttcagatctagattgaggaactacccgggcagaccgcaattgcagaagatcagctcgaattgccaggacagcgagtacgagacgaaaattgaaaaattccaagtggtgctagactcgcctcaactggacttggtggccctcaagaagatcagctggtctggcgtgcctcggaaggtgagaatcgaacaaatatttcgttgtgtaattctaattaaaccgaactccagatgcgcgctgtcagctggcgactcctttcgaagtatcttccgccttcaagtgagcgaaggatggcggtgctagagagcaagcggcagggctaccaggacctcaggcacaactacttccgggtggatagccaggatgagacgcaacaggacacataccgccagatccacatcgatgtgccacgaatgaacccccagattccgctcttccagcagcagcttgtccaggagatgttcgagcgcatactctttatctgggccattcgccatcctgcctccggctacgtgcaaggcatcaacgacctggtcacgcccttctttatcgtctttctacaggaggccttgacgccgaatacggatctcgaaaagtacgacatgtccacgctgcccgaggagactcgaaacattatcgaggcggactcgttttggtgcttatctaagtttctcgactgcattcaggataactacatctttgcccagctgggcatacaggagaaggttaaccaactcaaggatctgatacagcgcattgacggtgagtgggaatgctttacctttgcccgtagatagacgccacatcaagattaccttacaataaaagtgatcaaatatagatagagatatgttaatgctcttgtgataagataaattggaaggcaagcaccatgcccaatgcctaagcaaagaaaagcctcatcaaagtcaagccattttgatgtgccctgtcaaagataccaaggatgctttaaattttacatatttacacacgtttttccagaagccatatggtgtaagatagctcttggtcaataggctatgacacgtataaacatttttaagatcgcaaatgttcggaacaaataaaaataattactagataagccaattggacatgcaacctacaattgccgagtgatgataataaattgtaatttgtgctttcagtgaacttacatcgtcatctacaggcacatggcgtcgactacttgcaattctcatttcgctggatgaacaatctgctgacacgcgagctgccgctgcactgcaccatccgattgtgggacacatatctcgcagagtctgacggctttgccctgttccacttgtacgtgtgcgcggcattccttctgcactggaaggagcagctgatgcaacaaaacgatttccaggtgagtctccagacgaaaagatcttcccttcctgcaacgtctactaatcattgccatcttgctatgtgatagggcctcatgttgctgctacaaaatctgccaacacacaactggtccgatcgacaaatcaacgttctgctggccgaggcattccgcctgaagttcacgtatgcggatgcgcccaagcatttggagacgaagagttgacaaaagcaacacaaacaacgcatatacgtaacttagaagttagtttattacgatttgcggaatatacctacacaatacacgtacgctacatacatctaataattatatacaatttgttatttagacgttcctctccgtttgttttcattctatgtcgttttcgttttgtatttatcaacaatccgtacgtaggcaaccgctaaagttctgcgctttttgtacataagaatcaaaaattcaaaatacaattttacacgttcaacgggtcgagctgtttcaattgaaatttgtcttttataaaaacaaatcgaatcaaatgtaatgagaactaaatactttttccatgtgaaaattcaaattagcctaaacaataaagatgaaaagctatagtttatgattacacgaattcaacaaggacttaaagcgactaactacaagcctgatatttctaattctgtctatcggcaatgtgcttaagctgcttgagcaccgtctccaaaagcttcttcttgtcattctttcgcaccaacgagaaaattggctttttgtccgcctcgcggatcttttccagtatcacaataatggactgcggttgcaccagatggtagcggttctcttgcttgccatagtcatggaaatacgtgctccattcctctagaatgagcaggtccaacagctgacggttacgtaggaagtacttgctcagctctccttcctttagaccaggcacaggttccgaggccgcaaaaaactcgcactgcatcagatccaagttgatttgtgtgagtgctcccgtggaaatctgcttcacatcctcgtcatacatgatcgagtaaatcttctctgcaatgtgctcgaaggtgcgtcggcaggccgcctgggcgatgtggggcagcttgaaggcaaagctgtcaaaggtgctcttaaggtaggaaatcatgtccgtaatgaaggcggaggctattcccggcggctctactagtaaccagtcataggcgct

SEQ ID NO: 12098 - DNA, 1704 bp, DROSOPHILA
tcacactgtttttgatgcaaaataatataatgacgctgacatagaatcggctctagggaacgtatgatggataacaatgtagagcaattagcaggaaagagccaaactgaaacagccgagtccacagcagcagcaacaggaacagcaggagcaggtgtagcagtagtaaccgtggcaagtggagccggaccaacgcccggcgcaaactcctcgaccttttggaaaaacagcggacgtcgagtgcccggacgacccagtcccaagcgggagctcgagaaggcggcggcagttggggtagcggtcggtcgcggcgctgcccccggatctggcatggtgtccaccttcaccgagtaccagaagtcggtgagcgatgcctgggacatgggtgacgacgagttctgcatcatcagcagcacggaggcggctgccgcggccgttggagctggcgatgcggctcatttctcccggcaagtgtcgcagacggtggctctcaacgtgatcgagacgcactctcgaagcaaccagaaccataatgcatcccggtcagcaaacgaaagtggcgcagatttggtcccagtcagcagtagctcgacggacgactgcaaggaagaccgtagatctctgccggacagtaatgaaaacagatctagattgaggaactacccgggcagaccgcaattgcagaagatcagctcgaattgccaggacagcgagtacgagacgaaaattgaaaaattccaagtggtgctagactcgcctcaactggacttggtggccctcaagaagatcagctggtctggcgtgcctcggaagatgcgcgctgtcagctggcgactcctttcgaagtatcttccgccttcaagtgagcgaaggatggcggtgctagagagcaagcggcagggctaccaggacctcaggcacaactacttccgggtggatagccaggatgagacgcaacaggacacataccgccagatccacatcgatgtgccacgaatgaacccccagattccgctcttccagcagcagcttgtccaggagatgttcgagcgcatactctttatctgggccattcgccatcctgcctccggctacgtgcaaggcatcaacgacctggtcacgcccttctttatcgtctttctacaggaggccttgacgccgaatacggatctcgaaaagtacgacatgtccacgctgcccgaggagactcgaaacattatcgaggcggactcgttttggtgcttatctaagtttctcgactgcattcaggataactacatctttgcccagctgggcatacaggagaaggttaaccaactcaaggatctgatacagcgcattgacgtgaacttacatcgtcatctacaggcacatggcgtcgactacttgcaattctcatttcgctggatgaacaatctgctgacacgcgagctgccgctgcactgcaccatccgattgtgggacacatatctcgcagagtctgacggctttgccctgttccacttgtacgtgtgcgcggcattccttctgcactggaaggagcagctgatgcaacaaaacgatttccagggcctcatgttgctgctacaaaatctgccaacacacaactggtccgatcgacaaatcaacgttctgctggccgaggcattccgcctgaagttcacgtatgcggatgcgcccaagcatttggagacgaagagttga

SEQ ID NO: 12099 - protein, 545 aa, DROSOPHILA
MDNNVEQLAGKSQTETAESTAAATGTAGAGVAVVTVASGAGPTPGANSSTFWKNSGRRVPGRPSPKRELEKAAAVGVAVGRGAAPGSGMVSTFTEYQKSVSDAWDMGDDEFCIISSTEAAAAAVGAGDAAHFSRQVSQTVALNVIETHSRSNQNHNASRSANESGADLVPVSSSSTDDCKEDRRSLPDSNENRSRLRNYPGRPQLQKISSNCQDSEYETKIEKFQVVLDSPQLDLVALKKISWSGVPRKMRAVSWRLLSKYLPPSSERRMAVLESKRQGYQDLRHNYFRVDSQDETQQDTYRQIHIDVPRMNPQIPLFQQQLVQEMFERILFIWAIRHPASGYVQGINDLVTPFFIVFLQEALTPNTDLEKYDMSTLPEETRNIIEADSFWCLSKFLDCIQDNYIFAQLGIQEKVNQLKDLIQRIDVNLHRHLQAHGVDYLQFSFRWMNNLLTRELPLHCTIRLWDTYLAESDGFALFHLYVCAAFLLHWKEQLMQQNDFQGLMLLLQNLPTHNWSDRQINVLLAEAFRLKFTYADAPKHLETKS

SEQ ID NO: 12100 - DNA, 11157 bp, DROSOPHILA
aaaatatgagcacgctgcgtagcgagctgttaaataatttacggttcgtcgaagatttacgacccactggatgtatcaaactgcaatgattccggaatatttgattattcgagaactttggtagagcggacagaagagcacagcactttttatttatatttatagtattcttttttttttagtcgttgagttattgttgatgctggtaagtaaacgggtagtacgcagcactgttttgattgagcgcgcgcaaaaaattatacacaaaatcacgcacacagcgaaatccggatagagacgcaccgatggcttaaaactgggacccaagaagagagcgtagggtgtgttttggatgcctctgctcccaggcaccaaacactgcgttaaatgctgcgctcgtcactcgactcaactcgactcgaatcgtggcttaaatctcactcgtcactcactcggctgccaatcggaatgtgcgaccgtctgcttggaagcgtgctttcgaactgaagtcgttttttgcttctgagctgctcgttgctgccacagcaaccccaccaatacgtgcgcgggaagcaggttgctccagctgaaagctcggctccccagcaaacatccaacatcaaaagtctaactgggagctttacagtgctgccagataggtggatatagttggtggatatagaattttacacgactaacaaaatagaaacttaaaagaataacgggtataaaacaagtggtttgcatattttatacatgaaatataatattttaaatatatcttaataaaaagtatttatattttataatgctgtttacctaatattgtataccttagaaagaatttatctggaactgaacgaaccaagccatgagcctttgctcattcgaaacactgaaaagccgttgcacttgctttccattcaaatttcgaggcgattttgaaaatgactattcccgtgacccatttcctagtcgagttggtcagataatgagttacatggacgactgtttcgcaggtgctccgcaggagtttctcatctgcatcacggtgcacaaggctgcccaagtgggagtgaccaccggcgagctgtacgtgcggattagcttggacaaaatgacgaagagcaccaaatcctttcctaatacagaaaatcccttcttcaatgaggtgtgtgttttgatgggaattgtgcatataaaactaaatttttttaatgatattccatttacgccttctcagtacttcgtttttgagttccattgtacgttaaccgaactcctgcgcttaacgatcctttttgagctaaagaaacacatgacgtataagaaaaatgtggtagtgggtgaactactggttgatctacatagtgtgtggaaccagtccaatcatggctacttcaagaagtggggtcgcctggaagctcctattggagaaaaccagaccctagagaatgccgttgcaccgcacggctatttgcaactggatctggccatcgtatcccagcacagtccggtgtcttatgccctcggatctgaggagcaggacacacaaaatctgaacaagtggacggttgatcatgattttgatgacatcgaaaagtgagtattaaagtattaaagtattcttcgatgtatctctagaaccgaacatccctaggaatctactgaccaacgtgaacatcttcgccccaagtaatattcgatacttcgtcgccttttaccggggttacttcatcaagcagagcaactacatgattcaagtatcgtttgccggcttcaatgtacttggctctcggcattgacttatatgtttccgtttctaaagtacagattccatcctttcaagggcaaaacgccggtggtcaagaacacgacgacgcccgtgtggaactacgagatcaactttgcctggatgtatccgtcggtggcccagcgattcctcatcctaatttttgcccatgaacatctgcaatggaaatgcgtggctgagtttgaattgtgtcttgaggagatcgcgtttaatggtgagtcatgtgtggcacgaaaggcagattttgtgtaacaactaaataggaactccttctctgggacccacctacttgcatctctacgatcctgtcaatcctatgatctatgttggtcgtcttctaatggaacttcggtctgaaatgctaacggattcccagcccacacacacgctgtcctccaagacggtgccaggtttggatgagacccgtttctggcatgacgatgtctatctgattgagtttcttccactaatgggtcaccacatcctgacctcgggtacggcatacaagatctcggcgagattagccgaacacacctcgaacgtgctggagggtcaactaaggacacctttagatcgattcaagtcggcaatgaactcaaagaatttccggcgggaggcaccttttcagtcctgcatgtttcgtgtccgtttgccggacaatcgagccaagtacgaaagtgatttcttcatgctggatatagtcaattatatggtacgtctattgcggttttccaccttctattttaatccataataaatggcagcgttcagaactggacaccttcaagctctttcaacgcaaatatccactccaggatgatgagcaggccaaatgcctgaaggtcattgtgaacaatattttgaccagaatcaaggagggtctagatgcccaccgtttcgaccacgacgtgcaaccacagcgcaccacctgggatatcaatcggcagctgtacctcctggactatttcgccaagttgccactggaacttcaaaatcttaaacagaaactacgcagctgctttctggaacacctagacacttccattggcgatgtggttaatgagctacagcgtttggtagctgaaatcggatccctttccagtatggcacgcacccaggacgagtggccagaattggtgctttccttaagtgcaagcggtaaagatgtgggtgtttgccgattgaacgccaaactctttttgaatctacgaaatcaggatgcggatcaggatcaggagaccctttgttggcgtctaaagagcttttccttcaagtccgcgggctgttcgcacacctgccccaattgtggttgcaccacggccatagtatcaggatgtttatccattgttgtggaacgggagcgaaaacgatttcttgcggttgtcaataaagagtgggccaacattgagcccatgttgtggcagctgaatcctgaacagacacacttcctctgtcacgtttacatacaccaagccaaagttcgtcctggtggtgaaaaaaagaacatatgtgactcacatctgagagtcctgtttgccgaccaggcatgtgaaacgtatacgtctcccggtaccctatcgccaatttggaatgctgtgatcacatttaactgggtgtcactaccaggaggcattggtctctatctaaagaaccctcctctactttccttggaattctataattcggaacgcagtctaccagaagaccttgtgggcatgggaagcgtggccatgagtgttattagcgaggatcgggcaagtgattccaattgggaggatgcaggagtattcggttgctcaaagaatccgttgcgaaaactacagagattgaagtacctgacaccacctcctctcaaatgggtgccaattgctagaaaaggaactctacaagcagaggttttgatgtcagccgagatcattcaaatctccatggaatctctgaccactggtcagaatgataaaaaggaaccacaacttgcaacgggcattccaatggccatcaggccaactatgcagaattttgtgtaagcttggtaaatatttttcgaaacttggtttaatctattgcccattacagcttagaggttttcttcgtgggtctacgcaattactccaagagcagcatgagttctgctggtaagcggaaaatcaatttaatgatgggtgatctggtcctgtccagtggaccctccacagcacgcatccggaacagcataaactttttggtggcctacgcatctggagtggttgtaagttcatatcgtagaaaagtaaggtcccacctatatagtaccccgatcagagtttgccagatcaacaggattactggccggcgatcatagccaccgatgtccttctctccggatttagcagcgagtccattctgggtgcagctctcatacccaattcatcaaatttcctgcaacgcgacaggaccctcaagtgtgtgttcaaaaaggaacaagaggcagcagaagcttccaccacggttagtgtggatgaagatgatgaggatgaggaagaggaactggagtgggaagaggaggagaccaaaccctccaggattagcagctggtggatgcgactgctcttcgcgttcggtctgcgtccagccccctatgccaatcgacacgctttaaggttccacgatgatttggatgaccacgaattggtcgaggagcgagagttcacctggtggactaagttctacaactcgatgtattggagtgcggccgaaatgtgccacgaacacaagcaccgcctggttatctactacgaagagctggagaagcaggcccagtttggatacctccaggattgggcggttcccgttcagttggttcatggcgtgaagtttaaaaagcatggtccacccaaagaagatatctatgccaccttaaagctgcaactcaagttgaccccttgtcagtgcccggttcttgaggatcccggaggtggtggcgacatggttcgcaacatgtcaaatcccatacatcctcgacatcagtccacactacagtcgctgggtgagaccgtaaaactattggtacgtgtttatgtagtccagggggttcagatgcgtcctcgagatgtgaaaggtgactccgattgctatgtgaagctgttcctgggcggcaagacgttctccgatagagcccatttctcacccaaccacagtaatccagttttcggtcgtctatttgaaatggaggctacgctgccaggagatcatatgctgcaagtcatggtatatgatcatgacaagatcaaggacgaggtgatcggtcagacaaacatcgatctggaggatcgctggcgaactaggcatcgtgccacagtgggtttggccaatgagtacacaaagagtggctataatcattggcacgacgttaagttgccctcggaaattctcatagatctgtgccagaaaagaggcattcaggccccttactattatggtaatgtaattgaggtggacggaatgctttttggggacgaaactttgatctcaaaaggtgggttactactgactcgttctaaaatcatactttcttatatcagtatataactatttagatgaggagctgcaggagagacttagtttagccgtgcttaagaatatggataagttgccatcctttggttacaaattggttcccgaacatgtggaaacccgctccctttgccgcgatgattttccaaatgtcgaacaggtaagttaggcaacgaagtgtaggtgcaaacctatcccaatgcaatgactcactcacatagttagaatatctaaaaatagcatggccaaattaaagctatacatatatggccaaaaagtgtctagacagtctctatcaatattcaactaatctgtgagaaatatgttgataaatgttgataaaacatattacgttttattttcgatataaaaaagtattatttttatttgatatatatttataataaaccaaactactaatgcaacccattgtccagggcaaactacaactgtggatagagctgttcgaggcgaacatctatgtgcccagtcccatcgatataacccctgtgccgcccgcggatttcgaggtgcgtgttgtggttaagaatctggtcgggattcaggcgggcgacaaaaacatttttggcaaactaatgagcgacgtttacgtgatagggtgagtgtgcgggtgtgcgggggggggggctgttgaaccggaggggctgcttattaccccatgggttacaagcggatctaggtaaacgatatgcaattaccgacgtttttcgctgtacttggcagatggtgcgaggatgaggacaagcgccaatcgaccgatatccattaccgctcatttgcaggagatgcggcatttaattggcgcatggtcttcggcctcaagtattcccccaacgaggacctggtaagccgtgaccttgcctaattggtcagggtaaacaatactgcggcgccttttcaccattaattattccgtgggctcccgtttctttttataatttatatattttttagatggtaatccggcgaaaggcggggctgctggaggaaatcgagttcaagaagccgcctattatctatctgcaggtgtgggacaaggatgtgttaaccaaggatgagtatctggccgcactggagctcaatctctccaacatgtacgcaccgtatccagctgcccagttatgtaagccatatcccaagaagaggaagcgcatcaatctcttcaagcgcaaggtcatcaacggctggtttccgctgcaaagtaatgcacatccatcgcaacgcagccaggccgcagttcaaaatgtgagtgttggtggaaatatccttggtttgttatccgtgacctcttgagtgattccagggcaaaatgcagctgagcatcgaagtctgcacggatgtggaggccgtcaaccggccggctggtcgtggacaggatccaccgatggccttggagccgccttagtatgtttccacttgtttttagctctggccaacttgacaatgttttctttaaattaacctacagcagaccggacagctcgttcaatccactaacgcatccttgcaaatcctttcagcacatcctctggccagtcattcgaaagtatgtcctgtggactttgctcatattgatcgttatcctgggattggtgctcttcttttccaatctgcccgccaaactcatgaccattccacttgagtgaggactactgtttttatttctttctttcctgtttgttttattgttgttgttttttattgttcgctaaattgaattttacctggcgttttgaaagtttttcaataaattagcttgttgtttctttgccctgctactccgtcacttaaaaagtaattaatttcattggctaatagccatctccagtgccgaagtggggtgaatgcgataatgactgggactgggactcaaccccactgaatggttatgacgtcggtttatataaggagttcaaaggactgcatacatataaacatttaaggctaagcaatatttaaaatgtcctatgaagtagatatgcatctttgttgcagttataaaagcattattgttaatattaaaattaaatgaatattcttagtaggaatgtttaaatggtagctgttctttggccattttaaaacatggattatacactaatacatccctatgctaccttgtacacgatttggcatagaaacatcccatctccagttatttcttgagctagaagcctttaaagcatccagaactatcccaggggttctctggtatttcaccatgtgggtgacaaaagcggcgattcgcttgtttgtggatgttcatgtgtgcatatggtatctacaatatatcggtttgattataccggagtggtaatgtgctaatggcggcagtcgcggcaaaacgagacgagagtgacgaaaggctgacattgcttatcaggaccgccccgaactggtctgaaccgttctggctgggaaacctatagggcccaaaggctgccacgttcagttggtgtccagctatcgaggctgtcggttcgcaaatcactcagcaggaaactcacaggaatattcgacccctttgaacaaattgtacatcaaaaggtgctaattaagtttcataattaaatccatcagtgtccatcagagctgtgaaagtttgagcacaatttagctatatccttaagcaccatccctttgcctttgcaggcagaggccaaagtccttgctcgcgttcttatagtgcttcctccacgtcgcagtagaggatcgagagtgaaacatatggcaagcagccttaaatgctgctaaactcagtgcgaaaatattcggaaaattcctgctgctgtcgcagttgtgcctgccccgtgtgctccgttctagtcttggccgaaatcaaaatcaaattcaagttttttaaattcaaagtcgattgaaaatgtaagtgcatcctgtcagctgctctccaagaaaataccaaacgcgctgagtggaaaaacgagctagggtttgaatagttggaatatagcaaaggtaaggcaataatctgaataatatatccaccatttttgcaagaccatgtagatagtgtactcatgacccaaagtaaccccttaaatttccctttaattaagggatttatttacccgatggcccgtcaatgtttgctctgatatttgcccaccatcaccacttagactaatcaaaaagcctctagttttgtcaactcatccaattgggtgtagaaataatcagagctttttttctcacctaaggcttagtacctctaatttcattagacggaaatcgtccaaatcatctgataagtatctcttcaatgtaattaaatgttcaatacccgcctagaaatatctgcgcactatgagaagccttgcagtttgaatcctttgctcgtcgaaagcagttcgaaaatggggctggcggaagttaagtaagtctggatttacaaaggcttggcattatgcaaatttctccagtcgagtggcgaaaataaacaaaccattaattagacagttccagttaatgggcccgcgaaagggagtcccggcttcgattccctcgggcggcagtggctataaatgtgtagaatgacaaatggccattgacttgctagccagctgtacttttatacatacagtatatatatacggctcagtgcgtgtaaattggccaagggttactgctaaattagccctagttgcagttacgcttcagttctagtccgacacagttgtatctagtgtgaatcgtcgtatcgctcgtatctcctatatctggcgatatcatgtgacacacggtttatctaaattgctttgctgtcggtttacgcgtttgcaaaccgtttaacccaatcaatatctaattagtccactgattgctgcccagcccgatgatgtttgataagttgcaaaatacaaacgaggcactaaccagcgcgtacagtcgcgaccagcggccctttatgattacagctccggccacggccacggaacgcaaccagagttccaagagcaccaggatgcccaagctctacaacggagtctacagcggtcagtgcggcgccctatcgccacctgacctcatggaggcccagccgaagctacttcccaagccaaggagcaacagcagcggcagcaccggccggaacagcaaggtatgaaacagcaaaaaagaaaaatgattcttttttgtataatagggatagcttttatttaaaatctgtgccaattcctcacctatggtgacgccaggtagatgtgctcttctcagataaaaaaacccccgatgagattcgaacttacgatctcctgtttactagacaggcgctttgcccaactaagccacggcgccacattttgaaatttatgataatattattttattaaaatcatgttaatattggttttaaagcagtttgaacctagaaaaatatattaattatattctaaattaagaagtgaagtggattaaatatactagacctattcgaatttcagttcgaactcgttcgataatattccattttataattagccagcacttataaataatttatgacttaacataacttaaccaatttgacatctttttgcagtattggatattttcaatgataatcgagcgcagtgcgggtcccaagcggattgaaatcgatggcgatgatgcggacacgccgctggaggccatcctgccagccgaaccgccggcggaggtctgcctcttgcgtgacagccccttcaggatattgcgggtgagtagatccagaatgggttccatgcaggtgcgggccggcaattctccaaagtgaagacccgaggcaattcccgcagcgagagccatgataaatgcttctcgatgtgcacctagcctcgtgttttgaatgttcgagaagcggccaaggaagcccgatagatattattcaataaaatgtcaatcgttttttttataaaaaatataaaagaacacttatgaagacttaagcaaatataagttattttaatgacttatattcaagcagttaacagatccattgaggatatttttacctagaagtgattggagcaacaagtcctttttcgcattcagcgccagagaaagaaagattgaaattgaaaccaaaattgaccggcgagttcaacaaaataacacgaagcgcatccttctccaaaaggacctgtgccacacgcacccgaagttgccgccagttggctataaaagcaagactgtttggtccgagatttcagtcattcagcgactcttcccgcgtggactcaacctttttttttcctctggatatatttactctccgtcgagcttaccaaaaatcaagttaacttggcagcaaatcagtggcacagcaatttcatttattacatttgtggcagttaactaactcaataacgacttgtgctaaagaaaaaaaagtttatacacaaaaccgtgcaacaccaaggatattttacacatttaaaattcgtatgacaagtgaacgcgaattttgaaaaattaactttaatacattccacagtacaaatataacattaaatatacaaaatattgctcaaatagtgataacaactgaacttgtttttttttttataacaataacaatatatacaaaactgcaatttatgaaacgtacgcatatcaaagctgcaagtcttctgattatcgcaatctaattgagtttcgatcggaattaaaacaccaaacgaactgcaaaacagagctgaattcataagatgagctaaaggactcagttcataagttcgcataaccaaactacaagctgtcgtaacgaaacgcta

SEQ ID NO: 12101 - DNA, 5349 bp, DROSOPHILA
atggacgactgtttcgcaggtgctccgcaggagtttctcatctgcatcacggtgcacaaggctgcccaagtgggagtgaccaccggcgagctgtacgtgcggattagcttggacaaaatgacgaagagcaccaaatcctttcctaatacagaaaatcccttcttcaatgagctaaagaaacacatgacgtataagaaaaatgtggtagtgggtgaactactggttgatctacatagtgtgtggaaccagtccaatcatggctacttcaagaagtggggtcgcctggaagctcctattggagaaaaccagaccctagagaatgccgttgcaccgcacggctatttgcaactggatctggccatcgtatcccagcacagtccggtgtcttatgccctcggatctgaggagcaggacacacaaaatctgaacaagtggacggttgatcatgattttgatgacatcgaaaagaatctactgaccaacgtgaacatcttcgccccaagtaatattcgatacttcgtcgccttttaccggggttacttcatcaagcagagcaactacatgattcaagtatcgtttgccggcttcaatggcaaaacgccggtggtcaagaacacgacgacgcccgtgtggaactacgagatcaactttgcctggatgtatccgtcggtggcccagcgattcctcatcctaatttttgcccatgaacatctgcaatggaaatgcgtggctgagtttgaattgtgtcttgaggagatcgcgtttaatggaactccttctctgggacccacctacttgcatctctacgatcctgtcaatcctatgatctatgttggtcgtcttctaatggaacttcggtctgaaatgctaacggattcccagcccacacacacgctgtcctccaagacggtgccaggtttggatgagacccgtttctggcatgacgatgtctatctgattgagtttcttccactaatgggtcaccacatcctgacctcgggtacggcatacaagatctcggcgagattagccgaacacacctcgaacgtgctggagggtcaactaaggacacctttagatcgattcaagtcggcaatgaactcaaagaatttccggcgggaggcaccttttcagtcctgcatgtttcgtgtccgtttgccggacaatcgagccaagtacgaaagtgatttcttcatgctggatatagtcaattatatgcgttcagaactggacaccttcaagctctttcaacgcaaatatccactccaggatgatgagcaggccaaatgcctgaaggtcattgtgaacaatattttgaccagaatcaaggagggtctagatgcccaccgtttcgaccacgacgtgcaaccacagcgcaccacctgggatatcaatcggcagctgtacctcctggactatttcgccaagttgccactggaacttcaaaatcttaaacagaaactacgcagctgctttctggaacacctagacacttccattggcgatgtggttaatgagctacagcgtttggtagctgaaatcggatccctttccagtatggcacgcacccaggacgagtggccagaattggtgctttccttaagtgcaagcggtaaagatgtgggtgtttgccgattgaacgccaaactctttttgaatctacgaaatcaggatgcggatcaggatcaggagaccctttgttggcgtctaaagagcttttccttcaagtccgcgggctgttcgcacacctgccccaattgtggttgcaccacggccatagtatcaggatgtttatccattgttgtggaacgggagcgaaaacgatttcttgcggttgtcaataaagagtgggccaacattgagcccatgttgtggcagctgaatcctgaacagacacacttcctctgtcacgtttacatacaccaagccaaagttcgtcctggtggtgaaaaaaagaacatatgtgactcacatctgagagtcctgtttgccgaccaggcatgtgaaacgtatacgtctcccggtaccctatcgccaatttggaatgctgtgatcacatttaactgggtgtcactaccaggaggcattggtctctatctaaagaaccctcctctactttccttggaattctataattcggaacgcagtctaccagaagaccttgtgggcatgggaagcgtggccatgagtgttattagcgaggatcgggcaagtgattccaattgggaggatgcaggagtattcggttgctcaaagaatccgttgcgaaaactacagagattgaagtacctgacaccacctcctctcaaatgggtgccaattgctagaaaaggaactctacaagcagaggttttgatgtcagccgagatcattcaaatctccatggaatctctgaccactggtcagaatgataaaaaggaaccacaacttgcaacgggcattccaatggccatcaggccaactatgcagaattttgtcttagaggttttcttcgtgggtctacgcaattactccaagagcagcatgagttctgctggtaagcggaaaatcaatttaatgatgggtgatctggtcctgtccagtggaccctccacagcacgcatccggaacagcataaactttttggtggcctacgcatctggagtggttagtttgccagatcaacaggattactggccggcgatcatagccaccgatgtccttctctccggatttagcagcgagtccattctgggtgcagctctcatacccaattcatcaaatttcctgcaacgcgacaggaccctcaagtgtgtgttcaaaaaggaacaagaggcagcagaagcttccaccacggttagtgtggatgaagatgatgaggatgaggaagaggaactggagtgggaagaggaggagaccaaaccctccaggattagcagctggtggatgcgactgctcttcgcgttcggtctgcgtccagccccctatgccaatcgacacgctttaaggttccacgatgatttggatgaccacgaattggtcgaggagcgagagttcacctggtggactaagttctacaactcgatgtattggagtgcggccgaaatgtgccacgaacacaagcaccgcctggttatctactacgaagagctggagaagcaggcccagtttggatacctccaggattgggcggttcccgttcagttggttcatggcgtgaagtttaaaaagcatggtccacccaaagaagatatctatgccaccttaaagctgcaactcaagttgaccccttgtcagtgcccggttcttgaggatcccggaggtggtggcgacatggttcgcaacatgtcaaatcccatacatcctcgacatcagtccacactacagtcgctgggtgagaccgtaaaactattggtacgtgtttatgtagtccagggggttcagatgcgtcctcgagatgtgaaaggtgactccgattgctatgtgaagctgttcctgggcggcaagacgttctccgatagagcccatttctcacccaaccacagtaatccagttttcggtcgtctatttgaaatggaggctacgctgccaggagatcatatgctgcaagtcatggtatatgatcatgacaagatcaaggacgaggtgatcggtcagacaaacatcgatctggaggatcgctggcgaactaggcatcgtgccacagtgggtttggccaatgagtacacaaagagtggctataatcattggcacgacgttaagttgccctcggaaattctcatagatctgtgccagaaaagaggcattcaggccccttactattatggtaatgtaattgaggtggacggaatgctttttggggacgaaactttgatctcaaaagatgaggagctgcaggagagacttagtttagccgtgcttaagaatatggataagttgccatcctttggttacaaattggttcccgaacatgtggaaacccgctccctttgccgcgatgattttccaaatgtcgaacagggcaaactacaactgtggatagagctgttcgaggcgaacatctatgtgcccagtcccatcgatataacccctgtgccgcccgcggatttcgaggtgcgtgttgtggttaagaatctggtcgggattcaggcgggcgacaaaaacatttttggcaaactaatgagcgacgtttacgtgataggatggtgcgaggatgaggacaagcgccaatcgaccgatatccattaccgctcatttgcaggagatgcggcatttaattggcgcatggtcttcggcctcaagtattcccccaacgaggacctgatggtaatccggcgaaaggcggggctgctggaggaaatcgagttcaagaagccgcctattatctatctgcaggtgtgggacaaggatgtgttaaccaaggatgagtatctggccgcactggagctcaatctctccaacatgtacgcaccgtatccagctgcccagttatgtaagccatatcccaagaagaggaagcgcatcaatctcttcaagcgcaaggtcatcaacggctggtttccgctgcaaagtaatgcacatccatcgcaacgcagccaggccgcagttcaaaatggcaaaatgcagctgagcatcgaagtctgcacggatgtggaggccgtcaaccggccggctggtcgtggacaggatccaccgatggccttggagccgccttacagaccggacagctcgttcaatccactaacgcatccttgcaaatcctttcagcacatcctctggccagtcattcgaaagtatgtcctgtggactttgctcatattgatcgttatcctgggattggtgctcttcttttccaatctgcccgccaaactcatgaccattccacttgacccgatgatgtttgataagttgcaaaatacaaacgaggcactaaccagcgcgtacagtcgcgaccagcggccctttatgattacagctccggccacggccacggaacgcaaccagagttccaagagcaccaggatgcccaagctctacaacggagtctacagcggtcagtgcggcgccctatcgccacctgacctcatggaggcccagccgaagctacttcccaagccaaggagcaacagcagcggcagcaccggccggaacagcaagtattggatattttcaatgataatcgagcgcagtgcgggtcccaagcggattgaaatcgatggcgatgatgcggacacgccgctggaggccatcctgccagccgaaccgccggcggaggtctgcctcttgcgtgacagccccttcaggatattgcgggtgagtagatccagaatgggttccatgcaggtgcgggccggcaattctccaaagtga

SEQ ID NO: 12102 - protein, 1782 aa, DROSOPHILA
MDDCFAGAPQEFLICITVHKAAQVGVTTGELYVRISLDKMTKSTKSFPNTENPFFNELKKHMTYKKNVVVGELLVDLHSVWNQSNHGYFKKWGRLEAPIGENQTLENAVAPHGYLQLDLAIVSQHSPVSYALGSEEQDTQNLNKWTVDHDFDDIEKNLLTNVNIFAPSNIRYFVAFYRGYFIKQSNYMIQVSFAGFNGKTPVVKNTTTPVWNYEINFAWMYPSVAQRFLILIFAHEHLQWKCVAEFELCLEEIAFNGTPSLGPTYLHLYDPVNPMIYVGRLLMELRSEMLTDSQPTHTLSSKTVPGLDETRFWHDDVYLIEFLPLMGHHILTSGTAYKISARLAEHTSNVLEGQLRTPLDRFKSAMNSKNFRREAPFQSCMFRVRLPDNRAKYESDFFMLDIVNYMRSELDTFKLFQRKYPLQDDEQAKCLKVIVNNILTRIKEGLDAHRFDHDVQPQRTTWDINRQLYLLDYFAKLPLELQNLKQKLRSCFLEHLDTSIGDVVNELQRLVAEIGSLSSMARTQDEWPELVLSLSASGKDVGVCRLNAKLFLNLRNQDADQDQETLCWRLKSFSFKSAGCSHTCPNCGCTTAIVSGCLSIVVERERKRFLAVVNKEWANIEPMLWQLNPEQTHFLCHVYIHQAKVRPGGEKKNICDSHLRVLFADQACETYTSPGTLSPIWNAVITFNWVSLPGGIGLYLKNPPLLSLEFYNSERSLPEDLVGMGSVAMSVISEDRASDSNWEDAGVFGCSKNPLRKLQRLKYLTPPPLKWVPIARKGTLQAEVLMSAEIIQISMESLTTGQNDKKEPQLATGIPMAIRPTMQNFVLEVFFVGLRNYSKSSMSSAGKRKINLMMGDLVLSSGPSTARIRNSINFLVAYASGVVSLPDQQDYWPAIIATDVLLSGFSSESILGAALIPNSSNFLQRDRTLKCVFKKEQEAAEASTTVSVDEDDEDEEEELEWEEEETKPSRISSWWMRLLFAFGLRPAPYANRHALRFHDDLDDHELVEEREFTWWTKFYNSMYWSAAEMCHEHKHRLVIYYEELEKQAQFGYLQDWAVPVQLVHGVKFKKHGPPKEDIYATLKLQLKLTPCQCPVLEDPGGGGDMVRNMSNPIHPRHQSTLQSLGETVKLLVRVYVVQGVQMRPRDVKGDSDCYVKLFLGGKTFSDRAHFSPNHSNPVFGRLFEMEATLPGDHMLQVMVYDHDKIKDEVIGQTNIDLEDRWRTRHRATVGLANEYTKSGYNHWHDVKLPSEILIDLCQKRGIQAPYYYGNVIEVDGMLFGDETLISKDEELQERLSLAVLKNMDKLPSFGYKLVPEHVETRSLCRDDFPNVEQGKLQLWIELFEANIYVPSPIDITPVPPADFEVRVVVKNLVGIQAGDKNIFGKLMSDVYVIGWCEDEDKRQSTDIHYRSFAGDAAFNWRMVFGLKYSPNEDLMVIRRKAGLLEEIEFKKPPIIYLQVWDKDVLTKDEYLAALELNLSNMYAPYPAAQLCKPYPKKRKRINLFKRKVINGWFPLQSNAHPSQRSQAAVQNGKMQLSIEVCTDVEAVNRPAGRGQDPPMALEPPYRPDSSFNPLTHPCKSFQHILWPVIRKYVLWTLLILIVILGLVLFFSNLPAKLMTIPLDPMMFDKLQNTNEALTSAYSRDQRPFMITAPATATERNQSSKSTRMPKLYNGVYSGQCGALSPPDLMEAQPKLLPKPRSNSSGSTGRNSKYWIFSMIIERSAGPKRIEIDGDDADTPLEAILPAEPPAEVCLLRDSPFRILRVSRSRMGSMQVRAGNSPK

SEQ ID NO: 12103 - DNA, 6320 bp, DROSOPHILA
cggttgccgatttacccacctttaagtgtgtttcgaatcgtgcattaaattagcattttgctcttattgattcggctatcggctttgaacgtcgttgtcccaagttcatctttaacaccagcgaaaatgcacaaaacaaatcacttgaaaattaatttgtgtcagccatttttcaacatatgcccaccagtgtgaccgcatccaacaattgttcttttcgttacattttcatatataaatctaccacaacttatgtatgttatggtaataaaattaacttgattaaaataaataaagaaatattggaaatttgtcaccacaattttacatttttatatttttaaatatatcgaaacgtataaaatataccataaatttacttaattatccccactgtgccggcaaagactcagcggtctcgtcctggaaaatactagaaaatacatttaaatatttcctaaagattcaaaaacgttaatatcatacataatttacattttaaatgtagagtgacaattattaaatcaaattaaaaaaaataaaactaacatttatattaaggtaaaactttttgattgtcaaagtaaatcctatagaaatttcaaaatgaatgttaatttttttagtaagtatgccctttgtatgcttttatgtacaacttatctaaaatcaaaccaactaattttaattttaactcataattatcttaaagatatcaaatagaaaataccaaatactaaaatccctatcctttggtctgccgtattaaaatcgacagttgcctatcaattaatgttatgggtacacatatcaatactagctttaaaaacaaataacagaatttgataagtttttagtataatgatcatctagtaattggggtcaattatatgaatacgaagttgcgcgccagaaaatactagataaaaaccagaggaccaagcagacagctagcaatggtatatatagcagcgaactttagttcgataggtttttaccaaattggtcacgctgcgaacagaagcaattttacttgacggaggtttcattaaattttcacttgtgaataaaacgcgaaaaagcacttaaaaaccgaagaactgtgtaaaacaaaagcggtacgccaagaaagtgaagtgtaataactaaactaaacaagtaaaacgcgagtttttcacttcgcgaaaggtttgtgagctgcaaaattgttaaggtaagtaggttgagcaggagaagaagaactggagctccatttgtgcaagttggtggctcgaatgacgcacttggctgcaaccgaaaacattcgattcgatcagagctgcaactttcacatcaaaattgtacccatatgtacattttacatatgtatggtgtacctggacacgcacactgattcccgcacccatacacacacttaaacacacacacatacagcggcgtggaaaagtgaactgtaaactggaaaaaaagcgtttgtgttggtgttggtgtgcagtgaattcattgagtagtactcctttccaggctgctggtcactttatgtccaggtcgcgttcatccgctaaagccgtgcagttcaagcacgaatcggaggaagaggaagaagacgaggaggagcagctgccttccaggagaatgcactcttacggagacgccgcggccatcggaagcggggtgccggcctttttggccaaattgtggcgcctggtggacgatgccgataccaatcgcttgatttgctggaccaaggtaagcctacgccgccatattgtttatttacctttccagggactcccctcccaccacataccgctaatcagcatggcaacaacaatgacttggccatgcaggtgtctcaagctctctttgtagcgtttcgctctctgttttgttgttgcccatgccgcatcgcacgtatgcaagttgccttccccacacactcatcttgttgttgttgtcgatgttgccatttgcatgcgtacgtgcgtgaactctggaaaattttccatctccaactgacaatcgaataatttcccttggtcattcagttggcttttcatttaagataagagtaattggttctcacttaggttaccacacactcttaacgaagagtttattgataagcatagcctaccattttttgtcgacaacatatactcattaatatgtgagtatgagcgtaacataatctaattttcaaatccaatatttttagcgtgtttcacgcataaaaatctcacaaaaatttgaattttaaatgaaaaagttgacaaattttataaaatacgaatttttttaaaacgatcattttatacattatataagaacactagttccagctttggctcgtaactatagttttgcatctatagatataattacaattagctaattattttcgttgcttatcggttttggtttgcggccaaccgctaataggtttgtggcaactacatatcagcacaactctcatatcgcttccgtttttcgttttatttttgcaggatggccaaagtttcgttatacaaaatcaagcgcaattcgccaaggaactattgccactaaactacaagcacaacaacatggccagcttcataaggcaattgaatatgtgtaagtaaatgaaacatcgttgaaacatcaactgaaaactaaaaaaaatttgtgctttgcagatggattccacaagatcacctctattgacaatggcggactacgttttgatcgcgacgagattgaattttcgcacccattttttaagcgcaactcgccttttctacttgaccaaatcaaaaggaaaatatcgaacaacaaaaatggtgacgacaaaggtgtcctgaagccggaggccatgtcgaagattctcaccgatgtgaaagtcatgcggggtcgtcaggacaatctggattcgcgcttctccgccatgaaacaggagaacgaagtgctgtggcgcgagatagccagcctgcgccaaaagcacgctaagcagcaacaaatagtcaacaaactgatccagttcctcattaccattgtgcaaccgtcgcgcaacatgtctggcgtgaaacgccacgtgcagctgatgatcaacaatacgccggaaattgatcgtgcacggaccaccagtgagaccgagagcgagagtggcggcggaccggttatccacgagcttagggaggagcttcttgatgaggtgatgaatccatcaccggctggctacaccgcagcctcacattatgaccaagagagcgtctctccgcctgccgttgagcgtccgcgatctaacatgagcattagctcgcacaacgtcgattattcgaatcagagtgtggaggacttgctgctccagggaaatggaaccgctggcggtaatattctagtaggcggagccgcttctcccatggcccaaagtgtgagtcaatcgccggcccaacatgatgtctacacagtcaccgaggcgcccgattctcatgtccaggaggtgccaaacagtccgccttattacgaggagcagaatgtgcttaccacgcccatggtgcgggagcaggagcagcagaagcgtcagcagcttaaggagaacaacaagctacgacgacaggcaggagatgttatacttgatgctggagatattctcgtagatagttcgtcgcccaaggcgcaacggacaagcatccagcatagtacgcaacctgatgtgatggtccagccaatgattataaagtctgagccggagaacagttccggactgatggatctaatgactcccgcgaacgatctgtacagtgttaacttcatcagtgaggatatgccgacggatatttttgaagtaagatacattttaaacatcttatggtagttgctaactcttttctcttaactctttaggacgctctgcttcccgacggcgtggaagaggcagccaaactggaccagcaacaaaaatttgggcaatcgacagtgagcagcggcaagtttgccagcaacttcgatgtgcccaccaacagtacgctgctggatgccaatcaggcctcgacatcgaaggcagcggccaaggcgcaagcatctgaggaagagggcatggctgtggccaaatacagtggcgctgagaacggaaacaaccgcgataccaacaacagtcaactcctcaggatggcctcagtgttagtagaccagaagaatacgaattcaagtcggataagccataatcaagcggctaattcttactgttgcagtgacgaactccacgggcacttggaaagcatgcaagatgagttggaaacactgaaggatctgctgcgtggcgatggggtggccattgatcagaacatgctcatgggtgtaagtatcaacattgagtagaatttcttgtattagctgtccgtttgtccgactcgatgattatttaacttatgttctatttacatgattaggcgcttagcaggacgcccaattttcagttgccggaggacgagctgcttttaaaggtcagcacaaaacgtccacatctggccttcatgtctgaaaattcccctgcagaactaactaacaatgtgatttatttgtatactttatagctgtttaacgactctgatctaatggacaactatggcctatcgtttcccaatgacagcataagcagtgaaaagaaaggtttgttcggaattcagtattaattccttcgcttgagactaaactatttgatgattcaagcagcacccagtggctctgaactgatttcctatcagcccatgtatgatctgtccgacattttggacacggacgatggcaacaatgaccaggaggccagcaggcgccagatgcagacgcaaagttcggttttaaatacgccacgtcacgagttgtaacttatattaagtagcagcagctcagccgttaaattggcgaacaaatcgtttttagtgttaaatgcaaatcttgacacgttaattttcatcacctactctgtctaaccatttagttgattcatacgataatcacattaataaccactataatcatatgaatgatctgtatatgccttatgcactatatatatgatatatagactaaccagttcttgttgtagaaagactcgaagaatcagtaaagatttagatttattttgtatcgcgggattttgcgggccccagctcagcaggtagaagatttttagtttgcactaaccgatcgagagtacagtgaaagctgatcgcatcgtatacgatttaagatcgcacgcttcagtttatacattttacacactactcttatcattatttcaaaataaattgtttaatgtcgcgttgagctgcaaatgaaatcaaatgtgtactttttctttggaacaatgaaacttcgtttgctgctaaccttgttttgtgcataattttattcgactcaatgttgatacaactaaagagatatggactatggacacatatcgcctcaaattaacctagaaccttagcctaggactcgaaacgtagagttacaagttgtttgcaagtatgtaaatacataaatgaagggggagtgtgggaagtgttcgagtgcgttgtctaccactaaggatactaatcgagaattgtacgtatagaatgatgactatgacgccttagctttcgtccttgtacttggcgtccttcagaatgttggcgaactcgaacttgacccgctcccgttccgatctccgcatgctgcgcagtgtgtccaccagcgataggcagtagagctcgatgggatcgttgaaggacgacgtcacttgggtctgaagcggcgcttgggttgccttgcgcttgaagggattggtcagaaaatcgctgggtaatgcgcgtctgatagccgcaggcttgtaaatgggctcaatggtcacttctccgttggacagcgagctattcttgaacggcttttgctcctgtgtctgctgctgttctagatgcacctcctggccatagccattgcccattacaaccatcggcgttagcaggggcgaggaggccggcgagctggcttggtcatgttcgtggctgtgattgctgctgctggtgccgttcagtgtcgtcggcagggataattgctgcttggactctcccatgaccagctgcaactcgggcacaatctcgttgtcgtcgctatttgagccatcgtcgctgttgtccagctcgatgatgtcgtagccctcggaggcgtcgatctttaggtgctccggatcgggatacaaaaagctattgctgtcgttgtcacttcccattccattctgttgggccacgtagctctgggatttcttcacattgtaggtttgggccgtgttctgcagaaag

SEQ ID NO: 12104 - DNA, 2759 bp, DROSOPHILA
aattggtcacgctgcgaacagaagcaattttacttgacggaggtttcattaaattttcacttgtgaataaaacgcgaaaaagcacttaaaaaccgaagaactgtgtaaaacaaaagcggtacgccaagaaagtgaagtgtaataactaaactaaacaagtaaaacgcgagtttttcacttcgcgaaaggtttgtgagctgcaaaattgttaaggctgctggtcactttatgtccaggtcgcgttcatccgctaaagccgtgcagttcaagcacgaatcggaggaagaggaagaagacgaggaggagcagctgccttccaggagaatgcactcttacggagacgccgcggccatcggaagcggggtgccggcctttttggccaaattgtggcgcctggtggacgatgccgataccaatcgcttgatttgctggaccaaggatggccaaagtttcgttatacaaaatcaagcgcaattcgccaaggaactattgccactaaactacaagcacaacaacatggccagcttcataaggcaattgaatatgtatggattccacaagatcacctctattgacaatggcggactacgttttgatcgcgacgagattgaattttcgcacccattttttaagcgcaactcgccttttctacttgaccaaatcaaaaggaaaatatcgaacaacaaaaatggtgacgacaaaggtgtcctgaagccggaggccatgtcgaagattctcaccgatgtgaaagtcatgcggggtcgtcaggacaatctggattcgcgcttctccgccatgaaacaggagaacgaagtgctgtggcgcgagatagccagcctgcgccaaaagcacgctaagcagcaacaaatagtcaacaaactgatccagttcctcattaccattgtgcaaccgtcgcgcaacatgtctggcgtgaaacgccacgtgcagctgatgatcaacaatacgccggaaattgatcgtgcacggaccaccagtgagaccgagagcgagagtggcggcggaccggttatccacgagcttagggaggagcttcttgatgaggtgatgaatccatcaccggctggctacaccgcagcctcacattatgaccaagagagcgtctctccgcctgccgttgagcgtccgcgatctaacatgagcattagctcgcacaacgtcgattattcgaatcagagtgtggaggacttgctgctccagggaaatggaaccgctggcggtaatattctagtaggcggagccgcttctcccatggcccaaagtgtgagtcaatcgccggcccaacatgatgtctacacagtcaccgaggcgcccgattctcatgtccaggaggtgccaaacagtccgccttattacgaggagcagaatgtgcttaccacgcccatggtgcgggagcaggagcagcagaagcgtcagcagcttaaggagaacaacaagctacgacgacaggcaggagatgttatacttgatgctggagatattctcgtagatagttcgtcgcccaaggcgcaacggacaagcatccagcatagtacgcaacctgatgtgatggtccagccaatgattataaagtctgagccggagaacagttccggactgatggatctaatgactcccgcgaacgatctgtacagtgttaacttcatcagtgaggatatgccgacggatatttttgaagacgctctgcttcccgacggcgtggaagaggcagccaaactggaccagcaacaaaaatttgggcaatcgacagtgagcagcggcaagtttgccagcaacttcgatgtgcccaccaacagtacgctgctggatgccaatcaggcctcgacatcgaaggcagcggccaaggcgcaagcatctgaggaagagggcatggctgtggccaaatacagtggcgctgagaacggaaacaaccgcgataccaacaacagtcaactcctcaggatggcctcagttgacgaactccacgggcacttggaaagcatgcaagatgagttggaaacactgaaggatctgctgcgtggcgatggggtggccattgatcagaacatgctcatgggtctgtttaacgactctgatctaatggacaactatggcctatcgtttcccaatgacagcataagcagtgaaaagaaagcacccagtggctctgaactgatttcctatcagcccatgtatgatctgtccgacattttggacacggacgatggcaacaatgaccaggaggccagcaggcgccagatgcagacgcaaagttcggttttaaatacgccacgtcacgagttgtaacttatattaagtagcagcagctcagccgttaaattggcgaacaaatcgtttttagtgttaaatgcaaatcttgacacgttaattttcatcacctactctgtctaaccatttagttgattcatacgataatcacattaataaccactataatcatatgaatgatctgtatatgccttatgcactatatatatgatatatagactaaccagttcttgttgtagaaagactcgaagaatcagtaaagatttagatttattttgtatcgcgggattttgcgggccccagctcagcaggtagaagatttttagtttgcactaaccgatcgagagtacagtgaaagctgatcgcatcgtatacgatttaagatcgcacgcttcagtttatacattttacacactactcttatcattatttcaaaataaattgtttaatgtcgcgttgagctgcaaatgaaa

SEQ ID NO: 12105 - protein, 691 aa, DROSOPHILA
MSRSRSSAKAVQFKHESEEEEEDEEEQLPSRRMHSYGDAAAIGSGVPAFLAKLWRLVDDADTNRLICWTKDGQSFVIQNQAQFAKELLPLNYKHNNMASFIRQLNMYGFHKITSIDNGGLRFDRDEIEFSHPFFKRNSPFLLDQIKRKISNNKNGDDKGVLKPEAMSKILTDVKVMRGRQDNLDSRFSAMKQENEVLWREIASLRQKHAKQQQIVNKLIQFLITIVQPSRNMSGVKRHVQLMINNTPEIDRARTTSETESESGGGPVIHELREELLDEVMNPSPAGYTAASHYDQESVSPPAVERPRSNMSISSHNVDYSNQSVEDLLLQGNGTAGGNILVGGAASPMAQSVSQSPAQHDVYTVTEAPDSHVQEVPNSPPYYEEQNVLTTPMVREQEQQKRQQLKENNKLRRQAGDVILDAGDILVDSSSPKAQRTSIQHSTQPDVMVQPMIIKSEPENSSGLMDLMTPANDLYSVNFISEDMPTDIFEDALLPDGVEEAAKLDQQQKFGQSTVSSGKFASNFDVPTNSTLLDANQASTSKAAAKAQASEEEGMAVAKYSGAENGNNRDTNNSQLLRMASVDELHGHLESMQDELETLKDLLRGDGVAIDQNMLMGLFNDSDLMDNYGLSFPNDSISSEKKAPSGSELISYQPMYDLSDILDTDDGNNDQEASRRQMQTQSSVLNTPRHEL

SEQ ID NO: 12106 - DNA, 4382 bp, DROSOPHILA
cactccaatgcgggcagacaggatttgagtgcctcgatggcgctggccagattggattcgatctgacgggcccgcactagatcattgccctgctgaatcagcgaggcgctgatctggcgaagggacgtgtccaaggaatgcacttcgttgtgcagctgttgggcctgcgtgcgcacctggagcagctcctgaattgaatcgatgaagccctggtagtacagattgcagatccgctcgatctctttgtcatggctccgtatccgctgctccagttggtcgccaatctgcttagtgttgttgcctgtccgggaaaaaaggaaaatgggcgtaaacaaagtgtgccaattgcttctattcgcagtcaccttcaaggatcgaacggaatgttggtccccagtagtcgtccaccgcctcaatgtcttgcacggtcactttggacatcttataacgctcttttttctcttctaaacaactttttaccaaactttaatgagcaattatttcgccgacttatcggtatggtatatcgaatatttactaagtgttatcgaggtttgactttcgatactaggcgataacaattttaagcggtatgttttaaattataatacaaagttgtgtcagagaatatctgactgcattatcttttaaaaagatattatcactaggattgtaataaaataaataaatcaaataggcgaaaactaccgaatcataaacttaatttatatatgtatatcaaaatccggttcttaactatttaagcaggaaacaatgatttgtaaaatatttataaattaattaaatatttacaacttaaacctatgctattagtaatgttcaccaacataatattcgttggtaattttgataagaaaagtaattaattacagatgtttgaataactcattttggcgcccttatttcaaatatccgcagcaagcaacaggttggaatgccgtctgctcgttataggccgccttggaacagctgttgctgttcagctttcactttggcttcgctttggctggccgcttctcgagagggccaagagttgtcggtggagttgtggttccgttgatacagttatgttgcagtaacacccgtacacgcacgcaatcacggcacaagctaaacacccgaaatcagcaaagatggccgacctacggagtcgccacaatggaaccgctgccatggagaagcaaagccacagccaaaccggaagccaccatcacaacaacaataaagcgctggataaggaagcatcggagaatggaaagccggagaagagtgatcccatgatatacataatcttcgtatcgctgctcttcgacttactggccttcaccatcattctgccgctgctgccctcgctgttggagcactatcgccagaacgacagctccggcttgtatgccgtgctcacggatcgggtgcgctggttccagcagctcctgggcgccccggatcgctacatatcggtgctattcggaggctttctcggctccatgttcagcttcctgcagttcgtggccagtccgattgtcggaggactctcggactactacggacggaaaccagtcctgctggcttgtgcggtaggtaatcccagtgctcaatgctttaatgtgcactaaacactaaactagtcttgttagttttctttttggcttggtcaacatttcatgctattacgagttcaatccaaaagcgtggaattcgtcaaattcaaactccttagctaagccacaaataagtaaaccttccttaagctacgtcttctttcatctatagagtggtattgcgttatcctatctgatctgggcctgctccagcaactttgccctgttcgttttggcccgcttcgtgggcggaattagcaagggcaacatatccctgtgcatgtccgtcattacggatgtgtccagcgttaagacccgtggacgcggtatggcccttgtgggtgtggccttctcgctgggctttattgtggggcccatgattggagccctgttcgccatattctccgataaaagtggaagtacttggtttgtgttgccctctctgctggcgtttggcctggcagttggagatcttgtggtcctggcctgctgtctgcgggaaacgttgcccaaggtgcgtacggttggctaaattaaatatattcccaacaccattaattgtttgaccttttcgcaggagaaacgtgttaaggagatatcatctgcactgtcttatggcctgcagttgctcaatttttcggccatatttaggtaattcaatgttttaattagcatgtctcgaaaacctgtcgtgtgatcaaatcgaaatcgtcatacggtgagaactgcaagccacccggacttgcctgactggtttgatagacactattatcatgccgggttctcggacacgtttgtttgattgccttatcagttagtaaattctagattgcttttgattaattgtagttacagggaattgagtccagttagctagaagattattaccaatgattatgtctggattttacaatcatatttcaaaagaattctcccactgacagatttgctgccatcaaaaatgtgcctaagaaagacattgcggcactgcgatccattggcctggtatacttcttgtatctctttctgtattccggcttggagttcaccgtcacatttctgatgtaccacaaattcggttacacttcgatggatcaggcgaagatgtttttgacaacgggtatggagcaagttgataatctacaatattccctatcaaatttgtgtctttttctaggtgtaatcatgactttgctgcagggatcggtggtccgacggctgcccgaggcgaagatcaaaggctatgccatcttcagtttgtacctgattgtacccgccttcgtagtagtcggcctagccgagggcagtcggatgctgtacgccggcatgaccctgttcgcaatctccacagccttcgctgtcacctgtctgaccaccctcgtatccaaatacggaaacgatgaccagaagggttcagtactgggcatattccgctcactgggagctttggctcgagctctgggccccgtggtgggatgcattggtgagctcctcagctgtcttaggattataccttttctaaactctttaatccttaatagccttctggtgcgttggctccaggatcacctatatagccggcggacttctgctcatttatccagccatggccttgcaacgcgctcgcatttaagtgcaataggaatagagtttttaaactcactagagatcaacggaagtattagctgcacattatacttaatttatcgttttttacaagtattttatattaaaataaacacatttttactctgatttgtaagcagggggtttttacttgggatcgaaatgttttctatttaattaatttttttaataagataatattagaaacagttactgctactgggagaacgattctgtttaggttggaacgttttaagtattcaagacattttgagttggaaataagttaaatgggctagggataatccctagaaaatgtgttcagcttttttaaaatacgataggcttgtcgggatgaaacgagagcagttcatgataattcgtcgtaccgtctggtaactctaaaacatccatctcgttaatttagtgatgcaagtcgatgtgaaaacatcgataatgatataagtatgttggtgttttaaaataaaacaaataagttttttaaataggaaacaaacattagatttattttctagacctaatgtgttttaattatgaaaaaatttaattctaattctaaagcttttgagtataaaacaatgttcatataaacaaaaatagaagtgacattgtactatcgccttacatcgccattaagaaaatcgataagtatcgccgaaataatgtcgatgtaccgatatttttcaacatctctagtctcgttggaaatataacgtgacgttattgggagtgactaagttttcgtgtaagagaaaattgcaaataaatgcgctgcaagcagctgcaaatctccaattaatactgctccaattgccggaaaagtcctgccagcattttcgaacgcatccgagctggaagagcaaccgatttcgccacttaaatactgatatatacacttttctctttctttacaactacaactgcaaataaaagtgtaaagtgtgtgagccgacgacaaacgcattaaagaaatcggcggcgcgcagggattattggatttcgtttagcacccgcacacacaaaacaaaaaggacggaactggatttccaaaggatatcgaaccgagcgagcgatagcaaaacaaattgagcaaaatgggtgcaagagaagacg

SEQ ID NO: 12107 - DNA, 1715 bp, DROSOPHILA
tcagctttcactttggcttcgctttggctggccgcttctcgagagggccaagagttgtcggtggagttgtggttccgttgatacagttatgttgcagtaacacccgtacacgcacgcaatcacggcacaagctaaacacccgaaatcagcaaagatggccgacctacggagtcgccacaatggaaccgctgccatggagaagcaaagccacagccaaaccggaagccaccatcacaacaacaataaagcgctggataaggaagcatcggagaatggaaagccggagaagagtgatcccatgatatacataatcttcgtatcgctgctcttcgacttactggccttcaccatcattctgccgctgctgccctcgctgttggagcactatcgccagaacgacagctccggcttgtatgccgtgctcacggatcgggtgcgctggttccagcagctcctgggcgccccggatcgctacatatcggtgctattcggaggctttctcggctccatgttcagcttcctgcagttcgtggccagtccgattgtcggaggactctcggactactacggacggaaaccagtcctgctggcttgtgcgagtggtattgcgttatcctatctgatctgggcctgctccagcaactttgccctgttcgttttggcccgcttcgtgggcggaattagcaagggcaacatatccctgtgcatgtccgtcattacggatgtgtccagcgttaagacccgtggacgcggtatggcccttgtgggtgtggccttctcgctgggctttattgtggggcccatgattggagccctgttcgccatattctccgataaaagtggaagtacttggtttgtgttgccctctctgctggcgtttggcctggcagttggagatcttgtggtcctggcctgctgtctgcgggaaacgttgcccaaggagaaacgtgttaaggagatatcatctgcactgtcttatggcctgcagttgctcaatttttcggccatatttagatttgctgccatcaaaaatgtgcctaagaaagacattgcggcactgcgatccattggcctggtatacttcttgtatctctttctgtattccggcttggagttcaccgtcacatttctgatgtaccacaaattcggttacacttcgatggatcaggcgaagatgtttttgacaacgggtgtaatcatgactttgctgcagggatcggtggtccgacggctgcccgaggcgaagatcaaaggctatgccatcttcagtttgtacctgattgtacccgccttcgtagtagtcggcctagccgagggcagtcggatgctgtacgccggcatgaccctgttcgcaatctccacagccttcgctgtcacctgtctgaccaccctcgtatccaaatacggaaacgatgaccagaagggttcagtactgggcatattccgctcactgggagctttggctcgagctctgggccccgtggtgggatgcattgccttctggtgcgttggctccaggatcacctatatagccggcggacttctgctcatttatccagccatggccttgcaacgcgctcgcatttaagtgcaataggaatagagtttttaaactcactagagatcaacggaagtattagctgcacattatacttaatttatcgttttttacaagtattttatattaaaataaacacatttttactctgatttgt

SEQ ID NO: 12108 - protein, 477 aa, DROSOPHILA
MADLRSRHNGTAAMEKQSHSQTGSHHHNNNKALDKEASENGKPEKSDPMIYIIFVSLLFDLLAFTIILPLLPSLLEHYRQNDSSGLYAVLTDRVRWFQQLLGAPDRYISVLFGGFLGSMFSFLQFVASPIVGGLSDYYGRKPVLLACASGIALSYLIWACSSNFALFVLARFVGGISKGNISLCMSVITDVSSVKTRGRGMALVGVAFSLGFIVGPMIGALFAIFSDKSGSTWFVLPSLLAFGLAVGDLVVLACCLRETLPKEKRVKEISSALSYGLQLLNFSAIFRFAAIKNVPKKDIAALRSIGLVYFLYLFLYSGLEFTVTFLMYHKFGYTSMDQAKMFLTTGVIMTLLQGSVVRRLPEAKIKGYAIFSLYLIVPAFVVVGLAEGSRMLYAGMTLFAISTAFAVTCLTTLVSKYGNDDQKGSVLGIFRSLGALARALGPVVGCIAFWCVGSRITYIAGGLLLIYPAMALQRARI

SEQ ID NO: 12109 - DNA, 2838 bp, DROSOPHILA
cgctggcctttgttgctgttgctgttgcatcgcccgtggccgttgcatttgaattcttcgcctccgtttcaagcgccatgcttttgtttcacctgctcgccaaaaactcaacaaaaccagcggaggagacacagagttctagttcacgtttcttttttttttgggcccgtccgtccgtgttacacaactctaaccgctcgccgagctcggggtgatttcggttcgattttcagtgtctttctggtcgattgcgaacgtgattgttgtttggttaacgatctcgtacgcatctatgacaagtgggtctttgctagttctgttcttttcagcacattacttatcgaggatataaatcggccgattcgctagaaaataacgcgttatgttgttaacggctgagagtgtgaccaccgggtgaacatttaaatataccgctggcattggcttggttgcagtattttaattagtatttagttatttgctgtgtataattgcagatggacaacaactagtgatagggatgcacacgcaaaaacgataccaatatatatgattgcatttattttaacaacaattgtgttctgtttaataaaaggtaatttatgcacaatacaaacttatttttatttaaaacaaatttttaagcctttttataaagtgcgtcatattagcgtcgttgaggaacagtgaaatttgtaacatgggtaggttttttttattttatttgaaggtgaatttctattcaacaatttttaaaaattaattaatgtaaagggcctgttttaaggatgggttggttcatagctggacctactgttatgaaattatctcaaaaattgaaattttcctgaaattccaccgttccgccatcgccgctaacttatcgactctaatttgacgcatacaattttacagatcaagcatagtccccgttaagttttttttttaattcggtgtgtattttttacgacttgtaatacagccacacataaaatactgtttttaaccaaacaaacatgtcgcttataaagaatttggtaaaagagcccgaacagaaggcaaagaaaaagaaaaagaatgcgggatctggagaaagcgattccgatgagaaggacaagcctctgcggccgttcatcaaaaccgcgacagatctacagaggctgaagctggagaagctcatgaagaatccggtatgtgtttgcattggaaagctgggtggacattcatattaataaaccttttattgccaggataagcccgtggtcataccggagcagcgtcgcgaacgggacttcatgtcctcggtgcccacgttcgtgcggaatgtgatgggaagcagtgctggagcgggttccggcgagttccatgtgtaccgccacttgcgacgcaaggagtacgcccgccagaagaacatccagaaccagagtgcccgcgaagcagcagatgaagcttaccagcagaagttggacgacaacagacgcgcggccgaagaaaagactgctaagaaacgagccaaacggttgaagagaaaacagagggcgaaaaagccgagagaggacaagaagccactggctaaggaagcctcagaggatagtaacacagattccgaggaagagcccacagaagaaaaggcagaaagtagccctgaggaaggacaacaggtggcatccaaggaatccgacgacaataacacccaagaaacttcgaatgaagaggcagtgaattcaaatacagaagcgaaaagcgcagaggacacaaatgcagtggaattagatagcaccgaagctacaaaggaatcccaaaatgtggatcaagaacaagacaagcctgtgccttagtacctcctgttctattcctatcaataaaccgtttagagtaataaaacacagtgcggttttatttatagtacttttgtaatatatatatattaagcgatttctatacatcgccagtatctaggggttttcatctgaggccatctttctaaagcagcttggttgagaagaaagcgttttgcgaattatgcattgagttgtcgtggctttagtgcgcattttgttttttgttgtcttacatttataaggtgcatcaaatgttgcatttttgagtataataaatgctttcaaaatttgacatcgcaggcaatacattaattatacccttgacagaaatccaccatttttagttctgggtataaacatatttttttctggtttcttgaagaagcaagtttttattgttttcaataattagatttctttgaatccgaaaaatcgtttcttctaattgttggatttttctgcgttttgtttttgttttctcagatacatctatatgatttctcggttttgcacaaataattatttatagtatatttatatataggtatattttttgccgttgctcttaaataaacaattacaaataaatttgcagcatttttctactatgtaaaccgtaaaagtaaattatattttgaacttaaagccaacttaaatttgtaagcattttgaaaggtatttgtttttgttgaagatcctttcgcgaaaaagaacacaaaacaggaattgtgtaaagtgaatatggttaaaagaagcaaactgttatcgttaaaactacctcaattatgataaaaagcatgttgcactcctctccaagtaattctcattaacaaacttctctttgtgagtacaagttttcttagatgttgaaatacttccttgcttatataaattttccagtgaatttagctattattatgcatacattttgcaaacactaaaacacatcaacgtcattgaatttttttcaagtgagtgcgagtgctcgggtacattt

SEQ ID NO: 12110 - DNA, 778 bp, DROSOPHILA
ttttaaccaaacaaacatgtcgcttataaagaatttggtaaaagagcccgaacagaaggcaaagaaaaagaaaaagaatgcgggatctggagaaagcgattccgatgagaaggacaagcctctgcggccgttcatcaaaaccgcgacagatctacagaggctgaagctggagaagctcatgaagaatccggataagcccgtggtcataccggagcagcgtcgcgaacgggacttcatgtcctcggtgcccacgttcgtgcggaatgtgatgggaagcagtgctggagcgggttccggcgagttccatgtgtaccgccacttgcgacgcaaggagtacgcccgccagaagaacatccagaaccagagtgcccgcgaagcagcagatgaagcttaccagcagaagttggacgacaacagacgcgcggccgaagaaaagactgctaagaaacgagccaaacggttgaagagaaaacagagggcgaaaaagccgagagaggacaagaagccactggctaaggaagcctcagaggatagtaacacagattccgaggaagagcccacagaagaaaaggcagaaagtagccctgaggaaggacaacaggtggcatccaaggaatccgacgacaataacacccaagaaacttcgaatgaagaggcagtgaattcaaatacagaagcgaaaagcgcagaggacacaaatgcagtggaattagatagcaccgaagctacaaaggaatcccaaaatgtggatcaagaacaagacaagcctgtgccttag

SEQ ID NO: 12111 - protein, 253 aa, DROSOPHILA
MSLIKNLVKEPEQKAKKKKKNAGSGESDSDEKDKPLRPFIKTATDLQRLKLEKLMKNPDKPVVIPEQRRERDFMSSVPTFVRNVMGSSAGAGSGEFHVYRHLRRKEYARQKNIQNQSAREAADEAYQQKLDDNRRAAEEKTAKKRAKRLKRKQRAKKPREDKKPLAKEASEDSNTDSEEEPTEEKAESSPEEGQQVASKESDDNNTQETSNEEAVNSNTEAKSAEDTNAVELDSTEATKESQNVDQEQDKPVP

SEQ ID NO: 12112 - DNA, 8955 bp, DROSOPHILA
tggagcaacaagtcctttttcgcattcagcgccagagaaagaaagattgaaattgaaaccaaaattgaccggcgagttcaacaaaataacacgaagcgcatccttctccaaaaggacctgtgccacacgcacccgaagttgccgccagttggctataaaagcaagactgtttggtccgagatttcagtcattcagcgactcttcccgcgtggactcaacctttttttttcctctggatatatttactctccgtcgagcttaccaaaaatcaagttaacttggcagcaaatcagtggcacagcaatttcatttattacatttgtggcagttaactaactcaataacgacttgtgctaaagaaaaaaaagtttatacacaaaaccgtgcaacaccaaggatattttacacatttaaaattcgtatgacaagtgaacgcgaattttgaaaaattaactttaatacattccacagtacaaatataacattaaatatacaaaatattgctcaaatagtgataacaactgaacttgtttttttttttataacaataacaatatatacaaaactgcaatttatgaaacgtacgcatatcaaagctgcaagtcttctgattatcgcaatctaattgagtttcgatcggaattaaaacaccaaacgaactgcaaaacagagctgaattcataagatgagctaaaggactcagttcataagttcgcataaccaaactacaagctgtcgtaacgaaacgctatttctggaatgcaaaacgcattctaattgaatgtccactggcattaaggacccattgagtcatcacgtaaaggcagaaaatcagaaactgaattcagaaggcacaaggcgaacgcatatggaaatcatattggaaaaaatccataacaagtcaaggctctctcgaaacttcgtccgatgttgccagctgagctgtaaggacaataagagttaatccactaactaaacacaaatgtaattaaagtcgacaatgacttcgggcgacaaggagactcctaagagggaagatttcgccagtgcgctgcgattcttgatgggcggctgtgcccgcgaaccggaaatgactgcaatggcgccgcttaacctgcccaaaaagtgggcacgcatcctgcggatgtcctcgactccaaagataccaatcgtggactatctggaggtaaaactgcagccggcgaactcattaaattagccacgcgcgaatcacaaaatgacctctctgggttggctaaaagtttcatttcaccccctccttttaagtgattcacagaattatactcctggacatttccagaaaaacgctgttcaatacagtgttttcaaattctttttttttttttttttgaagaaaacaggaaaggcaataagacaatcaaattactcagtcgccggaaggcgttaatgtcctaaaatctattgacattttgctgtaggacaatgttttgcactttctttgctttgcactacgaaaggcaaacagaaagttcttagagaaagtaaatgaaactaaaagaacttcgccttgaactagcaaagcacctttataacacaaaaattaaaagaaaaaataaattgcatgcaaaagaattttgtattgttatgacattttaatttattaacccgaaggaagttaaagactcggaatactaggaatgttcctcacctccgaacaagagttcaaaatcagttttataaattaaaatttttcttaattaagtatttttcccagtgctggcaaaccaaacatagcttaatgttttaattgatgttgctgcaaagtgaaagacacctgtttttcctgtttcaggcggctgagtccggaaaccttgacgacttcaagcgactcttcatggcggacaactcgcgcattgctttaaaggatgcgaaaggacgaacggctgcccatcaggcggcggcccgtaatagggttaacattttgcggtacattcgcgaccagaatggcggtaagtgaacggataaagccattaacccggactccttatcaagcgtgatttacagactttaatgcgaaggataatgccggcaataccccgctccacatcgccgtggagagcgatgcctacgacgctctggactatctattgtccatgtaagtggctcaagccatggttgatttagcccgattgaacttcaaaatatatcttgccgacaatccttacagcccagtggatacgggagtgctgaacgagaagaagcaggcaccagtgcacttggccaccgagctgaacaaagtgaagtcccttcgggtgatgggtcagtaccgcaatgtcatcgatattcagcagggcggcgaacatggacgtaccgctctgcacttggccgccatctatgatcacgaggagtgcgctcgcatcctggtaagtggtgtgagttttggccaatcatttcatttgattattttttatgttcggccttgcttttgtatttactcatgcattttatttgcattggtttgatttatattaagccattaatcaacttgattcacccaccatcgtcctttcgaaaaacacactcatccgtacaaaagtttaatttatcatagagaacatgaaaaataaaggttggtatatgcagtagaagaaaattgaaattgttttgcctgcttttatactagacccaaatattaaagagtgtgtctgtgtgcgtgtgtgtatgttcctagtgctagcatattatattagacgcatttatatttgtttacaataactcatcgtatcttccagataactgagttcgatgcatgcccacgtaagccctgtaacaatggttattatcccatacacgaagcggccaagaatgccagctccaagacaatggaggtcttcttccaggcaagttatcctttccatttcccgattcgcacttgtcccagctgcatgctacaactacgagtatgtcatctcatccagctttgatcctattgtggaagctatccccattggacactgacccgatttgcttgattcctacaactcctacccctcttacttactttcttacttacatcccatccagacctttcgtgcactctcttcggttttgggtttatttttatttggtttttgattttgctttgctccttgattgaagttgcgtatacgccgcgttgtcagcgacctctttaaaaagtatcaaatttgttatgggtcacactgtcgctgtcgagagttgaaaggcatggagaataacatgttttccacaaaattttaagctgcagaaaaatatcagatgttggataactcaggcggggtcggtcattcactttggacaacagtttactggtcgccttaagacacttctaggatgcccaaaagttaaagcgttgcaaaaaaaaagaaaaaaaaaacagagtgatgtgttattttgattgcttttcttgacttggtttacttaaatgtgtaatcaattatagaaggaatgttcttagatataagtatgagcttagactgcactgccgcttcatagaattacttgttcaagttttttaatagtaatttaatcttttgtgtagctattgttattaatatattgacacctgcttttaaaagctgtcttaagaccattgaggataaatacgagaacggtgacgcaaacaagtctgttaatttctttttttcacaattaaatctctgcaggaatgagctcatctaatgtttttattcattttccagtggggcgagcagcgcggctgcacccgcgaggagatgatatccttctacgactcggagggcaatgtgccgctccattcggctgtccatggtggcgacatcaaggctgtggagctgtgcctcaagtccggggccaagatatctacgcagcaacacgatctctcgacgccagtgcacctggcttgtgcccaggtgagtgtatgctttggatgcacaggtgtgctgatgactgggaaatccttcagcggcgaccaactgacagtctgccaagcaattgaaaactctcatatttccacgtggagttgagcaaacaaagcgttcttggccagtaagcgaaaggaaaacagcattaaagcatatccaatgggcggtgaaaagtggctgtggtggtttcctttcggtctccttcggattgcctcgtgtcttggtgtccttagttgactttaatttgacaaattcttatgcaaattcactaagaagaacgtgactttgccgttaacaaaacaaagcacttttcatgttggggaaatacatactacggatgaatgattccgacatggttttccatttccatttccgcttcttgttctttttgtttttttttttgtctagggagccatagacattgtaaagctcatgttcgagatgcagccaatggagaagcgactatgtctgagttgcacggatgtgcagaagatgacgccgctgcactgcgcctccatgttcgatcatccggacattgtgtcctatctggtggccgagggagcggacatcaatgccctggacaaggagcatcgctctccgttactgctggcggcatctcgtagcggttggaaaacaggtgaccttagttaacccttttatatatctattgtgtaaacttggctttccatttttccagtccacctcctgattcgcctgggggcgtgcattagtgtcaaggacgccgccgcccgcaatgtgctgcacttcgtcatcatgaacggcggccggctgacggacttcgcggagcaggtggccaattgccagacgcaggcgcagctgaagctgctgctcaacgagaaggacagcatgggctgctcgccgctgcactacgccagtcgggatggacacatccgttcgttggagaacctcattcgactgggagcctgcatcaacctgaagaacaacaacaacgagagtccgctgcactttgccgcacgctacggaagatacaatacggtgcggcagctcttggattccgagaagggatccttcatcatcaacgaaagtgacggtgcagggatgacaccactgcacatatcctcgcagcaaggacacacgcgagtggtgcagctgctactcaatcgaggagccctgctccatcgggaccacaccggacgcaatcctctccagctagcggccatgtccggatacaccgagaccatcgagctgctgcactcggtgcactcgcatctgctcgatcaggtggacaaggatggggtgagtgataatacttggcaacttggttaatcaaggtaaccattaaacatggctaatccccattagaacaccgctcttcacctggccaccatggagaataagccccatgcgatctccgtgctgatgtctatgggctgtaagctggtctataacgttctggacatgagtgccattgactatgccatctactacaaatatccggaggctgccctggccatggtcacccacgaggagcgggccaacgaggtgatggctctgcgttccgacaagcatccgtgcgtgaccctcgccttaattgcctccatgcccaaggtattcgaggcggtgcaggacaagtgcattaccaaggccaattgcaagaaggactcgaagagtttctacgtaagtttgtcgttttcccagggtgaagcccaatcatcatctcattccatcgaagctaattgatttctattcgcccccattgacatcgccgtgaccagatcaaatactctttcgcattcttgcaatgcccctttatgtttgccaagattgatgagaaaaccggagagtcgattacgaccgccagtcccattccgttgccggctttgaatgtaagcggaaactggaatccttcccagatctgttgcatgcgtgtttttttaatgttgctcctccttcctggccttgatacgtgatcttggggttattgtgggctgggatgtagcccacaatcgagtatagaatgaggtttagcgggcacatcatgatccataattcatattaatggctaagttccatacatcgatactcattacttggttaccatccagataaaatattcgttttggccctaccaaaagacacccgaacagattgaggccaagcgcaaagagttcaatgaccccaagtggcgacccgcgcctttggccgtggtgaacgtgagtgtccccgaactctcttaaaggtcccagagctctgcaattgtgaaccgtcccccaaactaacccactaaccgactcactttccggcttttgtatcttgtatgttgtgtgcgtgtttattagactttatgctacccatttctgatatatgtttccctataatccctcgatcagaccatggtaacacatggcagggtggagctgctggcccatccgctcagtcagaagtatctgcagatgaagtggaactcctacggcaagtactttcacctggccaacctgctaatctactcgatattcctggtctttgtaaccatctactcttcgctgatgatgaacaacatcgaactgaaggctggggacaacaagacgatgagtcaatactgcaatatggggtgagttgagatcatagttacccgaaaacatatagcaacacctccatttttcagatgggagcagctgaccatgaatctctcgcagaacccgtcggtggcatcacagattcgtttggattcctgcgaggagcgtataaatagaaccactgcaatacttttctgtgcggtggtcatcgtggtctatatactgctcaactcgatgcgggaactaatacagatataccagcagaaattgcactatatcctggagacagttaatttgatatcctgggtgctgtacatctcggctttggtgatggtaacaccggcatttcagccggatggaggaatcaataccattcattactcggccgcttcaatagcagtctttctgtcgtggttccgattgctactgttcctgcaaagattcgaccaggtcggcatctatgtggtcatgttcttggagattctgcagacgctcattaaagtgctgatggtattctccatacttataatcgcctttggtctggctttctatatactactttcaaaggtaggtgcttttatttggatttttcgagtgagatatttcctacttatcccttagattattgacccccaaccgaaccacttgtccttctccaacatacccatgtccttgctgcgaactttctcaatgatgctgggcgagctggactttgtgggtacctatgtgaacacctactatcgggatcagttgaaagtgcccatgacatcctttttgattttgagtaagtattgtttacaccattacatttccttcaattgatattaaatttattatgtcaggtgtctttatgatccttatgcccattcttctgatgaacttgctcatcggtttggccgtcggcgatattgagtcagtgcgtcgcaatgcccagctcaagagactggccatgcaggtggtgctccacacggagctggagaggaagttgccccatgtctggctgcagcgagttgacaagatggagctgattgagtatcccaatgaaaccaagtgcaagctgggcttctgcgatttcatcctgcgcaagtggttctcgaatccattcaccgaggattgtaagttgtctgggaaaagatctggtactaggtccatccaatacactttcaacttctatgcagcctccatggacgtcatctccttcgacaacaatgatgactacatcaacgcagaattggaacggcagaggcgaaagttgcgcgacataagtcgcatgctggagcaacagcaccatctggttcggctcattgtccaaaagatggagatcaagacggaggcggatgacgtggacgagggtatatccccaaacgagttgcgatccgtcgtcggtttgagatcggcaggcggaaatcgatggaactcgccgcgagtccggaataaactccgagccgccctgagcttcaataagagcatgtagatcccttcgttcgaaggaacttggctttataacaaaatctgtgtatcgtccttagtagaaaaattgcaccatttttaatatatctctatgtgtgtgtaaatcgttgtcccacagtgacgtggatcgtgtgtgtatgtgacgatcgtattgtgtgaggtcctgaaaggaataatacatcgaatttataggcaaggatcatgggctgttctcgtaacttgattaagctgtggaattcaacagatctattgtagttttaaatgcaatttgcaaaagtgtgtattgttatttggatgtcttttaaaaagtatataaaataaaatcatattaaccagaaaaacagcatacattttggaacaaaggagacacactcctcaagtcaaatacaaaattcttatttatttatgacaatgataaatggtaaagtgacaatgtatgagagtagttttaacgattggcgataaagagacataaacttatttactaaatgtaagatgtgggatgaagcgtgcgatctacatgaatgtgatcttcgtgcgtcccatgttgacctgccagacattgagctcctcgtaatcatcgatgcatttgtccacctggtcgggcttgaatcctttggttgtgcagcggtccatgatgtcggagattttgactgcctttccagagccagccagttcacgaacgatggcaaagattcgatccgaagtgttgggtacgctgaaaatgagaaatatttttgttagcacaaggatttacttacatcctttgcaactacttactgtcccttctggtgctcgtggatttggttgagcgagtccttagacatctccagcagacgcagtgcttcagccacatcatctttctccacgctatcggaaagacgcaacctagccaaagcggtggacaaccgcaggattcccaacaagttacgtgccgaggtgaaggtcatgtccttctggttgcgcgcctcccgacgcaactccacataagctcccacaatgta

SEQ ID NO: 12113 - DNA, 3825 bp, DROSOPHILA
atgacttcgggcgacaaggagactcctaagagggaagatttcgccagtgcgctgcgattcttgatgggcggctgtgcccgcgaaccggaaatgactgcaatggcgccgcttaacctgcccaaaaagtgggcacgcatcctgcggatgtcctcgactccaaagataccaatcgtggactatctggaggcggctgagtccggaaaccttgacgacttcaagcgactcttcatggcggacaactcgcgcattgctttaaaggatgcgaaaggacgaacggctgcccatcaggcggcggcccgtaatagggttaacattttgcggtacattcgcgaccagaatggcgactttaatgcgaaggataatgccggcaataccccgctccacatcgccgtggagagcgatgcctacgacgctctggactatctattgtccatcccagtggatacgggagtgctgaacgagaagaagcaggcaccagtgcacttggccaccgagctgaacaaagtgaagtcccttcgggtgatgggtcagtaccgcaatgtcatcgatattcagcagggcggcgaacatggacgtaccgctctgcacttggccgccatctatgatcacgaggagtgcgctcgcatcctgataactgagttcgatgcatgcccacgtaagccctgtaacaatggttattatcccatacacgaagcggccaagaatgccagctccaagacaatggaggtcttcttccaggcaagttatcctttccatttcccgattcgcacttgtcccagctgcatgctacaactacgatggggcgagcagcgcggctgcacccgcgaggagatgatatccttctacgactcggagggcaatgtgccgctccattcggctgtccatggtggcgacatcaaggctgtggagctgtgcctcaagtccggggccaagatatctacgcagcaacacgatctctcgacgccagtgcacctggcttgtgcccagggagccatagacattgtaaagctcatgttcgagatgcagccaatggagaagcgactatgtctgagttgcacggatgtgcagaagatgacgccgctgcactgcgcctccatgttcgatcatccggacattgtgtcctatctggtggccgagggagcggacatcaatgccctggacaaggagcatcgctctccgttactgctggcggcatctcgtagcggttggaaaacagtccacctcctgattcgcctgggggcgtgcattagtgtcaaggacgccgccgcccgcaatgtgctgcacttcgtcatcatgaacggcggccggctgacggacttcgcggagcaggtggccaattgccagacgcaggcgcagctgaagctgctgctcaacgagaaggacagcatgggctgctcgccgctgcactacgccagtcgggatggacacatccgttcgttggagaacctcattcgactgggagcctgcatcaacctgaagaacaacaacaacgagagtccgctgcactttgccgcacgctacggaagatacaatacggtgcggcagctcttggattccgagaagggatccttcatcatcaacgaaagtgacggtgcagggatgacaccactgcacatatcctcgcagcaaggacacacgcgagtggtgcagctgctactcaatcgaggagccctgctccatcgggaccacaccggacgcaatcctctccagctagcggccatgtccggatacaccgagaccatcgagctgctgcactcggtgcactcgcatctgctcgatcaggtggacaaggatgggaacaccgctcttcacctggccaccatggagaataagccccatgcgatctccgtgctgatgtctatgggctgtaagctggtctataacgttctggacatgagtgccattgactatgccatctactacaaatatccggaggctgccctggccatggtcacccacgaggagcgggccaacgaggtgatggctctgcgttccgacaagcatccgtgcgtgaccctcgccttaattgcctccatgcccaaggtattcgaggcggtgcaggacaagtgcattaccaaggccaattgcaagaaggactcgaagagtttctacatcaaatactctttcgcattcttgcaatgcccctttatgtttgccaagattgatgagaaaaccggagagtcgattacgaccgccagtcccattccgttgccggctttgaatataaaatattcgttttggccctaccaaaagacacccgaacagattgaggccaagcgcaaagagttcaatgaccccaagtggcgacccgcgcctttggccgtggtgaacaccatggtaacacatggcagggtggagctgctggcccatccgctcagtcagaagtatctgcagatgaagtggaactcctacggcaagtactttcacctggccaacctgctaatctactcgatattcctggtctttgtaaccatctactcttcgctgatgatgaacaacatcgaactgaaggctggggacaacaagacgatgagtcaatactgcaatatgggatgggagcagctgaccatgaatctctcgcagaacccgtcggtggcatcacagattcgtttggattcctgcgaggagcgtataaatagaaccactgcaatacttttctgtgcggtggtcatcgtggtctatatactgctcaactcgatgcgggaactaatacagatataccagcagaaattgcactatatcctggagacagttaatttgatatcctgggtgctgtacatctcggctttggtgatggtaacaccggcatttcagccggatggaggaatcaataccattcattactcggccgcttcaatagcagtctttctgtcgtggttccgattgctactgttcctgcaaagattcgaccaggtcggcatctatgtggtcatgttcttggagattctgcagacgctcattaaagtgctgatggtattctccatacttataatcgcctttggtctggctttctatatactactttcaaagattattgacccccaaccgaaccacttgtccttctccaacatacccatgtccttgctgcgaactttctcaatgatgctgggcgagctggactttgtgggtacctatgtgaacacctactatcgggatcagttgaaagtgcccatgacatcctttttgattttgagtgtctttatgatccttatgcccattcttctgatgaacttgctcatcggtttggccgtcggcgatattgagtcagtgcgtcgcaatgcccagctcaagagactggccatgcaggtggtgctccacacggagctggagaggaagttgccccatgtctggctgcagcgagttgacaagatggagctgattgagtatcccaatgaaaccaagtgcaagctgggcttctgcgatttcatcctgcgcaagtggttctcgaatccattcaccgaggattgtaagttgtctgggaaaagatctggtactaggtccatccaatacactttcaacttctatgcagcctccatggacgtcatctccttcgacaacaatgatgactacatcaacgcagaattggaacggcagaggcgaaagttgcgcgacataagtcgcatgctggagcaacagcaccatctggttcggctcattgtccaaaagatggagatcaagacggaggcggatgacgtggacgagggtatatccccaaacgagttgcgatccgtcgtcggtttgagatcggcaggcggaaatcgatggaactcgccgcgagtccggaataaactccgagccgccctgagcttcaataagagcatgtag

SEQ ID NO: 12114 - protein, 1274 aa, DROSOPHILA
MTSGDKETPKREDFASALRFLMGGCAREPEMTAMAPLNLPKKWARILRMSSTPKIPIVDYLEAAESGNLDDFKRLFMADNSRIALKDAKGRTAAHQAAARNRVNILRYIRDQNGDFNAKDNAGNTPLHIAVESDAYDALDYLLSIPVDTGVLNEKKQAPVHLATELNKVKSLRVMGQYRNVIDIQQGGEHGRTALHLAAIYDHEECARILITEFDACPRKPCNNGYYPIHEAAKNASSKTMEVFFQASYPFHFPIRTCPSCMLQLRWGEQRGCTREEMISFYDSEGNVPLHSAVHGGDIKAVELCLKSGAKISTQQHDLSTPVHLACAQGAIDIVKLMFEMQPMEKRLCLSCTDVQKMTPLHCASMFDHPDIVSYLVAEGADINALDKEHRSPLLLAASRSGWKTVHLLIRLGACISVKDAAARNVLHFVIMNGGRLTDFAEQVANCQTQAQLKLLLNEKDSMGCSPLHYASRDGHIRSLENLIRLGACINLKNNNNESPLHFAARYGRYNTVRQLLDSEKGSFIINESDGAGMTPLHISSQQGHTRVVQLLLNRGALLHRDHTGRNPLQLAAMSGYTETIELLHSVHSHLLDQVDKDGNTALHLATMENKPHAISVLMSMGCKLVYNVLDMSAIDYAIYYKYPEAALAMVTHEERANEVMALRSDKHPCVTLALIASMPKVFEAVQDKCITKANCKKDSKSFYIKYSFAFLQCPFMFAKIDEKTGESITTASPIPLPALNIKYSFWPYQKTPEQIEAKRKEFNDPKWRPAPLAVVNTMVTHGRVELLAHPLSQKYLQMKWNSYGKYFHLANLLIYSIFLVFVTIYSSLMMNNIELKAGDNKTMSQYCNMGWEQLTMNLSQNPSVASQIRLDSCEERINRTTAILFCAVVIVVYILLNSMRELIQIYQQKLHYILETVNLISWVLYISALVMVTPAFQPDGGINTIHYSAASIAVFLSWFRLLLFLQRFDQVGIYVVMFLEILQTLIKVLMVFSILIIAFGLAFYILLSKIIDPQPNHLSFSNIPMSLLRTFSMMLGELDFVGTYVNTYYRDQLKVPMTSFLILSVFMILMPILLMNLLIGLAVGDIESVRRNAQLKRLAMQVVLHTELERKLPHVWLQRVDKMELIEYPNETKCKLGFCDFILRKWFSNPFTEDCKLSGKRSGTRSIQYTFNFYAASMDVISFDNNDDYINAELERQRRKLRDISRMLEQQHHLVRLIVQKMEIKTEADDVDEGISPNELRSVVGLRSAGGNRWNSPRVRNKLRAALSFNKSM

SEQ ID NO: 12115 - DNA, 9903 bp, DROSOPHILA
tccgcctccgaatgatactgctccttgatggccgactggtaggcgggcttcagctgcttgccctcctgcacgtacagcttgttggcaacgcgcagcaggttactgttgcggtacttctccagcacaaactggaacgtttgggccacctccggcggaaagttggagacgaagtgcagtgccttggcgatctcgtcggcggtttcaccctgcgatccggcaaaggccagggcaatgcaagtttggatggagaagggcgagaagacgacgttctccttgagcccgccagcgctcaaaagctgaaaaagttcgctggtgaaacgggcacctccacgcgcaaattccaaattgaaatcgaacatattgacggactgaactgagtaattgtgggtgtgctgcgtaatcgcggaactgcgtgtgcttgctctctggtctgctgtctacaccggaatgccttaaatgccattcggggccacaacaaaagtgaaaacatcggccagccggcgaatgagtcacagccaaaatattatcaaaacaatcgaagcgaattggtggcgtcatcattttcatgatctagcaaccttgggggcatccccgggttcatcccaaaaataaaagtaatagggcgttctttaaatagccactgtttttcagtttttgtttgtctgatgataaaattcttaaaaatatgtttttatttttaatattattttgcagtgtgaccttaagcattggcgcctaaaaacgctggctttctgtccaacaaatactaaaatacacttgaacaggaaaacgcatgctgttgtttgttgtttgtaattcaatcaataagcctgttagttaaatatttcgtaattacagatttaaataatttcgaattaatatttatgccctttttaaagttatcaatttcgataggcataaaataccagatcgactattgtgcagccctggcgcttctgcgcgcgcgctttccaacaccgccgtacgcaaccaccccgcttcccgctcgcctaaaagccattatttttcgagtttcatccgcagccacagtgcaaaataggtttatcaatttaatttaagtgttaaagtagttctaaagtgttttttaagttgcgcaaacgatcgaggccagcccgcatgaatggatgtgcatgtgtccatcgatcgaacggagtatttgcattcagttgttgtgattttcccgtgaccattgcgtacgaaaatcgttttgggagcgcaagaaggtgagttgcgtctgcagatcgttatgccactctcgtttcggatgcggactgggaatcggaatggggttacggaacggaatggaagggaagggaacagaatccatggatgtgtggatctgggtctaggtcttgttcttggtcttggtttgggtctgggtccttgaacccctgcacggaatgcacgaaacctgaattgcgcactgcagctgcattttatccgatttcaccaagaacacacagaggcataaggcaaccggagggccgtaagaaccagaaaagtgcaaccaggagtggttgcttggcatcggcaacgaatcagtcgatttgaacccttctacccgccgcctgtcacaatttgatttaggccgatgtcgtcgcttcagttgcatttctatgtatatatatatatatatacgcatatatgtatgcacacacatatgtatgtatgtatataggtagatacgtgtgcaccatgtccatttgcatttcgcatttatatgccccgcatgcagttgcaacttgtttacgcacaatcgccgcacaaagaaacacctccagggccctttgtgcggacagggaaaacattgtttgtgtccgtctcatccatgttccttttcctccttgcagctgcggtcgctggttcatacgggagtcctaaaggttacagctcaagaaaatgcagcacaacgttcatgccgcccggccagcgccccacatccgagctgcgcaccatcacagccacagccatgcccacatgcatctgcatcccggcatggagcagcacctgggccccagtcttcagcagcaacagcagccgccaccgccgccccagcagcctccacatcgcgacctccacgcacggtaagccatctatgtcgttgacgctatcaggaataacaattaaaccagataatgcttcatccttcagtcaaataagagtagtatcagtttattaaattgtgataccttttggagttcggttccaatttagcagttctaactatgtttggagttaaacaagatggtacgccttgttggttcagtttgttttcggaaatggttatcatccccttcattcaatcgaaactccatgtaaacaagaaggggtaacatgggttaaataggttttccaagtctagaagaattcccatctatctatgtacaggaaggaacttttagataggtgtgttattaatatgggataacatcttatagagtttcctaatctagatcgagatctcagtataaattgtttaggcaataatgtaccactagccactggttggatctcatggactcagtgtgaatctcaggtgaggaaaatgtatctccctggcttggttggatcctagagagattccacatcgactcgaaacgccagcttgtctgagctttatgcgttgcggcaattatgttaattcctgtcactgacaattggtgtgagactcatcatcccattttctcaactcataaattataatttcagtggctctttgttctttcgcgctcagcatgacttccgctcgatgataacgggtttgccctgccgactgcgctgcaattatccttgacgttcgcgagtatccttcggctcggcctccagtagttcaggctcctcgtattgtctacgatcatatgtttcgccaaactctctgcaaactgctcatccagttccgcattcagttgcgttttgcctgccggtcggatcgggtcgcacatgaatttattaccgacgttcgctgattctaacgtacatttgcgtacgatcttttaacgatcatgatagactttcatcagtgccaagtgagaggtgaaatatgcaagaagattaaagttatagaaactgaagcgggatctaataagttcgcaagacaataaattaaagaactcgtaaagataagagatgagattttgcaaatgaaatcaaatcctcttaaccatataacttgcaagtgaaaggtacgaaaggaataaacttcagatattactacagatttgtattagcctgaaatatggattatcacattgctcagacttgttttcaaaaaagagtgtccataaacattaagagcattcaattaattacctttcccttacgcaggacatttttatcgcatatcaactgatcctaatcacaaattgcccatatcaatgttaatttgaaggcttgtttccgtactgatttagcgattataaattgccaaaaatatttccttgtcttgtgaaatgtacgaggctgtaggtaaaggtcgctagagtgctctcctaccctcgatcattgggaaaggaaaggtagggagcggttgcaggagcagggtgtcgcagtaggtgcgtctcaattgaaactgacagttggcgaaaaatgacacgatgcgtaagagaatgcggcttttgtgctttgttaggattttgtccattgttcggcgtggtcgctgttgtctgctattccgcaggaacaacaacatacggcagagggttggggggggccacgaagcttctaggacctctctcgttggtgtttttgtttttcccgtgcgccagtcgatgtacacttttgtctcgatggcctctataatcctcttggtgtgcattgtttgctgatataaccgcagaagccagcgcatccgccccaggagctcttacttgtggccatcgattaaccaatttgcttgctctatcctccgttttgcagtctgaatcatcaccatctccacgctcagcagcagcagcagcaacagacgtcgtcgaaccaagccggcgccgtcgctgcggctggggctgcctatcaccacggcaacatcaacagcaacagcggcagcaacatctccagcaacagcaaccagatgcagaagatccgccaacagcaccagcacttgagtagcagcaacggccttcttggcaatcaacctcctggtccgccgccacaggccttcaatccattggcgggcaatccggcagctctcgcctacaatcagcttcctccgcatccgccgcaccacatggccgcccatctgggcagctatgccgctccaccgcctcactattacatgagccaggcgaagcccgcgaaatataatcactatggcagcaatgcaaacagcaacagcggcagcaacaacagcaacagcaactatgcccccaaggccatactgcagaatacgtataggaatcagaaggtggtggttccaccagtggtgcaggaagtaacccccgtgccggaaccgccagtgaccaccaataatgccaccaccaacagcaccagcaacagcacagtcatagctagcgagcctgtaacccaagaggatacttctcagaagccggagactagacaggagccagcttcagcggacgatcatgtcagcacggggaatatcgatgctacgggagcactgtccaacgaggacacgagcagttcaggacgcgggggcaaggacaagaccccaatgtgcctggtcaatgagttggccaggtacaacaagatcacgcatcaatatcggttgactgaagaacgaggacctgcccactgcaagaccttcacggtgacactgatgctgggcgatgaggagtactcggcggacggtttcaagattaagaaagcgcaacatttggcggctagtaaggctatcgaggaaaccatgtacaagcatccgccgccgaagattcgccgcagcgaagaaggcggtcccatgcgcacacacattacgccgacggtggaattgaatgccctggccatgaagttgggacagcgtaccttctacctgctggatcccactcagattcctcccacggattccatagtgccgccggagtttgccggcggtcatttactaactgcgccaggaccagggatgccgcaaccacctccaccacctgcttacgctctccgccagcggcttggcaatggattcgtgcccattccatcgcagccgatgcatccgcatttctttcatggaccaggtcagcgaccgtttcctccgaagtttccatcacgctttgcgctgccaccgcctctcggagctcatgtacatcatggaccgaatggcccatttccatccgtgcctacgccacccagcaaaatcaccctgtttgtgggcaagcagaagtttgtgggcatcggacgcacactgcagcaagcgaaacatgacgctgcggcgagagcgctgcaggttctcaagacacaggccatatctgcctctgaggaggctctcgaggattcgatggatgagggtgacaagaagtcgcccatctcgcaggttcacgagatcggaattaagcgcaacatgaccgttcattttaaggtgttgcgcgaggaggggccggcgcacatgaagaactttataacagcctgcattgtgggatctattgtcaccgaaggagaaggaaatggcaaaaaagtgtccaagaagcgtgccgcggaaaagatgctcgtcgagttgcaaaagctgccgccccttacgcccaccaagcaaacgccattgaagcggattaaggttaagacacccggcaaaagtggggcagctgcccgagaaggttcggttgtgtcgggcactgatggtcctacgcaaacgggcaagccggagagacgtaaacgcctcaatccgccgaaggacaagctgatagacatggacgatgcggataatcccattacaaagctaattcaactgcagcagacgcgtaaggaaaaggaacccattttcgagctgatagccaaaaacggcaatgaaaccgctcgacgacgggaattcgttatggaggtctccgccagcgggagcacagcccgtggaacaggcaacagcaagaagttggcaaagcgaaatgctgcacagggtaaattaaatataattcatacaaaactaagaaagctttaacaaacttaattgcttattgcagctctgtttgaactgctggaagctgttcaagtcacaccaaccaacgaaacacagtcatcggaggaatgcagcacttcggcaacaatgtccgccgttacagcgcccgcagtggaggcaactgcggaaggcaaagtgcccatggtagcaacgccagtgggtcccatgccaggcattttaatactgcgccagaacaagaaacgtgagtgagacccacattaaattcaaaatagcatatttatccagtacgtttctatcattatagcagcaaagaagagggatcaaattgtaattgtcaagtctaacgtggaatccaaagaggaggaggccaataaggaggtggcagttgcagctgaggagaatagcaacaacagtgcaaactctggcgacagcagcaacagcagcagcggcgattcgcaagccacagaggcggctagtgagagtgcactgaatacctcaaccggcagcaatacgagtggtgtgagtagcaacagcagcaatgttggagccaacacggatggtaacaaccatgccgagagtaaaaacaacacggagagtagcagcaacagtacgagtaacacacaaagcgctggtgtgcacatgaaggagcagctcttgtaccttagtaaactgctggactttgaggtaagcttaccaacggaacagtcaaccccaactagaaactaaccaatttcctcaattcaggtcaacttctcggactatccgaaaggcaatcataacgagttcctgaccatcgtgacattgtccacacatccgccgcagatctgccatggcgttggcaagagctccgaggagtcgcagaatgatgctgcaagcaatgccttgaaaatcctcagcaagctggggctcaacaatgccatgaaataagcataaagcgctgaaaatttcacaaaacccttattaactgcaatttttgttgttgcacataagcatgataagagcaaagcaaagaaaaaacaattgaaatacccgtccacaaagcaaaccttaaacaaaatccaaaaaccaagctgtgtgcaaattcaaaaaaaaaaaagaagaaaaatgagaaatgtaagagaagcaatgcaagaaacagttttgaaatagcaaattattagttaatacctatttatttatttatgtgtgcacgttgtgcaaactggtgttattattttatttatttgttgagaattgaataacgaatcgaactgatagtaaccgaaactgaacagaggcgaacacttaaccagaaccgcaacgttgttaatccaaatcgagaatcgaacaataactagacttaatgaaaacccaacaaaatcatgaatgaacagatgcatatatacatatgtgcagtacctaaacttaagattaaagctcattaaccacttgaattgaattgatgaacaaaggactattgatacctcttagctgcatgcggcaatcgctttcaaaaataaatacaaaatttctgagcacctcggtgcaggacaaaattgaaggatatccgcatttgcgaataaaccaggcaggctgtcaatggagaaactggacaaatttttgatttatttttcaaagcacgacaaccatgaaccgtttgtggtcatatgcttgatgaaactcgtcgaataatgaatctattatacgtatactatatttaagtgttaagcataagcatcggcgaatgtcggaaagccgtataccgtaccccatgaccggtcgatttgccaaaactttcagcaaatatttgcaatgttttgctggattttggttgattgataggaagtggaagaaagggcgttcacgtcgaacatacaacataaaatacaatttacataatcgttataattatatttatgaatgtttaataagccatttttgtaaatgttcagcttttggcgagtgtacaagctaaaagctgaacatccttatgaataatgaatcgtgttgtttaatctgtcatggtttgtccccacatgtcttgctcgtttttgaatccgacctatttattagttatgttatcgccgtaaccccattactcccccctccccccctccccaatacacacacattgcacacaccaactgaaatttcgagaacaatagttttaattacttttatcccgaacagcaccagttgattaagcgttaagttgcgttatgtaaaatgtattttgtctaagccatcacgttggccacaatgtgcatgattgcttcgcgatttgcgatcctaacctaagcttaagccccagcgaactgtaaccgttgaaatgaagtcaatcccagtattaaatgtatagatagggggcagttgtgcgtaactcccattaaattactagactcacagatatatatcgtgcacattgtttgcgccacacaaattgttcattttgttagaagattttgcagacccagcggatacgatacgatacgatcataatcgtagtcaataaattttcatgtgcgagtgtagcggtgtctgctttgcaaaatcttcacaaaattgattgaaattattaatcttaatgtgagatgtattcgcaggtagcaacaatgcgtgaagatctgttcattaacaccaaataaaggcatacgagtcaagatgagagaacacatttattagtcttaagcctacgcccacacacattcactaagttttgtctatctgtaatgtgacacataatcgtgttatgtcattaaaactgaagaaatccccgccccaaataaaaatatgtaaaatgtaattatacgaataaaaagtgaaataaagttggaagtgagtgtttttgattgatttgggaaacttattcttacaccgaaaatgcatatgaaatgagttagccccgtaaatcgacaagatatcgccattaaaaactatgatttattccggccataaattaatttatagtcccgcctttcctgccctgccctacgttgaaaatatttgtgacaggtggtgtataatatgtaatactgtccgaaaaccccgatgcgttacataaaatatcataaaaattagggaaaattatattttttttaaattcaccatcaaaatgcaaaagggtgagaggcggccataaacttataaatacataaacgtttgttaatttgccgaaaaaaacaaaaaaaccctttcgcaatacgaattcacaaactgtaaacggcttaaatgcccgaatcagattatgatgtgccgacagctcgggctgactaatcgatgacaaatgtttatgcaaaatggcccattcatttcttcagaagatttttgagagttttcgagactattatattatagaaatatgcaggatcgcatcgtttgcaaacttttagatgtatcttttgaacttaaactatgtagatacatttattatggttctgcatatctttttttcaccttggtatagttgataaatcataaaacagtgcaatcctatgaagctcgatctggtaaagtgagctgggatgtgggatatgctatggtgcagctcctccactttctccgctggcatttggctagtttttgtggcaatcgtgcgattaaaacaaaaagaaaactacaaaaaaaaaataaacttgtggccggcaaatgcataataaatacataaaatgaaattaatgccttgcttgcacatcagccagctttccggcaaaatcaaagcgattccgcgcccgccactctgcccctccatttgcatatgcatttctctgggggctctgggtctctgggtctgtggcatcccctggaactgggagccaccatatcatatcaaatgt

SEQ ID NO: 12116 - DNA, 5259 bp, DROSOPHILA
tcccgctcgcctaaaagccattatttttcgagtttcatccgcagccacagtgcaaaataggtttatcaatttaatttaagtgttaaagtagttctaaagtgttttttaagttgcgcaaacgatcgaggccagcccgcatgaatggatgtgcatgtgtccatcgatcgaacggagtatttgcattcagttgttgtgattttcccgtgaccattgcgtacgaaaatcgttttgggagcgcaagaagctgcggtcgctggttcatacgggagtcctaaaggttacagctcaagaaaatgcagcacaacgttcatgccgcccggccagcgccccacatccgagctgcgcaccatcacagccacagccatgcccacatgcatctgcatcccggcatggagcagcacctgggccccagtcttcagcagcaacagcagccgccaccgccgccccagcagcctccacatcgcgacctccacgcacgtctgaatcatcaccatctccacgctcagcagcagcagcagcaacagacgtcgtcgaaccaagccggcgccgtcgctgcggctggggctgcctatcaccacggcaacatcaacagcaacagcggcagcaacatctccagcaacagcaaccagatgcagaagatccgccaacagcaccagcacttgagtagcagcaacggccttcttggcaatcaacctcctggtccgccgccacaggccttcaatccattggcgggcaatccggcagctctcgcctacaatcagcttcctccgcatccgccgcaccacatggccgcccatctgggcagctatgccgctccaccgcctcactattacatgagccaggcgaagcccgcgaaatataatcactatggcagcaatgcaaacagcaacagcggcagcaacaacagcaacagcaactatgcccccaaggccatactgcagaatacgtataggaatcagaaggtggtggttccaccagtggtgcaggaagtaacccccgtgccggaaccgccagtgaccaccaataatgccaccaccaacagcaccagcaacagcacagtcatagctagcgagcctgtaacccaagaggatacttctcagaagccggagactagacaggagccagcttcagcggacgatcatgtcagcacggggaatatcgatgctacgggagcactgtccaacgaggacacgagcagttcaggacgcgggggcaaggacaagaccccaatgtgcctggtcaatgagttggccaggtacaacaagatcacgcatcaatatcggttgactgaagaacgaggacctgcccactgcaagaccttcacggtgacactgatgctgggcgatgaggagtactcggcggacggtttcaagattaagaaagcgcaacatttggcggctagtaaggctatcgaggaaaccatgtacaagcatccgccgccgaagattcgccgcagcgaagaaggcggtcccatgcgcacacacattacgccgacggtggaattgaatgccctggccatgaagttgggacagcgtaccttctacctgctggatcccactcagattcctcccacggattccatagtgccgccggagtttgccggcggtcatttactaactgcgccaggaccagggatgccgcaaccacctccaccacctgcttacgctctccgccagcggcttggcaatggattcgtgcccattccatcgcagccgatgcatccgcatttctttcatggaccaggtcagcgaccgtttcctccgaagtttccatcacgctttgcgctgccaccgcctctcggagctcatgtacatcatggaccgaatggcccatttccatccgtgcctacgccacccagcaaaatcaccctgtttgtgggcaagcagaagtttgtgggcatcggacgcacactgcagcaagcgaaacatgacgctgcggcgagagcgctgcaggttctcaagacacaggccatatctgcctctgaggaggctctcgaggattcgatggatgagggtgacaagaagtcgcccatctcgcaggttcacgagatcggaattaagcgcaacatgaccgttcattttaaggtgttgcgcgaggaggggccggcgcacatgaagaactttataacagcctgcattgtgggatctattgtcaccgaaggagaaggaaatggcaaaaaagtgtccaagaagcgtgccgcggaaaagatgctcgtcgagttgcaaaagctgccgccccttacgcccaccaagcaaacgccattgaagcggattaaggttaagacacccggcaaaagtggggcagctgcccgagaaggttcggttgtgtcgggcactgatggtcctacgcaaacgggcaagccggagagacgtaaacgcctcaatccgccgaaggacaagctgatagacatggacgatgcggataatcccattacaaagctaattcaactgcagcagacgcgtaaggaaaaggaacccattttcgagctgatagccaaaaacggcaatgaaaccgctcgacgacgggaattcgttatggaggtctccgccagcgggagcacagcccgtggaacaggcaacagcaagaagttggcaaagcgaaatgctgcacaggctctgtttgaactgctggaagctgttcaagtcacaccaaccaacgaaacacagtcatcggaggaatgcagcacttcggcaacaatgtccgccgttacagcgcccgcagtggaggcaactgcggaaggcaaagtgcccatggtagcaacgccagtgggtcccatgccaggcattttaatactgcgccagaacaagaaaccagcaaagaagagggatcaaattgtaattgtcaagtctaacgtggaatccaaagaggaggaggccaataaggaggtggcagttgcagctgaggagaatagcaacaacagtgcaaactctggcgacagcagcaacagcagcagcggcgattcgcaagccacagaggcggctagtgagagtgcactgaatacctcaaccggcagcaatacgagtggtgtgagtagcaacagcagcaatgttggagccaacacggatggtaacaaccatgccgagagtaaaaacaacacggagagtagcagcaacagtacgagtaacacacaaagcgctggtgtgcacatgaaggagcagctcttgtaccttagtaaactgctggactttgaggtcaacttctcggactatccgaaaggcaatcataacgagttcctgaccatcgtgacattgtccacacatccgccgcagatctgccatggcgttggcaagagctccgaggagtcgcagaatgatgctgcaagcaatgccttgaaaatcctcagcaagctggggctcaacaatgccatgaaataagcataaagcgctgaaaatttcacaaaacccttattaactgcaatttttgttgttgcacataagcatgataagagcaaagcaaagaaaaaacaattgaaatacccgtccacaaagcaaaccttaaacaaaatccaaaaaccaagctgtgtgcaaattcaaaaaaaaaaaagaagaaaaatgagaaatgtaagagaagcaatgcaagaaacagttttgaaatagcaaattattagttaatacctatttatttatttatgtgtgcacgttgtgcaaactggtgttattattttatttatttgttgagaattgaataacgaatcgaactgatagtaaccgaaactgaacagaggcgaacacttaaccagaaccgcaacgttgttaatccaaatcgagaatcgaacaataactagacttaatgaaaacccaacaaaatcatgaatgaacagatgcatatatacatatgtgcagtacctaaacttaagattaaagctcattaaccacttgaattgaattgatgaacaaaggactattgatacctcttagctgcatgcggcaatcgctttcaaaaataaatacaaaatttctgagcacctcggtgcaggacaaaattgaaggatatccgcatttgcgaataaaccaggcaggctgtcaatggagaaactggacaaatttttgatttatttttcaaagcacgacaaccatgaaccgtttgtggtcatatgcttgatgaaactcgtcgaataatgaatctattatacgtatactatatttaagtgttaagcataagcatcggcgaatgtcggaaagccgtataccgtaccccatgaccggtcgatttgccaaaactttcagcaaatatttgcaatgttttgctggattttggttgattgataggaagtggaagaaagggcgttcacgtcgaacatacaacataaaatacaatttacataatcgttataattatatttatgaatgtttaataagccatttttgtaaatgttcagcttttggcgagtgtacaagctaaaagctgaacatccttatgaataatgaatcgtgttgtttaatctgtcatggtttgtccccacatgtcttgctcgtttttgaatccgacctatttattagttatgttatcgccgtaaccccattactcccccctccccccctccccaatacacacacattgcacacaccaactgaaatttcgagaacaatagttttaattacttttatcccgaacagcaccagttgattaagcgttaagttgcgttatgtaaaatgtattttgtctaagccatcacgttggccacaatgtgcatgattgcttcgcgatttgcgatcctaacctaagcttaagccccagcgaactgtaaccgttgaaatgaagtcaatcccagtattaaatgtatagatagggggcagttgtgcgtaactcccattaaattactagactcacagatatatatcgtgcacattgtttgcgccacacaaattgttcattttgttagaagattttgcagacccagcggatacgatacgatacgatcataatcgtagtcaataaattttcatgtgcgagtgtagcggtgtctgctttgcaaaatcttcacaaaattgattgaaattattaatcttaatgtgagatgtattcgcaggtagcaacaatgcgtgaagatctgttcattaacaccaaataaaggcatacgagtcaagatgagagaacacatttattagtcttaagcctacgcccacacacattcactaagttttgtctatctgtaatgtgacacataatcgtgttatgtcattaaaactgaagaaatccccgccccaaataaaaatatgtaaaatgtaattatacgaataaaaagtgaaataaagttgg

SEQ ID NO: 12117 - protein, 1026 aa, DROSOPHILA
MQHNVHAARPAPHIRAAHHHSHSHAHMHLHPGMEQHLGPSLQQQQQPPPPPQQPPHRDLHARLNHHHLHAQQQQQQQTSSNQAGAVAAAGAAYHHGNINSNSGSNISSNSNQMQKIRQQHQHLSSSNGLLGNQPPGPPPQAFNPLAGNPAALAYNQLPPHPPHHMAAHLGSYAAPPPHYYMSQAKPAKYNHYGSNANSNSGSNNSNSNYAPKAILQNTYRNQKVVVPPVVQEVTPVPEPPVTTNNATTNSTSNSTVIASEPVTQEDTSQKPETRQEPASADDHVSTGNIDATGALSNEDTSSSGRGGKDKTPMCLVNELARYNKITHQYRLTEERGPAHCKTFTVTLMLGDEEYSADGFKIKKAQHLAASKAIEETMYKHPPPKIRRSEEGGPMRTHITPTVELNALAMKLGQRTFYLLDPTQIPPTDSIVPPEFAGGHLLTAPGPGMPQPPPPPAYALRQRLGNGFVPIPSQPMHPHFFHGPGQRPFPPKFPSRFALPPPLGAHVHHGPNGPFPSVPTPPSKITLFVGKQKFVGIGRTLQQAKHDAAARALQVLKTQAISASEEALEDSMDEGDKKSPISQVHEIGIKRNMTVHFKVLREEGPAHMKNFITACIVGSIVTEGEGNGKKVSKKRAAEKMLVELQKLPPLTPTKQTPLKRIKVKTPGKSGAAAREGSVVSGTDGPTQTGKPERRKRLNPPKDKLIDMDDADNPITKLIQLQQTRKEKEPIFELIAKNGNETARRREFVMEVSASGSTARGTGNSKKLAKRNAAQALFELLEAVQVTPTNETQSSEECSTSATMSAVTAPAVEATAEGKVPMVATPVGPMPGILILRQNKKPAKKRDQIVIVKSNVESKEEEANKEVAVAAEENSNNSANSGDSSNSSSGDSQATEAASESALNTSTGSNTSGVSSNSSNVGANTDGNNHAESKNNTESSSNSTSNTQSAGVHMKEQLLYLSKLLDFEVNFSDYPKGNHNEFLTIVTLSTHPPQICHGVGKSSEESQNDAASNALKILSKLGLNNAMK

SEQ ID NO: 12118 - DNA, 2983 bp, DROSOPHILA
agaaatttgtttatttttatacaggatacatctcccaaaatgtatataaataagcaacaggtcttttcatttgcatacatatattttggatactagaaaacaaaactatacactgcacaggtcacgacccctcatatatggaataataaacgtttatatcgattgacttgcctttggctcgtattctttgtttgcaacaattgctcggagggccttctttgtttgcggcccggagacacggatcacggacacaccgcacttgacatgaccggaactgaggctgtagatggtgcatccgctgctggcaaagcgccggaaactgcccaagaagctctgggacgcgtttctgagaagcgccatcgccgaaaaacaattaaatcccaaccgccgaataataaacaattgaacgtgatattaagtgtgaccgcggaatggccgttacaaaaatatatcattccactcggagatatatactaaagaattgtgcgtaaacaattatggagcggtggtaagcttgggtaaatctccagtcccgacacaaaccattttgaccgaaatatgggatttgaaacatgggaacgttttttatttatttctttgttatttggatagaaagaattcacttttattcaattagacagaagtagtttttgtaattttttgtcaaataattatcagattttttgtcaaaagcgttggaaaatatcgaatgacatatctcgatgaacttgtaattaagcccttaattggttggagttcaaatttggtaattttatttttttgacgttttttgaaaaaaatagacgttgttaccccttataaaaaatgtgaaaatagaaaaaaaaaaatttttttttttatttcaccaaaagttgataaaaataataagcattggtaaaaagctgtaagaaatagttcttattaagtctctgagaccaattttagccaagctgtgatgaacttctcaaattccctctccgcttttgacgaagacaaatacacttaaatattttattagtaacaaatatcacatctagtgcagatgtgttacatttttacagttacattttcggatttggacgctttaaaatctgatgccttcgacactatcaatttgatcaggctacaagaatgagcgattgctagaatttctgatgcgaatacaactgtcaaatataaacggtttagaataagaactgacgttttcgggtgctgtaggcgtttgacaaccggagagatacaatgggtggtggacagctatcggtggcacgagcaaatttgttgcgttggatcatcgccgcattggtgtcccattggttgataaaggcacgggcctcgtcgtcacatggctttgccgtactcggtctttcttcctgcaaaaaagattatttcaaattgatttttgtttgaaatattccaaaaaataggcacctgggctcggcggcgtcgaggagcctcagtttccatcgactccagaaagtcccgtctacgatttcgtttggtcgccacactgtccgggaaattaacccaggtgcactcgtacttgcgcttctccagttcgcgcggatggtactgctcgttatcgaagcgttcctgatcgtccccgaccgagatgcgtccgtggccctcgtcctgctcccacatggagcgtcgcttgttcttcttgtacacatccgctttctcccgctccctgagtatctgatcgtctggcaggtattggctgcccactctgggccgctgggaacgcctggcaatgtgacgcgttgaggcgcattcgatccgcgcacggaggagctcgatgcaacggttcaccatcatccgagtgccaccgtggatgttaaccattctcggaagatattttttttttttttacagttttagaaattttattaaaagaattagggaattgtgtaagttttagtattggaatgccaaaatgtagcctgcttccaaagaggcggcgtgtaacgaactgaatccgctcccaacaaatcgaggtgacatgtaaggtgcgtacgaatcaaggcacacctgatgctgtaagtcggctcacctttcttaattagcactgttcacctggcgttaattttccacgactagtatctgtcacacagatcagttgagttctcagagtggcggcatgaggtctacgattttggtacttctgttgatcggagccattagggcggctattgggaatcaaacccatctggtgggctcctctttggagaatcgcattctatcgcgacgggtgcgtgctttggtttttcccgacaaggcatcccttctcctgaccgccgccctaaccaaactaattttgggcggacgaccaagtggccttcagtacagcttggagtttgatatgtacgttccggttcccgacaccattgagggttggcagcccaagatcctaaagaagatgaagccaaagccaatgtcaacgccaaaacgccggtatgattggtcatatagcaaaagacctgaaagctattatccatactatgcggatccatatagaaatgctcattacgaaaggtaaagtatatatatttaaccgttaaagaaataaattcgaaattttaagttttagtcctgctaacaatcatagagttccattctaccaagcaacatcgaggtaaattattatgaattactttcaagaggtaataattacaagttcaatgtcctactagggattcatttccccaagcttcatggcattcatcctcgcccactaatcgcaggaaagagttttatacatcgaggtaatataagattaatcattttgaaataccctaaagtggctttaaaatatttcagaccctcattgaatagggcctcattctatcatagcccatggagcttgtctgcaaatcagagaaactcatatccaccggaggaagaagtttatgaatcctgggatcaagtgcctagttggaagttacatcgtggatacagagaacgcagagagattttcgatcaa

SEQ ID NO: 12119 - DNA, 925 bp, DROSOPHILA
agcggattcagttcgttacacgccgcctctttggaagcaggctacattttggcattccaatactaaaacttacacaattccctaattcttttaataaaatttctaaaactgtaaaaaaaaaaaaaatatcttccgagaatggttaacatccacggtggcactcggatgatggtgaaccgttgcatcgagctcctccgtgcgcggatcgaatgcgcctcaacgcgtcacattgccaggcgttcccagcggcccagagtgggcagccaatacctgccagacgatcagatactcagggagcgggagaaagcggatgtgtacaagaagaacaagcgacgctccatgtgggagcaggacgagggccacggacgcatctcggtcggggacgatcaggaacgcttcgataacgagcagtaccatccgcgcgaactggagaagcgcaagtacgagtgcacctgggttaatttcccggacagtgtggcgaccaaacgaaatcgtagacgggactttctggagtcgatggaaactgaggctcctcgacgccgccgagcccaggaagaaagaccgagtacggcaaagccatgtgacgacgaggcccgtgcctttatcaaccaatgggacaccaatgcggcgatgatccaacgcaacaaatttgctcgtgccaccgatagctgtccaccacccattgtatctctccggttgtcaaacgcctacagcacccgaaaacgtcagttcttattctaaaccgtttatatttgacagttgtattcgcatcagaaattctagcaatcgctcattcttgtagcctgatcaaattgatagtgtcgaaggcatcagattttaaagcgtccaaatccgaaaatgtaactgtaaaaatgtaacacatctgcactagatgtgatatttgttactaataaaatatttaagt

SEQ ID NO: 12120 - protein, 200 aa, DROSOPHILA
MVNIHGGTRMMVNRCIELLRARIECASTRHIARRSQRPRVGSQYLPDDQILREREKADVYKKNKRRSMWEQDEGHGRISVGDDQERFDNEQYHPRELEKRKYECTWVNFPDSVATKRNRRRDFLESMETEAPRRRRAQEERPSTAKPCDDEARAFINQWDTNAAMIQRNKFARATDSCPPPIVSLRLSNAYSTRKRQFLF

SEQ ID NO: 12121 - DNA, 3477 bp, DROSOPHILA
ccagtttgaattctcgcaatggaaaatgcgaactgaagaacacacttatatatatatgtatatatatatatatatcagttttcccggatgatgttgacaagagccggaaaacaaactagaaactgcatgcaaataaggcagtcgaaaacaaagctcgttgttgattcgaattgctttcttttcgtttgtatttaatttaatgcattccagccatcaacatcatcattgtattaaactttctgtcagttggccattgttattacttttcaaagttttctcccgctctcagtgcatctcgaagtctcggctcttgtgcatttcccagctgagtggagaaaactttaagcaaataataactcagacaacctagaggcaatggttaagggattccacagactggctcacaaattaatgcgcaatcaactagcggactgtgccaccaaaaaccacttttgccagccacccattcgtcaaagcctttttctgggccaactttgctcggcctggcttatttatgtgcgtcgtctgcagaggcaatgaattgactttgtgactttggagttgggtgccaacctagatcctacccctcattcaaagtcctacacccgcataatgtgcatgacaatcttaaccccccatttccataccccttagtccctggtggagacaatgacattgttgccggctttgcttgccacatgatgcacttgatgccaggcggcgcacaatgtgtcctttgatttccgcagactaaaggcaaccgcaagccacaagattgaggatgatttgaaagcaatagacactgcttaaaggggggaaatgttttaaaatttcgcgcggatgcctcgcgaggagatgaaaaatgatgctcacaaaattagggtccttcaatgtgtttccacttacttgagcatgcatatgaaattcttcattatttttattttttgccgcagatgcctatttactgaacgatttaaataaaaggaaagtagaagtctcaccactatctgtcattacagacactcgattttaaactataatagtgctatatttagatatgtttaacacgtttatcagctctacacagaagataacatatagataaatacatcccctctaataaaatggaatgtcaggaactcaagctcgtcacggataaagaactcattgataagaatcttgaaaaagaggagcaaacatgcaacttagtcccagcctggagccctaggaatcccttggaaaacagcatcgattgccgcgagaagtcaattgtggaaaacataaatgcagaccaggatgccattgccaaaatccaatatcttagttcggaacatgccaagctggataaatatttagataatcaggagcaggatgaatcacttcgcaaatatcttgtcgttggagttcattgggtttctctgctcacggaacatgtgttgagccatccgtttctagtattgcgttggcagtgtcaggtttataatgcctccaagtgttaccacttgcatccttttaccctgctgccctgtattgtccacttgcacagacgccaaggactaacgacactatggaagggaatgggcagctgcttgcttgttcgtggaatgtcctgcgccattgacgatgtaatatcgaaactcagcagttggcccaaggaattggatagtcgaacgaccttaaagcgatttggccagcatgtccttctgaaatctgtaagcatcgctttggttttgcccttccacaccgtttccttggtgaagacagtgcaaagcggcattgccagcgacaaaacaggactttttgatgtccttcgagaaggtggagctcgcattttctcatggaggtccccgcaaaatactcgaatgctaccaacttgggcattaatcggtccgagtatttcgattggcattacaaagtatctcttcaacctgttaatacatggcgtatccactcgaatgatgcagaggagaatgctggaaaatcgatgtgaaaaaaaccccgacaataagcttgaaaaccaaaatgcgaaaacttatgccggacttatagccatgcttaccactgaggttgtattcttccctctcgaaaccatattgcatcgcctagaactgcagggcacccgaaccataatcgataatcttgatactggttattcagttgtcccggttttgacagactatcgtggattattcgattgctacagggtaaccgttatttcagagggagctgctggactctacaaaggcttcggagcaatgatccttcaatttgtcgcacaggttgctataataaaactggccaagtggacagcggatcaaattgctgctggtatattgaatcgtccaacatcccgcacagtacagccctacaatttcgattccctctcctgcaacaagagctctacgacaaaatcgccaagcatttccagcatcgatgtggaactgactagcttaggaaagtattcactagatgaataaagacctgtttgtatatcttaaaatgtattatattcacttatattgttttatagagaactgtgcgatgaaacttaggaaacaaccctgaaatgattgctaattaaatttacaatttctaaagtggttggtatttgccatttaaacaaagtcgacaactaaacaagattaagtagtcattggctattaaatctaaaattggttcattaactacactgcgagtgtttcccagccaatctaagctcacgccagctggtccacacgtcgtatgcgaatgtcaatattaggaaaatactttgcaggtgtactgaggccagtcctatgctaatttatgtgcagccactgcactattgactcttagaggctttcaactactatttatctatgcatacgtcctggtcaattggttttcccaatttctccgattatttgttttttggcccacattcagaggggcagtggaacttaccacgataatttaaaattacaatttccaatgatgtgctgcagatactcgaaatcgctaggattgcgtttttatgtgttgtttgtgtgcacgtaatgcacataaagttgctgcttcgtgcccccagaagccgtaaagccaattcgcaggacaccacacggcgtatacttaatacacacgtatgcaacgcgtgactgctgccaggatccaaggatgtgagtcgaaggatgccaaagaaatcaacttaaaatgtgcaaattgtttatactgcgacccctctgcggccaaaaaacacacaacatatatgtatgtacgttggccggaatgggttaaagtatgtgccggacattgaataagattaatgaaggttttgcctctggtgtttcgcctttttttatgaatgtttggtttcggttcggccgcctgctgcggtatcgtggttggaccgcaggatgatgccgttgcccctgctgctaaaatatttttgcagtcggcctcgtcgtgttctgtagcagctgtaaacgaaaaacatatttc

SEQ ID NO: 12122 - DNA, 1477 bp, DROSOPHILA
ccactatctgtcattacagacactcgattttaaactataatagtgctatatttagatatgtttaacacgtttatcagctctacacagaagataacatatagataaatacatcccctctaataaaatggaatgtcaggaactcaagctcgtcacggataaagaactcattgataagaatcttgaaaaagaggagcaaacatgcaacttagtcccagcctggagccctaggaatcccttggaaaacagcatcgattgccgcgagaagtcaattgtggaaaacataaatgcagaccaggatgccattgccaaaatccaatatcttagttcggaacatgccaagctggataaatatttagataatcaggagcaggatgaatcacttcgcaaatatcttgtcgttggagttcattgggtttctctgctcacggaacatgtgttgagccatccgtttctagtattgcgttggcagtgtcaggtttataatgcctccaagtgttaccacttgcatccttttaccctgctgccctgtattgtccacttgcacagacgccaaggactaacgacactatggaagggaatgggcagctgcttgcttgttcgtggaatgtcctgcgccattgacgatgtaatatcgaaactcagcagttggcccaaggaattggatagtcgaacgaccttaaagcgatttggccagcatgtccttctgaaatctgtaagcatcgctttggttttgcccttccacaccgtttccttggtgaagacagtgcaaagcggcattgccagcgacaaaacaggactttttgatgtccttcgagaaggtggagctcgcattttctcatggaggtccccgcaaaatactcgaatgctaccaacttgggcattaatcggtccgagtatttcgattggcattacaaagtatctcttcaacctgttaatacatggcgtatccactcgaatgatgcagaggagaatgctggaaaatcgatgtgaaaaaaaccccgacaataagcttgaaaaccaaaatgcgaaaacttatgccggacttatagccatgcttaccactgaggttgtattcttccctctcgaaaccatattgcatcgcctagaactgcagggcacccgaaccataatcgataatcttgatactggttattcagttgtcccggttttgacagactatcgtggattattcgattgctacagggtaaccgttatttcagagggagctgctggactctacaaaggcttcggagcaatgatccttcaatttgtcgcacaggttgctataataaaactggccaagtggacagcggatcaaattgctgctggtatattgaatcgtccaacatcccgcacagtacagccctacaatttcgattccctctcctgcaacaagagctctacgacaaaatcgccaagcatttccagcatcgatgtggaactgactagcttaggaaagtattcactagatgaataa

SEQ ID NO: 12123 - protein, 450 aa, DROSOPHILA
MECQELKLVTDKELIDKNLEKEEQTCNLVPAWSPRNPLENSIDCREKSIVENINADQDAIAKIQYLSSEHAKLDKYLDNQEQDESLRKYLVVGVHWVSLLTEHVLSHPFLVLRWQCQVYNASKCYHLHPFTLLPCIVHLHRRQGLTTLWKGMGSCLLVRGMSCAIDDVISKLSSWPKELDSRTTLKRFGQHVLLKSVSIALVLPFHTVSLVKTVQSGIASDKTGLFDVLREGGARIFSWRSPQNTRMLPTWALIGPSISIGITKYLFNLLIHGVSTRMMQRRMLENRCEKNPDNKLENQNAKTYAGLIAMLTTEVVFFPLETILHRLELQGTRTIIDNLDTGYSVVPVLTDYRGLFDCYRVTVISEGAAGLYKGFGAMILQFVAQVAIIKLAKWTADQIAAGILNRPTSRTVQPYNFDSLSCNKSSTTKSPSISSIDVELTSLGKYSLDE

SEQ ID NO: 12124 - DNA, 6085 bp, DROSOPHILA
attgaagggctttgtggagtgttttctttacgctttgcttccttacacaacaatcaatgcgaacaattagcggtaatcattcagggtgaagacaagtgaagatgaaccgtgtggagagttcgttgcctaagtctttcgttttaatttgcatgaaatatgaaatttatctgtgtttgtagctggatccaactccgctgtcagcacatatcattcggaaaacataatagctccaaatgacctcagcagccgatccaaaagccatcgagccattgattgctcgagtgtttaactggaagcgatgcgaatacttgatttctgtttgcgtttagtttcgatttgctttgcttaattcggaattagccacgttctaataaggctccactatgattaataatcgttgcccatcacttaaacaatgacgagtgattaatcgttgtttgtggcaaccaaagaagttataaacacttcatattgatccgatatcgatctttaatgctgaagaggcttaacatttagatcaagcatgaatttcagggtcacctgctgctgcctccttttattgtgaatgcaaaagataagcccaatcgaatttaattgccatttgatggacacacttggccgtaaatggttcgaactgtcgacatatgccccacgcaaaaaaatattcgtacacttttgcaaaaaagtcatcgtccatctgtaaatggcatttgtttgggctacataaatcatttagcatccgctcgattcggttacgtgagagcgctatggacacgcctcgctaccaaatatatgtatgttatatgctaatctgtacggcaacttacgtgtttccgttgttcgccgcatttgtatgtaaatgggccaaaacacacattttaatcaatgagtttcggcccgattcatggtttatcaatcagcctaatgaataaagtgtcgcaaagcgtcgcttacgaatgtcacaattaatacctttttgcacgtattttttttctccagcatgtggccacccagctcctgtctgtggttggctctcgccctcctggtgggcgtggcccaggcccagagcggcagtcgagagcacttcgaggatgcggacaagtccagcgagtatacggatcagcagttcgatctacggcacacgattcccggagaaccgggcctagactatcccattctaagttcgccgccaaggaccagctttgtgtgcaagggaagacatgaaggtgggtatcaaagaggattaacatgaaattgaatcataagttaatattattagctactaccaactagtgctcgtgatcgaaactgaaatctctagttaaaactccaataaaagagttgtctttaatcctttataaaccattgcaggttattacgcggatgtagaaagtcgctgccaggccttccgcatttgtgcccataccgcccgatcaccccaaggattcggtttcctctgccccaacggaacgctcttcagccagaagaactttgtgtgcgattggtaccgcaatgtgaactgcgatgattctgaaaagtattatgaaatgaacgaggagaaaaccgttggcagcacccacgaaatgatggagcgagtgcgtcacatgatggaataccccatgaaaacaatttcaaaggccttgcaacaaacccaatcccagtcacagaatccacaccatagtcttagcaaggatctaagcggagctagtggtgttttgagtcaacctgcggccattaagctcaatgatcctgaaacccaagttgttggacgcggagaagacgtgaaaagtgagccattgagtgcagtacaactaggaagcattaaccccggggacagcgaagatgagggtatttatgtgaatagtttgggagaactttcgtcagatccaggcattcagtttgatcacaccaatgcccatatcgtggcagaatatcccagggagtaccactaccagaagcagaagaactttgccgagcgtgttaacgcgggcttggatatcctaactgactcggaatccaactccggtgaggctatggcacccgattacatcaagcatataagaaatactaaggacgaggccgtacaactagatctggtatcgaatataaacaatctgctggatgaagtatccactgatgtggatccctccatttccggctatcaatctatggcaccgccgaaagttaagcaacctttccgattcctaagtcgtggattctccatgcagcgtgaaaacggaaagggtagctcatcttccggttatggctacattaaacccaaacaaacgcccagcactgtcagatttacggtgagtttccccacaaagctaaaaccaactctgtgaactatctcaactatccactacttttttctgtatcctaactttttgtttgtatctctatctatctctatctttctatctaaattgctactctatcaactatcgcttacattacgcaatttaaaaccacaaaccacacacacacacatacacaaaaccagcccaatgagatacccgccgaagatcacaaatccattgagcataagcacacgtttcccaaatcaacaagtaccagcagcaccacttcgacaaccactgagtcagccactgaatcaatagaacatctgctgatagcaccaactttgccacccgctgaggatgaggaagttagtacgctagtggcatctgaggtcacctcaaccccagccgcggaaccactcaaagttttggcaccaccactatcagaagtggtgactgccggggaagagtcggctatcgaatccattggacaggcagctgctctcactgccagtctgcccataagtgaggatatagtccgagtggagcaaagttccgaagcctctgagaagaatgatgcgcatcaagaggctgctaagctgctgctggcaggtgtgcaactgacctcccacaatgatgagcagcatttggaaaggaacgaagtagtggtcaccagtacgacaaccgctagccccatcacaccagtcatggtcacatccaccgaagtggtgactgagatcagtagcacacaggaacggattcgtggctaccgcaggaatcgaccgggagttatgttgaagcgtgcccacattcgccccttgcccactgtgcgaacaactacagcggctaccacgccaaggagcacaacacccactagaagttacctggaacgcctggctgccagtaggttgcgactttctagactatctcaagccaccaggagcaccgcaaaagcaacaacgaccttgccaagcaccacaactaccccggccacaaccactacagtgtcgtcattccaacaaattcgcggtggagcagaaccaggtccaaataagaggctaacagtgcgcgatattgatcgcgagactaaggtagcgccaagcaaggccaactgggaaaccgtccacagcaacctgcaacgcttccaggtgcaacgcggcaatcgagtgtacacgccagcgacacgagcctcagtcggtagcagcaatgcggcaaccaccagcagcaccaccagtgctcctagatcctatattgcggccacatctacgcgagccaccgttaatgttaatcgcggaaagaatcgctactccaacttcaagacccaggcgcccgtgcaaagaactcggggtaccaccaccacgagcaccactcagcgacccacatcctcgctctcctcgctgaaccaacatatctccgccctggcatcgaactataatggtggctatagctacaaccaggcaacgcaaatcagcaaacccataccacaatcaccatcacatgtctatgccacacacacggccagcgatatcgctgggcacgcctctcaatcccaaaccacatccagtcttacgcccgcctccgctttcctatcctttgataagttaacccgtgccattgttgacgaatccgttttgcagaattttaagagtgcccagtcgcagggttccaatcaagcgcagcaaaaccagcgccagcagcagcagcagcatcaagtggccaagcagcaacatcactcggttagcagcagctatgtgaagccagcagcagcgccaggtaaggagttatcaaaatcaggatatggacttcacaataaatgcattatttttgcagctatttccagtctgactgtaccacaacgaccccaacaaacatcgcagtcatctgtgccgccaggaattgtgattgctcgagctgagggccagcgtattgctcccaactccgccagcagcatcatttccagcttggccactcaagcaccagtgaccagcaaccagggcaactcctatgtctccctcaacgatttccttaacaacaaatttggtcagagtcctgcagccagcagtaatgttcattctgctgccactttgcagcaggaacaacagccacattatcagcagcaagccactctgtccttgcagcagcaacagcaacagcaacggcaacctgtgctgcagcagcaacatcagctcgtgcaacagcaacgccagcctgtgcagcagcaattgagctttatctcgcagcaataccagcagccgcagcagcagagtatctaccagcaatataaacagccacaacagcaacagcagcagcaacacttccagcagcagcaacagcggacgacgatccacaccaatcagcaaccctatcttacgcccaatatctttgtgccctaccatcagcagcagcaacagttgccccagttcccgccgttggctccacccgtgtcgatatccacgggaaatattgcccagggaccggtgatagccggacgccatgtggatcacctgaatgtgcagctgcccacgctgcccaatggcttgatacctggcttgcagttggcacaaaagcgcagcgatgtttcgtccagtcagctgcagctgacggataccaagggcaagaacaacttctccggatcgggcaaaagtcgggaacgggccttctatgccggacgtacttcatacgatgttccccagagcagcgttggtcgactgcccaacgatatcacacagcaactgcgacgccggttgcggcgcttctgaacgagattttgagacgaacgagctaggactagtaccttaacttatagctaaattagtaaactatttatgcctaagctaagactacaattgtaccatatatagatcacttttttaaaaatcatactctactcgtatgtatgtgtgtgtatatttttgcatatttattgataaataaaacgaaaaaatttacaaaaacccgaacaagttcgccctcctgttgcatgtgagattaagtttttattgtttatacgttttagagttttaaaattatcagcaatacgtacagaccttaccgaattacgaatacaatacaaggtttcattttgctggctttaactgttcacttaaataaacattactaatattcttatatgcatattatattgttttacaatattccatttttaattgggcttcgaatgttctcgcttacttggtgtcaaacattttctatttataagttgttttactgcaacttcacatcgcatatacatatcaattggaatcgcccatagctacttcagttaccttgattactcagttgaatatcggtatggcatggagtatttgttgatacaaacagactgaattcaactaaaccgaattatcaagaggcgtatgtgtgatgcagatgggtgggcataggacatgggctggtggttttaaaattagttagaactaaaaggtactaatgtaaagttctggactatgcgaaaaaataatttaggacgtatcttaaacataaacaactaaaggtttggggaagggaacctaactataacgtggcaaacgctttgatatcgtctatgctgtgcgtcaagccttaaaatgtacagcgaatttatacaaaatcacttcttggattacgaaatgccctcctggcgacgacggcggtcggaaacttatgtacaaagcttaagtaaatgatgcagcgagctgcggattcggtagggttttggattcgcagtcgggggtctggggatcgtgcctttaacgctcaacgcttggcgaccaggcggcatttct

SEQ ID NO: 12125 - DNA, 3644 bp, DROSOPHILA
atgtggccacccagctcctgtctgtggttggctctcgccctcctggtgggcgtggcccaggcccagagcggcagtcgagagcacttcgaggatgcggacaagtccagcgagtatacggatcagcagttcgatctacggcacacgattcccggagaaccgggcctagactatcccattctaagttcgccgccaaggaccagctttgtgtgcaagggaagacatgaaggttattacgcggatgtagaaagtcgctgccaggccttccgcatttgtgcccataccgcccgatcaccccaaggattcggtttcctctgccccaacggaacgctcttcagccagaagaactttgtgtgcgattggtaccgcaatgtgaactgcgatgattctgaaaagtattatgaaatgaacgaggagaaaaccgttggcagcacccacgaaatgatggagcgagtgcgtcacatgatggaataccccatgaaaacaatttcaaaggccttgcaacaaacccaatcccagtcacagaatccacaccatagtcttagcaaggatctaagcggagctagtggtgttttgagtcaacctgcggccattaagctcaatgatcctgaaacccaagttgttggacgcggagaagacgtgaaaagtgagccattgagtgcagtacaactaggaagcattaaccccggggacagcgaagatgagggtatttatgtgaatagtttgggagaactttcgtcagatccaggcattcagtttgatcacaccaatgcccatatcgtggcagaatatcccagggagtaccactaccagaagcagaagaactttgccgagcgtgttaacgcgggcttggatatcctaactgactcggaatccaactccggtgaggctatggcacccgattacatcaagcatataagaaatactaaggacgaggccgtacaactagatctggtatcgaatataaacaatctgctggatgaagtatccactgatgtggatccctccatttccggctatcaatctatggcaccgccgaaagttaagcaacctttccgattcctaagtcgtggattctccatgcagcgtgaaaacggaaagggtagctcatcttccggttatggctacattaaacccaaacaaacgcccagcactgtcagatttacgcacacgtttcccaaatcaacaagtaccagcagcaccacttcgacaaccactgagtcagccactgaatcaatagaacatctgctgatagcaccaactttgccacccgctgaggatgaggaagttagtacgctagtggcatctgaggtcacctcaaccccagccgcggaaccactcaaagttttggcaccaccactatcagaagtggtgactgccggggaagagtcggctatcgaatccattggacaggcagctgctctcactgccagtctgcccataagtgaggatatagtccgagtggagcaaagttccgaagcctctgagaagaatgatgcgcatcaagaggctgctaagctgctgctggcaggtgtgcaactgacctcccacaatgatgagcagcatttggaaaggaacgaagtagtggtcaccagtacgacaaccgctagccccatcacaccagtcatggtcacatccaccgaagtggtgactgagatcagtagcacacaggaacggattcgtggctaccgcaggaatcgaccgggagttatgttgaagcgtgcccacattcgccccttgcccactgtgcgaacaactacagcggctaccacgccaaggagcacaacacccactagaagttacctggaacgcctggctgccagtaggttgcgactttctagactatctcaagccaccaggagcaccgcaaaagcaacaacgaccttgccaagcaccacaactaccccggccacaaccactacagtgtcgtcattccaacaaattcgcggtggagcagaaccaggtccaaataagaggctaacagtgcgcgatattgatcgcgagactaaggtagcgccaagcaaggccaactgggaaaccgtccacagcaacctgcaacgcttccaggtgcaacgcggcaatcgagtgtacacgccagcgacacgagcctcagtcggtagcagcaatgcggcaaccaccagcagcaccaccagtgctcctagatcctatattgcggccacatctacgcgagccaccgttaatgttaatcgcggaaagaatcgctactccaacttcaagacccaggcgcccgtgcaaagaactcggggtaccaccaccacgagcaccactcagcgacccacatcctcgctctcctcgctgaaccaacatatctccgccctggcatcgaactataatggtggctatagctacaaccaggcaacgcaaatcagcaaacccataccacaatcaccatcacatgtctatgccacacacacggccagcgatatcgctgggcacgcctctcaatcccaaaccacatccagtcttacgcccgcctccgctttcctatcctttgataagttaacccgtgccattgttgacgaatccgttttgcagaattttaagagtgcccagtcgcagggttccaatcaagcgcagcaaaaccagcgccagcagcagcagcagcatcaagtggccaagcagcaacatcactcggttagcagcagctatgtgaagccagcagcagcgccagctatttccagtctgactgtaccacaacgaccccaacaaacatcgcagtcatctgtgccgccaggaattgtgattgctcgagctgagggccagcgtattgctcccaactccgccagcagcatcatttccagcttggccactcaagcaccagtgaccagcaaccagggcaactcctatgtctccctcaacgatttccttaacaacaaatttggtcagagtcctgcagccagcagtaatgttcattctgctgccactttgcagcaggaacaacagccacattatcagcagcaagccactctgtccttgcagcagcaacagcaacagcaacggcaacctgtgctgcagcagcaacatcagctcgtgcaacagcaacgccagcctgtgcagcagcaattgagctttatctcgcagcaataccagcagccgcagcagcagagtatctaccagcaatataaacagccacaacagcaacagcagcagcaacacttccagcagcagcaacagcggacgacgatccacaccaatcagcaaccctatcttacgcccaatatctttgtgccctaccatcagcagcagcaacagttgccccagttcccgccgttggctccacccgtgtcgatatccacgggaaatattgcccagggaccggtgatagccggacgccatgtggatcacctgaatgtgcagctgcccacgctgcccaatggcttgatacctggcttgcagttggcacaaaagcgcagcgatgtttcgtccagtcagctgcagctgacggataccaagggcaagaacaacttctccggatcgggcaaaagtcgggaacgggccttctatgccggacgtacttcatacgatgttccccagagcagcgttggtcgactgcccaacgatatcacacagcaactgcgacgccggttgcggcgcttctgaacgagattttgagacgaacgagctag

SEQ ID NO: 12126 - protein, 1205 aa, DROSOPHILA
MWPPSSCLWLALALLVGVAQAQSGSREHFEDADKSSEYTDQQFDLRHTIPGEPGLDYPILSSPPRTSFVCKGRHEGYYADVESRCQAFRICAHTARSPQGFGFLCPNGTLFSQKNFVCDWYRNVNCDDSEKYYEMNEEKTVGSTHEMMERVRHMMEYPMKTISKALQQTQSQSQNPHHSLSKDLSGASGVLSQPAAIKLNDPETQVVGRGEDVKSEPLSAVQLGSINPGDSEDEGIYVNSLGELSSDPGIQFDHTNAHIVAEYPREYHYQKQKNFAERVNAGLDILTDSESNSGEAMAPDYIKHIRNTKDEAVQLDLVSNINNLLDEVSTDVDPSISGYQSMAPPKVKQPFRFLSRGFSMQRENGKGSSSSGYGYIKPKQTPSTVRFTHTFPKSTSTSSTTSTTTESATESIEHLLIAPTLPPAEDEEVSTLVASEVTSTPAAEPLKVLAPPLSEVVTAGEESAIESIGQAAALTASLPISEDIVRVEQSSEASEKNDAHQEAAKLLLAGVQLTSHNDEQHLERNEVVVTSTTTASPITPVMVTSTEVVTEISSTQERIRGYRRNRPGVMLKRAHIRPLPTVRTTTAATTPRSTTPTRSYLERLAASRLRLSRLSQATRSTAKATTTLPSTTTTPATTTTVSSFQQIRGGAEPGPNKRLTVRDIDRETKVAPSKANWETVHSNLQRFQVQRGNRVYTPATRASVGSSNAATTSSTTSAPRSYIAATSTRATVNVNRGKNRYSNFKTQAPVQRTRGTTTTSTTQRPTSSLSSLNQHISALASNYNGGYSYNQATQISKPIPQSPSHVYATHTASDIAGHASQSQTTSSLTPASAFLSFDKLTRAIVDESVLQNFKSAQSQGSNQAQQNQRQQQQQHQVAKQQHHSVSSSYVKPAAAPAISSLTVPQRPQQTSQSSVPPGIVIARAEGQRIAPNSASSIISSLATQAPVTSNQGNSYVSLNDFLNNKFGQSPAASSNVHSAATLQQEQQPHYQQQATLSLQQQQQQQRQPVLQQQHQLVQQQRQPVQQQLSFISQQYQQPQQQSIYQQYKQPQQQQQQQHFQQQQQRTTIHTNQQPYLTPNIFVPYHQQQQQLPQFPPLAPPVSISTGNIAQGPVIAGRHVDHLNVQLPTLPNGLIPGLQLAQKRSDVSSSQLQLTDTKGKNNFSGSGKSRERAFYAGRTSYDVPQSSVGRLPNDITQQLRRRLRRF

SEQ ID NO: 12127 - DNA, 3868 bp, DROSOPHILA
gtgtttacggggggccgcaacgttacggggcccaaataagatggctaaagggtttcctttttagctgacaccaaaattttccactctttgttcgcggcgcacgggaactgcggggggcgggggcaaggcggatgatcgcagtgggcgggggtagcagttatagcacaaacaaacgaacgaacacagagccgatcgaaaagcagctgcgcgtgtggaaatatcacgaccgattggctttcgtttcagatgagcagtggtgctcgctgctcttgttcttcctcgacggtccccaaatgccattcgcagcgaacgacgaaagctccggtcattaaaaaaaaaaaaaaacaacggcactctggcgccgcacttaatttattttcatctttttaattcgaacttgtataatttacgctaaacatgtgtgataatccgagacgtctacaacagatgtgacattaatatgtgttatattttataagcagcatactttgagagccccttcagtttggaatacccccattattaatgtaagccgcctcttcgggatcaattggcttgcgggcaaatcgtgccggcagctcgtagtcctcaattgctggtccaccggccaactaaatgtagaagggacaattacgaagattagttatgatgcacagaagaagccgtggtattgtgtataaatgaaatgggctgggttaacctttttgcctcctgcggcctgggaacttgccttctggtttgctgtctgggcgcccggcactcctgcaccacccttgcggaagtgtatgagcggtacgcgcttagccagcgcaactagtgttggtcgaaccatagcaacagcaattgaatttctaccaaaaagccaaggcaaaagtaaaagttacgtgaataacagctgactgtaaactcatacaagcgctgccagatcgttaaaattgcatgccattcgccgcgcaatggattattatcgttattgaaatttacgtgatcctgtgaatggctaaggcagataagaggaagcgcaaaaaactattttggtccaaatcggtaatatttttatatttaaaatgaattggggacagaagataaccggcagccgacggccctaacttctggacggacatcgccagtatatggattgctcctaaaactagcaaaccaacgtacttatgctctatgcaacaataaatgtcatatgaaaacaaactattgaagacgtttttatgagtataaccggtaactatttcatttgtttattatattaatgacaaataaacttatacgtaaacattcctttgatagattttcatgtgtatatccttctctgtgcagaaaaacgaaattaaagtaacatctcggatactttcgcagcaattgtataagccatacaaatatgaacgctgctggaggaggtagtggtgcccaggcggccgcagtggcggcaggcaacaacagtctcagccacaatgcgctactttccacggcctcaggagccaccaccatgcctatggcccaactggcagacggttggttggagctggagtccgacccaggtctcttcacactgcttctcaaggattttggatgtaatctatttgaatatgccttgttccacacatcctattaaaatatgtactatccttaggtcacgatgtacaggtggaggaggtgtacgacctacagaaacccatcgagagtccatatggcttcatatttctcttccgctggatcgaagagcgacgcgccagacgcaaaattgtggagacaactgctgagatattcgtcaaggatgaggaggccatttccagcattttcttcgcccagcaggtagtccccaatagctgtgccacacacgcgttgctttcggtgctcctgaactgcaacgagaacaatcttcagctgggcgacaccctgagtcgactaaaaacccacaccaaaggcatgagtccggagaacaaggggctggctattggcaacactccggagctggcctgtgcccataactcacacgcaatgccgcaggctcggcgccgtctagaaaggacgggagcgggcgtctcaagttgccgcttcacgggtgaggcgtttcacttcgttagctttgtgcctatcaatggacaactgtttgagctggatggcttgaaaccgtatcccatgaatcacggcggttgggaggatagcgaggattggacagataagttccgacgtgtgatggctgagcgactgggaatagcgaccggcgaacaggacatacgtttcaatctcatggccgtagtgccagacaggcggattgccataacacataaacttaagatgctgcgcacaaaccaggcaatcgtgtccggaacactgcagaaacttctaaaggccgacgagcagggcgaatcggggaacggagactcacaacgtccggatacacccaccacattattggagccgagcgctttcaccgcacgtgacctgcaatcgcttctcaagaacctggacacagaaatagccatcaatgagcagcatctggctgacgaaaacgatcggaggcacatgtttaaggtggacgccagtcgacgtacccacaactacgataagttcatttgcactttcctctctatgctggcccaccagggcgtcctgggcgagctggttagccagcatttgcttccgtcgaagaaggtcagtggccagggtgctgccaatcggatcagcaagcagagcaccaccgccagtgcaggcggaagcaccgcagcaggcactgcatccacgcccaagactcagcaacagcaggctgcggccgctaagaatggcaagtcgccaagcaaaacgccaggcaggaggcgaaagggacgcaacaagtgcagaaaacggaagtaggcgaccagacgaccagcatgtacatgtttttaagaatacagtttgcatttttaagaccattcattccagtattgtttttctacaatttccccaccaagaagcaccattaacccataagatcgtataagtttagttttagtaacactcaaatgcggttcttttaaatacgaaatcaacttggcagcttcatttttatttgatcgcaattcgatctttttaataataaaaaaccattttgttcgtatgaatcgtttttcatgtggtccttgatagacgaaggacccaaatgtgtatgcattacatatgaataatatatatattttctgatatatatctatatgatagttgtataacaaaaacgtaatccttcaataattcctctggtttttttttccaatcgggtgaatcctaacgttattgtaaaatatttagtcgcactcgttgtaaagttgattcaacaaaaacaatgcataaaacaagagaacgctatagtcgatttgctcgactatcatatacccgttactcaactagtgggaggtggcaggaagatatctctaaaatttgttggcataacggcgaatattgtaaaatagtatagaatggtaaaatagtaatataaaattactgctttttgcggttaaagtaacaatgttttaaaacaactaagcgtgacaagaagcaagtattcctcatgtcaacattctagcttttctagttcgtgtttctagacagacggacgtgtctggtgatcccgatcaagaatatatcttcctgctacaaatctttcaacgaatcatctagtatacctagagtaactaagagtaacggatgtgattacgtgcaatcgattacaaactataaaaggcatttgacgggtttgcaaatggtttggcaaaacatacatgtgtgttagagctaggcgactttttgcgttcaaaaacaagtcaactttctgttagagctgatttttctgtgatatctgtctgtaggttttggatag

SEQ ID NO: 12128 - DNA, 1743 bp, DROSOPHILA
ctaaggcagataagaggaagcgcaaaaaactattttggtccaaatcggtaatatttttatatttaaaatgaattggggacagaagataaccggcagccgacggccctaacttctggacggacatcgccagtatatggattgctcctaaaactagcaaaccaacgtacttatgctctatgcaacaataaatgtcatatgaaaacaaactattgaagacgtttttatgagtataaccgattttcatgtgtatatccttctctgtgcagaaaaacgaaattaaagtaacatctcggatactttcgcagcaattgtataagccatacaaatatgaacgctgctggaggaggtagtggtgcccaggcggccgcagtggcggcaggcaacaacagtctcagccacaatgcgctactttccacggcctcaggagccaccaccatgcctatggcccaactggcagacggttggttggagctggagtccgacccaggtctcttcacactgcttctcaaggattttggatgtcacgatgtacaggtggaggaggtgtacgacctacagaaacccatcgagagtccatatggcttcatatttctcttccgctggatcgaagagcgacgcgccagacgcaaaattgtggagacaactgctgagatattcgtcaaggatgaggaggccatttccagcattttcttcgcccagcaggtagtccccaatagctgtgccacacacgcgttgctttcggtgctcctgaactgcaacgagaacaatcttcagctgggcgacaccctgagtcgactaaaaacccacaccaaaggcatgagtccggagaacaaggggctggctattggcaacactccggagctggcctgtgcccataactcacacgcaatgccgcaggctcggcgccgtctagaaaggacgggagcgggcgtctcaagttgccgcttcacgggtgaggcgtttcacttcgttagctttgtgcctatcaatggacaactgtttgagctggatggcttgaaaccgtatcccatgaatcacggcggttgggaggatagcgaggattggacagataagttccgacgtgtgatggctgagcgactgggaatagcgaccggcgaacaggacatacgtttcaatctcatggccgtagtgccagacaggcggattgccataacacataaacttaagatgctgcgcacaaaccaggcaatcgtgtccggaacactgcagaaacttctaaaggccgacgagcagggcgaatcggggaacggagactcacaacgtccggatacacccaccacattattggagccgagcgctttcaccgcacgtgacctgcaatcgcttctcaagaacctggacacagaaatagccatcaatgagcagcatctggctgacgaaaacgatcggaggcacatgtttaaggtggacgccagtcgacgtacccacaactacgataagttcatttgcactttcctctctatgctggcccaccagggcgtcctgggcgagctggttagccagcatttgcttccgtcgaagaaggtcagtggccagggtgctgccaatcggatcagcaagcagagcaccaccgccagtgcaggcggaagcaccgcagcaggcactgcatccacgcccaagactcagcaacagcaggctgcggccgctaagaatggcaagtcgccaagcaaaacgccaggcaggaggcgaaagggacgcaacaagtgcagaaaacggaagtag

SEQ ID NO: 12129 - protein, 471 aa, DROSOPHILA
MNAAGGGSGAQAAAVAAGNNSLSHNALLSTASGATTMPMAQLADGWLELESDPGLFTLLLKDFGCHDVQVEEVYDLQKPIESPYGFIFLFRWIEERRARRKIVETTAEIFVKDEEAISSIFFAQQVVPNSCATHALLSVLLNCNENNLQLGDTLSRLKTHTKGMSPENKGLAIGNTPELACAHNSHAMPQARRRLERTGAGVSSCRFTGEAFHFVSFVPINGQLFELDGLKPYPMNHGGWEDSEDWTDKFRRVMAERLGIATGEQDIRFNLMAVVPDRRIAITHKLKMLRTNQAIVSGTLQKLLKADEQGESGNGDSQRPDTPTTLLEPSAFTARDLQSLLKNLDTEIAINEQHLADENDRRHMFKVDASRRTHNYDKFICTFLSMLAHQGVLGELVSQHLLPSKKVSGQGAANRISKQSTTASAGGSTAAGTASTPKTQQQQAAAAKNGKSPSKTPGRRRKGRNKCRKRK

SEQ ID NO: 12130 - DNA, 2927 bp, DROSOPHILA
cgacagctgggaattggggaacggtgcggctggagggaaaggcgacctaatctttctgggaaggatcctgcacacgaatttgctaactccggccggacagccgctgctctttttcgcccataaacaagaccgcacgcacttttttcacacaccacccacacaccaacccactcggaaaggcaaaaaaaatttctttcgccgctcttgtggtccttgcgcgaacagtcgataacacaacctatcggacagatgacagcgcgttgttttgcacgctacgccaaacgcacgcggtctttcgcactgccgaacgtcctgacaacattgtttattagccactgttccatgagcagtcttgtcaaagaggtgttaatttattatggcgaagacacagttttcttaactatctctaggggcggggatgctagattgtacctcttaattttcagctgtagcgcattgcgaattcgttgcgactgcgtgcaaatttttcttgttttgggtcgaccagcgcatgcaaacgaaaacgggctctaaaaagcatgagccggtgccgttattgcggcaaacacatcgcgccgaacatggagacctaactaaatataattatgcaagtgccgcaactttgtttttgtgtttttttcgtgaattttaaattgttaaaaacaaaatgtaatttattagagctggaactgaaatcgatatctattcgatactatcgatttttaggcttgttaagaaacatcgatgttatattgcaactatcgactatttccttggtcacattttccaaggaatgacatttaagtaaatagtccttagaattccaattttaaaatattttgcagtaaatgaacatattaacgaagtgagatgacttaaacggaatatttgtaagatctatcgtaataacgaaacagttactttggtgaaacagatttgttcagccctggtcatgtcgcaaacgccggtaagtgcaacattaagatcgtaatgagcgcgggaaaacgtggagcgttgataatatttgaaggatgtgatcgaagtggaaagaccactcaaagcaggctgttgggtaagttacggagacctttaaggcccagcttataatccgtatccatttttagttgaactcttgaaatcgaagggcattccgacattgcccatgaatttcccggaacgcagttccagcattggtcaggtgataaactcctatttaacgaacagcaaggatcttccggatgaggtgattcacttaatgttctccgccaaccgctgggagcacataaaccaggtgaaggagaagctgcttgagggcaccacattggttgtggatcgatattcgttctctggcgtggcatatagcgcagccaaaggattagactttgattggtgctatgctccggaaagggggctcataaaaccagatgctgtattttacctaagagcaccaccaaacgaccttacacatcgaggacaatacggcaaagagcggtcagtgcaacatctgcattaaaatgattatcaagattacaataccatatcttataccattgcagttatgagaaagtagaattccaaggtcgtgtggccgaagtattcaaccgcatttgctccaaggagggcagctattttcaccagttcgatgccagacagtctgtagaggatttacatgcccagatagcgagcattacggaggaactcctgcccaaagtggccacccgacctctggacacgttatcgtagcacacgtcctcgcgtcgccattcattagaggggatttacattgatttatgcaatacacgaatgtttgttataaatgttttaaatgccgcttaacttttaatttacgataaagccgcaggcaataaatcctagcatcgggcgattggaaggatatcgttaggtgttgagcgaaatgcatttacagaattgcacaccaaactggattaagcagggggattaagtgtaagccaggtggcacatgcaatttaatttccataatcccccttcatgaaaagccaatttttgttgctccattgtagttcgtttattttatacaccattactaagggactctctcttcactctaaatgctaagctaaagcgaaaaataatttatgcggatcaaacttagttgctaaaccaccaaaataagcacgcgaattcaattaggcgcaatccttcaaaactagttgaaatctgagctctcatagcccatatcctcgcgtcgactgcgaggagctggcttgggattcctcgtcctcagggtcagctggcggtagcccactcccggcttgtaatccacattgattggtgcatggggtcgcagactggacacgccggcccgtctcttctgcgcctgatggtagaaggctatatcgccgtagctatgcttcggccacatgcactcacaaccagagggcaccgtccgcgtctctgattcccagcagccggaggcgtcattcagtcgaatcagatggatggtgcggttgagctggatgcacgagaagcccgttgccgagcagatctaaatgcacgtaacgcaaaggtcatttaactgaatattcgctttctatctatgtagctcacctctcgtttctcgcttcgctcggagagcagagctcggagcagttcattgcccctgtaaccatattcatagttatagttcctcgagggctgcggtgagtagttgtgggcacatgtaacctccacatagtgattgggacggtaatcgccgctttccaacttcacggtcacccgatttgtggggcacaacgactgataggtgactacctgtgaatgggcaagtacattatatggagttcattattatattcaattaaattgagttacttaccccatctgagctgggattggggcccagaaatggtaccggtggcattacactgcgaacgcggcgcttgcgc

SEQ ID NO: 12131 - DNA, 810 bp, DROSOPHILA
gaaaacgtggagcgttgataatatttgaaggatgtgatcgaagtggaaagaccactcaaagcaggctgttggttgaactcttgaaatcgaagggcattccgacattgcccatgaatttcccggaacgcagttccagcattggtcaggtgataaactcctatttaacgaacagcaaggatcttccggatgaggtgattcacttaatgttctccgccaaccgctgggagcacataaaccaggtgaaggagaagctgcttgagggcaccacattggttgtggatcgatattcgttctctggcgtggcatatagcgcagccaaaggattagactttgattggtgctatgctccggaaagggggctcataaaaccagatgctgtattttacctaagagcaccaccaaacgaccttacacatcgaggacaatacggcaaagagcgttatgagaaagtagaattccaaggtcgtgtggccgaagtattcaaccgcatttgctccaaggagggcagctattttcaccagttcgatgccagacagtctgtagaggatttacatgcccagatagcgagcattacggaggaactcctgcccaaagtggccacccgacctctggacacgttatcgtagcacacgtcctcgcgtcgccattcattagaggggatttacattgatttatgcaatacacgaatgtttgttataaatgttttaaatgccgcttaacttttaatttacgataaagccgcaggcaataaatcctagcatcgggcgattggaaggatatcgttaggtgttgagcgaaatgcatttacag

SEQ ID NO: 12132 - protein, 171 aa, DROSOPHILA
MNFPERSSSIGQVINSYLTNSKDLPDEVIHLMFSANRWEHINQVKEKLLEGTTLVVDRYSFSGVAYSAAKGLDFDWCYAPERGLIKPDAVFYLRAPPNDLTHRGQYGKERYEKVEFQGRVAEVFNRICSKEGSYFHQFDARQSVEDLHAQIASITEELLPKVATRPLDTLS

SEQ ID NO: 12133 - DNA, 8401 bp, DROSOPHILA
aaaatacaaagttgtaacagggcaagacaacatttatatagtgcagcagcagtcagtcggttgatgctacatctacagctcggccacaaaacctcgtcagcacaatcacagcaattgctggcggtgcccagacggggaatgcactgagagaaacgggtggaacaatgtaggccatctaactgaatgagcaagttatgctagaaagtaaagcttatagaaagaaaaagcaataaatctcaaatgctaaccctaagttattaggcttttttaatgacttagggaattcataaatttcctgaaatacacaagattattcttagatacagtattttcgctctctgtggaaatgaaatgggaacgggactgggactgggactgggattgggttggagaatggtactgggagcgatggtggggagttcagcaataatggggaaccactgacagaccagacagccagtagtccatgtgagccgggactgcggcggtagttgcacaattttgcacaaaagccaaagcataatcatgaataatgagcgtttgtgataagtgataaatgcccggtggcaaatgcacagggaattcaaatataatggaaattgtattcatcggcttggcctgggaaaacttttaaaatggatcgatattacaaaatttgcataatacgatttttgaggctcgttcaaagtgagattttaaaattgtatatttttaataatattcaatggttttttatgtattcggaccaaatttaaatatcttctgtatttgacatactttgtaccacatttcgatacacccttttcagaactttaccaagtcctttatggatatatgtacttggcatcgcagaaacaggttcccatccgatttcccaccgggcagctctgagcccgtttttctctgctacccgcccgacttttctgttgtctcaggcttttgctccggtcttccagtcgggcgacttgaccaccccttggactcacagtatggttcggatcgggaatcggtgcggttcagttcggcttggaaatgcgcgccaaaggtgctaagctcgataaaaataaagaaataacaaatcacttaaaggcaacgcatatttaaacgtgtttgagcttagggaaatgttcaagattcggcggaaaaaattaaattagattgggagtttttctttgactcaatatgattggtgtttgtcgcagttcttatctgtggacttatttacgtcgtagtttgccgtctagttttgtcaactttaattgaaattaatttactttcttcacattctatctgccagatacagatacacgtatccgtatctgtgtgcacatgccgctaagtgaacagccttgtatgcgatcagatttgagcgcagaggtcagcaaataaacaaattgtcgcacattatggtttgttagacagccacgattcgtatgcaaaataagaatagaatgggagagggcccatcatgactagaagtgtgcaaattcaacaattcctgatacccatcttctggctgggatctcgtcgcaaaagtgccgccctttacgggttttccccagactgcaatctcaatcagcgaatgcaaatcgcagcgtgatgaactcagtcaaagtattcttttttttatatatatatgtatagccgcatagatatagatattcgtatttatagaatggcgaaaaacgcgatgcgatttgcatacaaatcacttgaatacccgcatttagtcgcacagacgacgcctggaatttcaataagttaaaagtttgcaaactaatcaaaatcaccgcctcttcttccagcacttgacaattatgtaaagcttctctcgccgaaaacaagtttgcaaacaacaaaaaatgaataaactcgtggtaccgtaaaactatcaaaactgaaactaaagaacaagtggcaacaacccaaccaactcaaagaaaacaactaacgaaaactctccaaacaaaagtgctagcaattaaaaataatttctcagttccctaacgagcaagaatagaggaacacgaaatttaataaaacagcaaccgaatctctcgaatgtcgcgcaaaatgttgcaagtgccggtagcaacacttgtgttgctgtcgctgctgccgattgcccatgttgctgctgcctcagccactgccgcagatgcaacagcagcaactgcagcatccacaacgtcaaccggaatcgatgccagcctgaagaatgccaagctgattgaggccaaagtgctgcccgacttggccatcctgcaacgcgttaaccaggaagacgaaaagtggcagcaggtctaccggttcatcgacgatggctttcccgtcctcgagttgtacggctacaagccgctaccaggtgagtttccatcatgggaaacttaagaggcatacaatcctaaacagtggatattattatacaatattattgattgcggtacagaacaagtatcgttcattaattggtttcaaatgtatacaaggtacagaacaaatatcattcattaaatattatcaaataatttttgaatattaaaatccttagattatttagcttgctaagaattaacttagtagattacaacaattttttatagttcacagtcttgaaatgcttaagcctagcggtgctgttgagcaacatggcgtttgtgaacatggcgaaggaccatcccaatcttagcatttctaaaatgtgtcccctatccaggcgaaaggcattaaagccacttttatccacagtcgctctcatcacgtgcatgtagagccacatcatttgtgtctgcaaaataaaatgtcaatacctattttattttgttgttgaaaagattggaaaagttcttgctcacctgtcgctgcggtttaaagctcgctctaaattgaccgaatgttttctcgatggagctaatggtcacatttatgtggagcagggctaccggacatatgaacgagctgagcagactctcgccaaaatctatggctgattgctgatcgtacaggatcaagtggaagttggctatgaagatgaaaaagctgtgcgctaaagccgtccacacaaaggacctgaccaagcagtcgaatgcgtggcgaagtctgatgagctgtctgtagaagacgaagagctggaatgatttccttcgattgtgaggcacttggatgtcgtagcaggcatagagtagcatgatgcccaagtaggccaccagtgacaatagcaggggctgaatgcacacaaagattactgcagacagtcccagtaatatgtcaacatttgggctgatgcccaaacccattttttggtttccaacaatcggcgccatcgaagcgacaaatgccctataggcttggatgccaaatagaagccagttaattttcggcactttaccgcaaattctctcgtagctataatagatccttatgaattcgttcagaacccgtcgcattagcttttgatgatgcctgtaattgggagataattaacaatacattaatgtttttcaaagtgaatccatcacaattatagaattataattagacatttcaacatcaaattctacctgtagtgataggcaattcctgtgctgatgaaaacatttcgatatttggcgactgtcagtcctatttcgtaagtgagctgaagtgacctctcactcccaggcgttagatccgtcagtcccttgcgaaactccgccagccagaatatgaggtgcatcaggaaggtcgtcagcagatatggccttagccagaatctgtgcaccgcccccacaagcaaattaatcttcgggttcactttgaatacccgcctgccttcgatgtatttgtaaatgttgcaacccgaaagcgttgtcagcacttgcagcagctgcagaacgctcttgaggcaggacatggcgctactgacttccagacagtctggaaaactcccaatagcagcaaaatggaaatgcgtgacattgacaaattacttcgttcaactgtccaaatgttgatcataaacaaaaacaagagacaccgcgatagtatcgtcgactatcagatacccagtactcagtcaaacttagggcgacagaatgatcaaataaaaatttgacatttaggcaaaagataatttcatttacatttatacaaaatcttggacaaagcatagccagatatattcctcaatttgtagatagcttggagtgtcagtttattgtagtatttctgaataagaatacatactttgttctacatgattaactttttaccaaatccaatatacccaattttcaccatttccatttaagttgaggcatggaaaaaatcaaaaatcatcgagttagagaatgtttattaacatagatttgttcaacatttattgtttcatttcacaaaaaaatatgaaaaatcaggtgcgacttatatttttattgccgaaaggcatttttttaatacggcaagaaatattaaagaacttatatatcatacgcactgtcaaaataaaaaaattaactataaagtaaaattgactaataaaaagctgctgactgcttaaaatgccgtatagtaaaatttgtgtatggtttttatacttgtaatgccattcaagtgaataccaggtatagtaattaagaatcattgaaatatgttatgttagttaactgccaacataacagttcacaacgcctatgccatactaataccggttaattaaagccacgaatttccgccgactacacacccaccaaaaaaaaaaaaatataaaaagttatgtacccgcgacagggcccaaagttaattacatgattagcatgcagacaggtgagggattcaggtgtggtgagcgcagcacttagccgtaaatgaaacgaaaacagtttacatttttaagcgagcaattccctgggtaactgggtaactaaacctccgtctcctttgcatgtgcgattccggtggacatgatccggacagacctgccgtacacgttgattgtgcccaaaatcgatgtgcggagcattgagaagccgcgactgaaggagttcatgttggaacatgtggtgcctgggaaaatcttcgacagctacaatggtaatgggaacagcaaggaggaggaggagtccttcggcaatgggaacggacacaaaatcgttttccgtaaattggaaaaatcccacaacaatgtttggctactcaatggccagcaaatactccacaagctgcgtatcaatgagaacctgatggccattgcaattgatggttatttgggcgataggaagtcgccctactccaagcgcaatatccaggaaacgaacaagtgagtaaggccaccgccaccctttccagtacagtgggctgaaactatgccataaacgtgtccatttcataataggttcatttatttaaagtacacgtataaaaaatgttttaaatagatacagattggcaacatttgagaaaatgtattagatattattaaataaaccaagggatttcatagacattttttaaacctatcctttttagggcctatgctgaaaccactgtagagcacttctgctgaattcctagtcctagtttgtttgcggtcaaaagtgcactcatgcgaaatttatcaggcggcaaacaaagttttcgctggtccaactttccgcacacacacacacacactccaacttttgagggtttcctcttccgcaatgctaaccgaggccatctcaatctcaatctgtggacctagttccaccacattcccataatcatccactgaatattcgtcgcacataaaaacgattcggtccatgattttccatttaagaaaattacaaatatttcttttggtagcctaaaaaattcagattttccgggagtaaaaaatactataaatttagtaacataatttgatgatttgtgatgcccattttttccctgtgcatcctgcagccgctacaacgaccctcagccgctggagcagccgaacattacgaatgcacatgcaaaggtggagcccgttatcaaggagtcgaaggccagtccgctgatgtcctttttggcaaacatgaagaccggcaccaaggtcttccagcacttcctctccaagagcaatctgacccgcatcatggacgacaacgcgtatacggtgctgattccgtcggacaacgccttccagcgctggcatcccatcgactggggattctatccgttttccgtgccggaattcactgagtcggtgcttagaaaccatttcctgcccatgcagcgacccctgcggctggccgatgttcggaacatggacgaggtcgtcgtgaccaccatgggtggcgaggatgtcgtcttccacggccaacgtaagtggctcccataaataatattcccaaattcaatttatgacaacggcatgtggcccttgcatcgttcgatagccacccccacggtgaataatgtgagcattatgtccgactacaacctctccaatggcaatcaggtgttcattatctccgaggtgctcttcgtcacggaagctgtcgtctccaaattgcaccaggtaagctgattatgcataatccgcactggctaaatttcaatttcaattattccgattcttttagatgcacaaggataaggagacacctccgttgctggcattcccctggtttggagcacagttcctttcccattcatttttggccttggagagagatccacgatttacccagattaccaggtaaaaattcgatttctaaataaataaaattaataaaaaaaaactttccaaaaagatatttgaacagtgccgagatcgccccccacatttccggcgccaattacacgttctttgtgccagaggatcgggccttcgagaagcaaggattcgacaagctatcagatgaggtcatggtgagtgcggaatacattgtcaacagttgagtaggaataacaagatacttctaggcctcacaacgcggcgtaaaaatgctgctgaaccacttcgttaagggacgactgtataaccgtgatctgcgcgacaatgaagtctttgagacgatcggcggaggccacattaagatcacccgtaacccgggtagcaactataccagcgtcaataatgcccagattacggagagcgaggtgttcgtatacaacttgggcaccatgtactacctggacgacatcctgtactcgcacatgctgcgcgacttcgtaagcaagtccaccaagacgagatccaatcggcacggcagcgattccggcggaggatcacggagcacctcgcggcccagcgacgtggaaatcgtgcccaacgagttcgagggggagcacaatggcggcgactatgccatccacggtgatgacgaggacttcgaggatgagattatcacgcccaaggcgctgcccgtccagatctatgagttgcccaagtaaagggcgggatcatgacagctgggttagtgtcagagtatatatatcgcgatggtaaatgcgaaaataacacaggcggcactttgagattgtttttgggatccctcaatcggccttcgagtcttgtatcagtctatttccgaagtaggagacattccaggcccttcgacaattagtctattgtcgctttatattattttggcaattaattagcagtatgtacaatatttttttgcaattgatctgcgttagaggaacgaatgtgagagggaggcgagcgctaaaagcgtttttgtatagttctgggctaattttgtaacgaatttttctagtttagttcttagtttttcatgtatgttttaagtttagcattgaacgaggcggtgaaacgaagtatactacaaagtcaacatcaagagcagcagcagcagcgacaacagcaaatatataaaatctaatcctaaagaacttatcagcgatttagacaaagcttgtagacatagcgagaaattgcagccaacaaattactacaaatatttaaagagtaaacgagtaagaataaagcattcccgtaatattggatttagaagcaaaatttcaaaaaatataaaaatatacgtatactatgcacattagcgctcatcagtgtttatgcttttttgagtctatccatatgagggagcataggaaaacatatcggctaaatcggcgaatcgagcctagagcgaccaaaattcaaacgcaaaaatccctggcatgatatatctatagaacgagtatattacgaacagatattgtattttttaatttacggtattgatatttaatgtatctgtgtatatgaacaacaaagcaatgagaacggagcatccaattttataatagtttgttaaaataaaaacaaaaatcttccagaaaaataattccagtcgcatagcatttcgttgaactattttattatgaattagttaaactcaatacatttgtaagtatgattatattt

SEQ ID NO: 12134 - DNA, 2179 bp, DROSOPHILA
cgggaatcggtgcggttcagttcggcttggaaatgcgcgccaaagcacttgacaattatgtaaagcttctctcgccgaaaacaagtttgcaaacaacaaaaaatgaataaactcgtggtaccgtaaaactatcaaaactgaaactaaagaacaagtggcaacaacccaaccaactcaaagaaaacaactaacgaaaactctccaaacaaaagtgctagcaattaaaaataatttctcagttccctaacgagcaagaatagaggaacacgaaatttaataaaacagcaaccgaatctctcgaatgtcgcgcaaaatgttgcaagtgccggtagcaacacttgtgttgctgtcgctgctgccgattgcccatgttgctgctgcctcagccactgccgcagatgcaacagcagcaactgcagcatccacaacgtcaaccggaatcgatgccagcctgaagaatgccaagctgattgaggccaaagtgctgcccgacttggccatcctgcaacgcgttaaccaggaagacgaaaagtggcagcaggtctaccggttcatcgacgatggctttcccgtcctcgagttgtacggctacaagccgctaccagacctgccgtacacgttgattgtgcccaaaatcgatgtgcggagcattgagaagccgcgactgaaggagttcatgttggaacatgtggtgcctgggaaaatcttcgacagctacaatggtaatgggaacagcaaggaggaggaggagtccttcggcaatgggaacggacacaaaatcgttttccgtaaattggaaaaatcccacaacaatgtttggctactcaatggccagcaaatactccacaagctgcgtatcaatgagaacctgatggccattgcaattgatggttatttgggcgataggaagtcgccctactccaagcgcaatatccaggaaacgaacaaccgctacaacgaccctcagccgctggagcagccgaacattacgaatgcacatgcaaaggtggagcccgttatcaaggagtcgaaggccagtccgctgatgtcctttttggcaaacatgaagaccggcaccaaggtcttccagcacttcctctccaagagcaatctgacccgcatcatggacgacaacgcgtatacggtgctgattccgtcggacaacgccttccagcgctggcatcccatcgactggggattctatccgttttccgtgccggaattcactgagtcggtgcttagaaaccatttcctgcccatgcagcgacccctgcggctggccgatgttcggaacatggacgaggtcgtcgtgaccaccatgggtggcgaggatgtcgtcttccacggccaacccacccccacggtgaataatgtgagcattatgtccgactacaacctctccaatggcaatcaggtgttcattatctccgaggtgctcttcgtcacggaagctgtcgtctccaaattgcaccagatgcacaaggataaggagacacctccgttgctggcattcccctggtttggagcacagttcctttcccattcatttttggccttggagagagatccacgatttacccagattaccagatatttgaacagtgccgagatcgccccccacatttccggcgccaattacacgttctttgtgccagaggatcgggccttcgagaagcaaggattcgacaagctatcagatgaggtcatggcctcacaacgcggcgtaaaaatgctgctgaaccacttcgttaagggacgactgtataaccgtgatctgcgcgacaatgaagtctttgagacgatcggcggaggccacattaagatcacccgtaacccgggtagcaactataccagcgtcaataatgcccagattacggagagcgaggtgttcgtatacaacttgggcaccatgtactacctggacgacatcctgtactcgcacatgctgcgcgacttcgtaagcaagtccaccaagacgagatccaatcggcacggcagcgattccggcggaggatcacggagcacctcgcggcccagcgacgtggaaatcgtgcccaacgagttcgagggggagcacaatggcggcgactatgccatccacggtgatgacgaggacttcgaggatgagattatcacgcccaaggcgctgcccgtccagatctatgagttgcccaagtaa

SEQ ID NO: 12135 - protein, 625 aa, DROSOPHILA
MSRKMLQVPVATLVLLSLLPIAHVAAASATAADATAATAASTTSTGIDASLKNAKLIEAKVLPDLAILQRVNQEDEKWQQVYRFIDDGFPVLELYGYKPLPDLPYTLIVPKIDVRSIEKPRLKEFMLEHVVPGKIFDSYNGNGNSKEEEESFGNGNGHKIVFRKLEKSHNNVWLLNGQQILHKLRINENLMAIAIDGYLGDRKSPYSKRNIQETNNRYNDPQPLEQPNITNAHAKVEPVIKESKASPLMSFLANMKTGTKVFQHFLSKSNLTRIMDDNAYTVLIPSDNAFQRWHPIDWGFYPFSVPEFTESVLRNHFLPMQRPLRLADVRNMDEVVVTTMGGEDVVFHGQPTPTVNNVSIMSDYNLSNGNQVFIISEVLFVTEAVVSKLHQMHKDKETPPLLAFPWFGAQFLSHSFLALERDPRFTQITRYLNSAEIAPHISGANYTFFVPEDRAFEKQGFDKLSDEVMASQRGVKMLLNHFVKGRLYNRDLRDNEVFETIGGGHIKITRNPGSNYTSVNNAQITESEVFVYNLGTMYYLDDILYSHMLRDFVSKSTKTRSNRHGSDSGGGSRSTSRPSDVEIVPNEFEGEHNGGDYAIHGDDEDFEDEIITPKALPVQIYELPK

SEQ ID NO: 12136 - DNA, 18085 bp, DROSOPHILA
acaaaagtaataaggatcaccagccgagtccatctggccatgtccgtatccgtcgagatctcgggaactacaaaagctagcgaagtaatgcatatcttgtatcttgtttattgttaagcacgcaaaaaattaattagccagacgaaatcatatttttgtcgctccgaaaaaattctatcgaagtcattaagaagtgggccattccaattaagaaatcaatgatggccttgaatgaatgaatagcatgaaagctattaaggacatttacatatgtatgtacgttgtggcctccggaaatagttgtaatgcttgaagtaaatatcgtatgaatgctgctatcaaatgctccaattagcaatcgatcggcagctttcgacccctccagaaatcaaaggcgcttattgaactcagaaaaaaaaaaatatagtgggaaagaaatggaaatcattccccttccgaaacgtacttaacaatgcacgctcctcatcgtcaattaagtttaattgccccagcgaaccacttgaaaaatgcatacaaagtgagccggggcatcattgaagtacatagcctgctctccacttttccgccaggccaacattagcagtttcgatttaacaatcaatttattctcgcaatattttcggttttgtgccgcattcattcccgcatgccgccttgccttgccacatcttctgccccaagaggaggcaagtttgcaagtgctattttcttccaaactcgttgcatattcattcgaattcggagtgccgaggtaggcatcgcctgcctgtctgatatcgaagcaattcaaaccctaattggctgacctccttgtgcacagtttactgttgcatcaccaaagttgcagccacaaaattgtgcataatgtcgtaataacttgttactttcggacttctgttacactgacttcgtttaacaatgtccaaaattggcatacgactgttacctgtgaacgaatgaagagaacttgctaaaaattgtatacaatatctcgttttattattggcaaaaattaagtatatgtagccctctatgtggaaactaaacatgactagtaaaaaatacttggaaatacatcatatgtggatagaggctttcgcaaatacactgaagatttatacatatattaagtagataagtccttctttaggaaaagtgcactacacatgcacttaagaacgcctgtatgacacaattagctaggatctaccatttgctggcgcccttctcaagtaaaccacggaatacagagccctccagctgctgcagctccctgggattgccatcctctacgatgcgtccttggtccagcacaattaagcggtcataatccagaatagttgtcagacgatgctgcgaataaataataataatggtcatatcacagctgccctcaagtgccgcgattatacatgtgtaaatggactcacggcaatggtgatgatggtgcgaccccggaaggccagatccgccgccttgagcagtgcactctccgtgctgctgtccaggacacttgttgcctcgtccaggacgagacacacggatccccgcaagatggcacgtgccaggcacaacaactgtcgatggccggcactcaggtttagccctccatcacatatcaccgtgtctgcaggataaaataaagttcattaagttcaagttattgtatcgaaaactatagagtaagtttgtatctagatcaagaacttaacatctaatatgcattaatgtactgtctgcattagcaacaaaatgaaataagatactttttcgctttcatgactctagacaaatgcaaaagccaaggacagcaaaagccacttgaagtcgcaattgtttgtactaaactgcaaataaaaaaaggggactcacccaaaccgagtggaaggtggccgttgacaaactccttcagctgcgccaattcgaggcaattccacaattgcaggtcctggaagtaaccgtgtggatcgagattttcacgtatggtcgcgttgaacaaatgcacatcctgcggaattatcgacagtctggttcgcagctcgtctggtcggatgcgctgaatgtccacgtcatcgatgtagatgtggcccctggtcgtttggaggactccgaagagggacagacccaaggatgatttaccactgccagtgcgaccacagatgccaatctgtaaacgaattgcgagggaattgaacaaagttgcattctaactagtgtcgaatgtgtgtggaatcagtggcatcctttcatatttaacacaatcaacttgataatattttttgctattttacaaacttttgagccagatgcgtgtgcccttctttgtcatcaatcaacatttcagtttagaacaattaaaacctattaaatgcaatgactgattctttgttccagttttgtgatttattatctcatcatttttttttttttttttttcaatatatattgcgagcacaaatggactgcaaaaacagggtttcaccccttcttgtttttccattgatgattcaattttaaacttcaatcaatatggctgacatctgttttactgattttgccatctaaccaaagtcagcgagttagcagggtccttactcttccttttttattttttgtacaaatcaataaaaatgttatatggatggcttttcgatttactcacccgttggccggcgggtattttcagtgttagattgctgatgacattttgtttctggccctcgtatcgcagactaacattatcgaaatgtatatcacctctttgtggccacgaaattggcacactttgatctgtaaatgttgcaaaaagttgagttttaaattaaaatgtgaaccgaatgtaataattggaatcattgagcttgtgtttcggctgcttgggtaattacccaaacttatattgtaatcaaataacccaaggacatgcacacaaaagtttgttcaaaatattttcgaattccagtgatgcgttgcaaatgcccacgagagtgatgcaaactggcccaagaacttacagcgttccagcttcctggccggctcatttggcaggacgaccttcttgtccttgtcgtcctgctgcggtggcagttgcttatctttaatcaccgacgtctttgtcgtcgcctgctccaccttgtcgccagctgtcgccggtgggtggtggaagtttaagtgattgccgtcgccggttacattgcctgcatttaatttatcagcgtttgcctcagccccattttcatgtccttgccggtatccacagtccccacctccaccacgtgctcctccaattcgttgctggtctccatcttcatcaacatcaccggcagctgtcgttgcgcctgggtaaactttgtcaccagcatccgactgggacgacctatcgacttcggcgctcacatcttcattggacgacggctcgtgatccaagtccgcatccacatccgcatcagcatccgcatcagcatccgcatcagcgtcctgtccctgggcatagtgggcgatgcgttccacggagcccgcatacatctccatatcagccaaaagttttacaacccaattaaggtaaatcggcaccaacaacgtgtagtttatggccagacccaccagcgatggcgatggtctcaactccgacgggctcttagtgacagcataagtttcgaatggggatggggatgcggatgcggatggggatgtggttgcctcatagtgcctcctgcaactgacgctcgccgctgtcaatgccgtcacggtggccacaaaaacaatgcatccacccaaatagtcctgcaggagaagaaaaaacattaaaacaagcgactgtgcggagtgattaaggagttggcctggtgaccgctccaccatcgctggagaagatggttgaggtctggttgcgcactgactgaataacatagctgacagtaattaagatattattgaaaaattaaaagtttaagaaaagcagcgtttcaacttctgattattttcaagcaacaagaatacttgaaggaacatatctttaagtcgtcttttaaacatagattttgatttaaattttttgtactaaccagagatactccaagccatcgatgactggtgttgagcaatgcataggcgattgtgttcgcctcgagtcgtttgaaaaggatttcggtgaatctagtctgttggttaaaggctcgaatcgtggtcactccttgaatcgtctccgatagatgggatatgaccggggagttagttgcgttttcaatacgctgcagttctctaaaaattgaaaatatcaaaaagtagaaatatgtgcaaaactaaagcaggtatgtatatactgctcacctggctgagcacctgtagaacttttgaatgaggtaatatgctccacagatgggcagggtgagtaccaaaatccagggtgtgatggtgacatttatgagaatggccgaaaggcagagcaaagtgaactgcagcaggcgttgtcctgtggcggcaattttctgaggacataatacaatatggttatgaattatttaagatacaggccacttgcacacatagctcatggtttcagaaaaaaagaaaaatcttgtcgattgctgcaactattagaaactctttattcaactacgattatacggacagataaacggacaaacaaaaggtacggacaaacggacatggctaaattgagtatatatatatagtttatattttaaatatttcaaagcatctatttaatccatatactctgccgggtaacgagtatatttatggcgaaataaatccgtgcttatccacagcaacaatctcaatcaaactggcgagccatctatccactgtgtcgtgccccaacaaatggggttattggtagcatttgatggctaaaacaacggctggataacaaaaaaataacaaatctcaccttatcaatgacggccatatcgttgctgaaacgattcacaatacgaccgagcggggtcacttggaaaaagtgcagtgttttatgcaaaatcgtttgcagcagcttatcgtgcaaattacgacgggcattacagccggcatattgtccggccggtgttgataccagtgccattattatacaaacacacgaaatggcggcgtacatgcgaaaatagtacgtgacttcgtggtcctgctccgatggatggagcaccacgtggcccttggacgcgactctgccatggacattgctccactgctgcagccaaatgtccgtgtagacacgcaaacactgccaaattagtgcggtgataaaaaagatggtgattatgggcaaaccggcggctcgtatgtacattagatatatgtcgtccgatattttcccatatttgcgttccgtatcaattgccaacctggccagcggcatcgattctcggccggattcacctgccacctcggccagcacgtgtctctcattgtgctgctcctggtcggccggggatgatgtcacgtttgccctcaattctttgtccgatgctgaatagcaattgtcatcgcaatttattgtggtttccttcgagtcaatatttacgcctgatttttgtaagaaaaagagagaagtagagttttgcacaggatcagaggatgtgtttggtagaataaaagaagctttcctgcttgtcttgtataatatttgtgataattatgtacatactatagctttttctagaaagagtcctaactcttacaatactcctagacttgatcgaaagtaatataaaactgcgattaaaatctaagctgaagctgaaaacattaaaacattaaagcccaaacgtaactcatatgcactttgggttgcaaaagagaataactaaagttgctttcgaggtgaacttctgattgacttttaattggtactgagatgttttctaccttttgcaagtgccacatgggcccacatcaattaagccatgctgccgtttaatttaacaacttccggcgacaaactaattgaaagcaaagtttccacggcgtttgcggatttgcgtggcacaggatgaatcggatggattcgatggattcgccgggttccatgggttcgaatggagtgacactcgcagcattgattaaatcgaaagttttcgaacccgctgacttatcagccaaatattgatagatcaatgcatcggagttggccaaaactttctgctttggaaacttttcgcgccctggaagactgtctctttgacttaccgctcgggagctcgaaacttttaaaatcaaagttgatttaagttttaagctacacacgcatgcatccaggagtaaactaaaaggatgccgaattctcaagtgtattggacaaaaaagcaaagcagacaccatttgcctccaccaatattatggcaatattttttggtcacagttttcccgaccgactgcataaatatcagctaatcaatattcattattgaaaatttccaaggcgcaagaaagcgtaaattttcattaaacttaattcgtttaaaagctagaaaactactatacgaaagttgacaagctaatttttaaaggattttacgtaagttaagaagcaaatggtttttaatttctgtagtaacttacatttcttgggcttttcttctgattgcgtttcatttttattgccatctgttgccaaaattgaggcaggaaaatgtacaacaggcggagattcctcagaaatgcttctataagagaaaaatgtaacaatattaataaatagtattaataaataaataaaaaaaaagaattaaaaaaagaattgtatgtcttacaaaatagaattggtggcactgagtggatgatgatggtttttgggcttattcgaacgccgcatggacattcgtcgcaggaactgctgaaaactcccccgaacatggtcatccaaaggactctccgagcttgtattggatctcctagcctcctccgacttcttcacgtccggattggccacctccatcgccggcggagaggaggcgttccgtgacagcggctgatgatgggtcacatgctgtggcggctgccaggattgaactcgtggttctggtgccgccgttgccaaatcaccaccatccacactgctctccgcatagctgctgcaactggtggccaaaacactgcggctcagcacatccccactgatggaactggactccgaagtggccgtcaaagtgctgaggccactcaatcgatggctggaattggtgttccgactgccacgacgaccaagagtgtgccgacgccgtggacgcatgatgacatcatctccctggcactcgtcgatgggcagcggaacatcgtacatcagatgccgggaaccatagatactggaacgtttgcgctgcaagttgaagccaccacaggatgcattaccgatgggatatgactgcggattaaaggatatggaaatattgaacaaattgaattacataagctaatctacccgtaccacagacacttgatcatcctcctcgaccacattcgattgcatattggccaccgatatacagccactgccatcaattgcatccgcgtggcatgccacattcgcatccatcgtcaccgaaatcgagcgctgtaatcccagtttgcttacgttcttcagcaatttccagcgctcacctgctgtcttttcacctggactgagtatgtttatgtattactattgcaattcgtacatagaagtacaagtgtagcatttacttttgggatgggttatcattcttggccttcgccatcgcaatgatcgcgttccactcggcggtaattcgcggttgcatcaattcaatgtccgcatagctgccacacgcttcaacgcgaccatcttttattgcaattaactaagggttaaatagataagctgtagtaatatattttatactaaataaaatcgaataagataggaataagataagggtttcttaagatacaactgcaacttttgcggactataaatatgcaaaaaggatgagtttaaagacctcttaagagtaggtgaagtaaagtaatcatataaaatgtgtattgtgtcctaaaggacttacgtattctgcctccttaatgcgatgcaattgctgagtcacaaggataaaagttcgattcgacttttgtagcatctcacgtatgcagtgctggaatatgtgctcacccacctcgttgtcaagtgaagccaatgggtcatcctaagcaaaatataggaatattagaaattatatttaataataatagaataataatatatatatgtacagagccaattgaccgcatttattaaattttaaagctcgacataataattgaaacaatttatttaaattatgatactgttttgtggccatttcgactattcgggacccagcatcttgctgggctgcacccactccctgaagtcctcccgttgaatgccatcaagtatggcctcctgttccaaagtggttccattgtgatgcgctgccttggcgatcgcagcggatcgttcgtagccaatgtgtggactgagggcagtgaccagcatcagggactccttgacgatgctaccaatcttgctcctattgggctcgatgccctcgaggcaattggtgcaaaaggacttcatgccatcgcccaaaagtgtaatcgagcgcaaaacattggaggcaatcatgggcataaaggtgttcagctgaaagtggccagaggaaccacccatggagacggccacatggttgcccatcacctgggcacagatcatggacatggcctcgcattgcgtgggattcactttgccgggcattatggaactacctggttcgttctccggcagatgtagttcaccaaatccgcaacgtggtcccgatccaaggaatcgtatatcattcgctatcttcatcacactcgctgcaatcgtgttgagttcaccgtgcagttccaccaggcaatcgcaggcggagatggattcaaaaaagttcggggactcgacaaagggtaggaatgttagctcggctatacgcttgatgcactgcgcagaatattccgccttggtgtccactttggtgcccacactggtgccgcccatgggcaactgatacaatcggcacatggcacagtccaatcgcgtccttccgttcacaagttgctgctgatagccactgaactcctggccgagggacagaggaactgcgtccatcagatgcgttctaccaatcttgatcaaatccatccaatcgttcgacttcttgcccagcaaatcaataaaggtccttaagctgggatacagcgtctcctgcaactgcatggccacggcgatgcgcacggctgtcgagaaggtgtcatgggaactttgcgccatgttgacatgttcattgggatccaccggctccttggagcccatctgaccgcccagaatttcgatggctcgattgcatataacctcgtttacgttcatgtttgtgtgctcgccgcttccatcctgccatataaccaacggaaagtgttcctcgtcatagagtttgcccgatataacatcatcgcaggccttggaaatggcatcgcatagatgctcctccagacaatggattttgttcgtctccgcagctgatttcttcactatgcccagggcttttattaggggtcgctgtgattttggagatcataagaatctatattttcaaagtcaatactatcatactggcattcgttcctcaactccgccaattggaaatttcatcagggatctcatggtttgcggaccgaacattcgatcgagaggaatgtgcacggcacccatcgaatcatattcaactcgagtatccggcactattagccgagccagtttgtacatcaaactgaaaatctccttctgatcgaaagacattttggaaaattttaatgtgtatatgtgttacgaaatgaaatatttaggccgaaaagtacaggccaggaaaaggttacgcgataatgatgagagatatatctcgctagagatataaaatgaatataatttactaattactaatttagctaaattacttagtttcaaaaatatatataagcctaccataatgaccacattagccgatgaatatatagctcgagctatggcaattcgctgcctttgtccaccggagatattaattccgcgttccccgataatggaaagatcccctcggggcattagctcaatatccggtttcagagcacaggcttccaatacgaaatcatatcgtttcggtcgaaaggactctccgaaaagtatgttctccctaatggtgtcattcaagagccaaggttgttgtgaaacataggaaatagtgcaggttctagaacacaaaaagttaaaataaaatcaattactatttaacatttgctttggttcgttttgagaaggctttgggtttctttcatatctggccatgtccgtatgtccgtttgtctgtccgtttgtatgtccgtttctctgtccgtataaaaagtttgaataccttaagctcagtaccaaacttgttaggtgtacataacaatcttttatgttttaaataccgaatgagtgacttaatataaagtatcagagtttccttattgaatgcatttcaggcaatatatacatatataaggagcataaatttgcaagccaaatgcggacaggaaaggaaagccccgaagataccgcagaaaaaagcgtactcgaactaacatagacatttattacagtaattgaaattattgcacatttgccggttgccaagatgcagttggagatggagatggagatggagatgggaatggggatggaaaggggctgtcgtcctgaaggaagcaatataagcaaaggccacaggatcgcagcgacttttgctgtaaaggaggaagtcttcgtttccactgcgcgatttccatttcttaaatgcatttgtatatggcctccatgcacccttttcctctttcagccagacggctatgccatttttattttatgtgcaataaaattaacaacgcacacaggcgttttgtgataaattacgaaatcacgtggctcgcattgaaacgactgttaaaatatgttgtatgtctgcggtggattcgattgcggcagcaaccaaccactaaagtttaaactattccacctactttcttggatttttgtgcgggcaaacggattgacctaatatcgcctagttcagatatttttactaactaaagcagcgagataaacttctaaaattgttttttttaaagtaaacattaactgggtaagccagctgcaatacaaattcatatatttttccaaatagttgaaaattatgcaattaatttgataaacgggcaaacacaaacatatccactatgttgcttagcttctgttgctgtttgcagaactgaaaataagcacataaatagctaagcaaatttacaggagccgtgttgtctgggtgttctgtgttgacagacaagggaatcgtgcttaatcttggccccaggaaattgaaaaaggactccctatgcttaaggcagccaagatttaatgctttaaattaaaacatatttttaaatttgcacaagtgagagtttttaaagtacctatatccgtatgtccgtttgtaagtctgtccctgcgattacggattactgaaaaaaaaaaaaaccgaagactataagatgtttactcacttatgccaaaacatgttgcctgctaggagcggcatctccatgagaagcgccgatagcaaggatgtcttgccactgccgttcttgcccacaactatggttagctttcccttgggaacaatgatgccgggcacatgaagctgcaccactggcatctgactttgcggctgccacgtgaagaggccgtcgttgatcgatacggcaatgtcgtcgggcattttcaacagtagggaatcccgtcgccagctatccgtatttctggcccgaatcactgaaaattccacgggtctctccatcacactgccgcgcattttgggtggccgaatggccacatatggtgtattccgtagcagttcccttcgctgctgcaccagcttattgtggcccagttcttggacagtggatggcgagatatcttccgccgattcctcggcattttgcagcaatggcgttgagttggtggcaagctcaggagtttgtgacttttgcgctaggcgcttttcatttagcctattttccgcttgggccgttcgcattgtcatattcgatttctcttgcgtttcatacatatccaatgaggcatcgcttttgctcaaaattctggccatattgcgaatgccttcgaattgcttctgaatctcgctggactttaggaaacgctccaatcgacgcgtcgataccctcgcggctatgataatgggcacggtgatgggaaagatcagaagcggtacggttagctgctggaaaagtgccagcgaggagaacaatcgactggcattcaaatcgaactcctgatcccgatgcagccacacataaacgcccagagtaacgaatgtgatcagtacggtggcaatatgtgtgagtacggcttgtataaagaaaaatgttcttattataattataatagtacttgctgggaatcaggatcatacgtacccattagggtccagaatgtcgcatccttgttgagatacttgagctcctttcgtcgcgcctcttgaatctttttgagaaatacctcatcccaggcatttagttttatcactttaatgccaactagtgtatcgtgtattcttttcaaacgctcatcggtatatccctgtaaaaaaaataattaatatgagtgctatataattttatagtcagtacttaccgctataacctctgcgtttttcgacattgcatttccgatgaaaaactgcaggggcgtcattatcacaatgcaagcaatggatccaataactgcactaattcccaaattcatatataataaatatatgaccacagctatctgaaatgaacaataaaaatgttaaaaaaaacatgttactactgagccattgaaagattatagaacaataaaaagtccttcaagtcgtttgtctaagaattattagcaaaaatagcaaataaatatttacaaataactcgagcaaaaggcaactttaaataaaatcaaatttatagcccgactattatagagcttattaaaaacatttatattcgcctttccagtcaagcatttcacagacagcaaatgcgataaattagcctcgtgttagcggacatcaaatggagcccaaatggcacacaagttgctcataaattacaaaaagaaaacgattagccaaccaaatgggcaaatctcaatacaaaccttgaagggaatggcccaggcatagtggatgatcaggaagaattccatgatgttccgagtgtcctccgtcatgtggttggtgatgctgccaatgtcatggctgatatttggttctggttaggaatggaaaaaaggattatattactaggaaaaattccttataaactatttgcatataaaagcagtcaaaaaaacaaactgccacttttgattgccaaatggttcctttgaaactttactgactttaagttaactcggaagattacagtttttgtctacatcaatgcggattattatgaataggatttgttctataattccctgatttactgactcaccacttggattgtccacgtgctctggcgttgccatggaatcatcgtttttctgtttctcatccgaagtggaagaagttgactgaacttggcccgcagaatcactgctatcgcagccaccgtccgcattgagaagcaaactttttctataaattagaccctgtagggacgttttaatcctgatgcccgtcatattgagtatgtgcgtcgaagcctgggacaaggcgccttgtgtaatggccgccagcagaacgatccaagcgatgcaccatccattcgccaggagatctgaccaggtgctgctatatatacgcaccttatcgatgttcgtgccgaaaacctcgtcgaattcggtgcccagaatccgggaggtggatagcagaacgttggccacctcattgccaggcgacttcgccggcggctcagaggcctgggcataaagttgttcgatatattcaacgattttctgtatggccaacggtccaatcagggcaaataaatcaccggcaagtttcaaaattccacccagggcaaacatttgccaactgttctttatatagcaataccacagggatggggatgaatttgactttttctgaaaagaaaaaaaatccaactagttaagagcgagagatgtgtgcaaattgtatggggcagccctactttcttctcagtgtaaatgtacaaaaagtggtcgtaatgcgacctggcactatcctccagcttcatttggcccaaatcctccagctccagcggttccttgtagcccagccacaaaagaggtgttagccaccaaaaacaggatttcgaataaaatgtggccatggagtgtttgtagcctattttgccatagtcatccaaatagtcgtcgtgatagcactgtgggttggaaatttgttgttaattcagttaattctataaatcacgagagtcctgcgacaattgttaattcgaaaagcacacacacagctaaatatttccgctcatccacacttttttgtgtatttaaatattcaacttgagccttcatttcctactttgcctgttagcacgggactcatcatgttgcaaagccacaaactggatggcaaaaaaaaagaaaatatatagaataaacatcataaacattttcgccaagtatgaaagacattaagctgaaaatcaccacttaaccccaattaaaatttaaacatgcaacaactcgcatagcgatttttggcttcctctgttgcgccaacttgcatttattagcgcagcatttaaataaatacgttttggccattgaaataaacacattatttaaataaaacaatggagtagtttccattcgcttggtaagaaggaatttgaaaattttaacttgagtaatactattaagttttagaacaatctacattgataactccttataaatattgtttttaaatggttggatttcaggtaaataatatttaaatttaatatccattaatccatttttattctttaaatactacaaaatctcctagtaagctttaaagccatagattgaagatatttttcaataaatgctcacttctttgtacacagttaatccgtccagcattgccagggacaccatgcacatggcagacatggccaccaggcacgtctgcagctccaggaaatcctcgtagcgaaccagctcgaaaagttcattggagagcagggcaaatgtcaacgcctccaccgcagtgctggcatacaaaaacactgaaattggcataaaactagatgagggaacttctctattggccaaaaactcacctgtcgcctttttgcgctccaccattcgatggtagagcattagcatgagggtcagcaaagtggagaagagcgcattccacagctcacccgatccaatgacaaccaaatagttgagatccctgggactcgactggaaaagtctgttcagattccgaacattttgatggggcaaaaagattctggccaaatcaaagctattcagggccaaaaggagtagggagatcgcagcacgtccattgtggaacgtaagcaatgttttatggcatctagtttaaaagttaagaggtttatatagatatggatatcatctatgatcatatatcacataattttatatggaaatccctccagatcatttcttacaaagatctcatatggaaccacttcagcataataaatcataaaaatcatgcagctaaatttctataattaactgcagtgtaaataaattcaataaatgatattgatttcgtgttcatccgcatatttatttataagaatccgcccttaaagcaaagtgcgttgcagaaccaattgagatttacccatttgagatacatcccattgagaatactttggcacgcgatgcgttattttttttttcgaatttggaatgccaagttgattgttttttaatttcgctgcgggttgcattcgattttcaatgcacttgaagtacggatatcaattatgggattttgagtgagtttccggaacaaaataagggggagataatatattttattctaattctatatgtataaatagtttttcctgtaaggaaataccgatcttttgacctttagaaatttccgagaacaagtaacaatacttcctttttggtcataaaattttcacgtttactttttgtttaaacaaacaattagcaacagtcgattgtgtatgcaaatgacttaaagtgcgtgcaaaagaataaaaattaagcacttaaaatatgttttatgttatcttgggccataaaatgctgtctgtgtgatttctaaatgaggtaacaaacttgagctccctagtcatttctccagaattcgtttaatctacaaaacgcatgtgctaaatttaaacaaatgtgctcatttgcttctcaaaaatatacgtatacatttgttgaatttatttacactcttattttggacctaattgagcaaggagtaaactggacatcaaacttctgatgataatcatttgaaatccattacatgtgaccttattttcgtttaagagctttgcacaatttcaagcaaaaaatcgcttgctctgctgtaaacaaaagaagtacatgtttacacttgggtcgaaaataaacaaataaaaaaacagagcgaaattcactattattttagtttaaacttgaaagtgtgtcaattcaactctggccgcccaagttgcaaatatacacatatcatatatttaaatcccgcaaatgaataaaactcactttttgtatctactgcaaacaaacatcaatccgaaaagtagcagaaaaatgctgaaaaacgtaaaaacacgccgcacacggtcaatgccacagatatctgtattcaaattgtcataaatggagcgaacatgcccattcaagtgatcacagtgtattatattgaacaactgcttcatgatggccaataaaaccatgaacttatggccaaaacgcttattgaacactgcaagaagttttcacttttccgatttcaatttaaaatcatttgtatttcgctcactattaaatcgagtccataggcagcactttgaaaactttgcgcccaacaggttgagcagcaaatacagaatcgctcaatataaacaaactatttcgcaatcgggaatatgcagtgcaatgtgtgttatgcccgatccaattcgatatatgtacatatatatatatgtatgtacatatggatggtaccacaatggatttcgttccaaagcgagaagagcgcgccgcgtccccggttgccattcaattattattattattctttttaagtaatttttgtataaacaacacacaacgcagagatatgtgtggcgcacgttcggccgcgattaagaaatcttcgcgagaagaaaaggccaaccgactccgaccgagcgtggcggctcactaaccacactgagcacatacattctcgccagcaggaaaaacgacgaagtgccagtcagcccgaactcgagaagatattgcactgatctgaatctgaatctgaatctgggggatcgcgcacgtgcgcgatgggaaaaagctcttcccacatcgccggaatcgtggggtgccagcccactgataccatcgacccatatatgatgcactaaatcaactcgaagcgaaccagaagttataagcaattaataaatagtttgttaaactttacaataagcagagaaaaacgttttatattcataaatcaaacttagtctcgcacctgatttattttcttaatctagaatgccacattagaagaatggtttagtttgaattttgtaagagcctagaatacattttataaatctgttattcctaagattttaattttaatttgttgtgcaattataacaatatgcttaaagatctcatttctagccataactcatatcattctttggatttagattaattagggggggaatatcatgt

SEQ ID NO: 12137 - DNA, 7001 bp, DROSOPHILA
atggttttattggccatcatgaagcagttgttcaatataatacactgtgatcacttgaatgggcatgttcgctccatttatgacaatttgaatacagatatctgtggcattgaccgtgtgcggcgtgtttttacgtttttcagcatttttctgctacttttcggattgatgtttgtttgcagtagatacaaaaaatgccataaaacattgcttacgttccacaatggacgtgctgcgatctccctactccttttggccctgaatagctttgatttggccagaatctttttgccccatcaaaatgttcggaatctgaacagacttttccagtcgagtcccagggatctcaactatttggttgtcattggatcgggtgagctgtggaatgcgctcttctccactttgctgaccctcatgctaatgctctaccatcgaatggtggagcgcaaaaaggcgacagtgtttttgtatgccagcactgcggtggaggcgttgacatttgccctgctctccaatgaacttttcgagctggttcgctacgaggatttcctggagctgcagacgtgcctggtggccatgtctgccatgtgcatggtgtccctggcaatgctggacggattaactgtgtacaaagaatgctatcacgacgactatttggatgactatggcaaaataggctacaaacactccatggccacattttattcgaaatcctgtttttggtggctaacacctcttttgtggctgggctacaaggaaccgctggagctggaggatttgggccaaatgaagctggaggatagtgccaggtcgcattacgaccactttttgtacatttacactgagaagaaaaaaaagtcaaattcatccccatccctgtggtattgctatataaagaacagttggcaaatgtttgccctgggtggaattttgaaacttgccggtgatttatttgccctgattggaccgttggccatacagaaaatcgttgaatatatcgaacaactttatgcccaggcctctgagccgccggcgaagtcgcctggcaatgaggtggccaacgttctgctatccacctcccggattctgggcaccgaattcgacgaggttttcggcacgaacatcgataagggtctaatttatagaaaaagtttgcttctcaatgcggacggtggctgcgatagcagtgattctgcgggccaagttcagtcaacttcttccacttcggatgagaaacagaaaaacgatgattccatggcaacgccagagcacgtggacaatccaagtgaaccaaatatcagccatgacattggcagcatcaccaaccacatgacggaggacactcggaacatcatggaattcttcctgatcatccactatgcctgggccattcccttcaagatagctgtggtcatatatttattatatatgaatttgggaattagtgcagttattggatccattgcttgcattgtgataatgacgcccctgcagtttttcatcggaaatgcaatgtcgaaaaacgcagaggttatagcgggatataccgatgagcgtttgaaaagaatacacgatacactagttggcattaaagtgataaaactaaatgcctgggatgaggtatttctcaaaaagattcaagaggcgcgacgaaaggagctcaagtatctcaacaaggatgcgacattctggaccctaatggccgtactcacacatattgccaccgtactgatcacattcgttactctgggcgtttatgtgtggctgcatcgggatcaggagttcgatttgaatgccagtcgattgttctcctcgctggcacttttccagcagctaaccgtaccgcttctgatctttcccatcaccgtgcccattatcatagccgcgagggtatcgacgcgtcgattggagcgtttcctaaagtccagcgagattcagaagcaattcgaaggcattcgcaatatggccagaattttgagcaaaagcgatgcctcattggatatgtatgaaacgcaagagaaatcgaatatgacaatgcgaacggcccaagcggaaaataggctaaatgaaaagcgcctagcgcaaaagtcacaaactcctgagcttgccaccaactcaacgccattgctgcaaaatgccgaggaatcggcggaagatatctcgccatccactgtccaagaactgggccacaataagctggtgcagcagcgaagggaactgctacggaatacaccatatgtggccattcggccacccaaaatgcgcggcagtgtgatggagagacccgtggaattttcagtgattcgggccagaaatacggatagctggcgacgggattccctactgttgaaaatgcccgacgacattgccgtatcgatcaacgacggcctcttcacgtggcagccgcaaagtcagatgccagtggtgcagcttcatgtgcccggcatcattgttcccaagggaaagctaaccatagttgtgggcaagaacggcagtggcaagacatccttgctatcggcgcttctcatggagatgccgctcctagcaggcaacatgttttggcataaaacctgcactatttcctatgtttcacaacaaccttggctcttgaatgacaccattagggagaacatacttttcggagagtcctttcgaccgaaacgatatgatttcgtattggaagcctgtgctctgaaaccggatattgagctaatgccccgaggggatctttccattatcggggaacgcggaattaatatctccggtggacaaaggcagcgaattgccatagctcgagctatatattcatcggctaatgtggtcattatgaaggagattttcagtttgatgtacaaactggctcggctaatagtgccggatactcgagttgaatatgattcgatgggtgccgtgcacattcctctcgatcgaatgttcggtccgcaaaccatgagatccctgatgaaatttccaattggcggagttgaggaacgaatgccacgacccctaataaaagccctgggcatagtgaagaaatcagctgcggagacgaacaaaatccatgatgacccattggcttcacttgacaacgaggtgggtgagcacatattccagcactgcatacgtgagatgctacaaaagtcgaatcgaacttttatccttgtgactcagcaattgcatcgcattaaggaggcagaatacttaattgcaataaaagatggtcgcgttgaagcgtgtggcagctatgcggacattgaattgatgcaaccgcgaattaccgccgagtggaacgcgatcattgcgatggcgaaggccaagaatgataacccatcccaaaatccaggtgaaaagacagcaggtgagcgctggaaattgctgaagaacgtaagcaaactgggattacagcgctcgatttcggtgacgatggatgcgaatgtggcatgccacgcggatgcaattgatggcagtggctgtatatcggtggccaatatgcaatcgaatgtggtcgaggaggatgatcaagtgtctgtggtacggtcatatcccatcggtaatgcatcctgtggtggcttcaacttgcagcgcaaacgttccagtatctatggttcccggcatctgatgtacgatgttccgctgcccatcgacgagtgccagggagatgatgtcatcatgcgtccacggcgtcggcacactcttggtcgtcgtggcagtcggaacaccaattccagccatcgattgagtggcctcagcactttgacggccacttcggagtccagttccatcagtggggatgtgctgagccgcagtgttttggccaccagttgcagcagctatgcggagagcagtgtggatggtggtgatttggcaacggcggcaccagaaccacgagttcaatcctggcagccgccacagcatgtgacccatcatcagccgctgtcacggaacgcctcctctccgccggcgatggaggtggccaatccggacgtgaagaagtcggaggaggctaggagatccaatacaagctcggagagtcctttggatgaccatgttcgggggagttttcagcagttcctgcgacgaatgtccatgcggcgttcgaataagcccaaaaaccatcatcatccactcagtgccaccaattctattttaagcatttctgaggaatctccgcctgttgtacattttcctgcctcaattttggcaacagatggcaataaaaatgaaacgcaatcagaagaaaagcccaagaaatgcgtaaatattgactcgaaggaaaccacaataaattgcgatgacaattgctattcagcatcggacaaagaattgagggcaaacgtgacatcatccccggccgaccaggagcagcacaatgagagacacgtgctggccgaggtggcaggtgaatccggccgagaatcgatgccgctggccaggttggcaattgatacggaacgcaaatatgggaaaatatcggacgacatatatctaatgtacatacgagccgccggtttgcccataatcaccatcttttttatcaccgcactaatttggcagtgtttgcgtgtctacacggacatttggctgcagcagtggagcaatgtccatggcagagtcgcgtccaagggccacgtggtgctccatccatcggagcaggaccacgaagtcacgtactattttcgcatgtacgccgccatttcgtgtgtttgtataataatggcactggtatcaacaccggccggacaatatgccggctgtaatgcccgtcgtaatttgcacgataagctgctgcaaacgattttgcataaaacactgcactttttccaagtgaccccgctcggtcgtattgtgaatcgtttcagcaacgatatggccgtcattgataagaaaattgccgccacaggacaacgcctgctgcagttcactttgctctgcctttcggccattctcataaatgtcaccatcacaccctggattttggtactcaccctgcccatctgtggagcatattacctcattcaaaagttctacaggtgctcagccagagaactgcagcgtattgaaaacgcaactaactccccggtcatatcccatctatcggagacgattcaaggagtgaccacgattcgagcctttaaccaacagactagattcaccgaaatccttttcaaacgactcgaggcgaacacaatcgcctatgcattgctcaacaccagtcatcgatggcttggagtatctctggactatttgggtggatgcattgtttttgtggccaccgtgacggcattgacagcggcgagcgtcagttgcaggaggcactatgaggcaaccacatccccatccgcatccgcatccccatccccattcgaaacttatgctgtcactaagagcccgtcggagttgagaccatcgccatcgctggtgggtctggccataaactacacgttgttggtgccgatttaccttaattgggttgtaaaacttttggctgatatggagatgtatgcgggctccgtggaacgcatcgcccactatgcccagggacaggacgctgatgcggatgctgatgcggatgctgatgcggatgtggatgcggacttggatcacgagccgtcgtccaatgaagatgtgagcgccgaagtcgataggtcgtcccagtcggatgctggtgacaaagtttacccaggcgcaacgacagctgccggtgatgttgatgaagatggagaccagcaacgaattggaggagcacgtggtggaggtggggactgtggataccggcaaggacatgaaaatggggctgaggcaaacgctgataaattaaatgcaggcaatgtaaccggcgacggcaatcacttaaacttccaccacccaccggcgacagctggcgacaaggtggagcaggcgacgacaaagacgtcggtgattaaagataagcaactgccaccgcagcaggacgacaaggacaagaaggtcgtcctgccaaatgagccggccaggaagctggaacgctatcaaagtgtgccaatttcgtggccacaaagaggtgatatacatttcgataatgttagtctgcgatacgagggccagaaacaaaatgtcatcagcaatctaacactgaaaatacccgccggccaacggattggcatctgtggtcgcactggcagtggtaaatcatccttgggtctgtccctcttcggagtcctccaaacgaccaggggccacatctacatcgatgacgtggacattcagcgcatccgaccagacgagctgcgaaccagactgtcgataattccgcaggatgtgcatttgttcaacgcgaccatacgtgaaaatctcgatccacacggttacttccaggacctgcaattgtggaattgcctcgaattggcgcagctgaaggagtttgtcaacggccaccttccactcggtttggacacggtgatatgtgatggagggctaaacctgagtgccggccatcgacagttgttgtgcctggcacgtgccatcttgcggggatccgtgtgtctcgtcctggacgaggcaacaagtgtcctggacagcagcacggagagtgcactgctcaaggcggcggatctggccttccggggtcgcaccatcatcaccattgcccatcgtctgacaactattctggattatgaccgcttaattgtgctggaccaaggacgcatcgtagaggatggcaatcccagggagctgcagcagctggagggctctgtattccgtggtttacttgagaagggcgccagcaaatggtagatcctagctaattgtgtcatacaggcgttcttaagtgcatgtgtagtgcacttttcctaaagaaggacttatctacttaatatatgtataaatcttcagtgtatttgcgaaagcctctatccacatatgatgtatttccaagtattttttactagtcatgtttagtttccacatagagggctacatatacttaatttttgccaataataaaacgagatattgtatac

SEQ ID NO: 12138 - protein, 2257 aa, DROSOPHILA
MVLLAIMKQLFNIIHCDHLNGHVRSIYDNLNTDICGIDRVRRVFTFFSIFLLLFGLMFVCSRYKKCHKTLLTFHNGRAAISLLLLALNSFDLARIFLPHQNVRNLNRLFQSSPRDLNYLVVIGSGELWNALFSTLLTLMLMLYHRMVERKKATVFLYASTAVEALTFALLSNELFELVRYEDFLELQTCLVAMSAMCMVSLAMLDGLTVYKECYHDDYLDDYGKIGYKHSMATFYSKSCFWWLTPLLWLGYKEPLELEDLGQMKLEDSARSHYDHFLYIYTEKKKKSNSSPSLWYCYIKNSWQMFALGGILKLAGDLFALIGPLAIQKIVEYIEQLYAQASEPPAKSPGNEVANVLLSTSRILGTEFDEVFGTNIDKGLIYRKSLLLNADGGCDSSDSAGQVQSTSSTSDEKQKNDDSMATPEHVDNPSEPNISHDIGSITNHMTEDTRNIMEFFLIIHYAWAIPFKIAVVIYLLYMNLGISAVIGSIACIVIMTPLQFFIGNAMSKNAEVIAGYTDERLKRIHDTLVGIKVIKLNAWDEVFLKKIQEARRKELKYLNKDATFWTLMAVLTHIATVLITFVTLGVYVWLHRDQEFDLNASRLFSSLALFQQLTVPLLIFPITVPIIIAARVSTRRLERFLKSSEIQKQFEGIRNMARILSKSDASLDMYETQEKSNMTMRTAQAENRLNEKRLAQKSQTPELATNSTPLLQNAEESAEDISPSTVQELGHNKLVQQRRELLRNTPYVAIRPPKMRGSVMERPVEFSVIRARNTDSWRRDSLLLKMPDDIAVSINDGLFTWQPQSQMPVVQLHVPGIIVPKGKLTIVVGKNGSGKTSLLSALLMEMPLLAGNMFWHKTCTISYVSQQPWLLNDTIRENILFGESFRPKRYDFVLEACALKPDIELMPRGDLSIIGERGINISGGQRQRIAIARAIYSSANVVIMKEIFSLMYKLARLIVPDTRVEYDSMGAVHIPLDRMFGPQTMRSLMKFPIGGVEERMPRPLIKALGIVKKSAAETNKIHDDPLASLDNEVGEHIFQHCIREMLQKSNRTFILVTQQLHRIKEAEYLIAIKDGRVEACGSYADIELMQPRITAEWNAIIAMAKAKNDNPSQNPGEKTAGERWKLLKNVSKLGLQRSISVTMDANVACHADAIDGSGCISVANMQSNVVEEDDQVSVVRSYPIGNASCGGFNLQRKRSSIYGSRHLMYDVPLPIDECQGDDVIMRPRRRHTLGRRGSRNTNSSHRLSGLSTLTATSESSSISGDVLSRSVLATSCSSYAESSVDGGDLATAAPEPRVQSWQPPQHVTHHQPLSRNASSPPAMEVANPDVKKSEEARRSNTSSESPLDDHVRGSFQQFLRRMSMRRSNKPKNHHHPLSATNSILSISEESPPVVHFPASILATDGNKNETQSEEKPKKCVNIDSKETTINCDDNCYSASDKELRANVTSSPADQEQHNERHVLAEVAGESGRESMPLARLAIDTERKYGKISDDIYLMYIRAAGLPIITIFFITALIWQCLRVYTDIWLQQWSNVHGRVASKGHVVLHPSEQDHEVTYYFRMYAAISCVCIIMALVSTPAGQYAGCNARRNLHDKLLQTILHKTLHFFQVTPLGRIVNRFSNDMAVIDKKIAATGQRLLQFTLLCLSAILINVTITPWILVLTLPICGAYYLIQKFYRCSARELQRIENATNSPVISHLSETIQGVTTIRAFNQQTRFTEILFKRLEANTIAYALLNTSHRWLGVSLDYLGGCIVFVATVTALTAASVSCRRHYEATTSPSASASPSPFETYAVTKSPSELRPSPSLVGLAINYTLLVPIYLNWVVKLLADMEMYAGSVERIAHYAQGQDADADADADADADVDADLDHEPSSNEDVSAEVDRSSQSDAGDKVYPGATTAAGDVDEDGDQQRIGGARGGGGDCGYRQGHENGAEANADKLNAGNVTGDGNHLNFHHPPATAGDKVEQATTKTSVIKDKQLPPQQDDKDKKVVLPNEPARKLERYQSVPISWPQRGDIHFDNVSLRYEGQKQNVISNLTLKIPAGQRIGICGRTGSGKSSLGLSLFGVLQTTRGHIYIDDVDIQRIRPDELRTRLSIIPQDVHLFNATIRENLDPHGYFQDLQLWNCLELAQLKEFVNGHLPLGLDTVICDGGLNLSAGHRQLLCLARAILRGSVCLVLDEATSVLDSSTESALLKAADLAFRGRTIITIAHRLTTILDYDRLIVLDQGRIVEDGNPRELQQLEGSVFRGLLEKGASKW

SEQ ID NO: 12139 - DNA, 6713 bp, DROSOPHILA
gtcacctgtctgaccaccctcgtatccaaatacggaaacgatgaccagaagggttcagtactgggcatattccgctcactgggagctttggctcgagctctgggccccgtggtgggatgcattggtgagctcctcagctgtcttaggattataccttttctaaactctttaatccttaatagccttctggtgcgttggctccaggatcacctatatagccggcggacttctgctcatttatccagccatggccttgcaacgcgctcgcatttaagtgcaataggaatagagtttttaaactcactagagatcaacggaagtattagctgcacattatacttaatttatcgttttttacaagtattttatattaaaataaacacatttttactctgatttgtaagcagggggtttttacttgggatcgaaatgttttctatttaattaatttttttaataagataatattagaaacagttactgctactgggagaacgattctgtttaggttggaacgttttaagtattcaagacattttgagttggaaataagttaaatgggctagggataatccctagaaaatgtgttcagcttttttaaaatacgataggcttgtcgggatgaaacgagagcagttcatgataattcgtcgtaccgtctggtaactctaaaacatccatctcgttaatttagtgatgcaagtcgatgtgaaaacatcgataatgatataagtatgttggtgttttaaaataaaacaaataagttttttaaataggaaacaaacattagatttattttctagacctaatgtgttttaattatgaaaaaatttaattctaattctaaagcttttgagtataaaacaatgttcatataaacaaaaatagaagtgacattgtactatcgccttacatcgccattaagaaaatcgataagtatcgccgaaataatgtcgatgtaccgatatttttcaacatctctagtctcgttggaaatataacgtgacgttattgggagtgactaagttttcgtgtaagagaaaattgcaaataaatgcgctgcaagcagctgcaaatctccaattaatactgctccaattgccggaaaagtcctgccagcattttcgaacgcatccgagctggaagagcaaccgatttcgccacttaaatactgatatatacacttttctctttctttacaactacaactgcaaataaaagtgtaaagtgtgtgagccgacgacaaacgcattaaagaaatcggcggcgcgcagggattattggatttcgtttagcacccgcacacacaaaacaaaaaggacggaactggatttccaaaggatatcgaaccgagcgagcgatagcaaaacaaattgagcaaaatgggtgcaagagaagacgagtacgattatctgttcaaaggtaattataaacatgatactagccgctggtcgaagatcgcggaaggttgatcaggaggggaggagccgcacttccaggctctcctctccctgccgtgagagacagtggttcaatagcactaattgaaactaattggagaataacaaaaagtgcactcgaagagcccaaagttcatgtgatggtatgtggtgtgtttgtttgcgtgagtgtcattaattcccaaaataagaagtacgccccccgagtttgttgttgttgctactgctgcagttggatgccctttggtggctctcccgctctcactctgcctatctccatctctttggggtactctttcggactggagtacgcgtactttgccgttaactgcttgttttgtcattacagtgccgttggtctcgccacgttgcatacaaaagccaagcagatcgtatttataatcgctcgctctgtaaagtaggtttaaggcttgcccacccactcgaaatgctaaagtgattagatatccagtaaatagagcgagagtgtgggtattatgatttctgtacagctggcttttgcaatggtttcttgtaacttcgtttagtagctctctctcacgcgcgctctctttttcacccgctctcgattgaaagtttgaagcacagtagagcaaaatgatgtatttgcaggtagaaaacaagacttttatcccgcatcttcccccgtttatgtgtagatatgtatgaacagaggtcacaaattctcagctcttctttgttcccttcgtttgctactacgccataaattccaattgcgcttggaaatctctgctagctatcacagctgagcaactgttgaatgtcattaaaaaaatatttaaaacttaatctgccgtattttttgggtcaagtatacaaaaagttaaaaaaaaagtcatcataataatgcgtcagtgtgcggtatgcatgatgaggcctcaaatttcacacatgaaacaatattaaacggacatgactcacagccaataactgctgaagaattccactcaccgataagcgcataatcacataactgaaaatgggccgtttcgggttattcgagccaatcccactactaagtaatgaccgtcgattaccactcctccccttttaatttctcatcgcatccgcttaactaagtgcaatttctctttaaagatcgttattagcgctgagaaagagagtagaaaacaaagtgactcagctctctcgctgataactgtaaccacgctgctcccagctgtccacactgaaagaaaaccctataccctctaatttagctatctaaattaagtcaaaaacttggacttagctcaaaagtcgtttcaaatatttagttcctatcttaatggcattgcaatcgaaacttcgaactcaagaatcagtgttcatatgataccattttactatttgaattttctccgtgcagcgatgaccatagcgatagagcgaaaaggtgtttgatgagttatagttgttgttttctgaatggattagcaaacatgctgaatcaacaatgtccgaaaagggtgtcaaaaatggaaactaatagacagacagtcagtaaacacagtgtctagatatcagttaatatatattatagccaacaactctggccgcacataagaaagtttatcaaaaagaaatggagtcgtaaaaaggtcagtggatagtttttatcgggtagcatatcaacttgggatgcttgtttgctccctcaaatatccgccactcaattatccaagaaatgtttgctatcggcaatgaagcacaataacacgaactccctaacgtcgactggcccaatcataaaacatttctttccatggcctgaaatcccccgagcatggcggttttatgtactcgctgaccttggtgcgccgtgccagcggcgaaaggaggacatgacctagccgggccaccagcgaccattctgtccggccgtaaaacacaagacaggggccatgccacgccacgccacaccacacacccacataaattatgcaactgggggtcttcgattatccaatgccaatgtcgatgtcactaattccctctaatcctttgcagttgtccttatcggtgactccggtgttggcaaaagtaatttgctctcacgtttcacgcgcaatgaattcaacttggagtccaagtcgacgattggcgttgagtttgcaacgcgcagcatagaggtgagtacgctggccaagaattcgagggtggagtggcccatggagctccacccccacacatctaccgcaccgcacccacagtgggggaagtcacgggtgaacttgcgtgtgcgtttcggtgggaggacacgtagttgaggcgtctatcggaaaattggggggaaaagtttgttcaatttgagtaagtgtcgagaatttcactaaataatggattgccaattggctttcttgcataatttcaaaagccatcctacgggattagccaaaatgttgacatcatagttgtcacttgtgctgaaataataaatttatgtggtcaataacaattatatattacgtatgtataaggatttgtgttaaacaatactttgtgccatcttttcgaagtagcttagtaggtcatcttaatatttagtatatcaaatgggttcaatgaatataacttacgctacttgcgttttttctaactagtgtaagaaatttcaaaaattgggttctcttactagagttaaaagcttatccataagctctaatttatgttggttatgtgtgaatactgaatgccagtgcttgtatattaattttcaaagcgaatgcgccgcaggcatttcgtggcgaaattgccaattactggcaccattctaatgctgtcctttgtttcatccttcttgtgcatccaacgcaggtcgatggcaaaacaattaaagcgcaaatctgggatacggccggccaggagcgttatcgcgccatcacctctgcctactaccgcggtgccgtgggggccctgctcgtctatgacattgccaagcatctgacctacgagaacgtggagcggtggctgcgggaattgcgcgaccatgccgaccagaacatcgtcatcatgctggtgggcaacaagtccgacttgcggcacttgcgctccgtgcccacggacgaggcgaagctgtttgccgagcgcaacggcttgagtttcatagaaacctcggccctcgactcaacgaacgttgaaacggcattccagaacatactcacaggtgggtcgttcaggatattttagctagtctgctttcaaattatcgatcgtttaagaatatttaaatactgtagattaaacgcttcattgaaagtcaatagattaatgataacgaagcacgactaatgatgtctcgtaatcccgtttcagagatctatcgcattgtgtcgcagaaacagatcagagatccgccggaaggcgacgtcatccgcccgtcgaacgtggagcccatcgacgtaaagccgactgtcaccgccgatgtgcgcaaacagtgctgtcagtgaccgccccaagcaattttcgctattccccgcaaccgccagaacagcaacataaacagaagcaacagcaattacaactacgactacaagaggagcagcagcggccagaactgcaacaccaagatcaggagcagcgtacacccgatggaccgcacaagatgtctatgcgtttgtcagccacagtttgtcatgtgcgcataaattgataattcaaatctgagccgccactctccaccaccaacaccaccaccatcatcagaagcagcagcagcagcaaaagaatcgaaagcaacaacatccggctgtagttaactgcggtttaaactgaagttttatatatatacagatccatgagtatcgcataaatcgaccgccgcggaaagaaagcaagcaaaactaaacactccaaattcagtttaagctgtagaactataatttatataaatatacatatatgctaatattaaaatattaatattattaatttttcgcaacataaatatatagttgtaatttcgcgagcagaacaacaacaaacaaccggaaattcttcgacttaaacgcaaattcattaccacagcactgcagctcggattttcttcttcggtttctcgcaacattttaaacgattggccacttggtaaaactagctgataaagagaaatcaaacaaaaacagttgtaaaactttaaatgcataaatgaaacgaaataacatcatttgtgtttgctatgttaagtgtgattaaataaatataatttaaataaaacagaagtgctttcaattgggcggaaaatcgaaatttaaaatgggattagagtgaccaaaggcagacgtcggagtgggtgtttggtattttccgcgcgagcagccacactgatccatacacgtgcgggagaaaagtgaacaaaaacattgaaacatgggcggtaagaagaaagtgcatccgaagacgcgcacggcggccttcaaggccagcgagccgagcgagatcgtggaggcgccgcactccttcgtcatccatcgcggcctcgcctgtccgtacatcacggacctcaccctggacttccgccgcattatggagccctttacggccagcaatctgcgcgagaagcggatgaaccgcatcaaggactttgtcagcctgagcagcttcttccacgtctcgcacatgggcatcttcaacaaggcctccacgcagctgtccttcaaagtggtccgcttgccgcgcggtccttccctgactttcaaggtttgtttgtttcatcgcttagtttatactggatattttaccgcgaagttattctctgtcaggttcaccagttcaccctggccagagatgtgatctcgctaagcaaaaagcagatgattgacaacgatcacttcaagcacgctccgctcgtcatcatgaacaacttcagtggcgatggcaagcaccttaagctgatggccaccacgttccaaaacatgttcccctcaattaacttggccacggttaatatcggcaccattcgtcgctgcgtcctgttctcctacaatccggacacgaagctggtcgagatgcggcactactccgtgcaggtggtgccggttggcttaaagcgggcggtccagaaaatcgtcaaaggaacggtacccaatctgggcaagtgcaacgaagtcgtggactttgtgaccaagtaggaaatgaccgtttgttctcattccatcaaataatcataatattgattttcagggacggctatgcctccgaatcagaggccga

SEQ ID NO: 12140 - DNA, 1601 bp, DROSOPHILA
acgtgacgttattgggagtgactaagttttcgttgtaaagtgtgtgagccgacgacaaacgcattaaagaaatcggcggcgcgcagggattattggatttcgtttagcacccgcacacacaaaacaaaaaggacggaactggatttccaaaggatatcgaaccgagcgagcgatagcaaaacaaattgagcaaaatgggtgcaagagaagacgagtacgattatctgttcaaagttgtccttatcggtgactccggtgttggcaaaagtaatttgctctcacgtttcacgcgcaatgaattcaacttggagtccaagtcgacgattggcgttgagtttgcaacgcgcagcatagaggtcgatggcaaaacaattaaagcgcaaatctgggatacggccggccaggagcgttatcgcgccatcacctctgcctactaccgcggtgccgtgggggccctgctcgtctatgacattgccaagcatctgacctacgagaacgtggagcggtggctgcgggaattgcgcgaccatgccgaccagaacatcgtcatcatgctggtgggcaacaagtccgacttgcggcacttgcgctccgtgcccacggacgaggcgaagctgtttgccgagcgcaacggcttgagtttcatagaaacctcggccctcgactcaacgaacgttgaaacggcattccagaacatactcacagagatctatcgcattgtgtcgcagaaacagatcagagatccgccggaaggcgacgtcatccgcccgtcgaacgtggagcccatcgacgtaaagccgactgtcaccgccgatgtgcgcaaacagtgctgtcagtgaccgccccaagcaattttcgctattccccgcaaccgccagaacagcaacataaacagaagcaacagcaattacaactacgactacaagaggagcagcagcggccagaactgcaacaccaagatcaggagcagcgtacacccgatggaccgcacaagatgtctatgcgtttgtcagccacagtttgtcatgtgcgcataaattgataattcaaatctgagccgccactctccaccaccaacaccaccaccatcatcagaagcagcagcagcagcaaaagaatcgaaagcaacaacatccggctgtagttaactgcggtttaaactgaagttttatatatatacagatccatgagtatcgcataaatcgaccgccgcggaaagaaagcaagcaaaactaaacactccaaattcagtttaagctgtagaactataatttatataaatatacatatatgctaatattaaaatattaatattattaatttttcgcaacataaatatatagttgtaatttcgcgagcagaacaacaacaaacaaccggaaattcttcgacttaaacgcaaattcattaccacagcactgcagctcggattttcttcttcggtttctcgcaacattttaaacgattggccacttggtaaaactagctgataaagagaaatcaaacaaaaacagttgtaaaactttaaatgcataaatgaaacgaaataacatcatttgtgtttgctatgttaagtgtgattaaataaatataatttaaat

SEQ ID NO: 12141 - protein, 214 aa, DROSOPHILA
MGAREDEYDYLFKVVLIGDSGVGKSNLLSRFTRNEFNLESKSTIGVEFATRSIEVDGKTIKAQIWDTAGQERYRAITSAYYRGAVGALLVYDIAKHLTYENVERWLRELRDHADQNIVIMLVGNKSDLRHLRSVPTDEAKLFAERNGLSFIETSALDSTNVETAFQNILTEIYRIVSQKQIRDPPEGDVIRPSNVEPIDVKPTVTADVRKQCCQ

SEQ ID NO: 12142 - DNA, 6242 bp, DROSOPHILA
acaatgaatttgttcttgctggcgttgcttatttatttattgctctgtgtggttcggtgacatctcgtgtcttggtcattttatccattcggtccattctgtccgttctatccattctgtccactccatcctgcttcggaattctagtttctagttctggacatgacgtttacttgttaacacttttctttccatctttcgctgagctgcttcttgttgacgtccccaatttacccgtttaccattacaaatggggccagcatggagcatgcggatgaggtgtgaacacctggaaatgattttttacggccgcggatgaactccagattagcaagaattagtagtagtaactacatttaaataagtaaatatttttctaggttattgctgtcgttataggttgataaaaagttaaaattatatataaattggctatttttctgtcttcattcattttctcatttcatccaactccaattgtcaatttactattctgacagattttattacgctctaaatgtattacagcccatatttctcgatgcccaaatgatggctgtttttggccaatagtcgtaaatatgtcagccggtctcctaattttcactcattgtctaagacaatgccaacttttcttttgattgatttcaatcgaaccagcagcagcaaagaaactttggccaatgtatttttatttgactccaattggggttcgtttgccactggcaggatgataatgatggaccagaaggtgtcaggagaccgacttccacatcagtcagctggagtcggcccacagcacaccatcaattccacttggctgcggaggagggatgtcgcatgccaacttgcagctggccagaagatacatgaactgtcattttttaacctggctcaacaagtgcccttttgcacttcccttcgcagttcccccatctcgatacgaagttgaaatttaaagggaatttgatgcgaaatacttttaggaatcggaaatttattaggcgtaataatttttcggcggtgtggtatattttccaaatgccagttccagcaaagagaaatgacaattgtactgggtgcagtcgtcggtatgagcattccgatatgcctgatcgtagtgcactatatccgcattctcgtgcagttcccgtgtgaaaattctctgctttggcaagctgtggatataggaggatattagagaacttcgagtattattattgcattttttggaacttacctgaatatggtgcgaagcatctcgcccaccatgctcatcttggtgcgctggaagtattgacgactttcgcagagggttctcaagatgcagtcacgtccattatagcccatgctaaatgggaaagtaaaattacaaaaaaaagttcaatgctagatttctattaaaataaaacattagttatgtgccatatgcacggaaagatctacaccaataattccgaaaataccccttacttatctacaactgcttcgatctgcctgtagatggcgcttctcgaccttctacgcaggactgctggagccacaggatgcgtggcaaatccgtgcagatgctgtaatacccacgtggtattcggcaggtcataagccactccccaatttaggccaaaactgttgtagccataatacggattaccgataatgcccacggtgaagcagacggccacctgatcaatgagacggtcacaaaagagaactcactgcaggaggagattgttcgggacatgacacatacggaaaacgaggagccctcgggaaagctgagatagcgcttcggacgactgagcgctcgctgccaccggcggtgcaacagatgcgaggatgtaaccagagactccggcgaggaggcgaatgtggatgtggatgcggtagagtcgtcagcacgttccatcatagtcatcaatgttggcggtgaccataaatcacggctgacattacccgggaaaaacgaggcagcgacgtcggggagcgtgggcgtggcatttgtcgttgcaattaaatcgtaaatcaaaaactttgcaacaattaaacgataattaaacaatgcggggtgcgcgtaaatcatggcagaaaagagaagcaacgtggcacgtgccactcgagcaggcgactgaaagctgcagactgcaaactgcagtggaaactccacttcgggacaagacaatgcatcggctgggccaaaggaaactggcccaagtgcaaatgtgtcaattgtccgttaacgtttagaatgctcttcagacacttgctgcagtcacgtttacaataaacatggcatcggcccaaaaggtcgatgggtggcggaggagagcttccagcattcaacttaattgaattgcctgtgccgacacttgcaactgcacctcccgcccgcacctgcacctgcattcccatccaactgcatgcccaccaccacctgtcgatgccaggcgaaaggtcggagtgcctgggcaaagtcaaagatgcgatgacagagatcgatgggctggacggccatgaagtccatatttgccaactctgctgcacggcgaaagtgcagtgcaatattagttcacacctcgagtgattcaggtgactctggctagcttggtttggactgaatagagtatgggtaaagtgcaaaatcatgctgttgaaaggaacttggtgtgattaaacataagttttttttaataataagccaaaataaaataaactttttctctgattaaataatgaccaccacacaaactggcacacaatgaactgcttaaaggagtgttccaccacaaactataatttccaggggattttaagcttgggagtgggaataaatttttagcctccccttcacgccaaattccccttccactgaaatagtggcggctgtcaacttgaatgctgcggccagtacgacaggcgagcaaacaaacaaacaacttcattaaccccatagggcatacatcgcatacacaaggactcccactgccagtgccagttccagtgccattgccacatgcgagtgtagatgtatatatagtatatatgcggatatatatcccgacatatcggatagaggcaattgaggccagggaaggcgcttagctgacccattagagggagaggcggtcgtaaaccagaggagccaatgccaaaagtcaggggcaaaattgccgggcatcaattgtgggacgctaagcaaaacagacaatcgaaaagcgaaaccaatcgagggaaaacaatcatgaaacacaagacgagcgaacacatagcacacaggacaacaacacacatttgagatacaagtcaccgaattcccgacacgtgaagctaaggtcaaagccaggggaaaatcctgcggaggatggcaaaaggaaggggcagccagccggtcgaaggacaaatatggtaactttctgacgaccacttgaagcttagtcgatcccaggaattgaggcagaaactcaagtcgtatcgaaaaggggctcaagtcctttgattaccatgacaacgcccattaccgaatgtatctcaacgtgcggatgtgtgtgtgtgtgcgtgtgtgggtgtgcggatcgttgataaggcattttacagattgcagatagtttaacggccacccggcacataactctgccccaattacggcctaatttgctatgcatttttcgcattggctccaagttaaagctaccggaaccgcagacttcagactcccgactcagacgcacggtcctctacggatattaaactatttccgaagcatacaaaaagccaatttaaatgctaatataaaataccaacattttattattatgccatgagcacgcatcgcagagtagggcggtaatatgggcgttgtgggtgggtgggcgtggtctggtagggacaacgaccactttgggtgcgaagtttctttggtcgcattgtgcgtgataagccaagtggcttggctgattttggcagcgcaaacaggacgacgagcagggtgtcctgccacttgagccatgcaaagtatctacatatgagtgggtggatacatctgttgagagccatacagtgcgtttcgcaaataaaaagcctccaaagtcattaatcagcgcgaatttatgcgagtaattcaggactgcgactgagatgatttacgtttcttaattgtgctaataaattattattactgataggatacatttaaattatagttatccagtttctttgatacattaaactattttcattatttgcttaaacttatcctgtacttgtgaagtgaactttaatgtgctccccaaatcgttttgttttataaacttaatgattagtttattcactttggtaagaccaacacaataaaacacaatacattttaaatattctttgtctgctctgaaggcgctttcaaatagtttgagccgaagaaatctcaactttgcctctattttcacacccaaatggacgtgagatggtcaagtgcctttgacccatcaatgccgatccatgaatccctgcccactcacctgtctatcattgtctccaggcggccatagagctcacgtcgatgtctgcgcttgatttgcgcctgggccgatttctttgtggtccacccgtgggcattctgcagcacccaggtgacattgggcaaatcgtaggcaacgccccaattgatgcccaaactaaggtacagcaggttggggttgccaataacaccggtggtcagacagacagcgccctggaacacggccacataatttaaataagttagcatagtagcatttaagtattgttgattccaactggacacaatcttgtttgcatgagcattcatttggattggttttttttaattcctattatttttttttcctgtgcataaagacggcatgttgtcccattgttcgagggttcgttgactcaccgatgctgatgaaccctggggaaaggccacaaagcgcttgcctctcgagagtttccgctgcgacgatggggccgcatgtggtgtcagtgggtcctggtccaagtcccggtcgaagtcctgtgcgttcccctgtgcgacgacgctgtgtcctggcggagtcagcgtgacattgttgactttgccggcttcgtgacttgtcgccggcggagcaaattcatccggcaaactgctctggcattcgcccaaaagccatgccgtgaacaagagtgtcagccaagtcgcagacataattccaactgaatcaatgatttggcccttgatttctaccatattccgtccagcgctttgtcttagcgttctatcaaaatggcaacttgttaattgaattagagcctggccaagtgacccctttccatactaatgctttgaccaaatagctgctgcgtgccgaattggatggccacgcgaacggaatgtgaacactgcttgttcaatctggagttaagtgtcgatccagcagcagcctggttcttcagttctcggccagcttcgccatggaaaacttaatatggcttagactggcggttttggccattttagtggccttagtttccgcaggaaatggtaccacttccctaatctgcaagtctaactccgggaataggggcgtgacttacatgcacgaaaagatccatctacttcatcgccagaagcgctggctcaccttcgaactgggatctgctctaacggttagtaaaatagtcatttaacttttaaataatggaagttattttacttatacttacttttgctgatcacacaggtgactgccaattgcggtaaggcgattctagatacgatacccagaggacttctttggctggcagagattaccagtctttatgaactacctgctgccattgaagattggatacccaggcatgtaggcaagccgaaggcgaagcttccgcctccacctccgccaccgacacctcctccaccaccacctcctccaccaccaccatctccacctggtgttcctgccaatccagtttcactgccaccacaacccgtgattgtgcctctgaatcccgcagatcccatacagtccttctacttcgcctacccgcaaggcattcccacgctgagtcgccgcaaatcctattcgcagcagttgcagatgggatgtccagccacccatctggtcaaggatatgtacggaacctactactgccgaccatcggcgatgtcccgtcgtctgagaagggaactggagagccagggtaggagggtgatcaatgaggcacagaatccgcacggcatgctcttc

SEQ ID NO: 12143 - DNA, 831 bp, DROSOPHILA
atggtagaaatcaagggccaaatcattgattcagttggaattatgtctgcgacttggctgacactcttgttcacggcatggcttttgggcgaatgccagagcagtttgccggatgaatttgctccgccggcgacaagtcacgaagccggcaaagtcaacaatgtcacgctgactccgccaggacacagcgtcgtcgcacaggggaacgcacaggacttcgaccgggacttggaccaggacccactgacaccacatgcggccccatcgtcgcagcggaaactctcgagaggcaagcgctttgtggcctttccccagggttcatcagcatcgggcgctgtctgtctgaccaccggtgttattggcaaccccaacctgctgtaccttagtttgggcatcaattggggcgttgcctacgatttgcccaatgtcacctgggtgctgcagaatgcccacgggtggaccacaaagaaatcggcccaggcgcaaatcaagcgcagacatcgacgtgagctctatggccgcctggagacaatgatagacagcatgggctataatggacgtgactgcatcttgagaaccctctgcgaaagtcgtcaatacttccagcgcaccaagatgagcatggtgggcgagatgcttcgcaccatattcagcttgccaaagcagagaattttcacacgggaactgcacgagaatgcggatatagtgcactacgatcaggcatatcggaatgctcataccgacgactgcacccagtacaattgtcatttctctttgctggaactggcatttggaaaatataccacaccgccgaaaaattattacgcctaa

SEQ ID NO: 12144 - protein, 262 aa, DROSOPHILA
MSATWLTLLFTAWLLGECQSSLPDEFAPPATSHEAGKVNNVTLTPPGHSVVAQGNAQDFDRDLDQDPLTPHAAPSSQRKLSRGKRFVAFPQGSSASGAVCLTTGVIGNPNLLYLSLGINWGVAYDLPNVTWVLQNAHGWTTKKSAQAQIKRRHRRELYGRLETMIDSMGYNGRDCILRTLCESRQYFQRTKMSMVGEMLRTIFSLPKQRIFTRELHENADIVHYDQAYRNAHTDDCTQYNCHFSLLELAFGKYTTPPKNYYA

SEQ ID NO: 12145 - DNA, 3815 bp, DROSOPHILA
ccgcttccaccgaatcctctactgattcgtcctccgtttccaccgaatcttctactgattcgtcctccgtttccaccgaatcttctactgattcctcgactgattcttcctccgcttccaccgaatcgtctactgattcgtcctccgtctccactgaatcctcaacggattcctcaactgattcgtcctccgtgtccaccgaatcatccactgattcgtcgacagactcctcatccgcttccaccgaatcctctactgaatcctcgtctgattcgccctccgattctaccgaatcctctactgattcctcatctgtttccacggaatccacaacaagtagtggtgaaaaggaagcggcgcctgaggaggacttgaaatccctctcctctcaaaacagcaatgacctccagaagattctaaagaatctacgggtttggtttaaaaatcactaagcgatcgttttaattttaaataaaagcataaacgaataaaacccaaataaatataaatatctactttatttattcgaaaataaaaacaataagtgtttttccattgggtaaataaaaatttaacttcataacttgaaaagatgagcagtgtgatttattgtgaaaccctctaaagatatccgctgttatcaagttatcagggtatagtccccgttcaggcgccaaagtacagtgttacccgccacttgactaaccaaacgttagcaaatcaattagaggcggtcagccgataagctaccaactatactataccattaccagataacagggctatttatggatgtttgggtcacagaaaaacttattaaaaatcaaatcggaaggaatcatggccgattttaagaacacgatagcaacttaattagcttttaatcagcatgatttaaagatttctcgatgacagttccaactaccgaaaattatgatagaagagagctataaaaatatgaaccaaaggccggtagcattcagtacgtattcgagatccgttaagtcggtcagttaagtgggaatactaaaaatgaagttcgctgttgtcctgtgcctgctattggccaccagtggctttgccctggtccccaagcatcccgccgatctagtctccatgttggcccgccaacagttcgccgttcgaactttaatggccgctcccgaggcacgggatgattcgaccctgatcaatgactgcttcaaccactacctggaggaccagaccaacgtgatcatgggttacaacctacagtacaccggatgtctgagaacagcacaaagtggtcgggatgagctcactaaggagagcgcctcggagcgcgaagcccttctggatcgcaccaacaaaatgtgttccagtctgactgagtgcgatacccttgttgatggcctggaattcttcgactgctaccgcaatgccgtaagaaaaattattcactaatttaattatctcgaaatctccagaagatgatctacctcttcaagcacttacgattataatgaaaagctctttaaaatgtgccttggccacacactggtctagatttccaatcgtattgcttactgctcgattagagcggattaaaaaagcgtgccattgtcataaattcattcgtattatcagacgagagctaaagtgctttataatgagtgacagtctaacattaagggaatatacaataaatagtaacatgcaatatcttttagtcctccgacagctacaaggttatgttcaccctgaacagtgactccagcctggacttcaaccgcatcagtgccaagtaccaagtgatcgagaccgatcttactgactgtgtggattcagctcgcttggattacgcccacgacatggacgcctgcgacgagaatctgacgttgtgcttaaagggaggcgagacttcccccgaaccgactgttcccactacgacctctgggacgccagtcacggtcactactcctgaggctccagtgtccactactcctgaggctccagtgaccactactcctgtagctccatccactactgaaactccagtgcccactactcctgtagctccatcgactactgaggctccagtgtccactactcctgaggctccagtgtccactacacctgtagctccatcgactactgaagctccagtgcccactacacctgtagctccatcgactactgaagctccagtgcccactacacctgtagctccatcgactactgaagctccagtgcccactacacctgtagctccatcgactactgaagctccagtgcccactacacctgtagctccatcgactactgaagctccagtgcccactacacctgtagctccatcgactactgaagctccagtgcccactacacctgtagctccatcgactactgaagctccagtgcccactacacctgtagctccatcgactactgaagctccagtgcccactacacctgtagctccatcgactactgaagctccagtgcccactacacctgtagctccatcgactactgaagctccagtgcccactactcctgtagcttcatcgactactgaagctccagtgtcaactactcctgtagctccatcgactactgaagctccagtgtccagtactccagaaagcactaccgaagccgcttccactaccgagcgttcccctgaggaagatatcgacagatctgggcgtctcggtcagaggagaacttggaacctgtttaagcgcttcttctaagcgtgagaaactttgtattatttattgcattcaatgagaaaatttagctacgtataaagcgtagaatacttttgggtttgatttcaaattgttttcatagagggacgcgtgcaggatttctgcggaaggggttccaaaaatatcaacaaattgctgtattagtagattaaaacttttgttaaatatatagaaactgtatgcacactttttgttttgaattccaaatatattcaatcaagtcggttgactagtggattaaccctcttgagtacgacgctgggagtaatcttatctctgatagatgacggagtaatgagctttatctcgcctgtccaaccagacaagcgccacactattgactactggtgtttgccactactcttagatcagagagcttcgatccaccggacgacactggcaatcacattgtgcacgtctatagataagtggtgcacctgaacctttcataaataactggccttcgggctggtcaataaaaccgaatggggcagaaccgagttattaggaaatgatcaattagacgctcggcacttgagcattttcgttggttcttgagcgcattcgagacggacgatcaaatggaagcactacgtcgatttttaagaacggagactcgttgtcgcctcaacgggatacataccctaatattgtgtgtcctatttttgggtttttcggtggctggtgagatgccggatttgttcactcccgaaccggatctcacgatagacgaatgccacgatgagttcaccattgcctgtgccaacgcttcactggtcttctccgattcctacgatctgtgcgaactgaatgccaatgagaccatcatcaatctagaggtcgatgttgaactggagcgactccaaatcgagttgggatccagtgcggtgtgcggcaatatgcaaatctgcgatacattggttgacgatctggagtactttcagtgcatcaataagaacgtaagtttttgaattatgttaaagatgactattaagtgtgtagagttcgaaattttaagtgcaaatttaaccatttgtttttagggaatccataacctcgaca

SEQ ID NO: 12146 - DNA, 1528 bp, DROSOPHILA
ttaagtcggtcagttaagtgggaatactaaaaatgaagttcgctgttgtcctgtgcctgctattggccaccagtggctttgccctggtccccaagcatcccgccgatctagtctccatgttggcccgccaacagttcgccgttcgaactttaatggccgctcccgaggcacgggatgattcgaccctgatcaatgactgcttcaaccactacctggaggaccagaccaacgtgatcatgggttacaacctacagtacaccggatgtctgagaacagcacaaagtggtcgggatgagctcactaaggagagcgcctcggagcgcgaagcccttctggatcgcaccaacaaaatgtgttccagtctgactgagtgcgatacccttgttgatggcctggaattcttcgactgctaccgcaatgcctcctccgacagctacaaggttatgttcaccctgaacagtgactccagcctggacttcaaccgcatcagtgccaagtaccaagtgatcgagaccgatcttactgactgtgtggattcagctcgcttggattacgcccacgacatggacgcctgcgacgagaatctgacgttgtgcttaaagggaggcgagacttcccccgaaccgactgttcccactacgacctctgggacgccagtcacggtcactactcctgaggctccagtgtccactactcctgaggctccagtgaccactactcctgtagctccatccactactgaaactccagtgcccactactcctgtagctccatcgactactgaggctccagtgtccactactcctgaggctccagtgtccactacacctgtagctccatcgactactgaagctccagtgcccactacacctgtagctccatcgactactgaagctccagtgcccactacacctgtagctccatcgactactgaagctccagtgcccactacacctgtagctccatcgactactgaagctccagtgcccactacacctgtagctccatcgactactgaagctccagtgcccactacacctgtagctccatcgactactgaagctccagtgcccactacacctgtagctccatcgactactgaagctccagtgcccactacacctgtagctccatcgactactgaagctccagtgcccactacacctgtagctccatcgactactgaagctccagtgcccactacacctgtagctccatcgactactgaagctccagtgcccactactcctgtagcttcatcgactactgaagctccagtgtcaactactcctgtagctccatcgactactgaagctccagtgtccagtactccagaaagcactaccgaagccgcttccactaccgagcgttcccctgaggaagatatcgacagatctgggcgtctcggtcagaggagaacttggaacctgtttaagcgcttcttctaagcgtgagaaactttgtattatttattgcattcaatgagaaaatttagctacgtataaagcgtagaatacttttgggtttg

SEQ ID NO: 12147 - protein, 471 aa, DROSOPHILA
MKFAVVLCLLLATSGFALVPKHPADLVSMLARQQFAVRTLMAAPEARDDSTLINDCFNHYLEDQTNVIMGYNLQYTGCLRTAQSGRDELTKESASEREALLDRTNKMCSSLTECDTLVDGLEFFDCYRNASSDSYKVMFTLNSDSSLDFNRISAKYQVIETDLTDCVDSARLDYAHDMDACDENLTLCLKGGETSPEPTVPTTTSGTPVTVTTPEAPVSTTPEAPVTTTPVAPSTTETPVPTTPVAPSTTEAPVSTTPEAPVSTTPVAPSTTEAPVPTTPVAPSTTEAPVPTTPVAPSTTEAPVPTTPVAPSTTEAPVPTTPVAPSTTEAPVPTTPVAPSTTEAPVPTTPVAPSTTEAPVPTTPVAPSTTEAPVPTTPVAPSTTEAPVPTTPVAPSTTEAPVPTTPVASSTTEAPVSTTPVAPSTTEAPVSSTPESTTEAASTTERSPEEDIDRSGRLGQRRTWNLFKRFF

SEQ ID NO: 12148 - DNA, 3027 bp, DROSOPHILA
ctctcgaatctcctcctgagcctcagtggcatccgttagcaaggacagccgctcgttaatggtaatcttctgacaggcattatatccttgcgaccaggtagccccttcactttccagttccggtaggtaacgagcaaaacacttcttggtgttgcccagactcgaaacagtttcctttccatcgtctaagtaagagcaaaatgagtttagagttcggggagaaggctcagcagcacatgcctagaaatgtagttggaattattgaaaaataacaatgatattacttctttaccccaagggctataagcagaatgatagctgttttcatggcactgatgaccataaaacactgacggaaatcgaagcaaaatttccgcgtcaagttaccgaaagttggtaatgtaatcggacagtgatgtatggtttgtttataggcttcttatcgctggggttcgtctgcaaataacgatccagtagctcccaaactgtgcacttcgatgatgagtataaagtgttgcatacttttagctaaaaggaaaacttccggcgaaagttggttggtctttgcaattaattacgtcactcgataaaaaaatagtaatgcgaaatggttcaatagatattgggatgtatgaaacaattggttacagcaatcgactctgcggatcgcaaaacccctaagctcctaaattacctttgataagttcaaagaaccgcaagttaggccttccggtggttcctggccaccttatcttctgactatcaggttttgaccctgaatacacgtgtgtggcatcgaatgggaatgcacatgcaaagcaatttgtgggtctgagcattacgcatacgcattaatgctacctaattgatcgacggtgggtagtaggaaaatattcgcaaaaatatcatttcgggcaaacggatcaatcattcgcaccgccgaacacgtatataaaggttttgtaccccttccttggcagcgacagtaaagatcgagccgccaacaaaacgaccgccaacatgaagcttctgtgcagtgtgctaatcctcgccagcgttctggcggccaacgtaacaaataatttgatattcgccaccattccggcaataaccagtttggctttctcctgaacaggccaagcccaatgttcagctgcagctgcagagtgccctcgaccagtatttggtgcatgcccgcaatttggataccaccgtttccgctgatgtgaccacccagtgcttcaacctctatctgcccatgctgaacgaagtggctgccaccttctccacttcctatcaggcctgcatcagcaccgccaacgcggagaccgccaatctgaccgccgaggccgacaagcagcagaagatctaccaggcggaggtcaccagcctatgcagcgccttcaccgcctgcaacagcgacaacgataccaccaacttcttcaagtgctacgccaatgcggtgagttgaagctaaaggatcttccgaatgatagttgttaacatagactagggttcaagtagtactcatatgccccaacaagtataggtaattcgcatatggtgaaaggccggagactaggtcaatttttttagacctaatcttaatgtgttacaaaaaatgtatcgttttatttccttaggccgagagtgatgtatctgtgatctatggcatcgccaccaatgccgccagttcggccaactccctgagcacaggcatccaggccatccaggacaccgagtaccagtgcaccaacaccacggagagcaactacgtccgggataccgctgccacctacgatctgttggacagctgcctgaagtacggagtgcccaccacctccaccgccgccccctcctccaccagccccgttgatagctcgagcggggctcctgtcactgatggcaccactgttgtggcatcgtccaccgccgctgctgacaccactgtggctgtgaccaccgctgcacccggaaccgctgctccggcgaccaccgccacttccggcacttcggcctcttcttaagtcacaactttaagtaatcacaagcaataaatgaacatttgaaaaaacgttatgaaaggtgtcctttaaacattatttaggaacagaaaaatttattttatatgtcgaaatcattatgtaaatttaaaggaactcaattaaacttatttgtttaaatttttatttttcattaagttattattaacacttacatattattactaccgtcactctctctctcttgagatagttggtagcacattaagtacctataaaaagtcaaatgaactagaaatcttttaaatagttgatttacgagcaaacaagtttttacatatggcatgtaagagtcatcataatatattttacatattttagccggataagagtttcatttcatttattaaaaatataggatttgattacaactgctaactttatattttttttttttttttttttttttttccattataacgatgatgtttttattatttgatcaacgcactgttacccatgcggcaacttaattggatctgcttaaattattttattttacaatgggtctgggttacttaagactaacagatttttaatcctaaaaatgatagggagaattataatagttgatataacatagtaattattatttatttgattattctaatgaattttaaaactaagactttctaggtcaaaaccaggttagggaggtcatgagggtggtggctaactttatatagattgcctgagacaaatgttgcatactttttgccgaaaaacaaatgttattcaaaacaagtaaggaagtcaggttcggcaaaaccgatgcttgtatacccttgctgtaaatatatatttaaaatactgaagcatttttttctattattttcaattaattgtacgacatcattatatgatatagtcgtatggttttgctcaaagatctggttatatcgaattaaaaggctttaagatcgaaaaaaaaaaaaaaataaagctgggatttcttttcaattac

SEQ ID NO: 12149 - DNA, 782 bp, DROSOPHILA
ccaacaaaacgaccgccaacatgaagcttctgtgcagtgtgctaatcctcgccagcgttctggcggccaacgccaagcccaatgttcagctgcagctgcagagtgccctcgaccagtatttggtgcatgcccgcaatttggataccaccgtttccgctgatgtgaccacccagtgcttcaacctctatctgcccatgctgaacgaagtggctgccaccttctccacttcctatcaggcctgcatcagcaccgccaacgcggagaccgccaatctgaccgccgaggccgacaagcagcagaagatctaccaggcggaggtcaccagcctatgcagcgccttcaccgcctgcaacagcgacaacgataccaccaacttcttcaagtgctacgccaatgcggccgagagtgatgtatctgtgatctatggcatcgccaccaatgccgccagttcggccaactccctgagcacaggcatccaggccatccaggacaccgagtaccagtgcaccaacaccacggagagcaactacgtccgggataccgctgccacctacgatctgttggacagctgcctgaagtacggagtgcccaccacctccaccgccgccccctcctccaccagccccgttgatagctcgagcggggctcctgtcactgatggcaccactgttgtggcatcgtccaccgccgctgctgacaccactgtggctgtgaccaccgctgcacccggaaccgctgctccggcgaccaccgccacttccggcacttcggcctcttcttaa

SEQ ID NO: 12150 - protein, 253 aa, DROSOPHILA
MKLLCSVLILASVLAANAKPNVQLQLQSALDQYLVHARNLDTTVSADVTTQCFNLYLPMLNEVAATFSTSYQACISTANAETANLTAEADKQQKIYQAEVTSLCSAFTACNSDNDTTNFFKCYANAAESDVSVIYGIATNAASSANSLSTGIQAIQDTEYQCTNTTESNYVRDTAATYDLLDSCLKYGVPTTSTAAPSSTSPVDSSSGAPVTDGTTVVASSTAAADTTVAVTTAAPGTAAPATTATSGTSASS

SEQ ID NO: 12151 - DNA, 4533 bp, DROSOPHILA
ataaactatcaacaaatagtattatttttagaagaaaaacgctatataaaatatattttacattcaatatttcaaaagttgttggaaaagatatgcacatatgaacttatatccaaagcactgcaaattcgtaaaacaattaatttaagctactgttgggccataaaattcgtatattgtttaatatatttacacacatacatacaaatgtttaaatcatgcgcccaagttcaatgaccgttaactgttaatgctagggccactaaaaaacataacttaatattgattttggtgttattcacaaaattgaacacttcatatatttatggccgctactgtacgagtatgacctcaaaagaccgtgaaatatacatttatctacattcaattaatttggagaatttctataattacaacttgacaaatttatagatttggttacagatcacggagcagtgaaagttgtaaattttaaataagttttatttcggtaattgtcgagtaagcaaatttatcgcacagcaacaaaaattaagattcttggattgttccccatcaatttattgacaattaagtgacgcattaattggaaatttgttgaaagctcaacgtttgctcttgatattcacaatcgagagaatgatactctttgaatttagaggttaaaaatagagcattcaagttatcaccgatagttctgctatagccatcttatctttgtagtctaatctgcaggcactaaatatgaatttcagaactgtctaaacaccaaagtcgaccctctaatcggttctactttacataacttacataactacatacataactccgatttgaaggctgatcgagtgaacagattttggagagctaataacatggtaatttgtttaaacaaattaagcagatttgctttcggtaatcttatcgtcactgttttgcggattcttcacaattaatcttaaaatagttctaaagtcaaggttcccctgagttgtttaatctacttccgtttgaggtaatcttcgtagagtttcaacaactctggagaagtccgcggaggcaccgccttcaaggcgtgctcgaagtccgtccacttgacatcctccgcttcgaagctttgctccagggctctcagggcagcctcatggcatacggcttgtatttctgcaccggaatatccctccgtcagctgcaccaacttctccatgtccacatcgtttgatatcggcatggcacgcagtttgatctttaagatctctctacgtgcttcacattgcggtagtcccacgtagagaattcgatcaattcggcctggacgaagcagtgccttgtcgatcatatctggacgattggtggcagcgactatggtgacattttgcagtgcctccacgccatccagttcggtgagcagttgcgtgaggacgcgctcttttacggacgaaccagagctggatccgtcgccctccgaacgctcgccaccgatggcgtcgatttcgtcgaagaaaactatggcgggtgccacctggcgagcctttcgaaagacctcacgcaccgctcgctccgattcgcccacccacatggaaaagagctctggtcccttgatggacagaaaattaagcttgctctcggtggccagggccttggcaatcatggttttcgagcagcctggcggtccaaacatgaggatacccctgggtggcttgatacccaggcgttggaacttatccgcgtgcagcagtggccactcgatggcctgctgcatggccaaacgtagctcggattgaccgccaatgtcggaccactgcacattgggacactcgatgagaacttcacgcatcgccgatggtttaatgcgggtcaaagccgcctgtagatgcggcatctgtagaggattcggttgcgcctgcagcatggcagcgtaaacgagatttgctaagtctgctcccacgtagccatgggtaatagatgcaacgtgctccacttcctcatcgctcaactgatgctccactgacttgatgaggcatcgtacaatttccagccttgcctgagagctgggtgcacccaactccacttcattgtccaatcgaccagctcgccgaatgctcggatgcagggtatcaatctgagaactagtggccaggacaaatgttttgcttccctttagctggctgggagagcttagctgatccagcagggataagaatgccaatgagacgcgcttgacaagatcgctgttttcttgcttgggacacaagttgtgcacatcctcaatcagcagcaacgttggatgcggatagtgattgtaggcacgctcaaatatagcaccaagtttctgttccgtttcgcccaggaatttgctgtacacttcgccgctgtttatgcgtataagctggacatgtccttggctacgttcctcggccactgcgcacatggcttccagcaccatggacttgccacagccagtggcgccatagagaagcagtccgcgggaaaccctaaggcctaaaatataataatcttaaataggtgcaatgtgagtcttggtttacatttacctgcaggcaacgttcggaatcccaaagcgtactccatactctcctcaaccagttgcaattgcctatccagcccgcctatttggcatttggtgatcctgtgacttattttttgctcctcctcctgctgatttgcatcgtcggttatcaggtggagcttggttacgttggtaacctggatgaactgcaagggtttggagtcgagactcagaccagctagagcctcttccactgtgctctgccatcgctccaggcgaaaagtcagcgatttgttaaagaaattcatgtggatcagactgtccttgtagaatacccgattgaccatgtctcttttgagaagggcaatggcgtcctgcagttgtactgacttcagggaggtctctgtggtgtttacatgcttcagggaaatgctggcagccgcagtgaggcgactgggatgcaaggcagagatcttgagtagctttcctcgaagttgtgtgcaatggagtttgaaatctggttaaaagtatgataattagtgccgagaactgtttttatagtgtaaaacacatacccccttcgctcacaaatactgtggtgaggaattgctctgatgtgggccatacaatcctaaccagcggctgctccgccgtcgatggagcttccagcaccacatgttgtccaatgtgtagctgtgccaattgcatcgcaccctcggagacgaagactagcatattggcatacttggtgggcagatccttcagagactccacctcgaaattacgctgttgaagacttctcgtatagattgctccactgcgaacgtactccgcctcagaatcgggaccaacatcatcctggctgatggcgaagcataagccctcgtggttatctctcgctttcgagggaatgtggacgccgcaggactcgcagtggtaccaagtaacctggtttttcttgctgcttgactttggcggcatttcgttggccggttgcacgttttgttttcattgtgggtggaaacgttcgttgtgaatggcaaattgagcgcaagctctggcagatcttgatcgaaaatagctagatcttggtatagctaaacagataataatcgtatggcgtacggattgcttgttaatattaatttcattgcgtaatattttaaatattcgatagttataaataattaaaattgattgttaaaaataatagctaagcaaatgcagtcagcctagctgacatcactgacagtgttggtagggtcggtatttacccgctgtccgcatgcagccactccaaagattcattgttggcttgtgactcagactttctggtgcgaaaagcaggagcggatcacacagcggattagcgatgaacagcgacggtgaagcctcatcactgcagatgccccaggtgacggtgggtggcatgctgccggtagaagccaaccaatcgcctgaaaccgctccgctttcgatggcggagacggtgtccaacacggacttctacatcggcgttggcctggctatctcctcctgcttcttcatcggttccagcttcatcatcaaaaagaaggcgctcattcggctgagcaggtacggcgaggtgcgggcgtcagccggaggatttggatatctgagggagtggatctggtgggcgggccttctgacaagtgagtgaagaaccaaacaaagaacactcggtttccggaatacccttgcagtgtgaactctctagtgtgtatatgttctatgagtaataatagtaaagtgaaattcgaaaaccaagatacttaagtgaggaaagccttagaaacacttttccatatgtttcatatccaaaaaggtaataaaataacacatatgtacctgctatcacaaacttccgttgctgatatttttaatttaaatctttccaaatattagtcaattacttataacgtacaacgcaaactagagcattaataaacatataacgaataatctttaaaacgtagagataa

SEQ ID NO: 12152 - DNA, 2422 bp, DROSOPHILA
aaacgtgcaaccggccaacgaaatgccgccaaagtcaagcagcaagaaaaaccaggttacttggtaccactgcgagtcctgcggcgtccacattccctcgaaagcgagagataaccacgagggcttatgcttcgccatcagccaggatgatgttggtcccgattctgaggcggagtacgttcgcagtggagcaatctatacgagaagtcttcaacagcgtaatttcgaggtggagtctctgaaggatctgcccaccaagtatgccaatatgctagtcttcgtctccgagggtgcgatgcaattggcacagctacacattggacaacatgtggtgctggaagctccatcgacggcggagcagccgctggttaggattgtatggcccacatcagagcaattcctcaccacagtatttgtgagcgaaggggatttcaaactccattgcacacaacttcgaggaaagctactcaagatctctgccttgcatcccagtcgcctcactgcggctgccagcatttccctgaagcatgtaaacaccacagagacctccctgaagtcagtacaactgcaggacgccattgcccttctcaaaagagacatggtcaatcgggtattctacaaggacagtctgatccacatgaatttctttaacaaatcgctgacttttcgcctggagcgatggcagagcacagtggaagaggctctagctggtctgagtctcgactccaaacccttgcagttcatccaggttaccaacgtaaccaagctccacctgataaccgacgatgcaaatcagcaggaggaggagcaaaaaataagtcacaggatcaccaaatgccaaataggcgggctggataggcaattgcaactggttgaggagagtatggagtacgctttgggattccgaacgttgcctgcaggccttagggtttcccgcggactgcttctctatggcgccactggctgtggcaagtccatggtgctggaagccatgtgcgcagtggccgaggaacgtagccaaggacatgtccagcttatacgcataaacagcggcgaagtgtacagcaaattcctgggcgaaacggaacagaaacttggtgctatatttgagcgtgcctacaatcactatccgcatccaacgttgctgctgattgaggatgtgcacaacttgtgtcccaagcaagaaaacagcgatcttgtcaagcgcgtctcattggcattcttatccctgctggatcagctaagctctcccagccagctaaagggaagcaaaacatttgtcctggccactagttctcagattgataccctgcatccgagcattcggcgagctggtcgattggacaatgaagtggagttgggtgcacccagctctcaggcaaggctggaaattgtacgatgcctcatcaagtcagtggagcatcagttgagcgatgaggaagtggagcacgttgcatctattacccatggctacgtgggagcagacttagcaaatctcgtttacgctgccatgctgcaggcgcaaccgaatcctctacagatgccgcatctacaggcggctttgacccgcattaaaccatcggcgatgcgtgaagttctcatcgagtgtcccaatgtgcagtggtccgacattggcggtcaatccgagctacgtttggccatgcagcaggccatcgagtggccactgctgcacgcggataagttccaacgcctgggtatcaagccacccaggggtatcctcatgtttggaccgccaggctgctcgaaaaccatgattgccaaggccctggccaccgagagcaagcttaattttctgtccatcaagggaccagagctcttttccatgtgggtgggcgaatcggagcgagcggtgcgtgaggtctttcgaaaggctcgccaggtggcacccgccatagttttcttcgacgaaatcgacgccatcggtggcgagcgttcggagggcgacggatccagctctggttcgtccgtaaaagagcgcgtcctcacgcaactgctcaccgaactggatggcgtggaggcactgcaaaatgtcaccatagtcgctgccaccaatcgtccagatatgatcgacaaggcactgcttcgtccaggccgaattgatcgaattctctacgtgggactaccgcaatgtgaagcacgtagagagatcttaaagatcaaactgcgtgccatgccgatatcaaacgatgtggacatggagaagttggtgcagctgacggagggatattccggtgcagaaatacaagccgtatgccatgaggctgccctgagagccctggagcaaagcttcgaagcggaggatgtcaagtggacggacttcgagcacgccttgaaggcggtgcctccgcggacttctccagagttgttgaaactctacgaagattacctcaaacggaagtag

SEQ ID NO: 12153 - protein, 799 aa, DROSOPHILA
MPPKSSSKKNQVTWYHCESCGVHIPSKARDNHEGLCFAISQDDVGPDSEAEYVRSGAIYTRSLQQRNFEVESLKDLPTKYANMLVFVSEGAMQLAQLHIGQHVVLEAPSTAEQPLVRIVWPTSEQFLTTVFVSEGDFKLHCTQLRGKLLKISALHPSRLTAAASISLKHVNTTETSLKSVQLQDAIALLKRDMVNRVFYKDSLIHMNFFNKSLTFRLERWQSTVEEALAGLSLDSKPLQFIQVTNVTKLHLITDDANQQEEEQKISHRITKCQIGGLDRQLQLVEESMEYALGFRTLPAGLRVSRGLLLYGATGCGKSMVLEAMCAVAEERSQGHVQLIRINSGEVYSKFLGETEQKLGAIFERAYNHYPHPTLLLIEDVHNLCPKQENSDLVKRVSLAFLSLLDQLSSPSQLKGSKTFVLATSSQIDTLHPSIRRAGRLDNEVELGAPSSQARLEIVRCLIKSVEHQLSDEEVEHVASITHGYVGADLANLVYAAMLQAQPNPLQMPHLQAALTRIKPSAMREVLIECPNVQWSDIGGQSELRLAMQQAIEWPLLHADKFQRLGIKPPRGILMFGPPGCSKTMIAKALATESKLNFLSIKGPELFSMWVGESERAVREVFRKARQVAPAIVFFDEIDAIGGERSEGDGSSSGSSVKERVLTQLLTELDGVEALQNVTIVAATNRPDMIDKALLRPGRIDRILYVGLPQCEARREILKIKLRAMPISNDVDMEKLVQLTEGYSGAEIQAVCHEAALRALEQSFEAEDVKWTDFEHALKAVPPRTSPELLKLYEDYLKRK

SEQ ID NO: 12154 - DNA, 2774 bp, DROSOPHILA
ttcatttattaaaaatataggatttgattacaactgctaactttatattttttttttttttttttttttttttccattataacgatgatgtttttattatttgatcaacgcactgttacccatgcggcaacttaattggatctgcttaaattattttattttacaatgggtctgggttacttaagactaacagatttttaatcctaaaaatgatagggagaattataatagttgatataacatagtaattattatttatttgattattctaatgaattttaaaactaagactttctaggtcaaaaccaggttagggaggtcatgagggtggtggctaactttatatagattgcctgagacaaatgttgcatactttttgccgaaaaacaaatgttattcaaaacaagtaaggaagtcaggttcggcaaaaccgatgcttgtatacccttgctgtaaatatatatttaaaatactgaagcatttttttctattattttcaattaattgtacgacatcattatatgatatagtcgtatggttttgctcaaagatctggttatatcgaattaaaaggctttaagatcgaaaaaaaaaaaaaaataaagctgggatttcttttcaattacataaagtttatatgttcattcaatatttgaatatgacacattgataggaatagttttcgctaagtttttgggctttgtggcccaatagttacagcaatcaattccatggattgtaaactcttaagctgttgagttacctttgataagttgaaagaccaggtgcttgtggactacattatattgttatccgcacttcgacttgactcatcgattggagccgtctggtcatacggcctaatgctacctaattgatcggaattcacttgcaacaaagaaatcacacgaatttcaagttggtcaaacggatccatcattttaccgaccagacgggtatataaaacatttagacctggtctacagtagtcccagtaaaggaataaccgtcaacatgaatattctgtgcaccgtgcttatcttcgccagcgttttggcggccaacgtaaacaaaacggcacatccgcttatttctcgagagtaaccacttccgtttccaggccaagcccaataaccagatccagagtgccttggatcagtatttggtgcatgctcgcagtctggatacatttgtttccgaggatatgaccacgcagtgcttcaacttatacatgcctatgctgaatcaagtggctgccactttctcgagttcctatcaggactgcatcaccaccgccaatgcccagatcgccaatttgaccgcccaggcggagcagcagcagaagacctatcagtccgacgtttcaacactctgcagtgcctttaccgcctgcgacagcaacaatgataccgcaaacttcttcaactgctacgcgaatgctgtaagaaaatgcacaatgaaatagtgaaagtattgaaaaattgaattttaaatattcctataggctgataatgacgtctctgtgatctacaacctggccagcaacgctgccagctcggccacctccttcagctcgggcatccaagccatccaggacaccgagtaccagtgcaccaacacaacgcagaacaactacgtccgggatacagctgccacctacgatctgctggacaattgcctcaagaatggagtgcccaccactaccgccacatcctcatcagccgcccctcaaactacctctaccacagacgggggtttcctatttggcctttgagtagttagcattcgaaactttaacatattctaatccataaaaacttgtatcgttcagtaattttttaaaccaaacaaaagaaaacaaataattcaattatattgccaaattcacagtagcttggttttatactgcagacatcgccaattgaaatcttaacataatcaattttgtttcagatgaaattttaaaaacgaagtgatcagtgaaataaagtcgcattggtttcagtcgtttagttattttataatgtgtactattgtacatgcctagtgactaagggaaatcctaaaaggctgttgtattttttatatttttttgccaacggagtacagatgctctcacaaatatactttcgtgtaatattcggttatttctggcacaagatttcggaacagactgatgagttgcccacaagccgcaggcagcatcaatggaaagtttttacctacactcggagaatagaatagaatagactgaccgaacttacaccttttcgattggcgagcgggcataaatattcaatcggcggaggtggccttatcggcgatacattcaattatctctccggtttgcgactgttggcgctttaaagtgtgcccacacacagtggcttgtgctcagtcgaattttgttctcggaccattaaacattacccattcagccagcattcaccattccaacattcgacattcaacatggaaggccaacgcgtggcagtcgtcgcatttgctgttttgctcgccggattgtgcgtgctatccggtctgaatgtaatgaaaatgaaattgaaaatggaaatgaaaatgagaccgggttggtgacaatcgagtaaccgtaacccccttttcgtaatctccaacaggcggcacccgtggaatgcaataatggcggtggcatccagatctctgacgatggtttccagagccagacgcaaaccggtcccggctgccagacccagacctccgaggatggaacccagagccaaagccagagtcag

SEQ ID NO: 12155 - DNA, 656 bp, DROSOPHILA
gaataaccgtcaacatgaatattctgtgcaccgtgcttatcttcgccagcgttttggcggccaacgccaagcccaataaccagatccagagtgccttggatcagtatttggtgcatgctcgcagtctggatacatttgtttccgaggatatgaccacgcagtgcttcaacttatacatgcctatgctgaatcaagtggctgccactttctcgagttcctatcaggactgcatcaccaccgccaatgcccagatcgccaatttgaccgcccaggcggagcagcagcagaagacctatcagtccgacgtttcaacactctgcagtgcctttaccgcctgcgacagcaacaatgataccgcaaacttcttcaactgctacgcgaatgctgctgataatgacgtctctgtgatctacaacctggccagcaacgctgccagctcggccacctccttcagctcgggcatccaagccatccaggacaccgagtaccagtgcaccaacacaacgcagaacaactacgtccgggatacagctgccacctacgatctgctggacaattgcctcaagaatggagtgcccaccactaccgccacatcctcatcagccgcccctcaaactacctctaccacagacgggggtttcctatttggcctttga

SEQ ID NO: 12156 - protein, 213 aa, DROSOPHILA
MNILCTVLIFASVLAANAKPNNQIQSALDQYLVHARSLDTFVSEDMTTQCFNLYMPMLNQVAATFSSSYQDCITTANAQIANLTAQAEQQQKTYQSDVSTLCSAFTACDSNNDTANFFNCYANAADNDVSVIYNLASNAASSATSFSSGIQAIQDTEYQCTNTTQNNYVRDTAATYDLLDNCLKNGVPTTTATSSSAAPQTTSTTDGGFLFGL

SEQ ID NO: 12157 - DNA, 2595 bp, DROSOPHILA
caaacttcttcaactgctacgcgaatgctgtaagaaaatgcacaatgaaatagtgaaagtattgaaaaattgaattttaaatattcctataggctgataatgacgtctctgtgatctacaacctggccagcaacgctgccagctcggccacctccttcagctcgggcatccaagccatccaggacaccgagtaccagtgcaccaacacaacgcagaacaactacgtccgggatacagctgccacctacgatctgctggacaattgcctcaagaatggagtgcccaccactaccgccacatcctcatcagccgcccctcaaactacctctaccacagacgggggtttcctatttggcctttgagtagttagcattcgaaactttaacatattctaatccataaaaacttgtatcgttcagtaattttttaaaccaaacaaaagaaaacaaataattcaattatattgccaaattcacagtagcttggttttatactgcagacatcgccaattgaaatcttaacataatcaattttgtttcagatgaaattttaaaaacgaagtgatcagtgaaataaagtcgcattggtttcagtcgtttagttattttataatgtgtactattgtacatgcctagtgactaagggaaatcctaaaaggctgttgtattttttatatttttttgccaacggagtacagatgctctcacaaatatactttcgtgtaatattcggttatttctggcacaagatttcggaacagactgatgagttgcccacaagccgcaggcagcatcaatggaaagtttttacctacactcggagaatagaatagaatagactgaccgaacttacaccttttcgattggcgagcgggcataaatattcaatcggcggaggtggccttatcggcgatacattcaattatctctccggtttgcgactgttggcgctttaaagtgtgcccacacacagtggcttgtgctcagtcgaattttgttctcggaccattaaacattacccattcagccagcattcaccattccaacattcgacattcaacatggaaggccaacgcgtggcagtcgtcgcatttgctgttttgctcgccggattgtgcgtgctatccggtctgaatgtaatgaaaatgaaattgaaaatggaaatgaaaatgagaccgggttggtgacaatcgagtaaccgtaacccccttttcgtaatctccaacaggcggcacccgtggaatgcaataatggcggtggcatccagatctctgacgatggtttccagagccagacgcaaaccggtcccggctgccagacccagacctccgaggatggaacccagagccaaagccagagtcagtcgggcaatggctaccaatcgcagacgcagtgcagcggctcatcctgtggtcagttcaacaccttcccgccgctattcaccattaagccgctggagccattggcacccatcacttggcagccatgggggcaaatgaggaacaaccaggtgcagcagcaggtcaattttggctaagttttggaaaaaaaagtattcaagttaataaagattttgaatttgtaattattcaaaaatttttagtttattatatacaacacgataagatttcaaaaaaaaattgtatgttcaattgaaaattaattgatgaacagcgacttaacggtctatcaccataatgaaaaattaaaaattaaaaaatgtattttattaatagaaagaacttacaatatggcaaattattggattaatcgtagtcctaacaaaacacaaataccaaaaaacaaagatttctataacatccaaaagattttgattcaaaattcatagataacaacaatagaaaacgcgcgttcaaaatgttttcggtgtaataaaaaaaaggaaagctggcttgaatttagatgcgaagtctggcgcttgtctagctcaacgagatatcgcaatccaaaatgactcattcattttgttttttatagtctgacttatttacatttttagtcatgtggggtagattagcaacgattcgttcgagtattgtgagcgattagttcactaattgttctgttgattgggcgtaaagattttgacaatgagcgtttctgatttgagctcggccatagataatcgccataaagtgtataaatagtttgcattacacttaaaactaaaagattaaaactaaatgatttagagattaaaaaacttaaaaattactacttatcaaagcttaataatgtttgatctgcatcagttttattttccattctagaactccatttatgcttcaaattgattgtacatacatatcataaaatgttatccactattttcgaaagttctcagaataaacttttgcttatcacttaaatccctgggattgcagcaccagaaaagcaaaaataatgatgaatgttcgcgaaagtctcgtctgtggttaatgcattttttgttttcctgtaacttttgccactgtcgctgctgcagataaaacttttataatgctcccaactttccggcaatgtgcggtgtgccatcacttttggcaggcactgtggcaccttcttcttcgccgtt

SEQ ID NO: 12158 - DNA, 503 bp, DROSOPHILA
cggaccattaaacattacccattcagccagcattcaccattccaacattcgacattcaacatggaaggccaacgcgtggcagtcgtcgcatttgctgttttgctcgccggattgtgcgtgctatccggtctgaatgcggcacccgtggaatgcaataatggcggtggcatccagatctctgacgatggtttccagagccagacgcaaaccggtcccggctgccagacccagacctccgaggatggaacccagagccaaagccagagtcagtcgggcaatggctaccaatcgcagacgcagtgcagcggctcatcctgtggtcagttcaacaccttcccgccgctattcaccattaagccgctggagccattggcacccatcacttggcagccatgggggcaaatgaggaacaaccaggtgcagcagcaggtcaattttggctaagttttggaaaaaaaagtattcaagttaataaagattttgaatttgtaattattcaaaaa

SEQ ID NO: 12159 - protein, 127 aa, DROSOPHILA
MEGQRVAVVAFAVLLAGLCVLSGLNAAPVECNNGGGIQISDDGFQSQTQTGPGCQTQTSEDGTQSQSQSQSGNGYQSQTQCSGSSCGQFNTFPPLFTIKPLEPLAPITWQPWGQMRNNQVQQQVNFG

SEQ ID NO: 12160 - DNA, 3063 bp, DROSOPHILA
aatatttgtgatcgtggtatgaatgcggttggtggttgtgcgatcttttatttaatttttatgtggatcgttaaggatcactatcagatatttgtgggcttcctggaagctgaacaatcagaaagccttttcaaggagtccttactcaagtttaagctctatggaggcgaacagttcgcctcaatgccaaaaaggtatttcaatgttgccaacgacattattcaagcgaagaatctgaaactagatctcgactgtgtaacactttccctggtcttgagcaaagaggaagccctgctttttcaagtagagtaagttcatccaaaaatatatatagtgcatgtgcctaataaaccgctctaaactttaacagacctccagccggattttcccttaagccggtagatatagacgatgctcaggtgattaatgatcaatgggaatggagtgagccggattccctttccgtggtccgccgtcaaattctgtatgacacagaaagaaattcatgctattagaaataaattctcaattactattacttcgcagggctccagatggcttattggcagtccttcaggtcaagacgacctacaaacgcagaggcttcggccaactgattgtgaaggaatttgcgagacaagaggctctgctgggacgcgatacaatcaccgaagtggttccggaaaacaaggcatccttgggcctgttcaccaaactgggctttaaaatcaacgaccagtgtcactggctgatgacggagccgccaaaaggagttcgataagattaaggacttgtttatctgtaaatgttattttttttgtagatttaaattattaaagctgataagttttagcagctggcaaaaaatgtactggctggccataagaaaaccacacgtaagagaatctaacgatttgaagagattgcatgaagagaaatagacaagctgcttgattgagtcacccaaacaacaatcaaatgagccattttcactcggtcgctcgaaggggaagattgtttcgctcgaccaatatgggtactcgattagaagttattgggctgaaagatatccaggagttccaacagctctacaagcaaaactggccaaaatattgccaggaatactactgccttgataactttgtggaatttctgaaaaaacagccccatatgaggaatattaagatgtacacattggatgcaaaacaagccagagatgaaggtctttttgttatagtggtgagttctacatatatgtatagactgcaactcactaagagaggcggccctctcttaggatcgctatcaactattcgtaggttgcttgaacaacacgaacggccttgttggaaaagctctggatttactggactggtcgtcgggtttgaaatgcagttctataccctccagacacattggtgccctggatagtctggtggagtccaaaaagttgaatctggtgtacagggactgcacgaatttgttttttatgaaagccaacgacgctctcaagctgaaagtcgagtaagaaataataatccatttaacataacgagttttatatgatctaagtcttgtagacctccatctggatttgttttaaagtcgttgagtgtggcagatgctccattggttaacgcagagtggcccaatcatcatgagggatctttgttcttcgtagaaaggcagattcgcctgtgcgtcagtgttggattgtaccaggaagacacccaggaactagttgcctggtgcattaggtaagacgaatgtatttttataaagacacattacctgatatcgaaatctgtaggttacaaggcggctacttgggcgccctgcaagtcaaagatacacacaagcgacgcggatttggcagtgtggtgactagggaaatagcataccgcctagccgtccaaggtcacgatgtaatggctctcgtgggcccctcgaataagccgtcatcggagatgttcagcaaactgggattccaggtcatcgatcaatgctactggctaaggacggaacccaccggtgggcagttcacatggcccgagggcgagtaattggtgtttaaatgtctgtattaaaatattacgactttcggttgtatatgaatacaagtattggtataaaaatatgccgaggcatttgagctgtgcttattctaaaactctaaacgagcgagcaatccctggcagcgatcttctaattggaggggactacactggatagtcggatcctctgttagagtccgggtgatcttccataagcactcgagatcgtattgcacatgataatcgttcattgtgtaactatcgaatagtaaaaatttggtggctacggttccctctgccaatcggcgagcggctataaactccagtagttctataaaatcgaggtagttgataccaaagctggccctcagcattgtctggcagtgggcctcaaagttgtccatctgctggcagtcggagatctcattgcaaacggccttcaggttgttcttaaggttttgccagaccatggatatgttgcagccattgaaccagttgtgattgacggatatggtgtctgttaggttccacacctgatgaaaccagccactgggcacgaaaacagcttcattggcccgctgattaatggtgtaatatcgcacgttgtgctcatccagcattttctcgtctatactaaagggcaggtttcccaagcgatcgttgagtttgagttcttctcccggcggcattatcagccatttcttaaggcccactatattggtggaccaactgaaggagccaaacacgtccgcatgataggaggtcctagaatggaaggtaatttagcatgagaaaaccaggtaaggcatcaaaatagaccatgagttcttgggccccatatagacgaatcgatagtcgtctttcccctgctgaatcagttgttcgttgagccagtcggaggcaaagtatttaggcaccttgtagaagttatagcccggcatttgggcagccagatgccagtccttgaggtagagattgtccccgctcgcgggagccacattactattca

SEQ ID NO: 12161 - DNA, 896 bp, DROSOPHILA
ctcgaaggggaagattgtttcgctcgaccaatatgggtactcgattagaagttattgggctgaaagatatccaggagttccaacagctctacaagcaaaactggccaaaatattgccaggaatactactgccttgataactttgtggaatttctgaaaaaacagccccatatgaggaatattaagatgtacacattggatgcaaaacaagccagagatgaaggtctttttgttatagtggatcgctatcaactattcgtaggttgcttgaacaacacgaacggccttgttggaaaagctctggatttactggactggtcgtcgggtttgaaatgcagttctataccctccagacacattggtgccctggatagtctggtggagtccaaaaagttgaatctggtgtacagggactgcacgaatttgttttttatgaaagccaacgacgctctcaagctgaaagtcgaacctccatctggatttgttttaaagtcgttgagtgtggcagatgctccattggttaacgcagagtggcccaatcatcatgagggatctttgttcttcgtagaaaggcagattcgcctgtgcgtcagtgttggattgtaccaggaagacacccaggaactagttgcctggtgcattaggttacaaggcggctacttgggcgccctgcaagtcaaagatacacacaagcgacgcggatttggcagtgtggtgactagggaaatagcataccgcctagccgtccaaggtcacgatgtaatggctctcgtgggcccctcgaataagccgtcatcggagatgttcagcaaactgggattccaggtcatcgatcaatgctactggctaaggacggaacccaccggtgggcagttcacatggcccgagggcgagtaa

SEQ ID NO: 12162 - protein, 287 aa, DROSOPHILA
MGTRLEVIGLKDIQEFQQLYKQNWPKYCQEYYCLDNFVEFLKKQPHMRNIKMYTLDAKQARDEGLFVIVDRYQLFVGCLNNTNGLVGKALDLLDWSSGLKCSSIPSRHIGALDSLVESKKLNLVYRDCTNLFFMKANDALKLKVEPPSGFVLKSLSVADAPLVNAEWPNHHEGSLFFVERQIRLCVSVGLYQEDTQELVAWCIRLQGGYLGALQVKDTHKRRGFGSVVTREIAYRLAVQGHDVMALVGPSNKPSSEMFSKLGFQVIDQCYWLRTEPTGGQFTWPEGE

SEQ ID NO: 12163 - DNA, 3368 bp, DROSOPHILA
gccagagcaatccgattgttttgtcggtgatcaccagcggaagttttccgcgtctgtggcgaatccgcgtcacccaaatccactgtggtagcatcagtcgagcggaccaaggctgtctgcagtactatacggcaattagtggtcgtgtgcgcagctttaattacaacacggtgggtggaagacaactgtccaatcaggactacagcatctgcatacggaacgagcgcaacttttgcggcattcagtacaacgcatgtccggatctggagaacaacagatccagatcgttcacactcactgggaactccaacaatccggtggccacgatggtgggtggtggtggtggcatgccaccaaacttgaacggttgcacaagcgattggctactgattggttgcattcgatcggcggacaggattcctcctctgcctggttgcgaggatcgcgtctgtggaggcacctttagtgcggaggccggaatgctcgccaaaacagtgcaatgtacgtacaagcttaggtcatcaaatcgaatcctatcattaaaagattattaataatatattttcttcaatatatccccacagcaagtgttcgtcctttccggctttatttccacacggacggagtagaagcgccgaatgatatagacaaccgaggattttgccttgattatgttcagcaaccatgcacaaatggcttttagacaccagcccacaagtatgcaatactctaaacacaaaatccacatgacgaattccacgcgactaaaatcgcaaggaaattatgattggcgctgcaaaagtcgcaggaaaaacgcacacatctttcgtatgtaataaatatgttttatttattgattttcgtaattaagttagacgtaacattaaaatttaagttaatttagaaaatcgtgtcgggttttggtacaaatttagtgttgtcgtaaaggatatcgaaatttcatgtgatccaaattctaacattaaaatcgttttcaactactaatacaggtttattgaattacgtttaattaataatacttagcagaagcaaaacaaaaattatataacagaaaaacacgatgataaacgcttttgtttaaggacattttcgttgcagcgttgttgccgttgttggtactcattttttttgccgtgacaaaaaagaaaataataaaaaccagtactaactatgcgcacgttgtcgtataaaagggtaatttctgggttcgcttgctcgcctgagatcgccaatttcagtctgtgcgcgtagtgcccgacttgtgacgtcactgggggatggtattatctcggatgtgatgcgggtatctacgatatatgtctgtcctaatcctaataggtttgtatcaaggcagccacgtgctgtttctcctcctcggtcagaccgtttttcagcgtgcgacgtactgcaaaatatattaaatattataacagagtcttcaaaagtatagtatatatgtatttagttaggcataggcagtcatgcaatgttaggtctaaagggcatgcaggttagttgcctcaagttttgaatatcctttgaattgcatgcaaattgaatatatatagagtaagtttttccatgcataaaacccggatcttcaacaaatgccaagggttccaaaataaagccaaaggtaaaagtttttaacgaaaattacataaggaaaaatgtgtaaaactaaacacaattcaattcactaaccaaaaaaggtaaaacctaaaaaacagttggctgttcttttggcaacggttacggattcggttaacagtaacggtttctacggcgatggtgctctttcaactgtgaatccttcgcgcgtgcggctgcgcttcacttcgatagtcaatatatcagatttgttgttgggtttggatttattttatttgattttttattggtttgttggattggtgcgttaatggtaaaagaacgaaatggaaataaattaaaacccaatataggcaacagattcgtaagctggcaaaactaaggggacaaaagctgcgtaatcgggaaaatattgtaaataagtatgggaaactgcaggtacttgtgtaaatttggaattttgtgtgggaaataagtatttgtataactatatatagtagtttctctgtggaattcttgatggtgtagtgtgtgtttctggttgaaagtatccagctagaggttatagacatagcgcgctgtgtgcgattcgaaaagatatagaccaacaccttttcattaaaacgtattctctctatcggagttttggacgtggatctcaatcgtattacttgtgcggtcaacttacatgatttgcgatccgcgtggcgcgtccgtttccgttccctcggcgttgtccgtgttcctggagccttggtggcggtcttaaccagagattccagtatctcatcgtcgccatcggtgaactgctcctcgctttggcgggtaattggtgagcggagctgttccgctcgtcgcctccgccaggtgagtgtcccatcggcctggtcggcactcgatgtgtccaaaagttttctggaacatttaataaataagtataatttatttataatgaaggagtaacgtatttaaagatactcgacatgaaatacgtatacggttcaggttaaagaactatacccccttcacgcgataaggaaactataatctcccagctgtaaatcacttgaaagtgttcatcagaaaattcaggttatactagcagagataagatttctccgtggtttgatttatcatatcaaatatgtttgaaacaacaaaaaacacaatatacatatactaaatgtcatgttaataatattaaaagtcttacgataagaatgggttaattattattattattatgatagatagaatagtttacaaaactagactaacttagatagtatagcattagctacggggcttacagctatatttatttacaatgttattatatcttaatttagttaatatctaatttggtaactaattgctggcttgttatgtacaaatgcctgttttgtttttagattttgtggtataatttagtttttttgaggaaaagtatgagtttttgtatgttatctggattgggtttgctaagaaggtctagagggttggtgttgttaaatatatcttgcttggtttgtaggagggatgggcatgagttaaatatgtggtttaaagaaatatcaccttggcaaaacgggcaagttggtattgaattgggatttaggtagtgttggtgggttatgtttgtgtgtcctagtcgaagtcgtattatttttatttggtcgagtctggtccaatttgggtgggattgtttaaggtaatcgcatgggtgtgaggtgttc

SEQ ID NO: 12164 - DNA, 664 bp, DROSOPHILA
atgtatattgtaaaacttttggacacatcgagtgccgaccaggccgatgggacactcacctggcggaggcgacgagcggaacagctccgctcaccaattacccgccaaagcgaggagcagttcaccgatggcgacgatgagatactggaatctctggttaagaccgccaccaaggctccaggaacacggacaacgccgagggaacggaaacggacgcgccacgcggatcgcaaatcattacgtcgcacgctgaaaaacggtctgaccgaggaggagaaacagcacgtggctgccttgatacaaacctattaggattaggacagacatatatcgtagatacccgcatcacatccgagataataccatcccccagtgacgtcacaagtcgggcactacgcgcacagactgaaattggcgatctcaggcgagcaagcgaacccagaaattacccttttatacgacaacgtgcgcatagttagtactggtttttattattttcttttttgtcacggcaaaaaaaatgagtaccaacaacggcaacaacgctgcaacgaaaatgtccttaaacaaaagcgtttatcatcgtgtttttctgttatataatttttgttttgcttctgctaagtattattaattaaacgtaattcaataaacctgtattagt

SEQ ID NO: 12165 - protein, 103 aa, DROSOPHILA
MYIVKLLDTSSADQADGTLTWRRRRAEQLRSPITRQSEEQFTDGDDEILESLVKTATKAPGTRTTPRERKRTRHADRKSLRRTLKNGLTEEEKQHVAALIQTY

SEQ ID NO: 12166 - DNA, 2983 bp, DROSOPHILA
gacagacgccattcaccaccactgtgctgggatgagctggaaataatttcagtgtgtatcaattagcgtcagcagcaatcccgtccagcttaccgccgatcagagtcggaattaaagccaacgggagcagcacacacgtcaggtacttcatattaaagccgatagatagatgaccgtatcgactctcacgctacttatatagtccggcacttgattcgatccgaatcaaaatcgatttgcataagcctaagcgtttggagctttcgatttgtatttgaacaatatatttaaattaatttcacactagaacactatcaaatcgcaattcgatggggttttccgcacacggttttgtggcatcaggtcgacgtagttgatttccttgaacttcttcaaagaaacttatgacagtcacgccccgaaaagtcggtttacaattattcccagacgtaaacatgaatggcaagcgattccagagaatcgcacaccattaaattttatccatacatctaaggaaaactggttacagaaccgaaagtcgtgactcgtgagtgaaatgtagaagctttagttctaaagctaacaatttatatttaaataataagatacttaatacaatgaaaaagcaaaaaatatatttgaaaacaaatacatttcattaaaaataaatctttgcaactttgtagaaatgaaaagtgtctgacttattatagattttacagattttgtgtatttgttatgttaaaaaggtaacgtagagtatcttgaatgcaatacgactgaccaactgatgcgctacagattgtttttgaaacccatccgcgggcaattccctgagattaatacttaatacatacgtagtggtttgtttgcacagcaatagttctttgcagcgataaggtctgtttgggtttgaattcgaattcaaattcagtatcggaatcggaatcgatgagtgcatcgtatataagctgctgttgcggttcgtacctggtccagaccagttcgacgttctaatagaccagccacaatgagaaccttgacggcatttgcgattatcgctttttttgcactggctctaacggaggcggctgtttacatcggtggcggttgctacgactgtaagtcaatgcctattaatttgggccatttattcaaaaattgttcaacgattttcgtcgctgccacatcaggcatagtttaaaaggaaattttgtgttttcattagcgaaagtttgaatgaacaatcaatttgttattatattatggtatttcttggcaacgaaagtcattaagtgattattaacgatactctaaacatttgttattggttaagtttatgaataatataattccgaacacttagctttaagcttttaatttctatagcgcatagtacatttgctggcttgcgtaaaaaatgcagtagctagcgcgcaattaagtaactactactcctcaagaaactgatttaaatatcactattaggtaatccacccggaggccaaggacctggagtctacacaggtggcaacggaggacgaggaggaggaggtggatacaacgcaggcggaggcggtggaggatactacaacggcggcggaggtggaggaggtggccgtcgtccagtatattcgggcaactttggacccggctatggtaacggcggaggaggaggtggaggaggctacggaggcggcggtggaggtggctacgatgatggcggtcttacgcagattataagcggctgagattataatctcgaagctttgctagcgctaagcgcgaagagcaagcatcgtctgaaacttagattatatagacttaaataaaaaaaatatatattttatcagcggtgactacttttatatacttacagaatgagcttttgttaggttttgttaaaggttaaaaacaagtccctctgttaaagtaaaactagtgaataaacttatcaaatactcagctaacgctactaataaatggcatgccacctatagcttctaaaaataatatccttaattcctgtgcattttataattggtattcattgtaattcagttcagacacgtataaatgagtagcaactgttcaagagtgatgattaatatacccttaaagccataaaaccgactgtgctgttcggttgaaggagtcaaagtcctgcaaaggaaataattcataagctcttcaaagtttcagccatcctgcttgtcagtcttaattaaaggacttgccctggctaaatatgcaagggcatcgaatttccaaaaagttgaaccaaaagaaccgctcggtgaatccacaagcacttaattgatacaattacaagttcgatttttgttcgttcggcgagcttttggtgagctaagctgaagcaaatgaaccggaatcaaattaagggtcattaagtataattatcggtatcatagcatgcattttgttaaacagttttcaaggacttcctttctttaagttggttcttttgcatttaagaaaaggttgcgtgcacgcttaaaaatagtacatttcgtggatatatgtttagttaagactcttgcagcacatgtataattacacattcgaaacgaaaataaccatttcaaagtagatacgcttaaagattactttatttatagcctgtgcaatcagtagttttagaatgagtagttttagtagtagtagtagttttagaagtagaatgcgcacatcgaaaatcttcagtgtcagtaaagtagcttcgggttttcagtggaagaagtagcacattgggcttagattaattttctaagaaaatcatgcttttattaaatatatacccattaaacattgatattagtatatattcatgggagaaatagtaatttggtaataatttatttgctgaatacacatgtataaaaatgttcattctttttccaatgaatacatttcctttcgtttaggctcaaaggaagtgttgctcaggattacctccttgtcg

SEQ ID NO: 12167 - DNA, 616 bp, DROSOPHILA
ccagttcgacgttctaatagaccagccacaatgagaaccttgacggcatttgcgattatcgctttttttgcactggctctaacggaggcggctgtttacatcggtggcggttgctacgactgtaatccacccggaggccaaggacctggagtctacacaggtggcaacggaggacgaggaggaggaggtggatacaacgcaggcggaggcggtggaggatactacaacggcggcggaggtggaggaggtggccgtcgtccagtatattcgggcaactttggacccggctatggtaacggcggaggaggaggtggaggaggctacggaggcggcggtggaggtggctacgatgatggcggtcttacgcagattataagcggctgagattataatctcgaagctttgctagcgctaagcgcgaagagcaagcatcgtctgaaacttagattatatagacttaaataaaaaaaatatatattttatcagcggtgactacttttatatacttacagaatgagcttttgttaggttttgttaaaggttaaaaacaagtccctctgttaaagtaaaactagtgaataaacttatcaaatactcagctaacgctactaataaa

SEQ ID NO: 12168 - protein, 117 aa, DROSOPHILA
MRTLTAFAIIAFFALALTEAAVYIGGGCYDCNPPGGQGPGVYTGGNGGRGGGGGYNAGGGGGGYYNGGGGGGGGRRPVYSGNFGPGYGNGGGGGGGGYGGGGGGGYDDGGLTQIISG

SEQ ID NO: 12169 - DNA, 3664 bp, DROSOPHILA
gtaatcccgtttcagagatctatcgcattgtgtcgcagaaacagatcagagatccgccggaaggcgacgtcatccgcccgtcgaacgtggagcccatcgacgtaaagccgactgtcaccgccgatgtgcgcaaacagtgctgtcagtgaccgccccaagcaattttcgctattccccgcaaccgccagaacagcaacataaacagaagcaacagcaattacaactacgactacaagaggagcagcagcggccagaactgcaacaccaagatcaggagcagcgtacacccgatggaccgcacaagatgtctatgcgtttgtcagccacagtttgtcatgtgcgcataaattgataattcaaatctgagccgccactctccaccaccaacaccaccaccatcatcagaagcagcagcagcagcaaaagaatcgaaagcaacaacatccggctgtagttaactgcggtttaaactgaagttttatatatatacagatccatgagtatcgcataaatcgaccgccgcggaaagaaagcaagcaaaactaaacactccaaattcagtttaagctgtagaactataatttatataaatatacatatatgctaatattaaaatattaatattattaatttttcgcaacataaatatatagttgtaatttcgcgagcagaacaacaacaaacaaccggaaattcttcgacttaaacgcaaattcattaccacagcactgcagctcggattttcttcttcggtttctcgcaacattttaaacgattggccacttggtaaaactagctgataaagagaaatcaaacaaaaacagttgtaaaactttaaatgcataaatgaaacgaaataacatcatttgtgtttgctatgttaagtgtgattaaataaatataatttaaataaaacagaagtgctttcaattgggcggaaaatcgaaatttaaaatgggattagagtgaccaaaggcagacgtcggagtgggtgtttggtattttccgcgcgagcagccacactgatccatacacgtgcgggagaaaagtgaacaaaaacattgaaacatgggcggtaagaagaaagtgcatccgaagacgcgcacggcggccttcaaggccagcgagccgagcgagatcgtggaggcgccgcactccttcgtcatccatcgcggcctcgcctgtccgtacatcacggacctcaccctggacttccgccgcattatggagccctttacggccagcaatctgcgcgagaagcggatgaaccgcatcaaggactttgtcagcctgagcagcttcttccacgtctcgcacatgggcatcttcaacaaggcctccacgcagctgtccttcaaagtggtccgcttgccgcgcggtccttccctgactttcaaggtttgtttgtttcatcgcttagtttatactggatattttaccgcgaagttattctctgtcaggttcaccagttcaccctggccagagatgtgatctcgctaagcaaaaagcagatgattgacaacgatcacttcaagcacgctccgctcgtcatcatgaacaacttcagtggcgatggcaagcaccttaagctgatggccaccacgttccaaaacatgttcccctcaattaacttggccacggttaatatcggcaccattcgtcgctgcgtcctgttctcctacaatccggacacgaagctggtcgagatgcggcactactccgtgcaggtggtgccggttggcttaaagcgggcggtccagaaaatcgtcaaaggaacggtacccaatctgggcaagtgcaacgaagtcgtggactttgtgaccaagtaggaaatgaccgtttgttctcattccatcaaataatcataatattgattttcagggacggctatgcctccgaatcagaggccgaagatgatgagcaatcacatgtggtgctggcacagactcttaaaagcaagggcaacttggaggacaaaaagagctccataaagctacacgagatcggacctcgactaaccatgcagctcatcaaaatagaagagggccttctgacgggcgaagtactgtatcacgaccatgtggtcaagacagaggacgaaaaggaaaccctgcgcaagctggtcgaaaagaagcgaaagcagaaggagcagcgcaagaaggagcaggcagagaaccgtgcccgcaacttgaagcttaagaaggatgaaaaatgggctgccaagagggcggcagagggacggactgacagcgatcccgaggatgatgcagagtactacaaggaggaagtcggcgaggaaccagacgaaggtgagttgtgctacatgctgcgtagaatataaactaatgtttcctttgcagaactgttcaaaatggaagcgaagtcctcccgaaagcggcctagtttgggcggcggaatgaaatacaagaacaagcgcgctaaactggataccaaggacaagaatgacaaatctgagcgcacggacaagtacgatcgtaaggacaagttcgatcgcaaggacaagaaggacaaattcgaccccaagaacaggagagccaagttcgatcccaaaaacaagcgcgccaagtttgaccacagaaagagtagaaaatcaaagtagtacatttaacataagctattttataaagaccattggttaacacgacatcgcaatgttatcaatgggaactaactaaacatacgttgcaccacctccttgtaatgggccttgctatccttccagctaacagcgatgttgtcgcgcagcttgctgaactctcgcttctcctcgtagttgggcattcgctcgatggtggcttgcgccttggcgaactccttcaggtgatagtaggcgagtgcacgccggtagatgctcttctcgctgggactctcctccgtctccacaaactgcgtgtggtagattacatgctcatagcgtttctcctgcagcaaacaggcggccaggttggtctgtatctgaataaagagctcctccaccgcctggccgttgatgccattggtctttttggtcagtttatcgaagggtttgtaggtgatcagcaactttgcggcacgcacaaagtaatcaaaggcgaatttcgggaacgtcttaaaggtggccacgccgctttccttgagacgtagtgccacctcatagatctctgcagcgcttagcttctccacctgagtgttcttcacaattttctccagcttcagttcaaattctattcgttcgccggttttggtcgtgatgctacaggctgccgtttcacccggcacaaattgctgcagcagcagctccaagtagcagtccactgcggtcaggctggtgcccatttccaggctgtgcttttgaggatacgtagcggactcatcgctgaccaaatatttgctaggtcgtcctcccaagttggtggctttcttgttgacactgaattccaccgtactgattatcgtgggcttgtccatttcggtgaattggaggccaattaccttcttggccagaccacggttcttgtcctcccactctgtgcccacgtaccagtccattttggaatatttgcaaattgggagcttcgaaatttagcagtaagcaaagtttgcgatttggcgatgtgaccagaaaaccgtcaaaaatgtacctatcgcgaatttcacaaaaaat

SEQ ID NO: 12170 - DNA, 1495 bp, DROSOPHILA
attttccgcgcgagcagccacactgatccatacacgtgcgggagaaaagtgaacaaaaacattgaaacatgggcggtaagaagaaagtgcatccgaagacgcgcacggcggccttcaaggccagcgagccgagcgagatcgtggaggcgccgcactccttcgtcatccatcgcggcctcgcctgtccgtacatcacggacctcaccctggacttccgccgcattatggagccctttacggccagcaatctgcgcgagaagcggatgaaccgcatcaaggactttgtcagcctgagcagcttcttccacgtctcgcacatgggcatcttcaacaaggcctccacgcagctgtccttcaaagtggtccgcttgccgcgcggtccttccctgactttcaaggttcaccagttcaccctggccagagatgtgatctcgctaagcaaaaagcagatgattgacaacgatcacttcaagcacgctccgctcgtcatcatgaacaacttcagtggcgatggcaagcaccttaagctgatggccaccacgttccaaaacatgttcccctcaattaacttggccacggttaatatcggcaccattcgtcgctgcgtcctgttctcctacaatccggacacgaagctggtcgagatgcggcactactccgtgcaggtggtgccggttggcttaaagcgggcggtccagaaaatcgtcaaaggaacggtacccaatctgggcaagtgcaacgaagtcgtggactttgtgaccaaggacggctatgcctccgaatcagaggccgaagatgatgagcaatcacatgtggtgctggcacagactcttaaaagcaagggcaacttggaggacaaaaagagctccataaagctacacgagatcggacctcgactaaccatgcagctcatcaaaatagaagagggccttctgacgggcgaagtactgtatcacgaccatgtggtcaagacagaggacgaaaaggaaaccctgcgcaagctggtcgaaaagaagcgaaagcagaaggagcagcgcaagaaggagcaggcagagaaccgtgcccgcaacttgaagcttaagaaggatgaaaaatgggctgccaagagggcggcagagggacggactgacagcgatcccgaggatgatgcagagtactacaaggaggaagtcggcgaggaaccagacgaagaactgttcaaaatggaagcgaagtcctcccgaaagcggcctagtttgggcggcggaatgaaatacaagaacaagcgcgctaaactggataccaaggacaagaatgacaaatctgagcgcacggacaagtacgatcgtaaggacaagttcgatcgcaaggacaagaaggacaaattcgaccccaagaacaggagagccaagttcgatcccaaaaacaagcgcgccaagtttgaccacagaaagagtagaaaatcaaagtagtacatttaacataagctattttataaagaccattggttaacacg

SEQ ID NO: 12171 - protein, 460 aa, DROSOPHILA
MGGKKKVHPKTRTAAFKASEPSEIVEAPHSFVIHRGLACPYITDLTLDFRRIMEPFTASNLREKRMNRIKDFVSLSSFFHVSHMGIFNKASTQLSFKVVRLPRGPSLTFKVHQFTLARDVISLSKKQMIDNDHFKHAPLVIMNNFSGDGKHLKLMATTFQNMFPSINLATVNIGTIRRCVLFSYNPDTKLVEMRHYSVQVVPVGLKRAVQKIVKGTVPNLGKCNEVVDFVTKDGYASESEAEDDEQSHVVLAQTLKSKGNLEDKKSSIKLHEIGPRLTMQLIKIEEGLLTGEVLYHDHVVKTEDEKETLRKLVEKKRKQKEQRKKEQAENRARNLKLKKDEKWAAKRAAEGRTDSDPEDDAEYYKEEVGEEPDEELFKMEAKSSRKRPSLGGGMKYKNKRAKLDTKDKNDKSERTDKYDRKDKFDRKDKKDKFDPKNRRAKFDPKNKRAKFDHRKSRKSK

SEQ ID NO: 12172 - DNA, 4731 bp, DROSOPHILA
tgcagaaattgtgaaaattcatcttttcaattttcgcccgaaacccgcacatttatgcaaacttgttacgctcgtttttgttgctgtcaatttcacagattaatgcgcacacatttcaacgccaaagtcggcagaaacatttattattgacaatggccaaaagtttggccattcgctttgctttttggccaacatcgttcatttggccagacggcgtagcgacaaaaattgatttacagtatagatattttaatcatccaagctctcttgccagttagttcttagttacattcagctacacactgccatttcaaaaaccaaatttatgggccatgtcgaaggacgagccctctgctccaagccaaatttatggcctcccattcggcgatgggcggttctttttaagggggcgtggcagcctgttgagcaagtattcggtgttatttctatgcgaataagaagcttttccggtggccttcggcttgtttactttgggagttgtatttcgcgtggtcgcaaaaaggtttctcggatactttttcggcaaagacaaagaaattcaatttaagcttcctaccccggaactaataactcttcaaaaagttgaaaacaattaattggttgtgggtatacattaggcagtgcagtattgaaaaaaaatcagtatatgtatctaacaagctcaatacagtttcacgtttaacaacattcaactgaaaatcaacaatggtatattattttatgcaagcaattaaaagtatttctcttatcattttgcggctcaacaacttttgcggtattgcactttttgctttttcagaagctatcgactaaaccacaacgtttggatttgtgagaaaaaaggctcgaccattgcagttttgcggttgggacttgataatgaatatttttaaaaatattatttttatattcggactgctagttagctataaaatgagttcggcttcctgggaaaatcacagttctgcaactggcttcgttgagtgaagttaaaagtgtagttgaaagtgtacatccatagagaaaaccatgactaacacggatctgaaagccttggaacttatgttccagcgacccctggaaccggcattcaccactcgtgactccggaaaaactgtattggaactgcccgattccttctatacggatcgctatcgcaatgacaccgaggaggtgggcaatcgattctctaaggacgtggatctgaagatcccaattcaggagttgagcaacgttcccagtctggagttcaccaaaaagattggtctcaagaatcaattttcgctgtttaacaatcgccatcgtgagatcgccagcgagctgatcaccctcttcatgagcgcaccaaatctcagacaattcgtgtcgctttccgtttacaccaagtaagtacttgtactaaaataaatatatatgtattgtataatgtattaattttttagggatcgtgtgaatcctgtgttgttccaatacgcctatgccgtcgccgttgcccatcgcccggatacgcgtgaagtgcccattaccaacatttcccagatctttccgagcaactttgtagaaccttccgccttccgggttcgtttaagttcttctttatttgaccaatcaaagtctttaatggtgtatttataaatttgaccacaggatgcccgtcaggaagcttctgttattggagagagcggcgctcgtgtccatgtggacattccgcaaaactacacggcctcggatcgcgaggatgaacagcgcctggcgtacttccgtgaggacatcggtgttaatagccatcattggcactggcacttggtctacccgaccaccggacccacggaggtggtcaacaaggatcgtcgtggcgagctcttctactacatgcaccaccagatactcgcgcgctacaatgtggagcgcttctgcaacaatctgaagaaggttcagccgctgaacaatctgcgtgtggaggttcccgagggctacttccccaagatcctgtccagcacgaataaccgcacctatcccgcccgagtgaccaaccaaaagctgagggacgtggaccgccatgatgggcgtgtggagatctccgatgtggagcgctggcgtgatcgcgtgctggctgccatagatcaaggatacgttgaagatgtgagttgggcccgtttggaatattgagcataggtcatagaaagcactagaaatttttatttgctaatccatagtcttctggcaatcgtataccattggacgaagttcgtggcatcgatatcctgggcaacatgattgaggcatcgccagtcctatccatcaactataatttctatggcaatctacacaacgaggggcacaacataatctcctttgcccacgatcccgattaccgtcacttggaggaattcggtgtgatgggcgatgtgaccacggccatgagggatccaatcttctacaggtggcacggattcatcgacacggtgttcaacaaattcaagactcgcctgaacccgtacaatgccggtgagcttaacttcgatggtattaccgtggactacattgaggccaagattggcaagtccaataccaaggccaacaccctgttgacctactggcagaagtcgagtgccgacttggcagctggcctggactttggaccaacgaccgatcgcaacatattcgcctcgttcacccatctccagaatgcccccttcacttatacattcaatgtgaccaataatggagccagacgaacgggtacttgccgtatcttcatctgccccaaggtggatgagcgtaatcaggctttgaatctggaggagcagcgactgttggccatcgaaatggacaagttcacagttgattgtgagtaataactgtatttcttagtatatatatttatttaatattttggtatttaaaaagtgtttctttcgtacaaagctagccagtgattttagcttatacttttccctactgacaacctcctacgatctattaacatactttaattaatccccagtggtgcctggtgagaacaccatacgccgccagtcgacagagtcctcggtggccattcccttcgagcgctcattccgcccggttggagcagactatcagcccaaggccgccgatgagttggcacgcttcaagttttgcggatgtgggtggccacagcatctcctgctgcccaagggcaatgcccagggaatggtcttcgacctgttcgtcatgatttccgattactcgcaggactccgttgagcagcccaaaacgtgagtgctataaacccaatttcccatcatcagctgacattctccttgtcgcccattagacccaacgatgcctgcagcacggcgtactcgttctgtggtctgaaggacaaattgtatcctgacagacgcaccatgggctatcccttcgataggcgcctgcccaatgccaatctcaccgaattggtcggtgcctttggcaacatggccaagaccgatttaaggattgtcttcaatgatcgtgtgattgacaaggcctagatgattgctccaactaacagagatgattttaagaatcaatggaaacggacttgaaaacggaaaactcttggaatcatatacactttttgctattaacttataactaaccaaacttgtgcgcgtttatgtggtgttttatcgtttctaattacactctacaaaaataaatgtattgtaatatgtgcaggcagtaatacaagcgagtattgacacctaatgaatgcagtgggtagatagctttagccaagaaacttttggtaagcttataatgtatctaatagtcccaatttaccacccggggagaccaaagaattttacagatttttatttattactttttcaaggcaaaacagagattactcgttttcgttggcctcaagcaagccagccatggatatgataaatatttactgatataagaaatcctcgtctaggaatattcgcatgccaaatatttgcttagcaatattgaatattatttatagcaaagaaatacagatacacagccgcagaagggcgtttatttgtcatagacagacacgcccacatttgtgcgaactaatcctattagacttcaaagcgccttgctcgacaaactttgcgattgcccatgtccaggaggccttggcgttccatccacccaccaagtgttgagggaaaatagaaaaaacatcctcgcaaaacagccaacaaaatcgctgcacgtgttgcgtttattaatttttggcttttaccaagtcgacggccttaattaagcatccactagatgtggataaagttcaagactttggattagcgcagcacaacagctgtctcaaacaaattgatttttaatagatttttatggctgccttatctggcgccacatgacgtatacgtgatgaaattgagtttccgactgcaatcatcagaggtggaaggcatgtgcaatctctaattggattgatttgcagaaagaaatgtaggaaaaagttccaactcatgattatgtacctgcggagcacgcgtacgtctaaaatacacacatattcaaatcaaaatcgaaatgaaactcataacaacaacaaataaaacggctacattttatattatctgccgcaaatacgagttcaatgcgcccaaacaaaaaactgaaagctaatgttgacaagacacggccacgcaatttaatctcttttgttgcctggaacag

SEQ ID NO: 12173 - DNA, 2315 bp, DROSOPHILA
ttgagtgaagttaaaagtgtagttgaaagtgtacatccatagagaaaaccatgactaacacggatctgaaagccttggaacttatgttccagcgacccctggaaccggcattcaccactcgtgactccggaaaaactgtattggaactgcccgattccttctatacggatcgctatcgcaatgacaccgaggaggtgggcaatcgattctctaaggacgtggatctgaagatcccaattcaggagttgagcaacgttcccagtctggagttcaccaaaaagattggtctcaagaatcaattttcgctgtttaacaatcgccatcgtgagatcgccagcgagctgatcaccctcttcatgagcgcaccaaatctcagacaattcgtgtcgctttccgtttacaccaaggatcgtgtgaatcctgtgttgttccaatacgcctatgccgtcgccgttgcccatcgcccggatacgcgtgaagtgcccattaccaacatttcccagatctttccgagcaactttgtagaaccttccgccttccgggatgcccgtcaggaagcttctgttattggagagagcggcgctcgtgtccatgtggacattccgcaaaactacacggcctcggatcgcgaggatgaacagcgcctggcgtacttccgtgaggacatcggtgttaatagccatcattggcactggcacttggtctacccgaccaccggacccacggaggtggtcaacaaggatcgtcgtggcgagctcttctactacatgcaccaccagatactcgcgcgctacaatgtggagcgcttctgcaacaatctgaagaaggttcagccgctgaacaatctgcgtgtggaggttcccgagggctacttccccaagatcctgtccagcacgaataaccgcacctatcccgcccgagtgaccaaccaaaagctgagggacgtggaccgccatgatgggcgtgtggagatctccgatgtggagcgctggcgtgatcgcgtgctggctgccatagatcaaggatacgttgaagattcttctggcaatcgtataccattggacgaagttcgtggcatcgatatcctgggcaacatgattgaggcatcgccagtcctatccatcaactataatttctatggcaatctacacaacgaggggcacaacataatctcctttgcccacgatcccgattaccgtcacttggaggaattcggtgtgatgggcgatgtgaccacggccatgagggatccaatcttctacaggtggcacggattcatcgacacggtgttcaacaaattcaagactcgcctgaacccgtacaatgccggtgagcttaacttcgatggtattaccgtggactacattgaggccaagattggcaagtccaataccaaggccaacaccctgttgacctactggcagaagtcgagtgccgacttggcagctggcctggactttggaccaacgaccgatcgcaacatattcgcctcgttcacccatctccagaatgcccccttcacttatacattcaatgtgaccaataatggagccagacgaacgggtacttgccgtatcttcatctgccccaaggtggatgagcgtaatcaggctttgaatctggaggagcagcgactgttggccatcgaaatggacaagttcacagttgatttggtgcctggtgagaacaccatacgccgccagtcgacagagtcctcggtggccattcccttcgagcgctcattccgcccggttggagcagactatcagcccaaggccgccgatgagttggcacgcttcaagttttgcggatgtgggtggccacagcatctcctgctgcccaagggcaatgcccagggaatggtcttcgacctgttcgtcatgatttccgattactcgcaggactccgttgagcagcccaaaacacccaacgatgcctgcagcacggcgtactcgttctgtggtctgaaggacaaattgtatcctgacagacgcaccatgggctatcccttcgataggcgcctgcccaatgccaatctcaccgaattggtcggtgcctttggcaacatggccaagaccgatttaaggattgtcttcaatgatcgtgtgattgacaaggcctagatgattgctccaactaacagagatgattttaagaatcaatggaaacggacttgaaaacggaaaactcttggaatcatatacactttttgctattaacttataactaaccaaacttgtgcgcgtttatgtggtgttttatcgtttctaattacactctacaaaaataaatgtattgtaatatgtgcaggcagt

SEQ ID NO: 12174 - protein, 690 aa, DROSOPHILA
MTNTDLKALELMFQRPLEPAFTTRDSGKTVLELPDSFYTDRYRNDTEEVGNRFSKDVDLKIPIQELSNVPSLEFTKKIGLKNQFSLFNNRHREIASELITLFMSAPNLRQFVSLSVYTKDRVNPVLFQYAYAVAVAHRPDTREVPITNISQIFPSNFVEPSAFRDARQEASVIGESGARVHVDIPQNYTASDREDEQRLAYFREDIGVNSHHWHWHLVYPTTGPTEVVNKDRRGELFYYMHHQILARYNVERFCNNLKKVQPLNNLRVEVPEGYFPKILSSTNNRTYPARVTNQKLRDVDRHDGRVEISDVERWRDRVLAAIDQGYVEDSSGNRIPLDEVRGIDILGNMIEASPVLSINYNFYGNLHNEGHNIISFAHDPDYRHLEEFGVMGDVTTAMRDPIFYRWHGFIDTVFNKFKTRLNPYNAGELNFDGITVDYIEAKIGKSNTKANTLLTYWQKSSADLAAGLDFGPTTDRNIFASFTHLQNAPFTYTFNVTNNGARRTGTCRIFICPKVDERNQALNLEEQRLLAIEMDKFTVDLVPGENTIRRQSTESSVAIPFERSFRPVGADYQPKAADELARFKFCGCGWPQHLLLPKGNAQGMVFDLFVMISDYSQDSVEQPKTPNDACSTAYSFCGLKDKLYPDRRTMGYPFDRRLPNANLTELVGAFGNMAKTDLRIVFNDRVIDKA

SEQ ID NO: 12175 - DNA, 2982 bp, DROSOPHILA
tgaatggcaaattggtgtgaccgtattttgcgttgtgactcggctgctttatttacattgaatttttgttcgatttttgaatttaaaataaaaataatgccgcacggacactctcacgatcacggcggctgcagccacgaggcctcggacgtggaccacgccctagaaatgggcatcgagtacagcttgtacaccaaaatcgatctggacaatgtggagtgcctgaacgaggagacggatggccagggaaaaagtgtctttaagccgtacgagaagcgccaggatctgtccaagtacgtggagagcgatgcggatgaagagctcctcttcaacattcccttcaccggcaacatcaagctcaagggcatcatcataagtggggccaatgatgactcccatccaaacatggtcaaaatgtaaggaacaaaagtcaaggctgctttaatattactatattcatcatatatcttatttttcagcttcaagaaccgacccaggatgacctttgatgatgccagagcaaagcccgaccaggagttccagctgacccgcgatgcccgcggagaaatcgagtactcacccaaagtggtcaccttctcctccgtgcaccatctctccctctactttcccagcaattttggcgaagacataacacgcatttactatataggtaagctcacaacaatctatgttttatctgtgttcccaactaaaaccaagtcactattcaaaggtcttcgaggagagttcacagaagctcattaccatggcgtaaccatatgcaactacgaatcccgtgccaatgcagcggatcacaaggaaaaggctttcgatggagtcggcagagccatccaatagggttatagagattaaaatttacaatttaattgagtatctctgtagtgtatatattttgtgatcatttaaggcaagaaatgtttttgtattcgcttaacttattgagcatttgtattgcacagatattgtgggctaaatcatactaagtatattgtgtgggtggaatcacatcgggtcctattttcatgcccatattgggcactttatccgaatggatttcagccgtgacctcggtgaacagcttgtcccactgccagagatcgtccttctcgttgaggctctcctgtggaaccaggcaatcggtgaggattgagagatcaaagccatccacagctgaaaaggcgtactgggaaagcaaatcggaattggcctccttcaaaacagcagatcgtgaggtgccaatactacaaattacaacttattatcgtagtgaagagaaatatagcagcttctgcttacgttggcggttctacaatctcattgagcatgatttcgtccttgacatcatccatgtctgggatgacgggaatgtcatccgttggtatggaatttgtagccgactttgtttgtttaaagcgctcactaaaatgaattttatcattataacagtcggtggaaagtgaagttattgtgataaacttgtactcactcatcaaaggagtttttcttggacctaaaaagatatagagcaatcagtaatgtgcctaattcgagcctaatcatacccactttaatcctttgagtccagaatccgcccagccacctgaaatgcgacgaatgggtggtcgatgtgactcgaattcattgttgtatgtggacgaggtggccgtgtccgaggtggtcggtggggtgcccgcctggacattcagcgtaatgtcgatggaaatgtccttggagcccccagccgcctggacatcctcctccttcagaacatcgcgactcttggagcgccgacccttcctggccgtcgtctagggtggcaaataaatcgaaacttcaatttgcatccatttaaacagggttacttacctttcttatggtcatcttgagttcttcggcccagtccatcatcttttgtttacgtttatcctcagcgtttccaaggcaacaagtggtcatggttactccgtgggaatgttcaagtttactaatggagtttgccattcgcaacgcgatgcgatagttttcaaatcagttacctatcgccgatgacagttggcggagcttcaagtggccaaaataaacaaatatttattttctaataacgcaaaatgctgacggacacggaagatgacttctttttcgaagaggataagatgtaagtggccattgaaagcaataaattgctgcaacacctacgcccagctctatttacgcacaacaatctgttgcgatgtgccgaaaagtgtctgttaaaaatcaataattgccaccaaactgaaacatattgttggaatcaggccagaaccgctgctcatccagttggatggggatggtgctcaggctgtccggcagcccaaggaacgcacggagcagcgagagcatgcctccggttccgtcgctcccaacgaggccaccgttatgctctgctccccggcgggattctcctgcgattccgcatccggggacaggttcggcatcgagtccgccagtaggcagaagtatgagttagaccgtctgtaagtcaactccgttgacccggaatcgttcccatactatttcctgtggcagctctgttttctaagttctggtttttatagtctttatcctgtagtttctaccaaattagcttactcttggttttttattgattttattcttttaaattcataaattggtgtatttatattaatagtagcatatacacttctttatttaactattaaaaatttaattttgattcagttgctgttttttttttaattatttactttttaaagagcgaacacagtactatatccattttttgtatagtaagaactacagaactagaactaacaagattgttgtttatttagtttattaattccaccgaaaaaggacaaatgtgaatttcctttgtagagccttagatgcttatacttaggctagctagtatacaaactatattgaattcgaggtgtc

SEQ ID NO: 12176 - DNA, 746 bp, DROSOPHILA
taaccatgaccacttgttgccttggaaacgctgaggataaacgtaaacaaaagatgatggactgggccgaagaactcaagatgaccataagaaagacgacggccaggaagggtcggcgctccaagagtcgcgatgttctgaaggaggaggatgtccaggcggctgggggctccaaggacatttccatcgacattacgctgaatgtccaggcgggcaccccaccgaccacctcggacacggccacctcgtccacatacaacaatgaattcgagtcacatcgaccacccattcgtcgcatttcaggtggctgggcggattctggactcaaaggattaaagtccaagaaaaactcctttgatgatgagcgctttaaacaaacaaagtcggctacaaattccataccaacggatgacattcccgtcatcccagacatggatgatgtcaaggacgaaatcatgctcaatgagattgtagaaccgccaactattggcacctcacgatctgctgttttgaaggaggccaattccgatttgctttcccagtacgccttttcagctgtggatggctttgatctctcaatcctcaccgattgcctggttccacaggagagcctcaacgagaaggacgatctctggcagtgggacaagctgttcaccgaggtcacggctgaaatccattcggataaagtgcccaatatgggcatgaaaataggacccgatgtgattccacccacacaatatacttag

SEQ ID NO: 12177 - protein, 246 aa, DROSOPHILA
MTTCCLGNAEDKRKQKMMDWAEELKMTIRKTTARKGRRSKSRDVLKEEDVQAAGGSKDISIDITLNVQAGTPPTTSDTATSSTYNNEFESHRPPIRRISGGWADSGLKGLKSKKNSFDDERFKQTKSATNSIPTDDIPVIPDMDDVKDEIMLNEIVEPPTIGTSRSAVLKEANSDLLSQYAFSAVDGFDLSILTDCLVPQESLNEKDDLWQWDKLFTEVTAEIHSDKVPNMGMKIGPDVIPPTQYT

SEQ ID NO: 12178 - DNA, 2846 bp, DROSOPHILA
atgctctgctccccggcgggattctcctgcgattccgcatccggggacaggttcggcatcgagtccgccagtaggcagaagtatgagttagaccgtctgtaagtcaactccgttgacccggaatcgttcccatactatttcctgtggcagctctgttttctaagttctggtttttatagtctttatcctgtagtttctaccaaattagcttactcttggttttttattgattttattcttttaaattcataaattggtgtatttatattaatagtagcatatacacttctttatttaactattaaaaatttaattttgattcagttgctgttttttttttaattatttactttttaaagagcgaacacagtactatatccattttttgtatagtaagaactacagaactagaactaacaagattgttgtttatttagtttattaattccaccgaaaaaggacaaatgtgaatttcctttgtagagccttagatgcttatacttaggctagctagtatacaaactatattgaattcgaggtgtcctttggctttccaagtcccatccttcgaaagcgttagtatcacgatgccttagaataagctgtcccgatcaacagttttccccatacagccctagccaaacttgataataatccaatggccttgctagaactggtaacatggctaattagaaaatcgcaccaatcgaagtgagtacgtatggaaaactgatatggaatcaccagcacataaccatatatacttcaaatcatgtagcacgcgtagatcacgcttcaaactatatttcaatatcttaacttcttaccaacctttatgcaggggcatgactgtcagcacgaatgctgtcgtcattacaaaggatcagagcaacctgattggcatcagcattgggggtggagcacccatgtgtccatgtctgtatatcgtgcaggtaagtctgaaaatcatgaactcataaactctcacaaagatctttttgctgccatattcagcttgtttcaaatttaatttacaatctcatttctaggctgcctgagaatcttttctagcggtgacccttgtttgcttccagggattcggcgtagccttgaaatttgtcattttgcgtagcttaaagtactcgcttctttcccgtgcaaaccaatcgatggtctgctgctccaaacgccgatccatccgtatccttttcctctcgtcatacacttggcggcgcagagcacgctccgacgtatggagatgaaaaggttttggatgggtaaaggaggacttgacaagcggcgtaaagggctgccggttgaggtagtccatagaagagcctggattgattcggggcacaaagtcggatgtctttcggctctgcctttgcttctttaggcgcttgtttaaagcgaccattgacgtggccagcgtggcagggcatcggggcttcgtcaccgtttgcagagagttcaggtacagcttgcgcctttccaaacgacgatgagatcgctcgaaatcgggcacaggtctgctccggaactgaaacgcattactttgcatgttggcctctcgttttagcttcttgcgtttctcagtgtaaaccttctggaatttgcatacccttggtgtctgttttctggtcgtcttgagctttttgggctttgcctggctttggccaccacccgcctgtgtacgcttgcgctgatgcttttgcacgtcccgctcctgaagcgccgcctgcagcctcttatccaactggtcgaatcccggaatcaacttgggtctcgcatgggactcattgcttaaatcctttacggaccaattaaaccagttggtgatggtcataatttggctaaccaaatcggtttcagttgcgaaggactaatcttaaacgataattttgaaacttaaagttatgagtactatttgcttggttttataaaaatgtttacgttttgacacaagtatgatttacaaactgtaaacaatagctttccaaaaaatgcaatgctataaatgtcacatcttgtaaactctagatcttcgatggaacacccgctgctcgtgagggatccctgcaatcaggagatgaactgttggctgtgaattcggtgagcgtgaagggcaagacgaaagtggaggtggccaagatgatccagacggccaccgacgaggtggttatccattacaacaagctgcacgccgatcccgaacagggcaagacactggatatcatcctcaagaagctgaagcatcggattgtggacaatttgtcgagcaatacggcggatacgctgggtctatcccgcgccattctgtgcaatgattcgctggtcaagcgactggaggagctcgagggcactgaactgatgtacaaaggactcgtagagcatgctcgccggatgctcaaggcctactacgatcttctgcagacatataaatcctttggggattgcttcacccaaatatcggtccatgaaccgcaacagcgggcatcggaggcgtttcgaacgtttggcgagttccatcgcaccttggagaaggatggcttgggcatcatcaaacagataaagccagtgctggccgatctgggaacgtatctgaataaagccattccggacacaaagctcacggtgcgtcgctatgcggatgccaagttcacatatctttcgtactgcttgaaggtcaaggagatggacgatgaggaacatggctttgctgccctgcaggagccactttatcgcgtcgaaacgggcaactatgagtaccgtttgatactgcgatgtcgccaggatgcacgcagcaagttcgccaaactccgcaccgatgttctcgagaagatgga

SEQ ID NO: 12179 - DNA, 846 bp, DROSOPHILA
atgaccatcaccaactggtttaattggtccgtaaaggatttaagcaatgagtcccatgcgagacccaagttgattccgggattcgaccagttggataagaggctgcaggcggcgcttcaggagcgggacgtgcaaaagcatcagcgcaagcgtacacaggcgggtggtggccaaagccaggcaaagcccaaaaagctcaagacgaccagaaaacagacaccaagggtatgcaaattccagaaggtttacactgagaaacgcaagaagctaaaacgagaggccaacatgcaaagtaatgcgtttcagttccggagcagacctgtgcccgatttcgagcgatctcatcgtcgtttggaaaggcgcaagctgtacctgaactctctgcaaacggtgacgaagccccgatgccctgccacgctggccacgtcaatggtcgctttaaacaagcgcctaaagaagcaaaggcagagccgaaagacatccgactttgtgccccgaatcaatccaggctcttctatggactacctcaaccggcagccctttacgccgcttgtcaagtcctcctttacccatccaaaaccttttcatctccatacgtcggagcgtgctctgcgccgccaagtgtatgacgagaggaaaaggatacggatggatcggcgtttggagcagcagaccatcgattggtttgcacgggaaagaagcgagtactttaagctacgcaaaatgacaaatttcaaggctacgccgaatccctggaagcaaacaagggtcaccgctagaaaagattctcaggcagcctagaaatgagattgtaaattaaatttgaaacaagctgaatatggcagc

SEQ ID NO: 12180 - protein, 266 aa, DROSOPHILA
MTITNWFNWSVKDLSNESHARPKLIPGFDQLDKRLQAALQERDVQKHQRKRTQAGGGQSQAKPKKLKTTRKQTPRVCKFQKVYTEKRKKLKREANMQSNAFQFRSRPVPDFERSHRRLERRKLYLNSLQTVTKPRCPATLATSMVALNKRLKKQRQSRKTSDFVPRINPGSSMDYLNRQPFTPLVKSSFTHPKPFHLHTSERALRRQVYDERKRIRMDRRLEQQTIDWFARERSEYFKLRKMTNFKATPNPWKQTRVTARKDSQAA

SEQ ID NO: 12181 - DNA, 6874 bp, DROSOPHILA
gtaggaaaataacaaaaaaaaaacgcagtttacacagcattatgttataattgtaattacatacaagtgcgataaactactaaagaattcatttgcaatagaatattccctcaatgttcgaaacagataatatttttcccactgtgtgcggctgaagtaatttttcttctttgatactgcaaaaacaattacctgaatacctgaatgttttcgtatgctgcgcggccgcattaagctcacattaaaattatcaggaataaagagcggcaggtaaacgaggcgaggaaatcaaattgaatcgtttacatcatttaaagctacgccaagttcacggacacgacggcaactttgcgtccttgcggccattttgttcaatcctgtgtacccatacatacacatggttgcttgttgggaaaagctaaggggccatgtcaacagacggttaacgctttacttcctcgaaaggcgttcgttgacttcgcagcgtaaaataagcaagcttatgctgctttgttctgttatttttcgcgcttttcgcagggctaattaaggcgttcgtccttcgaaacggtaatcctatatatcctcgattcagcgaccctgtcttgcagcatcgcattaccgacggatgcacgcgcttctgattatgccgcattattgctaacggcgtcatttagtcttaataggtattttgaaatgtgattaacgctcccgtccgtgataagcgctttaacgtgtgcttattacaaattaaatagtggtatactattttggttttagtgcagaaggaagttcttaaattaaatacatttgaatttggcgctcaaaaagcagactggtacaaaattacagcatctaacggtcgcactttagcgaatacatgcacctatcgtagcaggtacccactaccttccaagctagttcgctctctcaacccaaattgccatcactactagacaaaatcaatcgatatatgcaggggatagtataggaggtatcgaacaatcatcaactgaagtgccagctctagcgttttgctttggttgaaaatacaattaaaaattgattctgaagtatttaaatattctgcatcgccaggtgagtgcgtgttgccagcattggcatatttttcggccggaaaaaggattcacagtccattcaaccatcgaattgatgtccaaaagtcggtttaaaaaggcgcgtcatgtgctggaatcgaagaaaatgcgttacaatgcagcagttgcagttgtgcactttattttttgtgtttcaataattaccagtaactaattaattttctacctcccccacccactctccacccatctccctttttagccataaaaatctgcgaaaaccaaacggtggcggcatcgaaaataccgaaagaagcacaaaaagaaaaatttgcaaggctgcgtctgtgttagtgagcgtgtgcgagcgcgcgtgtgttgctctgtgtgcgtgtgtgtgttggcgagtgcgagtcttttgccttcagtgcgtgcgctgtttctcgtgtggagcccaaaggaagaaaaacacacaaaaatacaaggaatccgctaaggaaaaaagcgtaaccaaaaagaacatccaaaacaaacaagtgccgctgcaatggagaagagaatagaactggaaagacgcgcacgcaaagtaaatcaggtaagctaaatacaaacgatgaaaaaaaacacgcgccacaaacttaaattgaggtccaaattaagtgacgctttcgtgtgtgtgtgcattatcatgtaaatctagtttcaatttgttcatagacgacatacaaaaagtgctacggaagaagcagcaaagcggcatcaacaagaaaaacgaaaaaaagaaaagaaattgatcgccataagcaaattctacacacatgcctctgtgtgcgtgcgtgtttgtatgcatgtgacgccagtgttgccatgtgcgcgcatttttgcgccttgcctgctgtttgctcctttagaatgcaggttttgaattcgtttacaagctattacgtatttaattgcaagtccctgagtgattttactgcatggctgatggaaagcgatcttttcgggccagacgagctagagcacttggaattgtattatctccacagctggcaatgctcctcgcttgttgttcttgctgctgctgttctcgtcgtagttgttgttgtggttattgccggccttcaattgtgacaaacacgggcaacatgtgtttgtgtgtacgtgtgtttgactgcatgttgtaatttcaggttatttgataccaaattgtatctataacaatattatagcgcgcgcatcatccgcacaaacacacgcgtaccacgcacaaaagatacacatgcatacgtaagacgacttatgcacaaaataatcgacacatagcatacatatcagtacatccatccatacatatgtacatacatatattgactgcgcagtcataatacttttatgctccccttcttcttttcttcttctaacgtgtttacctgcacgccatcgcctctagccatcccgctcccgcccactcgaagtggcaaagaaatgcaggcgaaaagacaaagccgctgattaataaacatgcgctctggctggccggccagcctactcaatctcaatcagcggtcacccaaccgcccagccacccactgcccgcccaaaatgcaccccacaacagcgaagtcagcagaagacaaaaaatagcaacgtatacacactcattcgcgcctaagtcaaagccaaacgctgtgtgcattcatttccactcatttgctcaaatacagtagacactctctactgttagctatattttagatcatttgcattccccactttggtgcttactagatcgatcaatagatcgagcacaaccgaattcttagccgtgaatttcatacgaacatttttttcatttccaatttttataaattatacctttggggaagtgccactttgtttcctttccaagagttaaattttttgtttaaactacaccatatccataaaaagattcttaacatagttaaattgattccattaccaaaaacatgattttgaagttcatcaaacaataagttatttatattacaaagtatatcaaaccgaatacagattaggttttgcagtcagtttttatttacaattttatattttcatattcaattttgttgataattattaaaaattgtgttgagctacagttaattttcttttaggatataccaagattcttgccacttagaaataaaataaatttgaaccataattcaggttagaaagtgtccgctgtaagcacataactgtttctcggctagacagagacggacagacggactctgaaggcacccattttgtttctttgttgttggttttgttgtggcgtcgtgacatattgataattgggtaatctgaagtgaacttgcacagcctccaaaaggcgtacgttgtgtacatttattcatttgtagattatcagaccacaaaacaccacccactctcacccccacccactattcgcagacaggcgcaacaactaaactacgtcacggtcaaccatgttgttgttgttttgttgctgcgagtgccggctagtcttgttgttcccctgccatctcccttccacttcttgataattccgttttgctcgtcattcttctctttgcgcattctgctttgtgtcgaagcacacgcacacatacacacgcttgtggcacacacacatatattggggttacataaacgcgagttggcactttttcctcgtcgcctgcattacaaaaatatgcaatttggcgatggagcagcagcaatgtttaccaagtcatttgcattaacgccaaattggttattttgcatgtaatttcgttttgcatttcaacaaaaaaaaatttctcagcgtttgatcgatttttgcgtatgtattgttctccattttttttttctgttcgctttgcgtcaaaaaatgttacaaatgtgaccagactgcgaggcttgaatattccacaatgaatacatcaaatataccaaaataatcggtatcgtttgttcttgtcttcaataactaatatcgataagtaataattggtttaaaaattattcaaaactcgtttcatataaataaaatgaactacttctaatttatgtatttactctcaaccctattataacctagatcacagagctgaatctggacaactgccgtagtacaagcatcgttggccttacagatgaatacacagccttggaatcgcttagcttgatcaacgtgggtctcaccacactgaaaggtttccccaagctgcccaatttaaagaagctcgaactgtccgacaatcggatttcgagtggcctcaactatctgaccactagccccaaactgcaatatctcaacttgtctggcaacaagataaaggatctggaaaccctgaagcccctggaggagtttaaaaatctggttgttctggatttgtttaataacgacgctactcaagtggataattaccgcgagaagatcttcaagatgttgccatcgttaaatttcctagatgggtgagtttgagtaacttctttctattgtagaacaataaaagtaacttcttgaccacttccagatttgattgcaacgacgaggaggtgcaatctgatggcgatgatgatgatgaggtcaacggcaacgattccgacgaagtgggaggtgtgtattcgacgtatttatagagaccaaagattaaatcgcagaattcaggagttttttttttataaaagatttccatgtaaccaccattaaaattccattgtccgtctgtttaacttaatcgcttattgtgaatcgcgctttcttcgtattaacaataatatcatatactcaaccgtggcttttgtcgcctttcagataagtgcaatgcattctgtttaaatggtttagagatcgatttagacgagctcgaggctttcgagaagcgggttaaggcgaaaaaaagtttgcaggacaaaccacctccccaatcggaggacaaagaagtagacgaattagatgaatacttgaaagagttgcagctaagggaatctactgatgcttcaaccgatgaacaatctgtgataaatgccacaccgcagcctcctagcaattctaacttaagttttgtaatcctgctgtattggttccttgccattttaaatttgggcagtgctacatattgtaagcataacgtttctgaacttttcttcagtattagtcgaacttctctaactcgaaaatgctgcagaaaaagtaaagattctcttacccacaagaagcgttatagtagttcgtaggtttgttgatctcaattccgttgaacacattaaaaaatcgatttagggaagttcgagatgtacaaacaagcaagttggtttaatcaaatttacctttgatttttcagtttccgacgaagatgacgacagcgatgatagcgacgaagaggcgaatggtgaagtgtccctgtcggaggtgtacaatgacgatttggaagaggataactctgattgggaaggcgaagacgaggctggcgaggaggacgaggaagaggattccgatattgatgatgccgatggtgatgcaaacgaatcggctgcatcagtgaatgccaaggacaaggatggcgaaaaggaagcaggtaagttcaattatttatatcccagacagcattagttcttaatgccatatattttcctttttttctttccagacgagtcgcaagtcagaggcaagaagagaaagcatgatggttaaaaccctgatctgtcggtatagcgtctttgtacgttataaatttaaatatacacccacacacaaaacaaaaacacacacacacatcatattttgatagaaaaagatgataaatcctttaggaaacccacaatttgtttctctaaaatgtaagctaatgaaagaagaaatcgacaaaaagaaaaaacaacaaacaacccaaacaaagaggagcataatgaacgtaataatcaaacaaagctaaacaagaaaaaaatacatgtttaagcgagaaaaatcgaggaggaatgcaaaggaaaccaagcaaacaaccaattaagcaagtcgcattagtatagcctcatccgagcccaagttccagtttcattttaaacaccttcgccatcttcaggattcgcaacatgaaatccaaatcactatgttaaagattacacaattacaacgtgtacaatttttagccatccagcagcatcttgttttcaaatttcaatcagtcacgaaaatcaaacaatagctttccggcgttatttgaacaactgcggatttgtcaacgtttcgcgtgaaaacgatcacacaatttactgctaagaacttttaactaactcttaagtcattccttctttaaatacgcataagttaagcatcctacttcgcccactttctgctcaaggcgatttaaacacacttacattgttacccatcacccacctcccagatacacaaactttatctccgcgtcattctgtaaacgtagagcactcacttttgagcaacccgaattgtttacctttatatacttttaagtgtacttttaccacataccgaaatgtttccacttattcattggcagtagtgttttcattaaatgtggcgagtaaatcttatacacaaaacaattttagacaagacttttcatttaatacacaagtaattaaccgattattattaaagcaggccccgcgttaatttaacgagatgagatgtgtctttaccagcccattgaaactgaaatacataaactacatcattttaaaattgtcttttacgggggaaaatgggaaaatgatttctattaaagagaaga

SEQ ID NO: 12182 - DNA, 1250 bp, DROSOPHILA
aacaatcatcaactgaagtgccagctctagcgttttgctttggttgaaaatacaattaaaaattgattctgaagtatttaaatattctgcatcgccagccataaaaatctgcgaaaaccaaacggtggcggcatcgaaaataccgaaagaagcacaaaaagaaaaatttgcaaggctgcgtctgtgttagtgagcgtgtgcgagcgcgcgtgtgttgctctgtgtgcgtgtgtgtgttggcgagtgcgagtcttttgccttcagtgcgtgcgctgtttctcgtgtggagcccaaaggaagaaaaacacacaaaaatacaaggaatccgctaaggaaaaaagcgtaaccaaaaagaacatccaaaacaaacaagtgccgctgcaatggagaagagaatagaactggaaagacgcgcacgcaaagtaaatcagatcacagagctgaatctggacaactgccgtagtacaagcatcgttggccttacagatgaatacacagccttggaatcgcttagcttgatcaacgtgggtctcaccacactgaaaggtttccccaagctgcccaatttaaagaagctcgaactgtccgacaatcggatttcgagtggcctcaactatctgaccactagccccaaactgcaatatctcaacttgtctggcaacaagataaaggatctggaaaccctgaagcccctggaggagtttaaaaatctggttgttctggatttgtttaataacgacgctactcaagtggataattaccgcgagaagatcttcaagatgttgccatcgttaaatttcctagatggatttgattgcaacgacgaggaggtgcaatctgatggcgatgatgatgatgaggtcaacggcaacgattccgacgaagtgggagtttccgacgaagatgacgacagcgatgatagcgacgaagaggcgaatggtgaagtgtccctgtcggaggtgtacaatgacgatttggaagaggataactctgattgggaaggcgaagacgaggctggcgaggaggacgaggaagaggattccgatattgatgatgccgatggtgatgcaaacgaatcggctgcatcagtgaatgccaaggacaaggatggcgaaaaggaagcagacgagtcgcaagtcagaggcaagaagagaaagcatgatggttaaaaccctgatctgtcggtatagcgtctttgtacgttataaatttaaatatacacccacacacaaaacaaaaacacacacaca

SEQ ID NO: 12183 - protein, 261 aa, DROSOPHILA
MEKRIELERRARKVNQITELNLDNCRSTSIVGLTDEYTALESLSLINVGLTTLKGFPKLPNLKKLELSDNRISSGLNYLTTSPKLQYLNLSGNKIKDLETLKPLEEFKNLVVLDLFNNDATQVDNYREKIFKMLPSLNFLDGFDCNDEEVQSDGDDDDEVNGNDSDEVGVSDEDDDSDDSDEEANGEVSLSEVYNDDLEEDNSDWEGEDEAGEEDEEEDSDIDDADGDANESAASVNAKDKDGEKEADESQVRGKKRKHDG

SEQ ID NO: 12184 - DNA, 44456 bp, DROSOPHILA
gatatgtggctgtgtgtgtgcggcataattccacccgaatttgcagcaaatccattcagtttcgccacagcgcacaaaaaataaaagaaaacgcgcagccgaatgagcaagtgtttgtcgggggagggggttttaggcgggttgggcgaaggctgcggcgacgacaagtgcaattgtgcgccggaacaggtttacccactgttcctgtgtgtgtgtgagagaaagtcgctctctgcatagctactctcttttctctctctgtccctgtgcgtgtgctttgttttggtcactcactgacgcacacacgcagagctgtttgtttgcctcgctaaccagaacgaaatttcgcagtatttctactacgctttggcatcatttcaatattttaacaagatgatactgtgggaaagtgttggtaagcaaaaattcttatcagttctaaagaaatttacattttgaagaaaataacgtgacatataaagtaaatttagctttctaaaatttggtggtctttttaacattttttatttttaatttactaagaaaagcgccacttgttcttattctaagcaaagtgggttactcttataacaaatataaaatttacagcatttatatttttcctttcgttatatttaatataataaatatattgattttaatctaatccttttaattagagccccattcataagagctcagctaactcatagttttactaccttttcagagcctactactttttgttacgttctctctccccactcacacaaatacaaatacaagtgggagagcgcggtcgttgtctctttgactcacacaccagtacacatggactggcggcaaatggagccgcgtgagaggaccacggttgaaaggggggtgggtgctggctgggggagggcgagaacgagaccgaagaccgtcggccgaaagagaccgaatgccaaacaccgagcaccggcacaccggcgaatgtgcgaaggcgaaggaatgccgtcagttgtgcgacaactttggccaagagaggatgtcttgacgcgcgtccgcttactaacaccctgcgataccctgcgaagagagtccagagagccagatcagtcagtcaggagcaggagcccaaggattcggcacgccatctgccggagaaaccagacaggcggacagccagacagcctgaacgcctcaacctcaacggttggctggatttgcgattgtcgcattcgccaaattcgatacgctgccaatcctggtgacgcagtgacgcgatcagctcccgatttcatggcactaatgatgtcgcgtcgcccccaacagcaacaacaacagcaagaagagcccctggagcaattggaagtgcagcatctggaactagagtcatcgaatccgttccacgaaggaaacgcgcgtttcacctgagcgtgtgtgcggttgcgcgcgtgtgtgtgcctgtgtctaatttgcgtatccgcgctactcaaataagaaataaatagaaaaatcacatcaaattaaatcaaatcaaatcgaatcaagaaatacaccttcccccgatcgaattcgaaatcgagctccccttatcgcggtgacaaattgcaatcaaacaaaaatcacagcgaaccatccaaattgcaattaatgccaaagcgcctgcatctggccataaataaaatacgtgaactgcagactcagtgattagaactttgaatcgccagcgagatggacttccagagcgccatggaaacctttgccgaagcctgggtggcagccaatgccggtcagcaggtgagttgagccttcaaatttgcagagatatcatccgcatcacgaagatttcgtcatacggagaaatttcatcatcgcacggcgagatcgctttgccggcggcacttcacacagccattagtcagataccctggctatcccccacttttacagccctcccattgccaaatgaatcagttgagtgcaaacaaaatcggccaaacgacatatggccaagctgtagtgataagggccgtgtagatatgcgctcgtttcgctatttatgcagattaagataatccttatcggctgagattttcgagatcggtgctgcgataagtccgccagcaccccgcacccaactgtttacctttccccgttcggtgtgcccactaattgcattgtaaagccgatccccaaaggggaaaactgggaactggggctaagttccgagttctgggttctccgccagagcttttgccagccagataagataatcccgacggtaattttgtcaaacgctggtaaattcggcataaggcgatgacgaacttagatatcgaatgtggctaacggggtggggatactggcggtggggagcgttagcgcccccagctcatagagtgcatgtcgcgtcatctctgtgcgcgccgctcttatttttatcagaatcgaacgcccctgtcactgatatcgcaattaatccaaataagtgcgataaaattgattatgaacatgctggcgtgattagtccagcccaactccctctctggaaaaagtgggggatcactcatacacatgtccagatatctgggtgtgtgcctgcatgtgtgtgtgtggtttattagcagacataattgattatgttgtgtgagtgtaattattatttatctggctctgcggtatgacttctgcctttggcgctcaacccattggaatcggttacccaaacgccgaaaacggggggtgactaatccaagaatttatgaattttatttccaatcggtttcgaaaacatctctatgttgtatatttaaaaaatcccaatctcgcgagggacccaccgtcattgtctttaagccgaaatcatgccacaagagttattgtactggccaaatctgtgatggcttcgaaaacaaacagcttagagttatttcgtataccctagccattgggaatacttacatttttttaagagatcgattgagattaccatatttgtagaacctagcagtgcttccagcaatttaaataggtccacagggattgttttttgttctatgtacgtccacgtggcaatggtaattgcaaaatctttgcatgtttccgataaatgtaacttcctctaagtttgctacgacgaatgtgatgatgcaatagttttgaaaaattttatatcgattagatcagaatcgatctaggctagagcattcgaaacttcggctttagaaccattcgttttcttttttattttttgacagttttatgtgtcgacgcatatgcttagtgaatgggattaagataagacggcgtaagttgctcgagagtcagataataaaccagaatggtcagaaggggcataaataaatgtgaattctttcaaaactatggcaaatcatattgtgcgagtgtgagtcgaattttttgttggcccggccaaactaattataaagcatttagctttattgttgtgataatttcatttcggggtttttctaagggcgtaatatcgaaatcgaacgcggccaacagataatgccgtctcttcacacccggttagatcacctggccgccttttgagcagccagataggccgtcttataaattataaatggttcgattttgtctaatctgaaagtgttagtcgtttgtgaatgggggatgggcggggacagccttaggagtcagataatggaatatttattaattgaaatcttcttcgccgctgcttcctgctcaccgtgctcgtgatcatcgaatagtcgtttcattacctctgcctcgttttccccagcgatctctcgcaccaagactaatggtaatcggggttaatccggccgcgcatcgaatcgcagctccaatcaaatgcattcttcgccctttcttctggccctgcccgtctgcccctctgtcggcttccccgtctgccttcccacgttttcggtttcgttaaattccggtagtcaaatgtccattaaatgccgctcataaatgtccaaactgtttgtcatctttgtggccctgttgttgttgttgtggccgccgcctcctgacttctggctttcttttcttccttggacttgggtccaccaccactactactacaccctagcacatcgttcaattcttctggcggcttaggcgtgctcctctccccccgcagtttctcctgatctctttagccgcttggctgctagtgctacctgattgtaacacatttttagcattcattcgacagcgggctctcactccgcttttgcgatctgctgtcagttgagcggctttgaggctttttacggcccgattatgcgccttcgctgagttcgcatataggcgatataaacgtatttattaattattcaaagccgattggattataataatttataatgattattatcataagtcggcggacttggcctcagattcagatacagcttcaaatacagaatcagatacatattcagatcgtgtctcgatttcgattgttgtccgcactgccagagtttcgctccaatcagactgaaagctgtgacaagtacccatgtacttgtggaacagcggaaaacgctttaagttaattacacgatgtcatagcatttctatttcttcattttcgttattattttggcacttgcggagcggtcttaaatcaattcctcactatttcctgatcgcttttttttttttggggtgctcatgttcatggcatttcgattccccactcggaatcgctttcaaaggcgccgctcgggcagctctctcctcctccacagctcctcagataatcaacaaaacgtgttcgacttgtcgaggttttcctttctgcacttatcatagaacgaacacctttcggtttttgttattgttgttgttctttcatagctaatgacaccttgataaaacgatttgtaagacattgcgataaaagcggttcaggctttgtagcttaaggcgaaccgaaagctgataaaaatacaagccgaacaacagaatgggaaaaaacggaaaagttcgaatgataatgacaactttgggtaattaatttgtagggcggcagggaggaggagtgcgtctttcagtatttgcttgggcatttgtcattcagcttaatcggaatgcacaggctgtgacaaaacacggcaaaagaatcgaattttatacaatttacgcatttcgaaagtcatcatctctgccgaatgctgccttccccattgtcacctttttcattcttaattagtggatttagcttgttcagcgtagatatacgagatcgacttctgaattcagaactcagaattctgaattttcagcccctctgcaactatttttatatgggccgcccaaatccgttttcccccgctcgggtggacataaatttccgaatgttttgagaattatgacaagtgggttggagacaagtggaaatgaaatgaatatgtggatggcatgtacataagtatatatagggttgtgtatatataggctggcaattcagtgattataaactttggttctgatcacgatgacgatgatgtgggacttacatgaaggtattttcggtgctgaagatttattagttatcactaatacgccccgttgaaaatcataagccgccacagcagccggtgatttctacaagtcacagcgacaatcggcttccgagcatatttttcttgaagcccggtgtcaaagagtcggtaacctcgtcttatttaaagtattaactgctaactaatgtgcgacacattataaagagcgatccgcgacgagacgcaaccaataccaataccaaaacccaaaccgaaaccgaaaccgaaaccaaaaaaacaggtgatcgccggcacagtgagtaaaataagcggcgatcatgcctggcatcgacaaaagggattatatttcctaagcggtcccaacaaaatgtgaccaaagctggagcgactgggcatgggtatgccgtctggaatcgcattcagtgcccgatcgctgagctgcttaactaaatccggcttaagatccaacacacaaaattaatgtcgttgaaaaacacagcaaaagtcacacattaacagcgacgacgatcgcgcccagcttggtgtcccaggaagtggggatctgcctctgcccctgtcccagcccctgtccatccatcggctccttctgctaatgggtaatgggcagctccatgatgggcaatgggcgatggctaatggcgagaggaaatgcccggtgtgtggacatcttacaggggattagttcgagtttgccggccaaaacgcggaatgcgattgcgagtgcgggaaaataagccagttgcacttgctccccgtccgtcgatcgattcaaattaccagcgatttattggcgatcgccagcctagctaccgtgatcaactaatccacttatcagtctgcatctggacagcccctccgtttcccgcaagacttccttcctttcgctctcagaaattataccatatgcccacttttaatcggcgtcataaagtcgatcattaaccagtttaatctatacaatgggtcaccagccgccttttatccaaatctaatctattccagcaataccactcccccctttcaaacgtacttgtggccaatggctaatatctaaatctgtaaattggtgtgtttgccttttatcggaggcctttcaactggccaagggtccctgggacccgaaagccagagcctgaccagcgttatgcgaacacatgtatcgaatgtcgccgagttaatctaatctggggaattatgcgaccgtttcgggaagataaccgccgcaagtccgagaaccaaattcgataaatacccagtgctatcatataatgaagcgcccccaaaatttccagtcggagctaagtaaacagaaattgattgattagacacacaattaaggcaatcacatttgattttgaaacacaaatgggggcagggtggctgattcacaaccatttcactcctgcagctgcatcttttgggggtcaaagacgagtgtcgactggcgatgacccatgccaaatcccattgcttgcgtgctcgacacccaccaaccaaccccccatgcaaacccctccaaaaaaggtggaagaaatacaaatcaattcctgtgcaaattgaaagcggttgcaggtggaaaatcacctggaaagtgggtggctcgcatgtcagacggcggtagccgcttatcggtgtcatcgtattttgttccccacacgccggatgcaatgcatctaaacctggctaaactttgcgtgttagccaaacctaatccaggctaaacgagggactggggctttttgggccactaccatgtgatattctgtgaatgtcagctaatctgcagggcaaaacgaggcagcaattgcacaaaacactaatcagagagagtggggcttgcagcgattccccatcacttttcttcacccatccagcaggaagttgtcaccagttactcaatcactcattcagtcagttgtacattcattcgctcattcattcattcgttcgttcggtcgcagtaaacccgagggtctcgtgaagatcatggaaatacgcttatgtcggattatcccataatttatgtgagctgtgccctggccagacaatggatttgcctttccagcgcacaagaactcacaccggagctcacctaattgccacgatcatcagaggtagctatggccatacgatatagtatagtaaacaatatagaaaggaggctaatgacaatggccagaggaagcgttctcgggcagatgacaaaacagaaattgtgtcactcgattgcaggatcgggaggcctttaaaaaacggaggagaacagagcaaaagtagggaaccggaagcgtaatcgagctaaacgaacgccgtcggggaagtgatcagatgtgcgtgtgtgtgtgtgtgtgggtcagcccattgtgccaaggaaggaaaaagatgagcgggaagcgctaaggaaaaacgcgatgaggaaagtcagaaaagtatatatatatatatatatatatatatttctaaagagaaaaaacgaaaacagcactaccggtcaaaagggaaggaactggaagggagaataggaacaactgggaaaaaactagaagacaaccaccaaaggtccccccacgtgcaattaataaatgtaaaaaaaaaagtgagggaaacgacaaactggccataggaaaaatgaggtactgaggcacctcgctaccagatccccgtagctatggcaatgcaaacaggtgagggtgaattacttgtcctagacaactttgcagtcagctgggaacagctgaaacgacgcccaggcgatgcgagagatacgtatctgctggatgcaaactgtatctactgcagctaattaacgaaaaagtttcggagtgatcgctggtaaacgggagtgccaagattgcaatctaaatagctgaaaacgttcgtatcgtcagttcgaaatcagtccatactgttttgtaacttgaatttagcaattgggtatatttttatagttaaggtacttttctcgtcataaagatgagactattttaaaagatatagcttgcaaaaattcaagtaatggtcgagctaaagcggaagtgcgaaagcatttcatagttttttcttagatacacctttcagaatttccgttgaaaattctgtgaaatacttacatttcctgtttgccgattttcgggcatggaaaacgttttccgcttaaaaataaagacatattccagcgtttagagcagaactgtcgccaaaaactgtttggcgagcggtaaatatattcggaaaacacattacccagcgaacggaatcgtaaagtcggagcgttagggcctcgaaaagggggcggatcctggcgatgaggaggacccataaacttacatagttgggcctgtttaaaatgcgcttaatagtttcaacatgtggcgtggagagacaattaggcaataaaattaattcacaccaagaaaagcattaaaagcgacgccagacggagcaaggtgccgcattttccattcgccatcctctgctttcccgcttgccatttcccacttgccacttgccactcggagtttccacttggccatgccacattttcgcacgcataactcggaaattgcaactccatggtggcgcgtgtccgccgacagttggccatatcctccgccaccctcccgcggcattagccaactctttaattgacttttttacgtttgcctctctgaatggcaacagccatttgtctacgaataattaagccgatcaggccaaacaaaagtttgcgcctggcggagaactgtcatcggatgcgtaaaatcattattcgcaattgccggggaactaaaaaaaaatatatgagcccttggactgcgtttatgggatcaggatgtttgacttattttatcgccacagaactttatatatatggtgatttctttagtttaattaatggtaatgtgctagtgctagtatagctatagctggttttttggagctattggagctatttccttatttcctcgaacctcatagataactgtataatattgtatcttttggcgagtgctgcttactcattttttttttttgaaacagcacgtgctgcttgtgaaaaccagaatgcagtcggcacacgctcatctggcggcttcctgtcagacctcaggtttcactttctggatctggatctgaagcaggagcagcagcagcagcaggagcagtgacagcggcaggacttggagaagtaggacactgctgtttcctatacaaatgagggtgctgcagccagggctctccacatccgatgtgtgccctgatatgataatctcgccatcgagagctcgcacctcatttgtgaaacagcaattgtctagaggtcttcccccaatgcattgtgtgccgatgccgagtgcttcctgtctcgatgtggcaataaaaacgggaatacttccactcgagtccaaggtgaaccttgtgtgtgcaagtttgtgtgtatttctgaatgcctaatcgttttcccccctggaaaagagcgaaaaagaggggctgtacgtcatttggtctcttatcattaacgacttttgttctttttattccccaaaccatatatcgcgctctggagatctgaagtctggggttctttatccgcatccctgggtatcgctgaaaagtgaaagcgggggaggtaaaaagtgacctaacgcaattggagcaaacattttaattgaccccgatggggagaagtctgagccgcatatcctttggtcctttggccagtgtgctttgtcctgactgatctaatcaggcttcgttaccgctaacggtaaaagctcacctgcatttttaccactccattgcattgctggtccgtttgaagctcacatgtcctgctcacatcctgtttagaaacggttttgttttctttcgactgtctgctctgagtgcggccacatttattctcgttttttttttttcggtggctgcccagtctgtttaggccaaaagccacacaaattaagttaacttcctgtctgtctatggctaatagcaaattaataagagcttccggtcaatttggcttgcggttttctttcgcatttccctttcgttggccgccgttcgttctgttttattgctgattgtcctgtggcggtgggtgtgaccccgactcgaaacttcgcgacagctgtggagggaaggtctcctcggctctggctttctcccctcaagttttggtgcttcttgaacgcttccttggcgcctgcccttgacacacataaccaggggcatccttttccactcgagtacgcctcagctgcaattacattgcgaatgcactttctgcaattgttatctaagtagggctctcggctatctgccgtagcctgtcgcagtttcaggccgcttcctgttcttccctcgcttacaggatccctcaagctgccacttgcactgggccaaatgtcaaagcaaacgccgacgcaactgcagttacaggaaggaggatccttcttctcggggagaatgtcctgctcggctgcctctgcgcacagctgtccaaattgggcaattgaaatgtgtacctagggttctgttgttcatcattcttcttttatttacctcgggattagagaatccgggaatcatcgcatgaagtcaagtcccttggagaagggagtttagggattagaaactggtttgatctgcgatctgcagcttgttagtaaaatcaattacctatcttcaattaatccactccatacatcccatcgactgaggccaattaaaactctatattgtgtacgacctcccccatttcggatgcaactccgccccagatgcgccagttttatcaatttaaagcagagcagacataatttacatttttatttatcgagggtctagcatttcgaggcgcagacatggctgccgtatctcccagactgtggatgtgtctatccgtccacatttgctgccgtaacgctgggggatatttttcacatttttagcttaattgcatttggctggccgcacgttccggccgcagtagttgtttatcttcgcctcgtctcacgtgcaacgtgcaacctgcagcacagctactggcaactgccaacatcagcaagtggctacttgccacgacaactggtattttcctagctgtctttgctaatagacacacgtacaaacatacatacacacatacacacgcatgatacaagtgcagtttgcagcttgcaacattgctgcaaagtcaaacaattgtcgatggggcacgatgagtggagcgggtaaaagtggctgggcggtgggctggccacaaatagggggagtgttttgtgttctgtggcttgttaagtttaagattgtttgatataggcacagaggtctgggtccccatccccatctaagcctcccccctcggctgctccctcaatcgtggtgcccgcagcaacgtgcaacgtgttgctgttacgaggctttcggcgctaagagacatgttttcaattatgattgctggcgtgtcttattaattacaaccatcaagcgatagacagcatttagtccagcgtttagtgagggagcggttaggggtgttcctaatgttaaattgactggcaaaatctgaaatagcaaagcagttagctgatcaaaatggattaggttctcaataagtaccaattaactggcaggagcagcacaaaaaagaagaaatattcctctaacttaagattacataccttgaaagtatctctatctgaatcgatgaaatctcatcatcagatacattcgtgcgcgattgtcttctgcgcagaatctgtaagctggcagagctgaactgaacaatctaactgattgcttacaaatgaatctcaattaaaattaattcaaaacatgaaccgagtattatttacccatttgacactcactagaagtggacgcgtatgtgagccgcactcactcagattgacacacatctctcgatcggtagcttccatcacccttctactacagaagatggatggaatgggacggatcatcaggcagagagttcttcttggagctgggatctttgaaggcattcgaagactgggagaagcgcatatcaacggcatcaattaatttggtattcgtgattgtacttaacatcgattgaccccgacagattagtgagcgaggcgaacgaaatgttgaactttgctttcgagcattccttggctcgagctccatggatccatccagtggctcccaaaccccagacgcgtcgcattgtgacgcaaattgtcaagccgcagtgcgattatttacatctacagatagttcggttaattgagcatgtggcatacatagagcagcatcggtggctatacgttttgggggcgcctctggcctaattggtgcgattgaattaaaatcgtttgctgccacttgaagcatgctgtgtgcatcggtttctttcggtgtcgattaggctcacagatcacttgattgctttgctcttggtcgcttaaatgattgatcaatgggccaattgtccgcgagaatcagtttagaatttgcatgaatctcggcattggagcacggcgttgttcattgattgataaataaaacatatttgcccagcatcaggcggcgattgcataagttggggagggagtgaaacccagataccaggatcctcttccttctggaaattcggaactgcttgcccataaattgcttcctgctcatttggccgtgacaaaattgtgtcccctaactccgtttcctctgccttttttttacttctaacttttaacctatttaattgacttataattggagtgacccacacaagcaaataataccccggccagacatatgtgtaggtaataatttgttgagcaaggaatttctcaagcgcaacacggactcgactcaaaggggcgaaaacaaaggatcatgagaaacagttagcatcgggagatagatggacagtgagagagagagagggagaggagagccaggtcacacatgaacgagttttccagccgcagggaaaaggaaaaggggctggcatcgaggaaattatgccgccccggcatgttgaacttgaaattgtaatttggcattcggaacccggcatttggcattggcaagggcacctacataggccaggatgttgtcccaagaaacgaggaaaaaacgaggcattaaacgcggggttgtcactgcagtttactcttccgttaactgtttctggtcctccaggaactttgtcagctgttacttgatcgatggtaaatgacacattgaaattatccaccaccttgggctattggaaatgccaactttgtgaacaggcaggtagttaaggtgctcccactgcaattaaaggattaacgagaactgctggctaaatgcacattccaagttgatgtatttatggacattgcctctgcttaagatgcctatcgaaattttcaaagtttaattcgattaggaaagcatttttttgcttgaatggtttttgaaaatatttaaaaacccataacattgatactttttctaaactaaaagccgataaatactgctgctttttattcccctgccattcaatttaagtgggcatcaagtgttaagttaataatttgcccagctcactcggggggaaatactcagggcaggtaattgaaagaatggaaaatgccaacacacattgtaagcacgagagagctttattaatttttgtatttaaaacatttcaagcactcgacaccttctctccccagtagcagttgcactaccagtttactcgcggtcctcactgggttctccagtagccgtgccaccagtagcaccagtagcaatgatctcaaattgatgttggccgagtagaaataatgaggaccttgcggggaggacgagcagcgaacggaggatggaggatctgcgagaaacgcgcgcataatcaaggcatggagacatggacatggacatggacgatatggacatggacctgctccgcaatggctcggacatgccattgccattgccaattggcgatttgcctttgcgtttgcctgtgctgcatcagcttctgccctttatgattattgttattattgagtgtaggcctctgcaattcagggcaaagtcatcattaatgcgtcgagtgcagcgagcattaccgaaaaagccctccgcgaggcactaaaataaaatgaaatgaaatataattaaatgtccgcgtagctgggtagctgttgcccgtctcgtaatttggccagaaattcttccgcgatctcggctcggctgaagttgagtttcagtctggatctggctatcgctcaaactgatcgcataccaagtccggcgtattttgtcaaccggttttggccatccatctgaccagccatcgagccagccgtccctttcccactctgtctttgcttatctgcggctttgtggcatctttaaatggcgttttttcgcactcgccaactcgatgcgggcgtcgatcttgccgttggccaaaggggcgtccaaaggggggacaaaaagggggcctccttggcaaaacgttcgctgatttttaattattttgcacgtcgcaacgatgttcgccatcgttgagaatttagctggccatgtctgcctctctgctgcctttcgtcacttcgatattgaaacacttaatcacaatttcgttaaggacacaaggcatgcgggcagacagcagggacacacataaatggcaaaagtcagcgaaaatttcaaaaatctcatacaaattacgaagagcaaaaggcgtggagtcaaaaacaaaaacgaaatcgaaatcgaaaacccaaaaaccaaaaccaaaaccagagaaatcacaaagcgcagagacacgaaaatgatatttctacgcgccgaattccgaatgatcgcattcagttccctcgctagggaatttggcgaacacgaaacgcgaaatgcgaatctctggccggccgctgatcgcctcccgctgacgatgataattaataacagtggcccggccccagaaaagagcataaaaacgctgacaaacacccaatcgtacggccagaaaaaaacccagagtctcggccaatggaaatggtaatgtcgcggatcggagcgaggctcctcccgataagcaaaaaagaagacagaccagtcgcacataatctcagacggtggggaatgtcaatctggggatgcacttgaagtaaaacctatacacctagtcatcaggtttgggaaattgccataataagctaaatgtataaaaccatttacttgaaacaggaatgtgtttatgaacagttcattatcatcaaggaatagaataacttgtgatcataaatatttaaattttgttatacaccttccttctgagtgtataagctcatggtcctcagttttagttctccaacgattaagatcacagcaacgagatcctcaatcagtgttcgctgctcaagtgatcaacacttacagaatgcgtgtgttggctaagcaaactgacagagaacatgacaagaacaaggggtttgacaagagcctggcgatagaggagcttatccacagctgctccaaaaattcccatcgattacggcacaatcattttcatctcattctcaccagcaatcagtcgatcagcccgatcccgatcccgattccgatccctatgccaagccctatccatcctccagttgatcagtcattcccatcacgcagcactcgggcaaaaacaattaatgcctggctgaggaatcaaatgatatttggccaaggacaagacagcgccatggtgccaggcgcaaccacgatttatagcccaagtggaatgtgccatacatcagtagcaggatcagaggagcaaaaacaatttagccagcaaggagtatctgctgtcgatgattaaaacacattaaaaatccagtagccagtagccagtagccaggtactggtatggaatggggtttttcggtttttggtcgccttctcgggactggagcccaaactaatttcatatttttcatgcaattgatgaaattccatcaagcccccgaaaagcgaaactcctttctcggccagcagattcatcttctccagctccagctccagctccagctccagctacatcagccccatctgtatctgtatcgcaatcagaatccctgactgtccgtacatctgtccgtatgtccgcatgtccgtctgactgtccgtacgatcgcttgatgttcggggactacctgttgcgacgtgttattaggcgacgtattgacgacaagcaaacgtcaacccgaaacgtcagctcatcatatcatcgattgatgcgcattgcctcctctcgcatctcgaacctctccagatcctcccttttttgggggcaccgtgcatattttcgggatccgaaacagtagtcctctgcttgttctggaatttcgagagggtagaaaaagaaaggaatggaaaaaaacacgtccaatgttgggcctctaattttgtgcagatccgagtttgcagagttcttgtggcccccgttcgtcaaggtggtgatatttgttagtgtaaactgtccatcagcccagtcgattggacgctcctcttgttcttccccagcgtacagacgtgattttgcgctttaatgaggattattaaatgcgagattattatgtgctgcaattactttccgctgccactgtgcttggggtttcttctttgctgcggctgcctcatcatattcgggttttttttccccctctttgatttattttattgaaccataaaaatgtaaattttcgcgagacaaaagacaaagttaatcgttgtcaattatggcctttgacaggttaatattaaaatgttcagcccgatggttgggcgaaggaaaggggcctcttgattggtagcattcagcgaggatgatcggttggaagatcaggagcgaagcgggatgattaatgacttggatagctattaataagcggatggaagacattgtggtgcgatcaaaagggattacttggggctactttctggtttgaaatatagcatagaaccttgtaacgcttatagattttgccttcaactcgatgccacccgatgatgactcattcagggggctgatccgtaacttctggcattcttcgatcggtcttaatgccatgcatttggtggcagccctcgaaatgtttgattatttcgcaatttgtgcccgctggcactgcagtttccggctgaggtgagcgccgtcctccccctcgggcgggatgcggaaacaggcatccagggggtggggaggagggaggcggctcaaagcagcgcagagcagaacaggaatccggggggcagcacctctattaacataatcacaacacgagtcggtcgtccgtcgatctcaaccgaaaattacggcaagtgcaagcgcgaagaatatacatattgtatatatgtatgtattcgtggatgtgcggcatgggtagatcaatttttcgggaacccaaatcactgcagggcgatcaattaaaattttgatcgaattttcgtcaatttcttgacatgtggccaggaacagaagccaagtagccactcggcagaagggtagcaagaggacgggcagtggaatcgggacaagacgagatcaatgtaagctgaaattgtcggctggaagccttaggcgaaaattgctctgtctgcgggttcctttccatactcaatgacactgaaagaaactttgttaaccaaaaggaataaaaagcaagcaagcctacccacagctgtagtataatgagcttaaggatcttgtgaagctgagctgtagtataatccttacacttttaacgattgagaaaattgtagtattgaaataacttatttctttctctgcacttcccacttcctctgcttcatcggctgcctctgcatagtgaatgaaattgattaaagcgtaaatgaatttttgcgggcctaaatcgccgctgatggccaagaggaataggtggggagctggcgatgattataacacaagatcgattgctgcttgtcgctgatcgctaactcgatgcggctactgtggaaagcagagacgccgcatcagctccagctcctgctccatcttcgcaatggagcccaatccaaaggcaagcccctctgccctcattaagtttccgaacatgttttcgaaaaggatctccttgggcagcggctgccgctgtttttatgccctcatttgacaaactagccaggggcgaagatcgacctggccgggatcagagtcccgatgcctcggcttcgatttaagtttatccgcacgatcagcgccaaaaagccaaaaagccgaaaagccaaaaagccagcgcgaatgccaatgccataattttttgccaatccgcacgcacggaacgggactaaaaaaccggcgggctggaatccctgggacttagaagctgctggaattccgtgcgtgcccagccggcataaacggtaaaaacggtagccacagcgagacgctataattattggtttcatatcgggatggctagtgggaaaataagcagacggaagagtttatatcactcatgagctagttctggagaacttaaatgcttagattgaagctgtttatggctatctatgtatctataccagatgtgtttcattttggattagtccatcagtttgtatctagcgcttgcaatcaatgcgaagcgaattaaagatctctaactgaccaatttgaaattcggtcaccattcagcaagggcagagtgccatcattgatttcactgagtttgggatcgagtctctgggtccgattccatcatcaattgccgctttgtgggggctcggacttgggccttgggttcgaagtggacctgggccccgtcttctttcagtatgtgaaagagctttctgctctttaatggactggagacgagagccacattaatttagttacgcttcgacaacgatctcgagtcggagatctgcgcgtcattaaagacaatttcgtgattcgccacgatttgtgcagcaaattacttgctaaattatagaaagcaaacactggctgttgctcacaaatcaatagaaatcaacgcctgtcagggctgagacgccgattctcagggccattgttgacttaatcaataaagcgaatttgggttgttttctatttcggagtggcagtggaaatttcaccggatcatttagccgagcaaacaagcgacaaatgaaaaatctctgactccaagtaactcattgtgttttctcccctttttttctccattctcttttcagagtcaggccttggccttaaccagagctgtcaacgcggccgccgttgtggcctcggccaatgccaaatcccccaatgcctcctcctccgcctcggccagcctggcggatctggccgtcaagaaggagcactccatctcgccgccccacagtgtggtgagcgtgggtgtgggcgtggctggcgaggatcagcatcgcagatcctcgttgcagggtgtgcaggagaagctcacccagctgcagatgcagcagcagcatcaccagcagcagcagcaacagcagcagcagcaacagcaacagcaccagcagcagcagcaacatcatcatcatcagcagcaagcacagcaggcaggcgctggagtgggtagtggcgagctggctggacgcagatcctccgagggcacaccacccaccgcccatcccccaacgaactccgagggacaggcgctctcctcctccacagcctcatctagtcagaatgccacccccaagagcgatcgggaaagggagcgtgagcgggagagggatcgggaggagcgcgtggagcggggcagcatatcctgcctcccaccagccgcccttggaatggccgtgggcgtccagcaggcccagcatcaggagaagctgctcagccatccggccttggattcgcgacgggagttcgacgtcagcaaagtgaatcgtgagtaaaggcagctttatatatcaattcattcacatagttttaaagtgaaggctggctaaagtgggatattaaatatattctaaatatatatatattcttattcttattttattgatacgggatactacagcttaataacagtagtttactaattaatagttcactattatggtaaggaagcgagattattagatagttaaagcttgttccagattgacgatatgtttttaaaattttaaattcgtagtcaacgagttgcggtgaataaataatggaatttattattattcataatccagttcgtgattatgtgcgtaattaaagggtctgtgtgtttatgtatgtgaaaggttgaatataggtgcggggagaaatcaccgtcccctttaaagatacaactttaatcaggccagctgctgctggctgatggcaaatggaaatggccagggatttgctctgccccaacgcagccggcctaatccatgaaaagttcatttgatttgctcacaaggcattaagcacgtatcccacagaaactctgtggaagcacacgcacacatatgtgcgtcgctttccttgagcaatggccatggtaatcttgtttggttcatcaatagtttagccctggccagaagtgaacctgtgccacctcgttgcggatgcatatatcgagtatctgtcggatataaatggaaactgtgaagccttttgcataccaacgatatcatttccttcgctccattcagccacgcacacggacacatttacagatagagaaacagaaacagacatagacacagagacgcagagacataagcacaacactcgtatatggatcgaaatcccctggattaagcatatgaagcattcataacgtttattttgtgtacggatgtgtatctgtgtgtctacggaatgtctgtgtgtgcgagcaaacattcgcttctggtttaggaagtgggtggtttcagtgggtgggtggttggctgggtggctgtttggctgggtggctcggtgggtgctaagagagcacccacttgtggagtgaatgaatcgccgaggagactgcaggaggccaggaagcgtgccttgcttttgtttgttatggcttcagtcgctcgtctctcgggcactcgctgcgtatacgcaatctggcagaaagtgggagcacgtgtgcgatggatcaacaggtggcaggtggctatgtgaggaccaaattgtggcttcgtccttgcaaatagttgggcaaacaattgactttagcgataaatatgactgttaatattttaggataccggatactttaagccttcgggaagaaacgatgttcgcaaaaacttaaaccaactgccaactgcaacaggaagaggatttgatttgaattttgttgctgtgaatttgtgaatcctgctgttgtgtaagtctgtgtgtgcctgtgtgtggatgcgtatctgtgtaatgtgctttgtagcatattttgaggatttgcacaacaaaacgaggtgaagatggggacgggatcccatggatgccgaatcctacgaccatcctactctttttgtttgcttattgttgccgtcatttggcattgccattgccgtttttgttattattgtcatttaacattgccatttccaacatttcgaacagctgcagtgtgggttcatatgtaaatctgttttgtttcgatgcgttttgttgtgcacattttcgaatgcgagtgtgtgtgtgtgtgtgtgcgtgtttattgcgcctaagctgctcagcgacgcaacacgatatttatcctgccgcacctcccaccgcccacacggcagctgggcttttccatttcggggctatttttatgctcctgttttcgggattctcggctgtctctgctgcgtttcgatttatgcagagtttagtatgcaacattttcatacgttagccttaataaatccccacccggctgcacttgtcaatatgcacgacgtgccaccatccaccgcccaccgcccaccagttccccaacccccttggtcctgcagttgccacactgttggcacctataagcctatgcaaacacatacacccatgcaggcggcgcgttctgcaattgaaaatcactgcgccttagttaacgacacgtttgtggatcaacgcattcgggaaaacgaaccccacccacttgaccctgctattgaatcattgttgcatttggccaccaaaagtggagcaccagcggcagcaggagctgcatcccgcatccgcatatgcatgtgtcataagccaggcggcaccatgcatacaggactatgagcgtcctgtggacataagcacgcgctcaaggattcaaaaaatgggcacccattcgatcggctattatgcagatgtcatgaggcgggattgtataatgagatggtggactctagcctgtgggctggacggaagagcacccgataagccctgatggacacacaagtgtcggcaaagccggtcagtaactttgcagagcatattgctcgagcttcggcttcagttccagctccatttccatctccagctccacttacttggtttccgagtgctactggtaatcaggcgacacaaaagcattgcatagctcctgctgcaggataagagatactgtactcaactcaaagcggtagtaggagcagccggtttcgcaatcacacgcaaaactagctacgactcctcattcacccgaatcgtctgactctcacctgtgagaggagtggctaagccctgggccgatggatccgctggggcgactgggggcggtgggcggtggttgagcggtaggagcttaagtgttaagcgttatgcacagtggccagtgcgaagctgaatgataccactcacctaagccggttcccgaaaacccactgcccactctcactaccaatctcaaatcccccaatcacctatctaaagcccaagccccattcgagcatatgtgctagcgcatagagcatagatgcagatgcggatacagatacagccttagattgagatacaaattcgaataaatgccaaacgcaacaggaggcaacgtttccaaattataagcaaaaagggattggcccgtgcggcagcagcagcaacaacaacaacaacaactactgcagaataaaagccggttgttgccaaccagccacacataaacacacacatacactcacacacattggaatacatttagccaggacatcgccaggagctaaaggcaggtgctgcaggtgatgctgattgagttaagccaccatcatcgagtgcactgcaaaatgcagagagtttatctaagagatacatttaacatggagatagatacaccaaaacgaaatggaatcgattacagttctagaagacaataattaagcaacaataaattttaataaaataataataaattaaattctaaggcacagagagatattttttttttcgtataatgcgctcgaagattttctgctgctccagcttcagttagtccctttatccctcacacaaagagaactacaaattttaaggatttaaatgttggtagaggtgaacgaatcgagctctcgaagctgccaccacaacgggcccggatgagcccgagcgcccaccatccacttcccaccggcaacgtgcaacttgcaacttgcaaccggcaacgtgcaacgtcagtggagcagcttgaagctcgattcgagccgcttaaggctccctgtgtgttttcggtttataatcgaatatatactccctgtgtgccgtgtgattatcaaaacagaagtacgtattatacagcagccacagcagcagtggcagtggcagcaggaactgcaagtataaatcaccagcattaactttgagcgcttttgtgcgagtaaatatatgtggtagtgcgtgtatctattaatacacaagtgggattatgctgggagcgcatttgtaattagtcaaggaccaggtctggccaaggggttcgattatgaatattataagattcggtaattttccattttggcaagaacagctgcaatcgggatttgccataagcccttcgctcgaaggacatacactttcttgagtttctgttgccgtgcaggcatcccattagactccaaacaaatgccggagtgccaattaatgccgctgctaaaccgtttatttcctgtcacttcatattgaatttcacccattctgtggcacacattcaatattccactttaactctattttcacatacacacacacacaaatggtattaggggaattaggaaaatcagcaggcgagcgagagcaactaatgcgaatgcaactgggcgtctcataatccaaaagcgaaaacaaaatcatcatcatcatggtgaaaaggagcgggagcacgggagcaggaacaggagcaaaagcaagagccaccacccaaggacattaggcgaaagcatcaagtttgcgacttatcctgcgacctaagcctcctgaacccggtgaacgaacatccagccgaaaaaggggtagagaacgtacagccatccctctctctctatccgcatcttgccgtctctttcggctgcctgctttgcatgcgaacttggcgccaaaaactttcgagtttcagcccgagttgcttgagccgagggcacgacattatttgggaatcccttatccctttatctggctttagccctaatcccatcagacacaaatgaagagaagtttcacgtttcgagtttccagctccttaagcttttgtttttgttcctgtttctgttctcagctcccagttccctgtccttggcattgcctttgcttttgcttttgaagtgctttggcaatggcaacgacgtcgggattaggccgccagctaatgcgtccttgtgcccgtgtctgtgtctgtgtctgtgtgcgtgtcctttcgtctgcaacggtatgcgtgaggcactcagtgagtgtgtatgtttatgagccaggtgggttagacggcggcccagacagttgccagttttgggagcgagtcgaggtcgagcctttggggatgctaatcccaatacgactggcaatcctgccaaactgccggcagacaactcacaacctcgcttgccgcactttccaactccaggcgatgtactgcgagaaacggcaatgcgcggatttgcattagatgtgagtaatccagagtcactgaaactaaagttgcatctaaatgcaagaagagtgaatagttagagaaatacttttaataatcaatatagaaatgctgagataattcagatgtcaaataatactctttcctctatgtgatcagttttgaacagtttattgaacccctattgggttgacaatttctctcggtgtgctggctggcagggcttattgatcgcgcagaggattatccagggcgctggcatattggcagcctggcagtcgggcaggcgattgtccattttcaatttgtgctccaccagcgattcggaatggggtatgggccacgtcgaaatggaagggccttgggtttgggcatggatgccggtgtgggtgtgggggtcgggatgggcctgtaatccgttcgaatgcccgaccagtgctgcctacaagtttggatacatctatattcatgcatatacatatgtatatgcactgaacacattgttgttgttgctgttgtttaaagccagtggctgtctggtgctttgttgttttttgtcatacgcaacgtaatcccaattcgtttaagtcactgacaatccatggatgcccaggcgatgccgcaacgcatccacacggatagcagcgcacattcacacaaacacacacactctctcgcactgtccaatgccaaatcgtatccactcctccccccaccccctggcgaccattcaaccgcccgttttcgttgggtcgagcatattttcgcaataaagtagatcccgcattaatcccaacgattttgtgctctgggcattgcgtgtgctttatttgtccgtgtattggtgccagcaacgtcccagtgtaagtgtatctgtgtgtgcgcctgtttatatctgcatctgtgtgtgtgcgtgagtgtgtctgtgttaatccttaaaccggcagagctaaagctgcccgcgttgacgtcgctgccaactgcaaccgaaaaaggcccaaaagcatgccatgagttggagttttcgaagggcgtgcggtggttttttggggcgggggggtggcagtggagcgggcgccggaggtcgggggccccacgcagtgacagcccaccccctttcgtcgcccgccctccgagactcggtttgcggatgagtcgatggcgacggctgctgctgctgttgggagattaagttttttccatgcaaacagtgacggtgtggcgggggtttaggggggatcgaagcggccagggcgtccggggggaggagggtatcggctgtgggggctgggattttgcgtttgcgtttgcttttggtggccgtgtgggcgagggatttaatttcgtgcgggattattatttcggatttaactcttcgttttatggatcgcttggcattataatgaacagcggcgtcgccggctggccatgggcgcataatggggatcggatcagctgagatatttacacattcgaaaaaatatcaataatttattcgactattttctagaaacattaaaaaagttaaaaaatgtaatcccatatatgtttgtcgttgtatcagataatttaatttcattgatatattcgctaggagtagtataccaaatagtgatctcatctaaatacattttggatacattgtagctctaggtttttgtaatgcggttcatgttctccactattataatccaccccccatccaccatgcaccgtacttatcccaaatgctgagcacctttattcgaggttagcacgccactgctctataacccgctttggcattataaactccggtgtatttttataaccaaaccttagcatcgcctgcgacagcttcagctagagcgttcggcgacgggaaactgtgaacccgaatccattatagcttaagctgctgccaacaccaacacccagatacagacgcatacacacgtacaactggggcattatcccaaaacgaaatgacatcccttggaaattaatccttaattccattcatttcgtataatcccagagatatactttgataagcgtaatgcggggccagggcttaacggtagagcaagcgagatggggcgaggcagagagagcgagaggcagcaggaatgagagaggggctgggggtgtgcgtctgtgtttgtgagtggcgatagtgagagcagcagagagagagagagccaagagccacatgttgctatccatttgtgtgcgtttgcatctgtatcagtgtctttgccaccgtatctgcggctatgtgtgtttgcctgtttgtgtgtgtgtgtgtgtgggccagaactctcgactctcgcagctgagttttcggtttccgcttcagtatcgtgccaaacatgctggaagaaggttggtgtaactgcttttcgctgtgcccagtgttttctgtgtgttttcgttccgttcgcgccggttattgctgtttgcagtttgttgtttatgtttaatggcttggccagcaattggattatgtttgagactgtggattatgaacctgactctctctgtgtgtgtgtatgtgtttgtctcagcctaaaataaatctagatctgtgaattgtgtcctgcgacctgtgagtgagtgacctgtggtgggaagtgggagctcaggaactgaggaacttacaccggggacaaggacacttgcaaacacaatagatcccgccattgagttgagttcctcttttaacaccctgacagctgggtgctcgtgtgttttgagtctgcagaccagatttgccacaccactgtcaagtcgcatttgtcaacaaaggctacagccgcacacacacaccagtacacaagtacaccagtacaccagtacaccagcgcactggcaaacaacacacagcaaacaaacacacaaagcgctcaaatgaacttaaaaagcagagcgaaagcttttaaatctgttgctttcgtgcaggctaatccctatgaagttcactagattttgctttgttgctgttgttgttccagttcaacagtggcagacaccagctcaccaatacacataagcactcccacacagatacacactcacacacaaacacaaatgcgaagtaaagctggcaagggagagctgccaacaagagcaacaacaatgcacggcgcgctttggcacttaaaccgaactgagccgtcgggcagagctcatcctcatccctacctacccaccgtcatccttccagtgcccatgggagcaagttggagctgggcaagcccccacatcccatccgcccactgacctaagccacgctcacccgaaaccacccacagccaaccgcccactgcccaacacccgcaaaaataaaagccagagcaaaaacaaacaaccagcgaggctgtgaaaataaaataaagccctagagaaggataactacgaaggggacttgagctagggtcctagacgggatcatccatgtatgtcggtagtgctagtcttcagaaggcagtgttccctgagaaccaatcaaagttctactcttattattacattattgcgattgatcccaacgacttgagagttcttattggcaaccacataatatcaaaccctttttctaagcatatgatgtatgtagaagatttagaatacctatagatgtatagtaaaatgttagatcattgtaaaccaaagattaatcgtttttccatattaatcgacgttgctaagcaaaatcggcttagaatcactatggcgctccacgcttttcaaagtgcgtattaaagtatagttccgctttgatttcgatctgcaagtcctttccgctttgattctggtcttagaaatatccgagcatatgacgaaggcaagttcaaccccagccaaagcttttacattgcaaatctgagattaggcactcgggatctactcattacaatagtactcgggaggcatttaattacccagcccctggctggactactccgtcatatcagattatataaccaggagtgactgttcgtgcgtgctcgctggtgatttggtagcgtggtttcgctcattatgcccaaaaaagcgaattccgcctcggattaaaaacacactcaccgacttcatccctgtattcccgcacaacaccctgggtagttctacccaaaccgcttagagattatagcgaacttttgactaatttgattatctgatttggtattcatagtcataggacccctaaccctttaaattggctaactgctgcaatttttttttgctgccgtcactggctccacaggcggttgggtgtcatgtgagtgtgtgtgtgtgtctggaatccccaaagatttagctgtaaaagccccacggcattgctcccacattcgagtgctcatgcatatggtatatgcagtgtatggagtgtacggagtgtacggagtgtatggtgtggagctggaaaaaaatcaactcgaatgccgctggcattgggtgaaatcgcaaaaaattagcagttaatccccttaaattgaattccgcagatggtgttgccattgtcgttgtgcttctgttgctgtttggttagttcacatggctgataaaggccaaaaggaacaggaacagaaatagcaactgaaactgaatcacaaaagttaactgggcatttggacatcgcagagattgttaggcgaaaagccaacatcacaaacaagcggcaaacaaacaagtgtgtgtttcgtggctcgtgtttgcggcaattagccggagttggcacataatacgagcggctaaatgtttaagattttaagttgcaagaggccggggcagagagctgcagctcttcggtccgttctcggacctaagccgtcagtatgtgttactatgtttgcggtttggcttttgtggccgaggcttagggaatctgccctgcccctccacctaatccgcaactagtgaagaaatctgttgagaaatttaacctaatcccggccagagttcagggatccctgccgcggatccgacaaaaggctggaaaataataaggggacgcgaaggagctgcgacttataatggcactgcgtaaatccccttcaaattaagctccttgccagcctcgcgtatcgacgtctcgcacccttcatcccaactcccaatgccctcccatcgcaatcccacacccattccattccatcccattccgattccgattccgaggcgaggttacgcttaatgcaaatacaatgctacgcgctcaccgcagccggatcaaatttcatcctcctctgagggcgacccctcagctgcttccctcgaatccccgcgtcccttggccagacaaagcccaaatgccaaaataccaatgcgatatggcgacatcgtcgacatcctttctgcttcctcttggagtaggacatcgtcgacgtctgtgggccactaataaacccgagccgttgctgccccccatccgccgcctctgtaaagccgctcatctggcggctccttcgggccgccccctccgccaccagtttgcagttcattggcagcggattaagccggcgcgcattcgcagaggcagcaaatacaaaagacgcttttgccattggatcgatttaaaatacttcagcggcaaggaaaataagcgggacagagaagaaaaatcagttgtgggtattaataagcgctgaacgggacgagacggtggcaggggcggaggcggaggcggaagggtaatatgcataagcaccattaacttgtacttaaaactgtggcaggtggttgagccggggagcggaccatgcgaaacaagggggtcggtatcgccgccatgcccccgctgaatgtaacttaattcgccgtgtggctgccagcgtcttcaagcggattatattaatcaatacagtgatatatatggcctttgttcagccttgctccttacggctcctgacttcctcctccgccgtctcctcctcatttgcctgattcgcctgcgagaaggtttaaatcagaccgacagtcactaggcgtatacttattttactccgccttaagagctactttctccggaaagtggaggtcttactgaattcatttaaattaatgttgaagctgtgcaatcttttaacaggtgtatgaatttggtaaataaaatgggaaggaattaactttttaagtttttagtccaatatcataaaaatgagctccatatcatatatttaattttagtatcaattaaaatacccagcaaaaaaatacaatgagtatctgatagtcgacatagagggattgggccttggtttctcggctcggagacgcttcgagttcttttgcccgctttaattgaatcaatggcacagatcgcatgttgtgctcctttgcctccgccgaccagagactttgtttggctttaagcaggaagatttaaacgtaatgctagccgattcccttagcatatttatgcatttatgtgtgtacgtatatatatatagcatatacatatatgagcatgcctataattcagtcacacagtcaaagcgtcttaagcgctaagtagaagcaacgtaaataagtaatattgataactaaagtgattaaggttgcctttgggtctgctgcagttgcactgcccctcagcctgcccctgtgtgtttggctgtatggctttgtctttggaactgtctgctggaactcacgtatggatcccacagccgagtgggtggcccgcttggtcaattcggaatggttaaaacaaacacagtctgagcaggtttatggggaagcatgagcgatttcttggttgccattttggcttggcccttttttttccccagctgcgccagtgattatgtatggttcaactggtttctggttgatttttggacatgcaaccccgagaaggaaacgaaaaccccttctgagttctatctcggctgcgcttgtttgcagacattatcgacatttaaatcccttatttgtggctgctgcctgggcgtccttttctcgggcacttgatagaatttgacaaattgaaaatccttttgtggcgagcggttgtccttgtgtgcacgcatggccttatcctgcacttcataattttaatccggttccacaaaaatgtctgcttatttgcatcgccaagctgccgagatgctgagatcctggcgagtccttcagcactaggcattctttgcgctttaattattcacttcttggacttgttttaatcccactgccatcaatttggcattgctctcttcgattgcataacttcgcattggtttgcccgagagtcgagagtcatttggccgaaaaatacacattataatccttttgtaaggatttgtccctggcacatggcttcgccaactcaacccaaacccaaagcagcccaaccccctgtgcattcaattatcgtttggcctcgcagttggccattgtctcagggtccctgtccgcaaattcgcaaaactaatgaagtgctgcagctccttgagcaggctgctaatgccactagagtcctttttccttactcccctccagagctcctggtcgcctggactcttgaactcttcagccacttggccgcatgtataagcatgttttctggtttgcttcacagacaaagcttagaaccacttaagaaaatccattcacaacctgaaactaactagagtcctggccatcctgccgtcgggggtatgtttgtgagtgtcctgcaaagattttcgaacgctacgtctgaggtttggcccctgtcgtttttgtcggcaaaagaaagctcacctgatgatggtcccaaatcaacatatgaagcaaacaacaaaaaggattaagtccaagacacacacaaacacacatgctccttttgcatagttttacatgtctaaggacaaaaaatgaatttattgcgcaacaaaaacacaacttgagacaattccaaagcctaacccgagaggccgaggccaatttagcagctgagatgggccaaaaaagtgggggtttgggtaaaggattcaaataaattaccgctacaggccatacttatttcattaggattatttttgactaacatttacggccctcccaccggcagggtcctttgcaaaatacttggaggagtgcgctgggtggcaggagagtcctggagtcaaaggattcctgatttccggttgtatccgactgggcggatttcgattggttcgccgatgagggcgctaaacgcgaacagtcagcgataaaaagaaagaaaatgcctcacggcattaattataatccgcttaaaagtttcaacatgttttcccagccccccaaaagccctattcaaaaaaaagaaaaaaaaaaaaaagaacacgaatacaaatacggtggcaaaaaaaagaggcgtacaaatctcaaaatacgcctctgactcagagcaaaaggccaagaagcagcggaagagggccaactcaaatgtaaagtgcagatttttcgcatatgcacaagtggaactcgaagtgctaaagagcattgactctgattcgaaaaattagtattctcgggggtgaaagatcagttcaagcgacggctcgaaactcctcgactcacacaaggattcgtaatccttgcgagggacccaacggctatgggagttcaaggatatcatgggttgagattgttccttgcaactgtatctttatccctctttacttcatccatatatatcgttacaaataaatatgttttcacttcatacattaacaggtcgtaaaaacgtttttttattatgttcaattctttgttagttcagtatacaacacaacctaaacaatctaaaatactaaatgatctaaactaattggcaatcctacttcgataccccgggaatctggcaacttaccaccgctaccccgcgtcgctcttcaatagctaatctttcatttcctaggtattcattattccacaaggcaaaggcagttgttaggcagcttacttcgcttgtgtcctgcggcaaggaccaaaaaacacccggggcaagacgcaaaccgattttcattttattgtcctgcttaatatgtttgtttttcttttgcgagtgcagcaggccagcaagagcggggaaggacagggaaatcaggaaaagcgcagggactaaagcaaggatatgtgcaggaagccagaggtgtgagatgccagccaagtgaaaggctttcctttgtgctagtttgtgtgtgggtgtgtgctggggaaagttcttaagtcgctccgaatgctgctgaagctgtcggaggcattataaattaaaatgcacgcattaaaaattctactaaaaaacagtttgcaattaagtaggacttaagttgaagtgtaaataaaaatgcacacacacatatatatgtatgtacaggatcccttgggatgttgaaaatttgttttctggcgtgaagtgaaggaaaaacttgtggcaatttccttaagactattgcttaatttccggtcactcttccttgcacatatcggcccacgcacacccacaaaaacgaccatgtacacacgcacacatacacacaaacacacactattgccttgggaagcctacttaagtcccttgaaatccttgagattttttgcactggtcaagcaatgataagcaaatttccccacagttcacttggcttaagacgaaccctttccctccatccagctttccatccattcacgtgtccgttctggttattaaaacttttggtctgttgaaattttaattttcctaaatacccaaatcactcaaaatcattttaataagtaaattatgagcagtcggcctataaataaacaaacacacaatttattccatcgaaaaagtcgagaaaagactacaaatatttgccggcccaaggatacttgagtaatcctttgcagtcacctaaatagctctgcccgcctataaagtttctgcctgtgcgtgtgtgcgtgtgtgtgtgcatgtaaggattaaatcgttttgatgtccttgccagggcaatttataattatttgtttgcgtcggcctgtggtcagccaattggtcaatttcttagaagaaagtcgagtggataaaacttttcctcctccatttcccctcagcgtggtaatttggatactttatgcacatgagatgtttctggaaacttttcaaaagattataagtccttattggggggtcacagagttccagaggggaaaactgctcctggcggttacctgccatccttcgtgagctgggaattttccaatttcggttgattgcgatgactgaacttgattatttctgctgccatcgatgcaggttaataaatcttaagccgcgtggcggttcgcgggtattcgatgccaacgaggggatggataccgtcttagcccctggaaaagtagagttcatttacaaatcgtttgtcggcttacttacgggggagccaagtagtagatgttgccggagtcgtctgcctgccgcgccaagatttaatgccctcaaacagttttccctgcgcgcttaattcaatttgttttggcccgcttcgactgtctcgattacttaccattttttcagattttctccttttcgttatttgcctcctgccagtggcactgataatgctaataaggataagctctgtctgccatcgttggcccgggtgacttaaagctgatgattccgacccggccagtggttgttgaaatgccagttcagatgcaacaattagtgggtgctcggtggtttgggcatctacccgctaagaccaccacacactaaacgcaactgccacccactgagcgccacacaagcacacacacacacacacacatatgcaggtggacgaaatccgcttttgttttagccccatcaaatcatggctccatggataatggatatattgagtttataattcggctgcacaggccgcacaacgagttttcatccatggaaccagaccaccacactaatgaccagttttgggccatcatgaccatcatggccatcatggggcgagaacatagtgttctagggcccaaaacaatgcgtttagagcagctggctaatttaatgctggccaaattttttcattacgcgcatatatttcgggtgaacatttcgaatttattgaatttaatgggattattattacacctttcccatcacttaaagttctaggtgacaaacaatgcattatagttgaattctttattccttttcaactcggcacagccgacgcagcggctgatgtatttatttttaatgccgatggcccccaatgaggttttcatggcaattaaaagatttgcgtggcacacacacacaaacacgcgccgcccacagaaatatggcatggaaatcgcacgtaattgggctgaactttcggttggtccgattttatgcgattttcctcgattttccgcaccctccaacccctcaaccactcaacccatcaacctgccatccaaaccgatgttctttaaaacgcttccagctgcccggacccggcaaatgccaatcgttcgccaatctctggctgcttacaatttttataattggaataattaataataccattatgccggccggacctggggcgttaagcctatttgcagtgtgcccatcagcccttcaactgctcctggccacgcccacttgcagtggcagggaataatgtctataacttctatgccctgaattttgccattttatttttaagccttcaataattggtcgggaggtgcggcgagttagttttgggcgagcgatatcgaaagaaagagcataattcataatttcaaaaatgttttttttttccaaatttcaagtttattccgccagtttaggccgccagcccctccacgtaatgggcggcaatttaatcggctaaaaccatttgcggctaaccgcaacatgcaataatttattttaataccattgtgcgtgcggaggtgtggagccaatctgcataaaatgccccatttcgaatatgttttaattgcttattttaatttgtcgatgatttgcacttggaactagactgaactaaaccgattattaaacaccactcgagtgtggcagtcagctattattaataatattattagtatatttctaaccgctccccccttgattctcctttcagccaaatcacttccacttcactgtgtggtggagtcggtgcactcactgcacgcctccctgaccatcgacactcgccagccctggaagaggcggcccaatatcgagaccgacagctacgtgatcatcgccgcggccacgccctggagcgagattgttcagacggcgctccagaggctcggctactcccaggaggtggccaacacagccagaggtgagtgcttcatcctagcttagattgtgccatcaagtgcaatttggccagatattcagtgttagcaacacattatttcatattttcattcatctttaccctattttctgcaggctcattaataatcaaacattggaaacccatacccctggagcagatatcggacaatccagcggtgcccgtcagcgatattgtgggtgaattgacttccgtgatcacgctgaggatcgtgattctgcgccccaagacttcgccgttcggggagatcaaggacaagctgctcaagctgctggtgcttcagtcgcatgcggtgctccgttccacaggatgtccgctggatgaggtgagtttccccgagccccgagccgcctgctgccaattagacattcactttgaactttcacttaaaattctgcactaagacgacgaaattctataatgattcataagcggtttacgccgaactcccccaagcgctcttatccgtcttggagttgctaaaacttgccgaaaaatgtctccggatgagaagtggcgacgctaatttgcgtgatgtgaggcatgaacacacacacacacactcaagtacacacaactcacacagaaagagatacttataacttttgcatgtcctgtctgcttgcggaatatttaactcattgaaaatgttttgatagctactacaaagaaattttgttaagccgagttcatttatttggttcacttaactaatccttttttgcaatagttttcattttaatcagctttacgctgcctgctctcctgtctccaggacgtcgatgtatgcgttcgagtgtgtgttcggcttttgttttccttattgaaatcggtttaggaggcttagttgggaatcctgcagcgggcggggcacccagtgcatggctcacatgacccaattctgtgggcggggggcgatatcggtgcattaaggccataaatcattgggccgtacactatcgccggcgatgaacagcacgaaatcacggccagaaatacccttcaattgatattgcgactttattggcctggccaccctccagtgctgctccattccctccccccctcgattaatattagcaaagcaaagcaaagcaaagcaaagcaaggcaaggcacctaatcacatgataagcatttaccataatttccacattcgctgtctgacacctccagcccatcgcggtggctctccagtgtccgccgaggagctttgctttggggtgcggcgataggaaaatcaatttaataataccccggccacgtaagaagcgtcaacccattttatttacaataaggtgtctaccccgccagcccgcccacctatctacccacctggctgcctaacccacctaaaccacccaccctccagttcgcttgtgttctgagcagcttaagtgatttggggcgcctccttagctgatagcaccaccacgacgctagaaaaaccactgacagtaccacagaccgaactagaatcaaaatcagaagcagaaccagaaccagaaccatagccaaaccaaaccaccgaaagagccagacattatctttgccagcagttgggagacaaagcagtatctttgagcatttaatacgccatagcaatctaccctttggccaactcatcgcatttcgattctatttctgttgggtaaattcaattttaatcgccataagctgatgtgtcgctgcctatcaggaatcagggactatctatttatcgccttcgattcgattcgagcgggcgggccactgcggctctgttgtcagttaatatcagcccggcgataccaccatcgctcaggtatcagtcgccgccgttctctgcgtatatcgtaataggcaattttcgactgccactcgcactcgcacatttattttatggctaagtaaatcccgccacttgagtacgccggacaacaaatacatcaccagctacaggctacaactgcaagtgaaaccccggcgactgtgatttttatgacagccgcttagtgaccggcggactttggggtcttagtgcagctactgttgacagtcgctcagggcgaacgcaaacccctgtccaaggttgtccccacccccactaatcccatgcagttccccctgatttccacgcggaacacaccacttttgaagtgatgatcaaatcgctgatttttcacatcatatgactgcagagcgtggcagcacttaaaataggtgttcttaattaaacaatcagcgaattggggtacccgaaatgtttccattaattaatttcgtgcctgtgaatcacgctcttgccaaatagaatctatgattatgcagcaattcgcactcaatagcgtaatctttctacaaagttatttacttttgatagaataatgttaatgagcctataaatttgtagctgataagaatatcccttgcgtatgggtttctaaatgtaaaatttctattcttcctttccaggtgacgctatcccagatctgccggagttcccaccagaacacctacgccctgccaggaggagagatctccgacgaactgcgccgcaagttcgaccagtggtggtccaatcagctctctccccaagcgaccgccatgacgcccaagatgctgccgttcatgacgggtccttcagcggttccggttccagtggcagtgcccggcgagatggactttccggtaggcacggccatggcggcggcggccgctgcggcggctcatgctgccgctgccggtggagcagcgggcggcaatcccctgggatcgatgggtagtcgcgagagtctgttgctggctaacgaggctgctcaccatgcgggcgctggacaggctccgggaccaggacatcacggcagcatgctggtgcatccgatgcacgcgtccatgcaccaccatcaccatcatggcggcggcggtggacacggtcctccgtatcccaatcagaagactcgcatgcgcaccagcttcgatccggagatggagctgcccaagctgcagaagtggttcgccgacaatccgcatccttcgcgacagcagatccagacgtatgtggtgcagctgaatgccctggagtctcgccggggaaggaagcccctggatgtgaacaacgtggtctactggttcaagaacgctcgggcggctcaaaaacgggcagagatgcggggtggtagtctgggcagtgcgatcagtgccctgggtcacgccgccatgaacggctatctgagtcagcacgcccctttgggccagaattccagcagcagtgctggtagccagcccatgagcatgggcaacctgtccatgtcgcacgactacctaaagagtccgctcagcctgaagtcggaggacattgacaccatgtcgcagcactcggacgacatggacgaggagcagagcagaccgaacacgccacaactgcccctttcgctgaccacccacgagcggcatcgcagctcaccgctgatggacgaggacgaggatgaggcgggagagcagcagcagccacaggaggccaaaagcgatggaatgaacggtagtgtgaaggatgaggagcggcaggagaagtcgcgcgatgaactgcaggacaacgaaaaggagaactccaacggggaagaccgtcatctggatgcagacgcccagatggaggccagttccaacctcaacaataaccacaacaacagcagcttgcacattgagcaggaggtgggctccacacccaagcgctccacgcccaaggaggaggacgacgacttggatatggacgaggatgaggaggacaacgaaaacgatgccagccatttggacgagtttcgctcgccctcgccggatctagcaggtggagttgtgccccacaaggaccagctgccctttcctatggttcccaactccatgttctcgcagtccttcatgtacatgagccactacatcccggcattcggtcaagcggccgccggacatccgcatcaccatgctgccgctgcagcggcagctgccggaatccaacccaacgccctcatgggcggcggcggcctcaacctgtcgagcatatcgaacgaggagcgccggaagcgaaaccgcaccttcatcgacccggtgaccgaggtgcccaagctggagcagtggttcgccatgaacacacatccctcgcacaacctcatcctcaagtacaccgaggacttgaacaccatgccatataggtaagcatataatccttttttttaaaccctatataaaaaaacctttgtaccatctgattgcctatttttcgactgtataaatactttagactaactttttcctatttctatgtaatttttcaggcaaaagttcccgcgcttggagagcaaaaacgtgcagttctggttcaagaatcgacgggccaagtgcaagcgcctcaagatgtcgctgtacgacagcaatcagtgcgcccagctgggaggactcggctcttttgtgcccaagtacgaggagcgggactaggccggcggagaaggagcaggaggaaatcccgcccggagtttgaaatcaaaattagcagcatttcttcttgtaaatagttaagcgagagacacacacacacacacacagaaacccatttaggcggcttcaaaatgccgctgcagctatgacaaatactataccatatacgatagctcataatatgtaatcccctagattagtgaactctaagtattatagaacgagaactaacccagttaagcgttacccaggatttgcccaggagcatctagcgaaattagagcaaatagataaagccactttatgagtaatacgatcttgcatgaaccagtatgactaatttgtaggtgtggggagagccccagcgattctaccctaaccagtatacaactctctatttctacttctacctagttcttagccattgatatagaaagagggcgacagctcgttaagcataagcaaaccaaagaaagccaagtttcgagaatcgtagacgtagaagcgatctgcgatctgtatataatgtatgttatcctaggtacgcattctttgagcattgtgaatttgtttcggccttagttgcatttgtatctgcagattaagttacccttaagtttgagttgtaccagtaccagtatgtttagttgccctgccttatttgagagcccctccctcgcctagcacatatccctttcgatccaagcacacggataccgcatatagaatgtataacataccattcgttgctttcgaagtcttggtatttaataccaacccccgaaatctagccaccaatcagcttcgatgcgattggaacctttcgttgctaactccacttttagcgtttcgatacaaacacgtaactaaatctacacacggaaataaaacgttttacaaattgttccattagtttcgtaagccttcgcatagataataaacttaattcaaataatattgtaatttattgcaaaacactcacacacagacacacaagtaacacagacagacacacagtgaaaacatccacacatctttatatataatataaatagaaatatattccccagcaattattaaataattaaataaatacaattttaaatgtcaaattcaagctaagagtttttaatgtcaaatggaaggggttgcgagctttggatctttggtaagttcgtgtttcattaaatgtttgcatagaaatggcttgggttttgttgactttataatttgtagacttttgtctataaaccagacgaagtataattaaaattttgctaatattattagcagtataaattgaaaggctgttctggattaggggttggggaaaacttaagtttactgccgtggtcaaaagttgtcattctcaaatttgtcgtaaggataccctttttgaggggcattcccaaatttctggccacatcattaaggagttcataaattctcagggagtgcattgttggccgaaaggatgggaactgtgagatattcctactcctcattttccttcaaaacgccgtgggctaatgtgctgctgcagtcgtaatgtgtttggcaatttctcatatgtgccagatctttgctttatttctttgggttcttttcacttttttttttctctttttggtaagcactgataagcagcgcgggaaataaatatgcatatgtacgggaaacgaagaaaaaatggcaatatgagcagcacatttagcttcgtttcgagcatgagttgtggcacggggcgtatgagttatctgccgcccacccacatcgcggccgcagatatgaaacaatttattagcgccaaagtttacttattttcatttctttatttcgctcgcctttgttacatcccgcagtcattcctagatacgatgagtatggcttgctcgtttcttttggcttgggggttgggttcgttgcggttactacatcagcacaacattatttcacatttaaaatacacacgtgtgtgggtgtgtagaggggatgtgcatcatttgttatcgcaaacttttaaattaaaattgtgggaaggagtgaagcggttcgaat

SEQ ID NO: 12185 - DNA, 4852 bp, DROSOPHILA
cagttgtgcgacaactttggccaagagaggatgtcttgacgcgcgtccgcttactaacaccctgcgataccctgcgaagagagtccagagagccagatcagtcagtcaggagcaggagcccaaggattcggcacgccatctgccggagaaaccagacaggcggacagccagacagcctgaacgcctcaacctcaacggttggctggatttgcgattgtcgcattcgccaaattcgatacgctgccaatcctggtgacgcagtgacgcgatcagctcccgatttcatggcactaatgatgtcgcgtcgcccccaacagcaacaacaacagcaagaagagcccctggagcaattggaagtgcagcatctggaactagagtcatcgaatccgttccacgaaggaaacgcgcgtttcacctgagcgtgtgtgcggttgcgcgcgtgtgtgtgcctgtgtctaatttgcgtatccgcgctactcaaataagaaataaatagaaaaatcacatcaaattaaatcaaatcaaatcgaatcaagaaatacaccttcccccgatcgaattcgaaatcgagctccccttatcgcggtgacaaattgcaatcaaacaaaaatcacagcgaaccatccaaattgcaattaatgccaaagcgcctgcatctggccataaataaaatacgtgaactgcagactcagtgattagaactttgaatcgccagcgagatggacttccagagcgccatggaaacctttgccgaagcctgggtggcagccaatgccggtcagcagagtcaggccttggccttaaccagagctgtcaacgcggccgccgttgtggcctcggccaatgccaaatcccccaatgcctcctcctccgcctcggccagcctggcggatctggccgtcaagaaggagcactccatctcgccgccccacagtgtggtgagcgtgggtgtgggcgtggctggcgaggatcagcatcgcagatcctcgttgcagggtgtgcaggagaagctcacccagctgcagatgcagcagcagcatcaccagcagcagcagcaacagcagcagcagcaacagcaacagcaccagcagcagcagcaacatcatcatcatcagcagcaagcacagcaggcaggcgctggagtgggtagtggcgagctggctggacgcagatcctccgagggcacaccacccaccgcccatcccccaacgaactccgagggacaggcgctctcctcctccacagcctcatctagtcagaatgccacccccaagagcgatcgggaaagggagcgtgagcgggagagggatcgggaggagcgcgtggagcggggcagcatatcctgcctcccaccagccgcccttggaatggccgtgggcgtccagcaggcccagcatcaggagaagctgctcagccatccggccttggattcgcgacgggagttcgacgtcagcaaagtgaatcccaaatcacttccacttcactgtgtggtggagtcggtgcactcactgcacgcctccctgaccatcgacactcgccagccctggaagaggcggcccaatatcgagaccgacagctacgtgatcatcgccgcggccacgccctggagcgagattgttcagacggcgctccagaggctcggctactcccaggaggtggccaacacagccagaggctcattaataatcaaacattggaaacccatacccctggagcagatatcggacaatccagcggtgcccgtcagcgatattgtgggtgaattgacttccgtgatcacgctgaggatcgtgattctgcgccccaagacttcgccgttcggggagatcaaggacaagctgctcaagctgctggtgcttcagtcgcatgcggtgctccgttccacaggatgtccgctggatgaggtgacgctatcccagatctgccggagttcccaccagaacacctacgccctgccaggaggagagatctccgacgaactgcgccgcaagttcgaccagtggtggtccaatcagctctctccccaagcgaccgccatgacgcccaagatgctgccgttcatgacgggtccttcagcggttccggttccagtggcagtgcccggcgagatggactttccggtaggcacggccatggcggcggcggccgctgcggcggctcatgctgccgctgccggtggagcagcgggcggcaatcccctgggatcgatgggtagtcgcgagagtctgttgctggctaacgaggctgctcaccatgcgggcgctggacaggctccgggaccaggacatcacggcagcatgctggtgcatccgatgcacgcgtccatgcaccaccatcaccatcatggcggcggcggtggacacggtcctccgtatcccaatcagaagactcgcatgcgcaccagcttcgatccggagatggagctgcccaagctgcagaagtggttcgccgacaatccgcatccttcgcgacagcagatccagacgtatgtggtgcagctgaatgccctggagtctcgccggggaaggaagcccctggatgtgaacaacgtggtctactggttcaagaacgctcgggcggctcaaaaacgggcagagatgcggggtggtagtctgggcagtgcgatcagtgccctgggtcacgccgccatgaacggctatctgagtcagcacgcccctttgggccagaattccagcagcagtgctggtagccagcccatgagcatgggcaacctgtccatgtcgcacgactacctaaagagtccgctcagcctgaagtcggaggacattgacaccatgtcgcagcactcggacgacatggacgaggagcagagcagaccgaacacgccacaactgcccctttcgctgaccacccacgagcggcatcgcagctcaccgctgatggacgaggacgaggatgaggcgggagagcagcagcagccacaggaggccaaaagcgatggaatgaacggtagtgtgaaggatgaggagcggcaggagaagtcgcgcgatgaactgcaggacaacgaaaaggagaactccaacggggaagaccgtcatctggatgcagacgcccagatggaggccagttccaacctcaacaataaccacaacaacagcagcttgcacattgagcaggaggtgggctccacacccaagcgctccacgcccaaggaggaggacgacgacttggatatggacgaggatgaggaggacaacgaaaacgatgccagccatttggacgagtttcgctcgccctcgccggatctagcaggtggagttgtgccccacaaggaccagctgccctttcctatggttcccaactccatgttctcgcagtccttcatgtacatgagccactacatcccggcattcggtcaagcggccgccggacatccgcatcaccatgctgccgctgcagcggcagctgccggaatccaacccaacgccctcatgggcggcggcggcctcaacctgtcgagcatatcgaacgaggagcgccggaagcgaaaccgcaccttcatcgacccggtgaccgaggtgcccaagctggagcagtggttcgccatgaacacacatccctcgcacaacctcatcctcaagtacaccgaggacttgaacaccatgccatataggcaaaagttcccgcgcttggagagcaaaaacgtgcagttctggttcaagaatcgacgggccaagtgcaagcgcctcaagatgtcgctgtacgacagcaatcagtgcgcccagctgggaggactcggctcttttgtgcccaagtacgaggagcgggactaggccggcggagaaggagcaggaggaaatcccgcccggagtttgaaatcaaaattagcagcatttcttcttgtaaatagttaagcgagagacacacacacacacacacagaaacccatttaggcggcttcaaaatgccgctgcagctatgacaaatactataccatatacgatagctcataatatgtaatcccctagattagtgaactctaagtattatagaacgagaactaacccagttaagcgttacccaggatttgcccaggagcatctagcgaaattagagcaaatagataaagccactttatgagtaatacgatcttgcatgaaccagtatgactaatttgtaggtgtggggagagccccagcgattctaccctaaccagtatacaactctctatttctacttctacctagttcttagccattgatatagaaagagggcgacagctcgttaagcataagcaaaccaaagaaagccaagtttcgagaatcgtagacgtagaagcgatctgcgatctgtatataatgtatgttatcctaggtacgcattctttgagcattgtgaatttgtttcggccttagttgcatttgtatctgcagattaagttacccttaagtttgagttgtaccagtaccagtatgtttagttgccctgccttatttgagagcccctccctcgcctagcacatatccctttcgatccaagcacacggataccgcatatagaatgtataacataccattcgttgctttcgaagtcttggtatttaataccaacccccgaaatctagccaccaatcagcttcgatgcgattggaacctttcgttgctaactccacttttagcgtttcgatacaaacacgtaactaaatctacacacggaaataaaacgttttacaaattgttccattagtttcgtaagccttcgcatagataataaacttaattcaaataatattgtaatttattgcaaaacactcacacacagacacacaagtaacacagacagacacacagtgaaaacatccacacatctttatatataatataaatagaaa

SEQ ID NO: 12186 - protein, 1024 aa, DROSOPHILA
MDFQSAMETFAEAWVAANAGQQSQALALTRAVNAAAVVASANAKSPNASSSASASLADLAVKKEHSISPPHSVVSVGVGVAGEDQHRRSSLQGVQEKLTQLQMQQQHHQQQQQQQQQQQQQHQQQQQHHHHQQQAQQAGAGVGSGELAGRRSSEGTPPTAHPPTNSEGQALSSSTASSSQNATPKSDRERERERERDREERVERGSISCLPPAALGMAVGVQQAQHQEKLLSHPALDSRREFDVSKVNPKSLPLHCVVESVHSLHASLTIDTRQPWKRRPNIETDSYVIIAAATPWSEIVQTALQRLGYSQEVANTARGSLIIKHWKPIPLEQISDNPAVPVSDIVGELTSVITLRIVILRPKTSPFGEIKDKLLKLLVLQSHAVLRSTGCPLDEVTLSQICRSSHQNTYALPGGEISDELRRKFDQWWSNQLSPQATAMTPKMLPFMTGPSAVPVPVAVPGEMDFPVGTAMAAAAAAAAHAAAAGGAAGGNPLGSMGSRESLLLANEAAHHAGAGQAPGPGHHGSMLVHPMHASMHHHHHHGGGGGHGPPYPNQKTRMRTSFDPEMELPKLQKWFADNPHPSRQQIQTYVVQLNALESRRGRKPLDVNNVVYWFKNARAAQKRAEMRGGSLGSAISALGHAAMNGYLSQHAPLGQNSSSSAGSQPMSMGNLSMSHDYLKSPLSLKSEDIDTMSQHSDDMDEEQSRPNTPQLPLSLTTHERHRSSPLMDEDEDEAGEQQQPQEAKSDGMNGSVKDEERQEKSRDELQDNEKENSNGEDRHLDADAQMEASSNLNNNHNNSSLHIEQEVGSTPKRSTPKEEDDDLDMDEDEEDNENDASHLDEFRSPSPDLAGGVVPHKDQLPFPMVPNSMFSQSFMYMSHYIPAFGQAAAGHPHHHAAAAAAAAGIQPNALMGGGGLNLSSISNEERRKRNRTFIDPVTEVPKLEQWFAMNTHPSHNLILKYTEDLNTMPYRQKFPRLESKNVQFWFKNRRAKCKRLKMSLYDSNQCAQLGGLGSFVPKYEERD

SEQ ID NO: 12187 - DNA, 6374 bp, DROSOPHILA
caagtcgcattagtatagcctcatccgagcccaagttccagtttcattttaaacaccttcgccatcttcaggattcgcaacatgaaatccaaatcactatgttaaagattacacaattacaacgtgtacaatttttagccatccagcagcatcttgttttcaaatttcaatcagtcacgaaaatcaaacaatagctttccggcgttatttgaacaactgcggatttgtcaacgtttcgcgtgaaaacgatcacacaatttactgctaagaacttttaactaactcttaagtcattccttctttaaatacgcataagttaagcatcctacttcgcccactttctgctcaaggcgatttaaacacacttacattgttacccatcacccacctcccagatacacaaactttatctccgcgtcattctgtaaacgtagagcactcacttttgagcaacccgaattgtttacctttatatacttttaagtgtacttttaccacataccgaaatgtttccacttattcattggcagtagtgttttcattaaatgtggcgagtaaatcttatacacaaaacaattttagacaagacttttcatttaatacacaagtaattaaccgattattattaaagcaggccccgcgttaatttaacgagatgagatgtgtctttaccagcccattgaaactgaaatacataaactacatcattttaaaattgtcttttacgggggaaaatgggaaaatgatttctattaaagagaagagcttacgcatatgagcgtatttttttttatttaaatctcgatatcaataaagcaacaaattgtatcgttatcggaaatgagcatggaagtttagtattttccacaagaatttgtagtatttgtgttctgatatgaaaactagagatatcgatgttatcgttaaaggatttccagctttagcatggacggtcacactggatctcaaaatctggcgcaaagcaacaaaaaaggaagcgtcgcagttaaactagttaaatgtgccaattccctttgaaaaaatgtctactgatatagccacccagctgaagggcagccgctccgatgtggaaaaagtccgcaaaacggtggaagccaaattccgggagttgtctggcgatggactacctctgagatacgaagtgaatgtattgcgccatatttgcctcgccttaaaggataatctgcaccagaactcggatctttactgcgacatcatgggcataatgctgccacgcgtagttccctgcgaggagaagccaagcttatgggaagcgcacttgtccagcctgcggtacatacatcatggcttgtttcatcaggtaggagtcgctataagaatcttcgaatctttctaaccaattctcccgttcacagcgatccattgaagcctgtcagaagctgtacaacctcatccgacaacaaccctgccgtctgcaagaagaatcagactacaaaatatatctggacatacatttgacccacttcaatggtttccatgtgctgctgcagaagcaaaaactccccttggaagctacaagtcaattgtgttatgctttggaatcattgggagatctattcgcagccatgacgcaaaggcaaataagtctatgcgcaacgcttctagttcaactaaacgagagtttatttggcaaaagaagtagatcattcttcaagtccctaagcttcctgccgtcggagagtcttgccaaaatgttcaacgcgctgcttatgctcctggccagcagcaccagttcgaacctggccaacttattccctgagtgcctgagtctcacgttggctctcgtacaaatcgacatgttcagtccacagtccaatcaacagatgtcattgcagctgctgcgcatgagcaaggaactatttcgccaggaatcaaacctgtgctatgctctacagctgatgtactactatatcaagttaatctttgttcgggaacccacaggcgactttaagcgcacctacattgacttgtctagcaagtttcagcacttcttcgagcacaaagtagcctcgcatgccaaagaacagtggctagcggattttctggtggccattcaattgctacaggtgctcatccatcaaagtaacagtaagttgcagagtccttttcagatattttggcagcagtttgacggagagagcagccccgatatctacacagcgcactttcagttgcttcagacgtgtgctagcttggcggttaatattacgaggagtcctttgggctgcacttgctcccacgaggcatgcaagagcgtgcgacggcactgcatattggcgtatggattgtgcgcattagatgcgtatattaattggaaaccggcggcggagcagaaaacaaatgtggtgggtatttttatctaattttgtggaattttaatgctacatttcaatactattgcagagccctcacaagcccttactgggagtagtcaaatactcaatggatgtagctaagaccatgaagtgtttgggtcccaccagtgtggagatcattaagctagtgcgccagctgacatacgtggctgatcaggtcacctgtccggagcaaatgtccgtgctgctgccacttttggagccactgcagaagctgcgacctttggttgccgaccaggatatgagcagtttactccgacgcctctttaaggccagctcccattgcggcgattccaatatagcatgtcgaattcaagccagttacttggcctcgattacgaatccggcacgattaagatcacaggtctgtttgtactatcacaatctgggaaaaaagggcaccgagatcaaaaggtgtgtctacgagtggcacgagtccacgccactacctttccctctcactccggaccagaagaaacagctgtatgataccgatttctttgccttactacactatttgaggagtccttctacggctcatatggaatcacttattcgttgccgaacgagtgactatcatctggtactcttggccagacaaatgcgaaaggatgactcgatttcgaagaaatgcatagaggttcatgataagctaaggcaacaacgttcgctcagtcgaatggataacttgtgcctgggccacgcaagtgtgggactactactggacgcactggaggctcaaaaaaccaaagtttccaccaaggagataacggaaaatatgttcgaggagctgctactcagcaagaatttatggcagatgaacatacaaagggagcagcgattggtcaactatgctagtgaagccatctcggccttcagcaacttcttcgatcgagcagatcaagagccattgagcgcaaatgaaacgtctattgattgggaggcattgattgacgatgccatcgctactgccaatgcactttcaagtatggggtatcagtcagaagaggatgatgcctggctgttgcttctgaggatgggtcgcttgctggaagatcgttttacctatctgcgtgccctaaatcattttctgtcacagaatgaggttagttctcgtttaaatctgaaactcggcgaggaagtggaagtagcagaggaattgctggatgatttgtggcctcaattgaaaaatggcaaattcttcaagcgtcagcaaactacggtaatgctctgtttttgtcacctcgccagttactatgccagaatggaatgctatagtcatgcccagttgcttctattgcatgtggaacaacttcgcgaagagtttcctgagagacaaggaaaaagtgatattgtattgcttacactgcaaacggtgcgctttcgaattgggtatcagcaaaggaagccaacgaattgcaggctgccgactcctctgcgtcaattggacattcttctggacaatgtgcgaagtttttgcaatctatccagtttagatggcggctcattgcagctgcttctttcgactcttgtcagggaaagcaccgagtgctctgcgaacagattaagcgaaagactgtccttctccaacattgcactacatttggtactccaatctggcttggctttaagagccatagaggtattccttgcatggttatggaccaatttgcaaatggaaagtttcgacaaggcgcaatcgaagttgagactcatcgagcattgtttaggtataaaacagctgaatccaacgagtaggccggaaaaggaagcgattaaggatgtagcaattagagatctggctagtaatatgcatctcctccagttggtggagccgatcagaaagcagcagctattaaatatggcctcgccgaatctgctcaaaatgcgaccacatagcccaaatccccaactggacttggatcgctacataacactcgatgtggcgccagcgaatcttcgagagaattcccagctgcaatgcttgtactttgtaacgggctgtctacatgcacgtctccgctttctgcagagaaacagcgaacaattggacgaattctatggaagagcgcatagttggatgcaggaaaaacctccgatgagtagcgctttgtatcccatgttgcatgcccagcagctgtatcatctgaactatcttcgctttgcgcgaaagcatgtagaggctatatcaacggctcaattgggccttaaaatgcgatcacgcgcggtcgacattaacttcgagtacaattttttggctcagctaaagacggctcagttagaactcaaacccgtgggtcaggataagccacaggtcaaaatccttcgacgtgctttggtattcaatcactcacccgaagataagaaacgaaccgcaataggatcggtttcagcagtcaagaatacggcgtctaaagttaaacagtcggccaaaaaggcacctcgattcagaatttacgaggagctggaactacgaccaccaagtgctaccagttgcagtagcagcggtggcagcggaacagagaatacaccgccttcggatcacgtggatctaaatgcctgccaagcgatcgagataagcgacgatgacgattcacctttggtgtccacaaagaagacacaaccaaaaagtagggagaaggcaaaacccaaggccacatccaaagcttgtaaagtcctaacattggataatagcttggaaatagtagaaacgccgacaataactacaagtacacggagcaccagagccaggctgcgccaaccagtagagacaccaaagacagcgactctttcatccaagcgaacgaggcgccaggttttggaagcacaggctcccgaaacggagtccattagcacacgcacacggcatcggcactgattagatagtagtctccttagttcgtatttattcttatcgaaaatgtcttggtatttaaatatatatatatattgtgtgtaagtgttacaaaagagcttttgacataaattcattgtttttatcttgtggcagggacagtagtgacgttctacagatgtccttgctccaaaaaccgtgctgaatccgctgtccattgctggcatggtaaaatacacctgagcccgatttgcagcctccttcaaattgacccacgtagcgatttcccgttgctatggataacatattaacttattatctataatctttatgcatttttaaagttgcgaaaaaataaataaaatgaaacaaatacatccaaaggaacatatcttatttctttatcacactcacccgtgaaaagtaaacccttttcgtgcatcttgtcccgaagccactcgcccacatagatgccgccatccgcctgccataggatgccctctccacttcgctggtccgctagccactgaccaaagtagacggatccgtccggatagaactgcttgccctcgccactccgcttgttctcccgccactgacccacgtagatgcgttccatgcggccatcgagctccttgcgacgcaaacttccgatgccatgccgttgacccttctgccagtgaccctcgtagacaagtccactgctcgtttgctttaccccaaacccgtgaggctgctggcccaaccatttgccctggtactgcccaccaggataacgttgagagcgaactccactactatatccgctcgtacgcgacgacatgtcttcgatgactgagcgcgggagcaagtccgtccaattgcggcggtgccatgtggtgtcgtccgactttaggcggcggtgtgcgtgcggtggtgtcacttgtctaatcgaacccccccagccagcagcagcatgtcttgccaccatttggcttcctccagcagcgacacgctaacttaaggaggccaaagacattggctcaatagaaaatcgtttgttccggttaagtgtatgtagtaaaaatcgtttaatcagtcgtatataaattacagcgctattt

SEQ ID NO: 12188 - DNA, 4261 bp, DROSOPHILA
tcgcagttaaactagttaaatgtgccaattccctttgaaaaaatgtctactgatatagccacccagctgaagggcagccgctccgatgtggaaaaagtccgcaaaacggtggaagccaaattccgggagttgtctggcgatggactacctctgagatacgaagtgaatgtattgcgccatatttgcctcgccttaaaggataatctgcaccagaactcggatctttactgcgacatcatgggcataatgctgccacgcgtagttccctgcgaggagaagccaagcttatgggaagcgcacttgtccagcctgcggtacatacatcatggcttgtttcatcagcgatccattgaagcctgtcagaagctgtacaacctcatccgacaacaaccctgccgtctgcaagaagaatcagactacaaaatatatctggacatacatttgacccacttcaatggtttccatgtgctgctgcagaagcaaaaactccccttggaagctacaagtcaattgtgttatgctttggaatcattgggagatctattcgcagccatgacgcaaaggcaaataagtctatgcgcaacgcttctagttcaactaaacgagagtttatttggcaaaagaagtagatcattcttcaagtccctaagcttcctgccgtcggagagtcttgccaaaatgttcaacgcgctgcttatgctcctggccagcagcaccagttcgaacctggccaacttattccctgagtgcctgagtctcacgttggctctcgtacaaatcgacatgttcagtccacagtccaatcaacagatgtcattgcagctgctgcgcatgagcaaggaactatttcgccaggaatcaaacctgtgctatgctctacagctgatgtactactatatcaagttaatctttgttcgggaacccacaggcgactttaagcgcacctacattgacttgtctagcaagtttcagcacttcttcgagcacaaagtagcctcgcatgccaaagaacagtggctagcggattttctggtggccattcaattgctacaggtgctcatccatcaaagtaacagtaagttgcagagtccttttcagatattttggcagcagtttgacggagagagcagccccgatatctacacagcgcactttcagttgcttcagacgtgtgctagcttggcggttaatattacgaggagtcctttgggctgcacttgctcccacgaggcatgcaagagcgtgcgacggcactgcatattggcgtatggattgtgcgcattagatgcgtatattaattggaaaccggcggcggagcagaaaacaaatgtgagccctcacaagcccttactgggagtagtcaaatactcaatggatgtagctaagaccatgaagtgtttgggtcccaccagtgtggagatcattaagctagtgcgccagctgacatacgtggctgatcaggtcacctgtccggagcaaatgtccgtgctgctgccacttttggagccactgcagaagctgcgacctttggttgccgaccaggatatgagcagtttactccgacgcctctttaaggccagctcccattgcggcgattccaatatagcatgtcgaattcaagccagttacttggcctcgattacgaatccggcacgattaagatcacaggtctgtttgtactatcacaatctgggaaaaaagggcaccgagatcaaaaggtgtgtctacgagtggcacgagtccacgccactacctttccctctcactccggaccagaagaaacagctgtatgataccgatttctttgccttactacactatttgaggagtccttctacggctcatatggaatcacttattcgttgccgaacgagtgactatcatctggtactcttggccagacaaatgcgaaaggatgactcgatttcgaagaaatgcatagaggttcatgataagctaaggcaacaacgttcgctcagtcgaatggataacttgtgcctgggccacgcaagtgtgggactactactggacgcactggaggctcaaaaaaccaaagtttccaccaaggagataacggaaaatatgttcgaggagctgctactcagcaagaatttatggcagatgaacatacaaagggagcagcgattggtcaactatgctagtgaagccatctcggccttcagcaacttcttcgatcgagcagatcaagagccattgagcgcaaatgaaacgtctattgattgggaggcattgattgacgatgccatcgctactgccaatgcactttcaagtatggggtatcagtcagaagaggatgatgcctggctgttgcttctgaggatgggtcgcttgctggaagatcgttttacctatctgcgtgccctaaatcattttctgtcacagaatgaggttagttctcgtttaaatctgaaactcggcgaggaagtggaagtagcagaggaattgctggatgatttgtggcctcaattgaaaaatggcaaattcttcaagcgtcagcaaactacggtaatgctctgtttttgtcacctcgccagttactatgccagaatggaatgctatagtcatgcccagttgcttctattgcatgtggaacaacttcgcgaagagtttcctgagagacaaggaaaaagtgatattgtattgcttacactgcaaacggtgcgctttcgaattgggtatcagcaaaggaagccaacgaattgcaggctgccgactcctctgcgtcaattggacattcttctggacaatgtgcgaagtttttgcaatctatccagtttagatggcggctcattgcagctgcttctttcgactcttgtcagggaaagcaccgagtgctctgcgaacagattaagcgaaagactgtccttctccaacattgcactacatttggtactccaatctggcttggctttaagagccatagaggtattccttgcatggttatggaccaatttgcaaatggaaagtttcgacaaggcgcaatcgaagttgagactcatcgagcattgtttaggtataaaacagctgaatccaacgagtaggccggaaaaggaagcgattaaggatgtagcaattagagatctggctagtaatatgcatctcctccagttggtggagccgatcagaaagcagcagctattaaatatggcctcgccgaatctgctcaaaatgcgaccacatagcccaaatccccaactggacttggatcgctacataacactcgatgtggcgccagcgaatcttcgagagaattcccagctgcaatgcttgtactttgtaacgggctgtctacatgcacgtctccgctttctgcagagaaacagcgaacaattggacgaattctatggaagagcgcatagttggatgcaggaaaaacctccgatgagtagcgctttgtatcccatgttgcatgcccagcagctgtatcatctgaactatcttcgctttgcgcgaaagcatgtagaggctatatcaacggctcaattgggccttaaaatgcgatcacgcgcggtcgacattaacttcgagtacaattttttggctcagctaaagacggctcagttagaactcaaacccgtgggtcaggataagccacaggtcaaaatccttcgacgtgctttggtattcaatcactcacccgaagataagaaacgaaccgcaataggatcggtttcagcagtcaagaatacggcgtctaaagttaaacagtcggccaaaaaggcacctcgattcagaatttacgaggagctggaactacgaccaccaagtgctaccagttgcagtagcagcggtggcagcggaacagagaatacaccgccttcggatcacgtggatctaaatgcctgccaagcgatcgagataagcgacgatgacgattcacctttggtgtccacaaagaagacacaaccaaaaagtagggagaaggcaaaacccaaggccacatccaaagcttgtaaagtcctaacattggataatagcttggaaatagtagaaacgccgacaataactacaagtacacggagcaccagagccaggctgcgccaaccagtagagacaccaaagacagcgactctttcatccaagcgaacgaggcgccaggttttggaagcacaggctcccgaaacggagtccattagcacacgcacacggcatcggcactgattagatagtagtctccttagttcgtatttattcttatcgaaaatgtcttggtatttaaatatatatatatattgtgtgt

SEQ ID NO: 12189 - protein, 1379 aa, DROSOPHILA
MSTDIATQLKGSRSDVEKVRKTVEAKFRELSGDGLPLRYEVNVLRHICLALKDNLHQNSDLYCDIMGIMLPRVVPCEEKPSLWEAHLSSLRYIHHGLFHQRSIEACQKLYNLIRQQPCRLQEESDYKIYLDIHLTHFNGFHVLLQKQKLPLEATSQLCYALESLGDLFAAMTQRQISLCATLLVQLNESLFGKRSRSFFKSLSFLPSESLAKMFNALLMLLASSTSSNLANLFPECLSLTLALVQIDMFSPQSNQQMSLQLLRMSKELFRQESNLCYALQLMYYYIKLIFVREPTGDFKRTYIDLSSKFQHFFEHKVASHAKEQWLADFLVAIQLLQVLIHQSNSKLQSPFQIFWQQFDGESSPDIYTAHFQLLQTCASLAVNITRSPLGCTCSHEACKSVRRHCILAYGLCALDAYINWKPAAEQKTNVSPHKPLLGVVKYSMDVAKTMKCLGPTSVEIIKLVRQLTYVADQVTCPEQMSVLLPLLEPLQKLRPLVADQDMSSLLRRLFKASSHCGDSNIACRIQASYLASITNPARLRSQVCLYYHNLGKKGTEIKRCVYEWHESTPLPFPLTPDQKKQLYDTDFFALLHYLRSPSTAHMESLIRCRTSDYHLVLLARQMRKDDSISKKCIEVHDKLRQQRSLSRMDNLCLGHASVGLLLDALEAQKTKVSTKEITENMFEELLLSKNLWQMNIQREQRLVNYASEAISAFSNFFDRADQEPLSANETSIDWEALIDDAIATANALSSMGYQSEEDDAWLLLLRMGRLLEDRFTYLRALNHFLSQNEVSSRLNLKLGEEVEVAEELLDDLWPQLKNGKFFKRQQTTVMLCFCHLASYYARMECYSHAQLLLLHVEQLREEFPERQGKSDIVLLTLQTVRFRIGYQQRKPTNCRLPTPLRQLDILLDNVRSFCNLSSLDGGSLQLLLSTLVRESTECSANRLSERLSFSNIALHLVLQSGLALRAIEVFLAWLWTNLQMESFDKAQSKLRLIEHCLGIKQLNPTSRPEKEAIKDVAIRDLASNMHLLQLVEPIRKQQLLNMASPNLLKMRPHSPNPQLDLDRYITLDVAPANLRENSQLQCLYFVTGCLHARLRFLQRNSEQLDEFYGRAHSWMQEKPPMSSALYPMLHAQQLYHLNYLRFARKHVEAISTAQLGLKMRSRAVDINFEYNFLAQLKTAQLELKPVGQDKPQVKILRRALVFNHSPEDKKRTAIGSVSAVKNTASKVKQSAKKAPRFRIYEELELRPPSATSCSSSGGSGTENTPPSDHVDLNACQAIEISDDDDSPLVSTKKTQPKSREKAKPKATSKACKVLTLDNSLEIVETPTITTSTRSTRARLRQPVETPKTATLSSKRTRRQVLEAQAPETESISTRTRHRH

SEQ ID NO: 12190 - DNA, 5190 bp, DROSOPHILA
tacccggtggagatgtcgccaagggcgaggttctctccgcctacgtgggatccgggcctccaccagacaccggactccatcgttacgttttcctgatctacgagcagcggtgcaagctcacattcgacgagaagcgactgcccaataacagcggagatggacgcggtggcttcaaaatcgccgagttcgccaagaagtacgccctcggcaatcccattgccggtaacctctaccaggctgagtacgacgactatgtgcccatcctctacaagcagctgggcgcttagtttctacgccaaaaaccatgcttatataagccagtctgaattggattcaaatctattgtaacctagaaattaaagacacctatgaacactctgtgaaaccctctgttgctggcaataaaattgttaaagacatattaactaagccactgtatcttattacacattttcaatattttcatatcttatcttgttaatttgtctgaagtaataattcggttaccctttgctgaggcaaaacagtttctgtgctggttatgtatttattattcattccaattacaatctacttctttatcaataggattcttctagcgtcatttgtatacatacagatttcatgaacttgagtttatatctcgccaaaatacatgctttgaagatacaagacataattgctatcggaccttccaaataggaagaacgtttctgatcagtattatagttatttcccagggcgcaagagacgcccatctgggtaagttatttatttgtaaaagcattgcgacataattacaatctacttcttaaagtcaagaggatggttcttcatgtgtgcaataataaaggtctctaatacaactagatgcagactcatacaatccataaaataatgctgaagaagaacccacgctctatttcctcctttgatgggtccagtgcatattcggctgttgagaaggaggggaggtgtctagtttccaaattactttactctatagagggaaagacagtgcgatggtctttccattcggtttcgctgattgcctataaaaagcaaggtcggagttagttagtatgaaataggctgcatgactatgttaccaacttaccactagctcgtcgaaagcctgtttggccagccagtggaagcatggactcttccattcgcgcgcaatcgcctgctgatccttgacgtcgtcctcggcggtggacttggaattggtaatggccttgtacttggcccacaggaagaccatgctgcgcaacttgtaaacccacaggtcattgggtatgccgcgaataatgtcctgtatttccaccatgttcaactccgtaaggttatccaggaaggtgcggttcatcaacgtaaagatcgtcttcattgtgtcgtacggcacgtcggcattcttctcgagaccaaagtgtgccgactttatgatagcgtaaaccacctgctctgtggttagcttgggcagattgggtaggaagcaatgctctagattcaagttcccacactccaacagttgctggtcgatctcctcgccaacattcttgtagtccttccaccagttgccccaatcattatatttcttcgattcgttaagcggtgcccaatcggaccgtatgcgtttcctgttgcgctttgcaatcttgcgagccgacttggcgtcgtcggccaccgattcgtcttccgaatcttcgttgagcactacggccgcctctacgaagtcctcctcggtggcgtcctggtttgtactgtaattgaaggtttgttcgaagaaggtcaaggcatatgagtccgcctccggctgtgggagcttcttcggctgatcgttgagatagggaatcttgaatccgccaataaggaaaccgcgcttgcgtgccacgcgtcgccatttcttgaccgacttggaggcagcctccgtttccagcggtggaggtggggcaacacgcttctgacctgcaatgcataacatattaggaacttgtgtatggtaaaactattcctagttgctttgcaaaactctactaaatgaattggaatagttagaagaaagttttgtaatgcaaccttacgaaatagaactgaatcttactaatttggacggggaatccaggagcgtttggcggcctactgggcactcctgctggtttgcctccttgtggtccacctttcactgcctgctggccagttctaggtgccagtggtcccgacttctgcagctgtggtccagttttcaagccctgttgtccagttctcaagccctgtggtccagatctcaatccctgtggtccagctcttaatccctgtggtccagttcttaatccctgtggtcctgtcctgtttgcctgcggtccggtcttcacggctggtgcggccaccggtggcttcttgttggtaaccgagaccgttttcgaattgggtgttacgttattgactttatactgatttggtgctgcaacgggcagctttttctgtactccagtcgcattgcccggacgcaggttggcggtcttgttgttgcgcagagtgggcgcacctgcgcttttgacgatttcagccttctgaggattgttgcgcaagttctggaccgccttagcggctggctgtggagctggctttcgaacagatccgctgttgttcagattcatcttctgcagctgattgcgcttcgagttgaaggcgcgctgaccagcttcccatccagagccaccggaacctactcctcctccgccgccggcaccgcctcctccaccaccgccgcttcttcctccacctccgccaccaccaccactgttcgattgatagccagagttctggaacgatgatgattgtgatttgttccagttgttgcgagagtcttggaaggtgcgactaatgttgttgctaaagccgcctccggaattattgttgccaaagttaccaccagagttcggtttaaaacctgggcctccggatcctccgacagccggtccgcggttgttaaagtttccaatatccctattgttgtccccaaagtttccagagttctggccaaagttgttgctaaagccgcctccggaattattgctgccaaagttgccaccagagttcgggttaaagcctgggcctccggatcctccgacagccggtccgcggttgttaaagtttcctatatccctattgttgtccccaaagtttccagagttctggccaaagttgccgtgatttccactgcgtccgtaggaatcattgaaaccggaacgctggtcatcatagttaggacctctgtttgggaaattgtcattgttgaagttgcgttgattgtttcctccaaacgaaggaccactgtttccaccaaaagggacatcgcttcctccaaaggaaggtccactattgcccccataagcgggtccattgtttccaccaaaagagggagcattgttgccgccaaatggcactccatcgttgggaacgaaattaccgaatgatccctgatttctgggttcatcgttgaaaaacctatcgccgcttccctgcggctggggacctcgatagttgacatctggattgcagtccatacggttctccacctccagcaagcgggctacgttgctctgattggatgctcccctgttcgcttggccgaaattggaggacggcccgccacgaaatttgtcctggaaattatcgccgaaacgctggttgctgctcggattgaaaccgctccgatctccgtctccggaacgtgggtagctgttgttgccgccactgttgctgttgttgctgtagttgccaccgccgcgactgaagttgccaccatctgggctggtattccggttgacgccgtagcctccgccaccgaaagtgccaccgtagcctcctctgccactggtattgccgcctccgccgaagttggcgccgctaccgcctccgccgtagtttgaggaatacatcccgccgccgccgcctcctccaccaccaccaacgccgctggagctccccattccgcgccgctggccaatgccgtaagcgtcgttcttcatttggcggtagtccattccgaatagtccttgcccggatttacctttacgtcgagcactcgccgctgcttccaattaactggcttctctgcgattttttccaacacaacaaacgcggcacaaaaaatgctttcctttccccgaatttttcactgtctggtgccagggttgcaaagcaatgaaagccggctgctcaaaatggtaataagtccgattcgaagttggtatttttattgaaaaatactgagcgtgatagaaaaataccgctattgaattagttaggaataccttgcaataaattattatttatttatattttaagcattatgtcaaatgtgatttgttataaacaacatttgacaaatgtataatttcggttttgattcggtaatattctgaaagccatcttccaaaaaatttctttagcaagatatttatagagaagaagcttactgtataatttcttttcactactatcgtagttaattaaagagctatattttatagtaatatttactaatgaattggttgtattaagtattatattatattacatacatacttacactttcactaccaaagaaaacacacaacctgaaaatattgaatcacaaattcttttgaaaaatgtagaataaaacatgagcacgaaagtcaaaccaggaaaaccaacaaaaaaaaaaaacattacaaaaatctatgaaagttaaatataagctagctgttgcctcgaaaccgctttttaatctacactagtcggcataagtattttgacaaaataagcgcagcacatttgtcagtgtgtaagtaatataaacttaaaaattaacaagcaaaattttttttattgaaacttaaaaagatataaacaacttaataaaatatgatgtttttttctttcgcagtcaatatatgatatcatttgaatatatagaaaatccaatcagcccctttttttcagtttctaataaaattcaagaataaaataaattgtaaaatttgcgcctttattaacattatcacagcgggcattattcatttatgtgcctttttagttactgaacactggaatgcgaacatgaagcatctgaaaaatgggaagaaagaacagaaattaaagatttgaatcctccaaacttggtgcactgcatcaccttgg

SEQ ID NO: 12191 - DNA, 2989 bp, DROSOPHILA
cagacagtgaaaaattcggggaaaggaaagcattttttgtgccgcgtttgttgtgttggaaaaaatcgcagagaagccagttaattggaagcagcggcgagtgctcgacgtaaaggtaaatccgggcaaggactattcggaatggactaccgccaaatgaagaacgacgcttacggcattggccagcggcgcggaatggggagctccagcggcgttggtggtggtggaggaggcggcggcggcgggatgtattcctcaaactacggcggaggcggtagcggcgccaacttcggcggaggcggcaataccagtggcagaggaggctacggtggcactttcggtggcggaggctacggcgtcaaccggaataccagcccagatggtggcaacttcagtcgcggcggtggcaactacagcaacaacagcaacagtggcggcaacaacagctacccacgttccggagacggagatcggagcggtttcaatccgagcagcaaccagcgtttcggcgataatttccaggacaaatttcgtggcgggccgtcctccaatttcggccaagcgaacaggggagcatccaatcagagcaacgtagcccgcttgctggaggtggagaaccgtatggactgcaatccagatgtcaactatcgaggtccccagccgcagggaagcggcgataggtttttcaacgatgaacccagaaatcagggatcattcggtaatttcgttcccaacgatggagtgccatttggcggcaacaatgctccctcttttggtggaaacaatggacccgcttatgggggcaatagtggaccttcctttggaggaagcgatgtcccttttggtggaaacagtggtccttcgtttggaggaaacaatcaacgcaacttcaacaatgacaatttcccaaacagaggtcctaactatgatgaccagcgttccggtttcaatgattcctacggacgcagtggaaatcacggcaactttggccagaactctggaaactttggggacaacaatagggatataggaaactttaacaaccgcggaccggctgtcggaggatccggaggcccaggctttaacccgaactctggtggcaactttggcagcaataattccggaggcggctttagcaacaactttggccagaactctggaaactttggggacaacaatagggatattggaaactttaacaaccgcggaccggctgtcggaggatccggaggcccaggttttaaaccgaactctggtggtaactttggcaacaataattccggaggcggctttagcaacaacattagtcgcaccttccaagactctcgcaacaactggaacaaatcacaatcatcatcgttccagaactctggctatcaatcgaacagtggtggtggtggcggaggtggaggaagaagcggcggtggtggaggaggcggtgccggcggcggaggaggagtaggttccggtggctctggatgggaagctggtcagcgcgccttcaactcgaagcgcaatcagctgcagaagatgaatctgaacaacagcggatctgttcgaaagccagctccacagccagccgctaaggcggtccagaacttgcgcaacaatcctcagaaggctgaaatcgtcaaaagcgcaggtgcgcccactctgcgcaacaacaagaccgccaacctgcgtccgggcaatgcgactggagtacagaaaaagctgcccgttgcagcaccaaatcagtataaagtcaataacgtaacacccaattcgaaaacggtctcggttaccaacaagaagccaccggtggccgcaccagccgtgaagaccggaccgcaggcaaacaggacaggaccacagggattaagaactggaccacagggattaagagctggaccacagggattgagatctggaccacagggcttgagaactggacaacagggcttgaaaactggaccacagctgcagaagtcgggaccactggcacctagaactggccagcaggcagtgaaaggtggaccacaaggaggcaaaccagcaggagtgcccagtaggccgccaaacgctcctggattccccgtccaaattagtcagaagcgtgttgccccacctccaccgctggaaacggaggctgcctccaagtcggtcaagaaatggcgacgcgtggcacgcaagcgcggtttccttattggcggattcaagattccctatctcaacgatcagccgaagaagctcccacagccggaggcggactcatatgccttgaccttcttcgaacaaaccttcaattacagtacaaaccaggacgccaccgaggaggacttcgtagaggcggccgtagtgctcaacgaagattcggaagacgaatcggtggccgacgacgccaagtcggctcgcaagattgcaaagcgcaacaggaaacgcatacggtccgattgggcaccgcttaacgaatcgaagaaatataatgattggggcaactggtggaaggactacaagaatgttggcgaggagatcgaccagcaactgttggagtgtgggaacttgaatctagagcattgcttcctacccaatctgcccaagctaaccacagagcaggtggtttacgctatcataaagtcggcacactttggtctcgagaagaatgccgacgtgccgtacgacacaatgaagacgatctttacgttgatgaaccgcaccttcctggataaccttacggagttgaacatggtggaaatacaggacattattcgcggcatacccaatgacctgtgggtttacaagttgcgcagcatggtcttcctgtgggccaagtacaaggccattaccaattccaagtccaccgccgaggacgacgtcaaggatcagcaggcgattgcgcgcgaatggaagagtccatgcttccactggctggccaaacaggctttcgacgagctagtggcaatcagcgaaaccgaatggaaagaccatcgcactgtctttccctctatag

SEQ ID NO: 12192 - protein, 944 aa, DROSOPHILA
MKNDAYGIGQRRGMGSSSGVGGGGGGGGGGMYSSNYGGGGSGANFGGGGNTSGRGGYGGTFGGGGYGVNRNTSPDGGNFSRGGGNYSNNSNSGGNNSYPRSGDGDRSGFNPSSNQRFGDNFQDKFRGGPSSNFGQANRGASNQSNVARLLEVENRMDCNPDVNYRGPQPQGSGDRFFNDEPRNQGSFGNFVPNDGVPFGGNNAPSFGGNNGPAYGGNSGPSFGGSDVPFGGNSGPSFGGNNQRNFNNDNFPNRGPNYDDQRSGFNDSYGRSGNHGNFGQNSGNFGDNNRDIGNFNNRGPAVGGSGGPGFNPNSGGNFGSNNSGGGFSNNFGQNSGNFGDNNRDIGNFNNRGPAVGGSGGPGFKPNSGGNFGNNNSGGGFSNNISRTFQDSRNNWNKSQSSSFQNSGYQSNSGGGGGGGGRSGGGGGGGAGGGGGVGSGGSGWEAGQRAFNSKRNQLQKMNLNNSGSVRKPAPQPAAKAVQNLRNNPQKAEIVKSAGAPTLRNNKTANLRPGNATGVQKKLPVAAPNQYKVNNVTPNSKTVSVTNKKPPVAAPAVKTGPQANRTGPQGLRTGPQGLRAGPQGLRSGPQGLRTGQQGLKTGPQLQKSGPLAPRTGQQAVKGGPQGGKPAGVPSRPPNAPGFPVQISQKRVAPPPPLETEAASKSVKKWRRVARKRGFLIGGFKIPYLNDQPKKLPQPEADSYALTFFEQTFNYSTNQDATEEDFVEAAVVLNEDSEDESVADDAKSARKIAKRNRKRIRSDWAPLNESKKYNDWGNWWKDYKNVGEEIDQQLLECGNLNLEHCFLPNLPKLTTEQVVYAIIKSAHFGLEKNADVPYDTMKTIFTLMNRTFLDNLTELNMVEIQDIIRGIPNDLWVYKLRSMVFLWAKYKAITNSKSTAEDDVKDQQAIAREWKSPCFHWLAKQAFDELVAISETEWKDHRTVFPSI

SEQ ID NO: 12193 - DNA, 5912 bp, DROSOPHILA
atgataaagaatgcgggcgatacagtatacattggttatttgaaagtcatagatattatatattttttttttaaatttttaatcaatttctaaattaaattgtaatctgcacttcctgcacttaattaaaacatgtcatattaccaatgttattggcgagtatagttcaatcacgccttttatctttaagcctttgattatttaacatgagcttagttgtggcttgtttgcgattgcaggcagaaggagtttctgatctagacgagagctatccatccatatgatagcatggatagcagtgcaaagccaacgcggaaaaatccgcgacagcatgcaaatattatttcacaactaatatttgcctgggcgataccattactatatcgaggttcccgcagaggccttaatacggatgacctgacacaatgtctgaaggaagatcgatccgagcagttgggcgaccgtttggaggagtaagtactgagatctaacatcctctttaactgacaacaaacactaaggaagtttgacttgctacaaagtcgtattaaacatttgtcaattgtgatcaatttttagtcaatggtttaaggaactagagcgatctcaccgcaagaaacagaagccgcatctcagaaacgcacttttccgctgtttcctaggacccacgatcatcaatggcctcatttgctttatctacatagtgatcaagtgagttgggggtttaatttaactcattatatcataattaatctgtttctaggaccttaattccagctgttcttgcacagctgttgattcagtttcaaaaaactcctgttgcgcaattaagaaatatcgatgtcaatgatatttcaatatcagattccctgaatcgaacagcacgggcaattccaaactatgtgctgagtcaggctgtcgccaactctagtggatctccaggggatggtgagctttaaacaaaggattatcattcttgattaaattatacatatgaatcatgcatatttcagcacttttccccaaatcgctggacaaagcgggtccactggagccgattcagcctccagtagaggaagtggatcacaatgcaaccgctgtgcgaagcatcttggatcagaccgtcgagcacatgtggaacgatatgaacagtctgggcgccgtcctggttctttcgacgctgttctgctgcttcctgttgcaccacgtcgatctccgacagcgcctaatgggtgcacggatgcgaatagcctgctgctcgctgatctaccggaaaactctacggctctcgatgaaaacggctggtcagacgccagctggttacctaatcaaccttctttcgaatgatgtgaatcgtttggactatggcttcatattcatgcactggatctggattatgccattgcaggcgatgctcacgtgctacctgatttggctgaacattggcatcccagcaattgtgggtgtagttggactgctgctaaaaacggtgcccgtgcagacggccttgagcaaggtaacctctgtgctgcggatgagaattgcggagcgaacggacgcgagagtgggcattatgaacgagctggtgcagggcattcaggttataaagatgtacgcctgggaaaaaccgttccaggcggtggtggccgaagctcggcgtagcgagatcaagcagatccgatatgcatcttacctgcgtggcttctacctcagcaccatggtgttcacggagcgatccactttgtacatcaccctggcagcggctgctttgatgggccaaaccataaccgcagactttgtgttctcagcagccagttactacaatatcctgcaactggtggctgccatttggtatccactagctgtaagctttggagcggaagcattggtttctctgcgtcggattcaggacttccttatgctcgagggacgtgaggagcgcactcaaggacttacccataagcgagatcaggaaggtggagactccagagcagtgaccattaaggacattaatgccagctgggatattgagaagccacagaaaacgctccaaagcattaatctgcagatcgagaagggccaactgtgcgcagttattggaccggtaggtgccggaaagagttctatcctccagttactgctgggtgaactgcccgttatcgatggaggcgtttttatccagggtgacctctcctatgcagcccaggaaccatggttatttacgggatcggtgcgaaataacatccttttcggtgaagagtttgataggaagcgttaccaggaggtaacacggtgttgtgcccttagcacggatttccaacagctgccaaacggagacaaaactcttgtgggtgagcgtggggcatccctttccggaggccaaagagcacgcatcagcttggcccgagctgtctataagcccgcacagatttacttgatggatgatccgctaagtgctgttgatgcgcacgtgggcaggcatctcttcgatgaggtgattggacccagaggacgactggctcagctgaaggcgactcgcattctagtgacccaccaggtgcacttcctgtccgaggccgacgttattgttattgtcgaccaaggaagaattttaaggcaaggcacctaccaggagctgatcaacagtgatctggacttcgctaggctccttgagcgacccaaggaggaggaggaaggggaaaacagtcgcaatcaaacatccccgctgagtgtcaattcactggagagtgacgacgaggacatacctttcatcgatggtgtaaaagatgggtaccagcagttgagaaaacagagcagctcggtacatggcagcaagtcggtgggttaacaaagtcccaacatctaatgtgcacttcattatgtaaagaattttccgtttcagttggacagtacccaactggatgataatgtcgatgaggatgatctggccgaggcccaagcatctggtggcatttcaccacgcgtttggtacgagtacttccatgcgggcagtactcttctgagcttcagcttcatggtctttgttatggtgatgtcccaggtggtgtgcagtagttccgatttctttgcgaacatctggacacagcaggagcatcagaggtcgcagggagaggccactttctcaaccttcgagtgcatgtacatatacggtgctctgatcatcgccgtggtgatcatgaccacattccgtggcttcctgttctttaagatttgcatgcatgcctccaaggtgctgcacgatcgcatgtttgcctgcatcctgcacgccaccatgagattctttgacaccactccgtctggaaggattctgaatcgcttctccaaggatatgggcgccattgatgagttgctgccgcgggccatgatggattttatacagatcgctctggtgatgtttggaattctgattgttattggtatactgaatccggttttggtggccgccatgttggtggtagccgttgtggatgtgctcatcctgaagttgtacctgagaccttcgcaggatctcaagcgattggagggcatatgccgcagtccggtgttttcccatctcagtgcttcccttacgggtctggccatcattcgatcccgccagttgcaggatgtggtggccaaggagtttgatttgctgcaggatgtgcacagtagcgtgtggcagctgaccatggcagtgaatacgactttaggcttgtggctggactgtgtcagttgcatcttccttacctctgtcaccttcagcttcattatctccagtgaaagtgagttctattagaaataagttattaaaaagaacaaaactaataggtatattttctaattttagccacttatagcggcaacgtaggcttggccattgcccaggccatgatcctaaccggaatggtgcaatatggagtgcgacaagtggccgagtccttgcagcaaatgaccagcgtggagcgcgtcctgcaatacaccgaactggagcaggagccggcgctgggcgaaaaaacgccaccgcagcagtggcccacacgcggtcaggtggagttccgcaatatgagctgtcgttatgatccaaatggatcgccggtgcttaggaacctgaatctcaccatcgaggcgggctggaaggttggcattgtgggacgtacaggagctgggaaatcgtcgctaattggagctctcttccgattggctcacatcgagggagagatttttatcgatggcatagagacgggaacgatttcattggaaattctgcgcacccgcatctcgattataccccaggatccggtactgttttccgctaccatccgctacaatctggaccccttcgagcggtataccgacgctgagctgtggagcgctttggaagatgtggagctgcgtaaagccattcccggtctggactacatggtaacggagaggggcggcaatttcagcgtgggccaacgtcaattgctctgcctggccagggcgattctgcgaaacaacaaggtgctggtactggatgaggccacggccaatgtggatccacagtgagtcctagaacgaaagttactatatctccagaactaacttctaacccatctattctcgcagaaccgatgccctgatccagcgcaccatacgcatcaagttcaagcagtgcacagtgctcaccgttgcccatcgattgcacacagtcatggattcggatcggattatagtaatggatgctggtgtcgccgtggaattcgatgtgccgtacttgctgttgaagaagtcacagggacatctccggcaaatggtagaggccacaggcggggaatcggaagcactgaagaagacggccagtgacagccacaaaagaatgcaaagagaacgggacgagcgagatcgcgatcaggatgagagccaggagtgagaaacggtggcccaaaaaaatatccatcggaaatcgcatttaaccaaatctggtgcttataatggctcaaggttacaactcttgggctcccaatggaagaggaatcttgtccaaaacaaaaaccgtaccaaaatgattttcttgtgcacatacacatattatgttatcaatgtttcatttccttagtttagttaagtttgttaacgaaaagtctagaatgtgtactgccttatacgtattgtacttagatgtaatctccaccagggactacgttgtaatatttgtccaccaacctattgtagaccgccagtgaatcggatgtttacttacaacatgacaaaagctacttacattctggtaccggaccagaactgaaacaccgaggtcctcaaaggatcagtgggttaatctactcactagttagaccatcaaatatatatattgtttataaattgtgtacattactgcaagtctatattcatacaaccgaaatattgtacttgaaactctagatagaaatttaataaataatcgtcgggtttattaaaatataaataagtttcacacaaattggtaataaaattgtacatttaacttattgagtaaattttatacaatctttttcgatagtcattttttgacacaaaattgcaaagtaagtaaaatataaataattgtcataaaatggataatataatctaaaacctaaacaaacgaattaaaagttcggcgatcattttcggggcgactttcgatgcgttgtcctgacacctgatcctatttgacctgaggattggcgagtttgatttgtactaagtttgctttgttgttcaaaaggaatgggtggagttccatctggatagttaaccagggagatgcgactctccccggagaacagttgagagccggtgttactcatggacccggccttctctggaatggagaggaacgatcccactggtgtggatgtcttttgtctgtcgtttgttgctccggtggc

SEQ ID NO: 12194 - DNA, 3720 bp, DROSOPHILA
atgcatatttcagcacttttccccaaatcgctggacaaagcgggtccactggagccgattcagcctccagtagaggaagtggatcacaatgcaaccgctgtgcgaagcatcttggatcagaccgtcgagcacatgtggaacgatatgaacagtctgggcgccgtcctggttctttcgacgctgttctgctgcttcctgttgcaccacgtcgatctccgacagcgcctaatgggtgcacggatgcgaatagcctgctgctcgctgatctaccggaaaactctacggctctcgatgaaaacggctggtcagacgccagctggttacctaatcaaccttctttcgaatgatgtgaatcgtttggactatggcttcatattcatgcactggatctggattatgccattgcaggcgatgctcacgtgctacctgatttggctgaacattggcatcccagcaattgtgggtgtagttggactgctgctaaaaacggtgcccgtgcagacggccttgagcaaggtaacctctgtgctgcggatgagaattgcggagcgaacggacgcgagagtgggcattatgaacgagctggtgcagggcattcaggttataaagatgtacgcctgggaaaaaccgttccaggcggtggtggccgaagctcggcgtagcgagatcaagcagatccgatatgcatcttacctgcgtggcttctacctcagcaccatggtgttcacggagcgatccactttgtacatcaccctggcagcggctgctttgatgggccaaaccataaccgcagactttgtgttctcagcagccagttactacaatatcctgcaactggtggctgccatttggtatccactagctgtaagctttggagcggaagcattggtttctctgcgtcggattcaggacttccttatgctcgagggacgtgaggagcgcactcaaggacttacccataagcgagatcaggaaggtggagactccagagcagtgaccattaaggacattaatgccagctgggatattgagaagccacagaaaacgctccaaagcattaatctgcagatcgagaagggccaactgtgcgcagttattggaccggtaggtgccggaaagagttctatcctccagttactgctgggtgaactgcccgttatcgatggaggcgtttttatccagggtgacctctcctatgcagcccaggaaccatggttatttacgggatcggtgcgaaataacatccttttcggtgaagagtttgataggaagcgttaccaggaggtaacacggtgttgtgcccttagcacggatttccaacagctgccaaacggagacaaaactcttgtgggtgagcgtggggcatccctttccggaggccaaagagcacgcatcagcttggcccgagctgtctataagcccgcacagatttacttgatggatgatccgctaagtgctgttgatgcgcacgtgggcaggcatctcttcgatgaggtgattggacccagaggacgactggctcagctgaaggcgactcgcattctagtgacccaccaggtgcacttcctgtccgaggccgacgttattgttattgtcgaccaaggaagaattttaaggcaaggcacctaccaggagctgatcaacagtgatctggacttcgctaggctccttgagcgacccaaggaggaggaggaaggggaaaacagtcgcaatcaaacatccccgctgagtgtcaattcactggagagtgacgacgaggacatacctttcatcgatggtgtaaaagatgggtaccagcagttgagaaaacagagcagctcggtacatggcagcaagtcgttggacagtacccaactggatgataatgtcgatgaggatgatctggccgaggcccaagcatctggtggcatttcaccacgcgtttggtacgagtacttccatgcgggcagtactcttctgagcttcagcttcatggtctttgttatggtgatgtcccaggtggtgtgcagtagttccgatttctttgcgaacatctggacacagcaggagcatcagaggtcgcagggagaggccactttctcaaccttcgagtgcatgtacatatacggtgctctgatcatcgccgtggtgatcatgaccacattccgtggcttcctgttctttaagatttgcatgcatgcctccaaggtgctgcacgatcgcatgtttgcctgcatcctgcacgccaccatgagattctttgacaccactccgtctggaaggattctgaatcgcttctccaaggatatgggcgccattgatgagttgctgccgcgggccatgatggattttatacagatcgctctggtgatgtttggaattctgattgttattggtatactgaatccggttttggtggccgccatgttggtggtagccgttgtggatgtgctcatcctgaagttgtacctgagaccttcgcaggatctcaagcgattggagggcatatgccgcagtccggtgttttcccatctcagtgcttcccttacgggtctggccatcattcgatcccgccagttgcaggatgtggtggccaaggagtttgatttgctgcaggatgtgcacagtagcgtgtggcagctgaccatggcagtgaatacgactttaggcttgtggctggactgtgtcagttgcatcttccttacctctgtcaccttcagcttcattatctccagtgaaaccacttatagcggcaacgtaggcttggccattgcccaggccatgatcctaaccggaatggtgcaatatggagtgcgacaagtggccgagtccttgcagcaaatgaccagcgtggagcgcgtcctgcaatacaccgaactggagcaggagccggcgctgggcgaaaaaacgccaccgcagcagtggcccacacgcggtcaggtggagttccgcaatatgagctgtcgttatgatccaaatggatcgccggtgcttaggaacctgaatctcaccatcgaggcgggctggaaggttggcattgtgggacgtacaggagctgggaaatcgtcgctaattggagctctcttccgattggctcacatcgagggagagatttttatcgatggcatagagacgggaacgatttcattggaaattctgcgcacccgcatctcgattataccccaggatccggtactgttttccgctaccatccgctacaatctggaccccttcgagcggtataccgacgctgagctgtggagcgctttggaagatgtggagctgcgtaaagccattcccggtctggactacatggtaacggagaggggcggcaatttcagcgtgggccaacgtcaattgctctgcctggccagggcgattctgcgaaacaacaaggtgctggtactggatgaggccacggccaatgtggatccacaaaccgatgccctgatccagcgcaccatacgcatcaagttcaagcagtgcacagtgctcaccgttgcccatcgattgcacacagtcatggattcggatcggattatagtaatggatgctggtgtcgccgtggaattcgatgtgccgtacttgctgttgaagaagtcacagggacatctccggcaaatggtagaggccacaggcggggaatcggaagcactgaagaagacggccagtgacagccacaaaagaatgcaaagagaacgggacgagcgagatcgcgatcaggatgagagccaggagtga

SEQ ID NO: 12195 - protein, 1239 aa, DROSOPHILA
MHISALFPKSLDKAGPLEPIQPPVEEVDHNATAVRSILDQTVEHMWNDMNSLGAVLVLSTLFCCFLLHHVDLRQRLMGARMRIACCSLIYRKTLRLSMKTAGQTPAGYLINLLSNDVNRLDYGFIFMHWIWIMPLQAMLTCYLIWLNIGIPAIVGVVGLLLKTVPVQTALSKVTSVLRMRIAERTDARVGIMNELVQGIQVIKMYAWEKPFQAVVAEARRSEIKQIRYASYLRGFYLSTMVFTERSTLYITLAAAALMGQTITADFVFSAASYYNILQLVAAIWYPLAVSFGAEALVSLRRIQDFLMLEGREERTQGLTHKRDQEGGDSRAVTIKDINASWDIEKPQKTLQSINLQIEKGQLCAVIGPVGAGKSSILQLLLGELPVIDGGVFIQGDLSYAAQEPWLFTGSVRNNILFGEEFDRKRYQEVTRCCALSTDFQQLPNGDKTLVGERGASLSGGQRARISLARAVYKPAQIYLMDDPLSAVDAHVGRHLFDEVIGPRGRLAQLKATRILVTHQVHFLSEADVIVIVDQGRILRQGTYQELINSDLDFARLLERPKEEEEGENSRNQTSPLSVNSLESDDEDIPFIDGVKDGYQQLRKQSSSVHGSKSLDSTQLDDNVDEDDLAEAQASGGISPRVWYEYFHAGSTLLSFSFMVFVMVMSQVVCSSSDFFANIWTQQEHQRSQGEATFSTFECMYIYGALIIAVVIMTTFRGFLFFKICMHASKVLHDRMFACILHATMRFFDTTPSGRILNRFSKDMGAIDELLPRAMMDFIQIALVMFGILIVIGILNPVLVAAMLVVAVVDVLILKLYLRPSQDLKRLEGICRSPVFSHLSASLTGLAIIRSRQLQDVVAKEFDLLQDVHSSVWQLTMAVNTTLGLWLDCVSCIFLTSVTFSFIISSETTYSGNVGLAIAQAMILTGMVQYGVRQVAESLQQMTSVERVLQYTELEQEPALGEKTPPQQWPTRGQVEFRNMSCRYDPNGSPVLRNLNLTIEAGWKVGIVGRTGAGKSSLIGALFRLAHIEGEIFIDGIETGTISLEILRTRISIIPQDPVLFSATIRYNLDPFERYTDAELWSALEDVELRKAIPGLDYMVTERGGNFSVGQRQLLCLARAILRNNKVLVLDEATANVDPQTDALIQRTIRIKFKQCTVLTVAHRLHTVMDSDRIIVMDAGVAVEFDVPYLLLKKSQGHLRQMVEATGGESEALKKTASDSHKRMQRERDERDRDQDESQE

SEQ ID NO: 12196 - DNA, 4224 bp, DROSOPHILA
gggggtacccattagtacaaaggctgaaaggtaaacgaattatttattagattattatttaattaaaaatacatacaaccaatgataagatacaacaaactcataatgattttatctagcgatctgcttttagtaatgaggtaccgatcttcggtatttatagatcaacaaaattagttccggataattacattattagtaatgaaattctgaaaaatgtcaaatgtctttgtagtttttaaaagttcattgcaccattaaatattcatgtaaaagtcatgtcaaatttggaaatgtatatttcttgcaaatataatgtattgttatataacagtaataaataaactatattttcctttactcatagggaacaccttatttcccaaagcaaaatccaatgaacagttgaaaaagtatacctctctgcttgaaataaattccctgtaaacgagtgaaatgaagcagcaggacatttagacatagcttagttgctcccaatgtttcagctgttgccgcggaaaactttgagcatcaagtgaaaaacaagtggacaggcagctgttgttgacaccgcccttttttagacgggcgaaactttgcctaaaatgggtggacacttgcaggatccactcctgcgaaggtaaactgcacgcgtctgaaaacaaaagcaagcatgttgccgctaggtggcgacaccgtgcagacaattaaacgcaacaacagccacatctgccatagattttgcataacaacaaagccaaaaagagtgcggaaaatttgagtagtgtgatagagttagttgccataaatacatcatgggagaagaaaggctttgatcaactgctcaatggaccccttattagtcgaaatatgcagcaccattcaaggcaccaataaagttgttggaaaaatcatttcattaaagcaaaagctttgctcttgttgtcaaataatgattaggaaaaaacacaaatacgtagtctttatttagtagctgatcatttttctaacaccaaattcggaaataaaagcccccgaatacattcgaaattattgtgttcataccgcggtttaccgcaccagcttaatagcgctgagccccagaaacagaccaagaaatcggcattaaagataaacggttataggccaaagttgaaagataagaactattgggaccattcgtctagaccgtgggctgtaaatggctagcgcatgtgcttaatgaaatggacaagaaagaagttcaacatcaccgcagtcaacaggcgatgacaaaatctctatacgccattgggatgggtcttctgggaaagtcggcgaccaacatggattgtgctaatacgaatttagaatcggcagggaagagctcctcaacgaattataacagaaatcggttctacaacgaaaggttcgttccgatggcatccggaactatgccttccgtttcgggcactaaccatcattctaggcatcaacagctccttctccaacaagctcccaagtgcactgccgatctcaacgagaaattagtaaaaatcaatcggcaaaacgccaataaggagctatccaccattcaggcaaaggatatgcaatccgttgataaaaacgaagaggccctaaaagaattgcaggagagcattccggaaatcaacaaaatcttcgatgtgcactgtcgcatcggcagtggaaccttcagcacagttctcttgggaaccctgcagcgggaaaggggtctcgtggaaacccaaaggaggagattcgccatcaaacatcataatcccacaaatcatccggagaggattcttagagagttggagtgcatgtatcgcattggtggagtggaaaatgtaatcggaattaattgctgcattagatataacgacaacgtggcctttatcatgccctatatgacccacgatcgctttcacgacatttacagaagcctgaatttcccagagatacgcgactatctgaggaacttgctcattgcgctgcgacacgttcacaagttcaatgtgattcatcgggacgtcaagccaagtaacattctttataaccgcaggaccggaaagtttttactctgcgatttcggattggctcaaaggatagccgatgatggtagtgtagtgcagtcgagtgatctcagctcccgggaagtattctccattctgagggacctggagaatggtagaagtgtgacgttgacggatggcaattcagcccaagccgaggctgaggattatatggcccgtcgaaggatgcgggctctaggtggcggtgggagcgtggaacgtgctgtgactggacctccgagtatacagaaactacgtgagcaagcgggtggacatttgaccaaaaaggatgtggccaaccagagggctgacaccatgaggctgctgaaccgcctgcgactcgtgagcccaaatgcggatcccaacaactacgtggtctccacgaacacctcgaagaaggagatgcacgcttcaagggctggaaccccaggatacagacccccggaggttttgctccgatatcccaaacaatccactgcggtggacgtgtgggcggctggcgttataatgctctctttgctctctggtcttcatccatttttcaaggccccccacgactgcggcgccctggctgaaataatcaacctatttggcgatatgccagtgcggaagactgcctttctgctggataggctgattttgctggcgcagaaggtgaacaccttggatttacggagggtgtgcatgcgatttcgccatgcggacttctttctggcccccgaaatacaacgtaaatatcaaaggcccgatggcaccaccgaaatgtgccgcagctgtgagcagcccacgtttaattgcctgtgcagcaacagtgggcataatttggaaaggtacgatgggctggatatatttcccgcagtggcctacgacttgttgtcccgtctgctggaagttaatccccaaaagcgtatcaccgccgaggaggccctaaagcatccgttcttcagcgatcagcatcgcattacgccgggaataccgctgcaccagcagcagcttataatgcaccagcagcagcatataatgcagcatcagcaacacctccagagatccagagagacacttccttcgtcggcggcgcgaactctaaaggcattcgtatgctatcccatggaaattacttctactgcgtcacaggcagcgggtaacatctgactctgatctccgattatctttgtgtgtatcctgccttctttataaccagattgagaggaagaatgcatttaccgcggccacctgtgggcatctaaaattgtattgtgcacaaaccaaaaaaaaaaaaaaaacgaaatttttatatggaagctgcgaaatgttcccgaaattaacattaaaaataaaatgtatatttatgttaatttatggtatttatgtttattcaaaattaatcgaggcactttagcatttccggtatctttcttctttaattatttttatgcgttttaactttatcattttctatctaatgtttgttttgctcaaaaatgaagaacaacgggaatcaatgctgttaagggtaatagaaatcaattaaaaattaaaaaaaataaataaagacattctaaaaaataatttttatttgatatatataaatgaggattttttgtcgataagcgccatatagatcccatatctatcattgaattctgaaaggccatcttctgtagtctttcaattttacgaatgtcgtaatctctttctgccttcaaatgatctaatggcaatcaggttttcttttatttaatattttacccgacagccattttctcgattggcttttctaaggcctgaaccgaggaaaaattgtccttttgtcttatcaatttgcattattgacgcttacaacaaactttattttgttgttgctcacaaaaaggttatgggaatcttcccttttgggtgagtaattttttcgttttaccatttgtttttgtccgtcagcagcaaaaaaaaatgcattgctcactgggaattatgttgacaatttcattctttagcccagaaaagaaatcagatttctatctgctggtttgaatgtgtaaaaacgaaaaattttgggggttctggcaagtcaccaagaaacgaactttcagctgtcgacgttgcaaaatagtttattaaaaagttttccctcccttttttattgaactgaaaa

SEQ ID NO: 12197 - DNA, 2224 bp, DROSOPHILA
atttttctaacaccaaattcggaaataaaagcccccgaatacattcgaaattattgtgttcataccgcggtttaccgcaccagcttaatagcgctgagccccagaaacagaccaagaaatcggcattaaagataaacggttataggccaaagttgaaagataagaactattgggaccattcgtctagaccgtgggctgtaaatggctagcgcatgtgcttaatgaaatggacaagaaagaagttcaacatcaccgcagtcaacaggcgatgacaaaatctctatacgccattgggatgggtcttctgggaaagtcggcgaccaacatggattgtgctaatacgaatttagaatcggcagggaagagctcctcaacgaattataacagaaatcggttctacaacgaaaggttcgttccgatggcatccggaactatgccttccgtttcgggcactaaccatcattctaggcatcaacagctccttctccaacaagctcccaagtgcactgccgatctcaacgagaaattagtaaaaatcaatcggcaaaacgccaataaggagctatccaccattcaggcaaaggatatgcaatccgttgataaaaacgaagaggccctaaaagaattgcaggagagcattccggaaatcaacaaaatcttcgatgtgcactgtcgcatcggcagtggaaccttcagcacagttctcttgggaaccctgcagcgggaaaggggtctcgtggaaacccaaaggaggagattcgccatcaaacatcataatcccacaaatcatccggagaggattcttagagagttggagtgcatgtatcgcattggtggagtggaaaatgtaatcggaattaattgctgcattagatataacgacaacgtggcctttatcatgccctatatgacccacgatcgctttcacgacatttacagaagcctgaatttcccagagatacgcgactatctgaggaacttgctcattgcgctgcgacacgttcacaagttcaatgtgattcatcgggacgtcaagccaagtaacattctttataaccgcaggaccggaaagtttttactctgcgatttcggattggctcaaaggatagccgatgatggtagtgtagtgcagtcgagtgatctcagctcccgggaagtattctccattctgagggacctggagaatggtagaagtgtgacgttgacggatggcaattcagcccaagccgaggctgaggattatatggcccgtcgaaggatgcgggctctaggtggcggtgggagcgtggaacgtgctgtgactggacctccgagtatacagaaactacgtgagcaagcgggtggacatttgaccaaaaaggatgtggccaaccagagggctgacaccatgaggctgctgaaccgcctgcgactcgtgagcccaaatgcggatcccaacaactacgtggtctccacgaacacctcgaagaaggagatgcacgcttcaagggctggaaccccaggatacagacccccggaggttttgctccgatatcccaaacaatccactgcggtggacgtgtgggcggctggcgttataatgctctctttgctctctggtcttcatccatttttcaaggccccccacgactgcggcgccctggctgaaataatcaacctatttggcgatatgccagtgcggaagactgcctttctgctggataggctgattttgctggcgcagaaggtgaacaccttggatttacggagggtgtgcatgcgatttcgccatgcggacttctttctggcccccgaaatacaacgtaaatatcaaaggcccgatggcaccaccgaaatgtgccgcagctgtgagcagcccacgtttaattgcctgtgcagcaacagtgggcataatttggaaaggtacgatgggctggatatatttcccgcagtggcctacgacttgttgtcccgtctgctggaagttaatccccaaaagcgtatcaccgccgaggaggccctaaagcatccgttcttcagcgatcagcatcgcattacgccgggaataccgctgcaccagcagcagcttataatgcaccagcagcagcatataatgcagcatcagcaacacctccagagatccagagagacacttccttcgtcggcggcgcgaactctaaaggcattcgtatgctatcccatggaaattacttctactgcgtcacaggcagcgggtaacatctga

SEQ ID NO: 12198 - protein, 665 aa, DROSOPHILA
MDKKEVQHHRSQQAMTKSLYAIGMGLLGKSATNMDCANTNLESAGKSSSTNYNRNRFYNERFVPMASGTMPSVSGTNHHSRHQQLLLQQAPKCTADLNEKLVKINRQNANKELSTIQAKDMQSVDKNEEALKELQESIPEINKIFDVHCRIGSGTFSTVLLGTLQRERGLVETQRRRFAIKHHNPTNHPERILRELECMYRIGGVENVIGINCCIRYNDNVAFIMPYMTHDRFHDIYRSLNFPEIRDYLRNLLIALRHVHKFNVIHRDVKPSNILYNRRTGKFLLCDFGLAQRIADDGSVVQSSDLSSREVFSILRDLENGRSVTLTDGNSAQAEAEDYMARRRMRALGGGGSVERAVTGPPSIQKLREQAGGHLTKKDVANQRADTMRLLNRLRLVSPNADPNNYVVSTNTSKKEMHASRAGTPGYRPPEVLLRYPKQSTAVDVWAAGVIMLSLLSGLHPFFKAPHDCGALAEIINLFGDMPVRKTAFLLDRLILLAQKVNTLDLRRVCMRFRHADFFLAPEIQRKYQRPDGTTEMCRSCEQPTFNCLCSNSGHNLERYDGLDIFPAVAYDLLSRLLEVNPQKRITAEEALKHPFFSDQHRITPGIPLHQQQLIMHQQQHIMQHQQHLQRSRETLPSSAARTLKAFVCYPMEITSTASQAAGNI

SEQ ID NO: 12199 - DNA, 3399 bp, DROSOPHILA
tgatctccttgtggtggtttaataatcttcttggcatcccagtcgtaaccgatgtgcttgtattcgtcgtaccagtgcatgggtatgttgcctacagtatttcttatgtcctcctcgtcggaggtatctgaatcctgatactcaggcttcgagctatcccgtttcgggagctctgctgtaagggcttttttagacgcggcaccgcttccactgggcttatcgtctgtttgctttgacttggaatccttctcctcatcttccacttcctctccatcagtgctttcctcctcttcattatcctcttcatcactactttcttcatcttcctcagctgatgaagattgctttctgcccaagtagttgccctcctcatcgctctcgaactgcagttcctcactggaatccgagtggtattcctggtctatgccctcgtcatctgttgaatcttcgccgggatcttttacagcttgcagcaggtccttaaagagcacaaacacacatgcaggtcattttgaaatgactttttatatcactgtcaatgggtcttacctcctcctcctcctcgttttcggaagcctcggaactggccaccacttcatttgtgggttccgaatcctttcctctgcgtttcagagctagttttttggtcattttgaggtaaaaacaaaactaacgcggcgcacgtgttgcagtcagcgatagcgatgggaatcgcctgaaacggttgcctatcgattggcttgccgccactgctgctggtaatcggttacaaatccatttggaaacagcaacccttttattttcatttgttacctctcttaaaatatacatctataataaatactttccaataaagatttatttagtattaaacataatattacagccgttgcaagttgcaaaatcaagacaaagttatacatgaccaatgtatatgtataccaattgcagcgccgttgcgagcaagtctgcaaaataccctaacgctaattggaagattcttcaacgaaccattttcagcgaaattcgcagacttacgtgcggatttttttgggccagtgcgaaaaccaaaggtgacaccccgcaactggagcactaggagctcaccaacaacgaaacaccggcggctgaacgagagtattacatatccggaagacaaaaccatcgatttgcagctcacacaagggcaaacaaaagtgcacacgcacacattggcaaggtggccccctcctctttccgttccacacacacctacgcacacaccagcataagagaacccacacatagacatcacgatgactgcgccgcgacgcctgcgaaaagaattgagcgatttgcagggcaacgcactgaagtccttccgggacattaaggcggacgatgacaacctgctgcgctggacgggattgattgtcccggacaatccgccgtacaacaagggcgccttccgcatcgagatcaactttccggcggagtatcctttcaagccgcccaagattaactttaagacacgcatctaccatccaaacatcgatgagaagggccaggtgtgcttgcccattatcagtacggagaactggaaaccggccacacgcaccgaccaggtcgtgcaggcactggtggacttaatcaacgaccctgagccggagcatccgctgcgggcggagttggccgaggagtttcttaaggatcgcaaaaaattcgtgaaaaacgccgaggactacaccaagaagcacagcgaaaaacgtccggccgactagcggataggcggaggtagagctggaggaggtgggccagtccacaacccatgtgtacccttaccccttagtcttgtgatttttctgttagttatttaattttcattcttgatccatgaaaaactatcctcagaaaacatttaagcagatatttccccggcagagtacctagttttgtaaaagtagcactgtaatttgatgcaagtgagaaatacatgttcgttatgttaaaatacagctgccgactcttggatggaaccgacatctgagttggatgtcggagctacgggcatgggaaatgattcctcgcccaacatgctacggaagcaggtcattacaatgctgttgttgtgctgaatgagggccttgctgaactggttcttctgcagctccttaatgtccagcaggctgtgaatggcccccgcctgctcgtccttaagaagttccagcacctgttccaaggcactgttagccgtatcttttagcttactcaacgtgagagtttgcgcttgattgctattaaaacaacaatcctgataaacgctctctatgagaaataagagcagcgacgccgcgtaatgggtgagaaacaggaacttgtggaagacaatgctgtcgggcttcaatttctttacttcttccaggagatcaatgaaaaagcgctgctgggcggtgtggaatgcctcgtcttctgttggtggcaggtagcatagtgtcttgctttccaactggcactttggcgcagactgccagacagggtcgagttcaaatgtgtccaggatgcgaaggcgcagaatgagtattggttccgaggcaaacatgctgctttgcaggctctgaacaggtgctcctcgtgaaatgtgaagattcaagggtgccgttctgttcttaacgtatgaatacggtgttctattgttaagacacttctccagttgattaaattcccgacgcaagcagtaaatctgcttgagaaggtcaccgtgtttcaaggactccctttctgtgtaggaaccgccatagacaggcacttggaatcccagagccttactggtggcctccttgtccacgatgcacaggctatcttctaatggcttcactttgtatagactgtagtaggtgttcgcgacaagactgcgcaggtgatgaagatgtctcagataatgacgatcattggactcgtaggcatagatactgccctcgatggcatccgtttgaagcttcatgtacatacggcaggcgatctcgtgctgcatgagaaagtcgtggggaatctggaacttggcaaacagtggcattaccaatgtgtcattcggctgagcaagcttgctctttatctcctctagcaaacgaggcaagtcgggatggtccttgttgtagttcaggcagataacatacacttccgaatttccccgcttggaagtagccggcttaaagatgtgtacctcctcaaagatgcaattgagtgtataaagtagagatacactgcaagcctcgaagagggtaaacatcttcactaggaagttaccgccacttgagagaattcttaaggcactgagtacttcagcaaagaaaaggcgaaccactatctcttcctggcaatcaggctgtgcggcacaatcgatggaaccatcggcagtgacaa

SEQ ID NO: 12200 - DNA, 1399 bp, DROSOPHILA
cttcaacgaaccattttcagcgaaattcgcagacttacgtgcggatttttttgggccagtgcgaaaaccaaaggtgacaccccgcaactggagcactaggagctcaccaacaacgaaacaccggcggctgaacgagagtattacatatccggaagacaaaaccatcgatttgcagctcacacaagggcaaacaaaagtgcacacgcacacattggcaaggtggccccctcctctttccgttccacacacacctacgcacacaccagcataagagaacccacacatagacatcacgatgactgcgccgcgacgcctgcgaaaagaattgagcgatttgcagggcaacgcactgaagtccttccgggacattaaggcggacgatgacaacctgctgcgctggacgggattgattgtcccggacaatccgccgtacaacaagggcgccttccgcatcgagatcaactttccggcggagtatcctttcaagccgcccaagattaactttaagacacgcatctaccatccaaacatcgatgagaagggccaggtgtgcttgcccattatcagtacggagaactggaaaccggccacacgcaccgaccaggtcgtgcaggcactggtggacttaatcaacgaccctgagccggagcatccgctgcgggcggagttggccgaggagtttcttaaggatcgcaaaaaattcgtgaaaaacgccgaggactacaccaagaagcacagcgaaaaacgtccggccgactagcggataggcggaggtagagctggaggaggtgggccagtccacaacccatgtgtacccttaccccttagtcttgtgatttttctgttagttatttaattttcattcttgatccatgaaaaactatcctcagaaaacatttaagcagatatttccccggcagagtacctagttttgtaaaagtagcactgtaatttgatgcaagtgagaaatacatgttcgttatgttaaaatacagctgccgactcttggatggaaccgacatctgagttggatgtcggagctacgggcatgggaaatgattcctcgcccaacatgctacggaagcaggtcattacaatgctgttgttgtgctgaatgagggccttgctgaactggttcttctgcagctccttaatgtccagcaggctgtgaatggcccccgcctgctcgtccttaagaagttccagcacctgttccaaggcactgttagccgtatcttttagcttactcaacgtgagagtttgcgcttgattgctattaaaacaacaatcctgataaacgctctctatgagaaataagagcagcgacgccgcgtaatgggtgagaaacaggaacttgtggaagacaatgctgtcgggcttcaatttctttacttcttcc

SEQ ID NO: 12201 - protein, 154 aa, DROSOPHILA
MTAPRRLRKELSDLQGNALKSFRDIKADDDNLLRWTGLIVPDNPPYNKGAFRIEINFPAEYPFKPPKINFKTRIYHPNIDEKGQVCLPIISTENWKPATRTDQVVQALVDLINDPEPEHPLRAELAEEFLKDRKKFVKNAEDYTKKHSEKRPAD

SEQ ID NO: 12202 - DNA, 3133 bp, DROSOPHILA
tgacaacacgcataggtggcgtaggtgtgcgtgcccctgtgtgtgtgtatgtgtgtgggtctattgaggcgacaccttgggcaatatgtacttaaatcggtgtgtttaatgcatttagaagggcagagatcccgcttaaagcaggtaacttagcgaaaactcacggcctgtgcattggagttggtttcgtccattattttgtcagtctccattttcatcattgtgttgtttgtgtgtttgtagagtttactggctcgtcgtttgcttctctctcactcgctcactgccagagttttccgtcgcactcgcactcacgcaccacgtagcgtttttcgctgatttttcgttaacacgtctcgcaaatcgcttttcgccagcgatttcatataatttttaggtcgaaggaaaattacaatttgctcgtctcggtttctgtaggaccgcaggcgggatgcgcgaaaacggcgaggcgaacgcgatggcaaaggcaaactcaacttgccgaggtccctcaccaattgagcgaatgtcgtatgcaagtcattattctcaccgctcctggcggcttgcacgttgtttgtttttgcttattcagatgacgccaactactggacactcacttttcacacggagaattttatttttttttaccagatctcgcccaaatacggactgcgaaaccacaaagccaaagatgagtgtgcactatcgttatcgatatctgtcacatatatgaacggtcacactgccacgggccagtgctgcaaaatacggcaagagcacacaatttcgtcgtttctgctctaaattttcgaacaggttgttgcaattacaactatttatgaaatgtttttaagttatttccctttcagagctatgaattgtaagcattgtatggctacccaacacactttgccagctctgacaactctgcacatccatatcagctgatttctcgatcgctctctccgttttctgttgttatttaattgataaacttgttgcggggggccactctccagataaccccccacttttaaattaataaatattgcgcaagtaagtgccgtccagctcgccgaatgctcactttcattcgaccgcagagctgttcccattctaatcatttccttgagcattcataatcgagctacaatacacattttttttcaaattcacagtgcaactaactcaaatcctcaggatggcgtgccaaaaccaaaatgccgccaacttcttgagcaatggcaagaaaattgtgggggtggctctcaattacatgtaactcagtgtcatagtaatcttgggtctgcatgggtaatccacgaatactttcttccgtcgcagggacgttgtgctggccaggaacgttcccgtgcccaaggagccgctcgtcttcctcaagcccacatcttcgtacctccaggagggtcagcccattgtggtgagttctacagagaattaattaagataacattaagatagtagcaagatagcaaaagtccataaactggagagtaaacgaatggaaattgaaaatccctcttgtgatttaaactttgtattcccccagttaccaaaagtctttaccaaggtggcatatgaagtggaactaggcgtggtgattggaaagccctgcaagaacgtatccaaggcagatgccatgagctatgtggcaggatactgcctggctttggatctaactgcccagtgcaatttggtaagaagatggatgcactcaatcaagagccattgttgtaatcaataatcaatttcagggaccagctcgggcggccggtcatccgtggaccttgggcaagggatttgatacttctacgcccgtgtcccagtttatacccatcgaaaaagtgacggacccgcacaacttgccgctttggctcaccgtcaatggagaccttaagcaaaacgggtgcactgcagacttaatattcaaggtgcccgacatcatttcctacgtgtccaagtacatgaccctggaggccaacgatctgatccttaccggaacgcccaatggtgccgatgcgttcaaggcaggcgatgtaattcagtgtggaatggccgatctcgctaaattgaccttccaagtggaggctgaataaaagtgaagaatttaattttgatgctatattcggatataattggatatgtgcaatggctatttcttcttattactggccacatcatcacaggcaaccaaatatttccacatcgctgtgcaatcgctggtgtttttccatttgctggtcgggcagttgatgtagaccttttccatgacgcaggccagcaaggtggcaggatagaagtcgcagtcgcccttcttgggcatccattggaactcctgcacccgcttcctagctatttagaattaaccattattaagtagaaaaaaactttcgtatgctaactcaccgtagtccgtgcaactattgaggctcttcaacatcagttgcgacatattcggatcgtttttgtagcgttgctgatagctcttctgcaatgcctgggtattaacagtgccattgctcaacaagaatccattggtcctgaaggagcactccgcaatacactgaggattacacgtttcccaagagtaaagccagttttaaaatgatatattttagagcgatacttactgcatgcaaagccactttatccgacttaagattgcgcacttccccattcgaattggttgaattattgcccagcaaggacttgcgacacgaattgatggccttgtcgtttttttgaacatcacagcatgagctcaactgccaaatattcagttgtagtaataaaaacacgattttatttgaagttttcatacaaactttggctgctttgcgtgatcgcagcttgtataattaaaggattttgcacaatagctaaaaactattacaacgaaaagcagattatacacatacatgttgtgcttaaaatttataattaaactggtacgatgggcagctgaacttgagttttaaagccacattttaattaaccgtaatttaaaagttaatgatgcataaatagctcgcctaatgctgtgaaaaaataattgaaatgagaaggcacagaactaaagtgctgttgaacgcatattttcttgttttat

SEQ ID NO: 12203 - DNA, 758 bp, DROSOPHILA
gttgcggggggccactctccagataaccccccacttttaaattaataaatattgcgcaatgcaactaactcaaatcctcaggatggcgtgccaaaaccaaaatgccgccaacttcttgagcaatggcaagaaaattgtgggggtggctctcaattacatggacgttgtgctggccaggaacgttcccgtgcccaaggagccgctcgtcttcctcaagcccacatcttcgtacctccaggagggtcagcccattgtgttaccaaaagtctttaccaaggtggcatatgaagtggaactaggcgtggtgattggaaagccctgcaagaacgtatccaaggcagatgccatgagctatgtggcaggatactgcctggctttggatctaactgcccagtgcaatttgggaccagctcgggcggccggtcatccgtggaccttgggcaagggatttgatacttctacgcccgtgtcccagtttatacccatcgaaaaagtgacggacccgcacaacttgccgctttggctcaccgtcaatggagaccttaagcaaaacgggtgcactgcagacttaatattcaaggtgcccgacatcatttcctacgtgtccaagtacatgaccctggaggccaacgatctgatccttaccggaacgcccaatggtgccgatgcgttcaaggcaggcgatgtaattcagtgtggaatggccgatctcgctaaattgaccttccaagtggaggctgaataaaagtgaagaattt

SEQ ID NO: 12204 - protein, 220 aa, DROSOPHILA
MACQNQNAANFLSNGKKIVGVALNYMDVVLARNVPVPKEPLVFLKPTSSYLQEGQPIVLPKVFTKVAYEVELGVVIGKPCKNVSKADAMSYVAGYCLALDLTAQCNLGPARAAGHPWTLGKGFDTSTPVSQFIPIEKVTDPHNLPLWLTVNGDLKQNGCTADLIFKVPDIISYVSKYMTLEANDLILTGTPNGADAFKAGDVIQCGMADLAKLTFQVEAE

SEQ ID NO: 12205 - DNA, 10496 bp, DROSOPHILA
tcgagcactcgccgctgcttccaattaactggcttctctgcgattttttccaacacaacaaacgcggcacaaaaaatgctttcctttccccgaatttttcactgtctggtgccagggttgcaaagcaatgaaagccggctgctcaaaatggtaataagtccgattcgaagttggtatttttattgaaaaatactgagcgtgatagaaaaataccgctattgaattagttaggaataccttgcaataaattattatttatttatattttaagcattatgtcaaatgtgatttgttataaacaacatttgacaaatgtataatttcggttttgattcggtaatattctgaaagccatcttccaaaaaatttctttagcaagatatttatagagaagaagcttactgtataatttcttttcactactatcgtagttaattaaagagctatattttatagtaatatttactaatgaattggttgtattaagtattatattatattacatacatacttacactttcactaccaaagaaaacacacaacctgaaaatattgaatcacaaattcttttgaaaaatgtagaataaaacatgagcacgaaagtcaaaccaggaaaaccaacaaaaaaaaaaaacattacaaaaatctatgaaagttaaatataagctagctgttgcctcgaaaccgctttttaatctacactagtcggcataagtattttgacaaaataagcgcagcacatttgtcagtgtgtaagtaatataaacttaaaaattaacaagcaaaattttttttattgaaacttaaaaagatataaacaacttaataaaatatgatgtttttttctttcgcagtcaatatatgatatcatttgaatatatagaaaatccaatcagcccctttttttcagtttctaataaaattcaagaataaaataaattgtaaaatttgcgcctttattaacattatcacagcgggcattattcatttatgtgcctttttagttactgaacactggaatgcgaacatgaagcatctgaaaaatgggaagaaagaacagaaattaaagatttgaatcctccaaacttggtgcactgcatcaccttggtggtcttatcgaacagagcttgtgcacgatcctgctgcagacggtagttgacgaatttgttgaacacatagccatacttgcgggtttccaccacgatacgatcctcgccgacaaggagactgaactcctgcgaagaaacctgcggattgatgtggtgacataaataaacttctttttctctgtgcatccataataatcttacgtagttgggcaagtagatctcagcatggatttcgtcaacggactcgtcacgaactcgaccacgaagtttgtactgtatatccagaaaaccgccgcctgcagactgtcgactcttccttatggcagcagcatccttctcgtcgatctcctgcaccagttttccggaattttccggtgccacagccccaccatcccggctgttaagagcagcaggaatgccggacgtagactgggcccttttcatatcttcgttgcgcacacgatgagtgaccaaagtgccgatgaacttgcgattgttcagaataatggtcttttccatgttgagctgcacattatacttttcgctcatcgcctcaatcacaatttgcataaagaagttcttgaagagctgcgacttctggatctttaccagaaactttgggttgatagcgatgtcgcagacatcgacggtcttatcggaacgatccttcgtgaatctgggatctgagatgctcatgggcactcgataggagccaggagtagtggattccagtatgccaatcagttcctcctcggtgacatcctgcggtgctggaacttccgctgcctggcacacgttaatgaagaacttttcatcactgtttgtcttgaagcttttcacgcagattcctaatggggaaacagaaaagagttgagtattattaaaatggcttgttatctggaaagtttctggcagctaaaaaaaaaaaatagaaagttgaggcgattcaatcgtatgggccattgcaaaagcaaacccctttgttttattttggctttgattccatatacaatcttatacaatatgcttcgcattcaattatgctttcaagccgggatagatttttttatgatccggccacgcgatctcgctgattgcctataaataaagataaggttcgttgtcagttgaagatagtagaacttgggtttccttaaggttttcagatacttttagctttgggaaatgttgttttctcaccttaagctcatcgaaagcctgcttggctaaccagtgaaagacaggacttttccattctctcgctatggattgaatttccttatcgcttttgaaattattagctgaatgggttttaagagtgccatggtacctttcccaaaggtagaccatgctgcggatcttgtagagccacaagtgatttggaacgccacgtatcaagtcctgcaactgttccaattgctcatcagacaaactgttgaggaacttttcgttcatcagtaggaaaatcgaacgcatattgcggtagtggctaaaggtgttcttctccagacccatgtggcccgatttaaaaatctgattgatcgtctttccggtcatcggtttccggccgatgggggcaaagcggtggcgcagattgcgatcgccgaacttctctagctttttgttaatctcgctgccgcaccacttgaaatcccgccaccaggcgtgccagtccttgtagttattggttctatagatttttgtccattccttgcgcaactgggtgcgcaccttcttcttcgaactgcgtcctttccacttggacagaacaccggatcggttcgagtccagagattcggcatcggacatttcctcgtcgtccccatcaccttcgtcttcatcaacatggccatcgtcgatggcatatatgttggtgttgtagttgggcgtttgctcgaagaaggtcaccgcgtatgactgctcctccggctgtggcagcttcttggtattgctgttgatatagggcagactaatgccgcctataatgaagctgcgatctgttcgatccgctctctggcgttttggcccggctttggtagccccccctaactttggagtagtctcagcttttctttttatccctgcaaaattgaacatgtattgttttttgggtatacccgataatttcggaatgcaaaccaaacaaaagcatatttatgactagcttcttgaagtatgaaatgcagttgataacttcgaatcgggtttgaaaccaagaaaatgtgtttcaaaactggtttatcaaaaattcttgtagctagagtacgatccttaatttaaggcatttgaaaaaaaagggatatatttttaacgggtttgcattccaaatgtggctttaaaatcatttatacactttaaaaccaatacaaaagctctataagctagcttgtaattggtttgtatcaaatttttaatttattaagaattcaaaagtttatcccttaccagcgagcggtttcgccatggccgcgttgatcttggttgcctgtagtttcggtttgattaccgactgaccaggtttggatgcaccaggattggtgttcataggtttgtttggttgcggtgcacgattgtcttgtggaaccgccgacttcttgaccattttgtttggaatatcaggatttagatttcgagtttgagatgtggttgacttggatctgggttgattaggagtcccagcattgatgcgatctggccccttgccaggatttaaatttttattgattctacgatttaaattagttccatcttgtatgggacccccagaatgggccacacttggagcagcttcatcagcatttggtaggcggcttcgtctgttttgattgggacccatgggtctgttagagctcgtatcgcggcaacgatttccagaacccgatccacggagaatagtgtttggatagttcggtggaaaattagggttatttgagccttggaatgtgtcatcctcccttcggggaaagcgtacggtgtcaccgccacgcgaatagttgtttcgctgattgaagttgtcgtttaagttgcgtcgatcgagttctggatcaaactggcgcctaatgccctcaaagttacgatcgttgcgattgcgtccatatgaattacgatcatcgatgttatgatcttggatgtagtgttgattaccccttgagtggtaaccctcatactgatcatcattcataagtgtatcatttgtgtcatcgatgaaatcggcatcatcttcaagaaattcgcgttcatcgggtatatagtcgtctatatcatggtgttctagatctagatcctcttcttcgtcagtccagtcggtgcgacgtagtattatttgattgtcattcacaatacgctgataattgtgcctcttttggggtccacggtttccaacctggtcagcgttcacattacgtggatatggtggttgttttggatgcgcttcaggcgaacggaatcgatctcttggcagctgaatgccgtcatcgcttatagcattacgatccaagttgggttgctgattcgaaacgaagttctgattaccaggcctgcgattgttgtttacttgggaatgatcattgtttggcatctgaacacgatagttgatctggtgatttggtccttgaaaacgttggttattaaagtttgggttctcgtcaaaagttttgcgattgaattgtgcattcgcattacgattgttatggttatgtccttgagggaatgcttggttgttaacattacgagtattgcgattgaattcatcattgactgcattacgattgtgattaaattcctgctcgttatcatttcggatattacgattgaattcatgcggataggcattacgattattgcgattgaaatcctgtggattttgatttctattgggacgattgaaatcctgggggttttgatttctattagatcgattgaaatcctgtggattttgatttctattggaacgattgaaatcctgtggattttggtttctattgggacgattgaaatcctgtggattttgatttctattgggacgattgaaatcctgtggattgggacgtgaaccctcatttcggttgaaattgcgattattttgattgaattcacttctgtccatatttcgattatttcgattaaagtcctgcgcatttgcataacgattgcgattgaactcagcaggattcatgccaggattattgcgatttacgggtccacaattcctattgattggctcccgttgttccacaactccgcgattgttgtttgggaaattttcctctctctgacgattcctagaacgcgatcgatccttattagccggtgagttattcatcctggcgctgtgccaatcaatgttccgcggcggcgacggagtgcgtggccgcgactcgacgtcgtcgtggctagccaccgcttcctcgatggcttggagcacctccttgtccaccacatcctggtgactgtcgcccagctcgacgctgaggcggaacctctggcgctggaaatggcgcaggttgaacttgggcacattgaaggtgcgctgcgccaaggcgttggccaacacccgactggcgcccaggtcacggagaaattggcgccgattgtccagctcgctgttggctattttcatggtaccacatatgaaatttaaaatttaaaaaagcagacacgttttaggttagagctatgtggtcacgtttagcaaaccaattccaatctaatctactcatgacgacaatgctcactgaaaatatgcatacaaattttagtttaaatctataatagatttgctttgttttgcatttcttcccaccctttaattgctttaacaaattgtacaacacaaaaaaaaatgataatttcaattgcattactacttgattgccttttcagtcgttatcaaaatgctgactaagtttgatgtttgattttttgtcaatctataaacactaagcactgccactatctcatattttaaattaaacatctaaattgattagattagaaattctatcacagaattctattctattggtgtgtactttcgaaatgcatagcagcaaatcctgtagttgtagttgttaagaaactactcagtaattatacatttatggcatcaaacacacaataaactgataatcaataggtatggtcatgcttataccaaaatcgtgaagaattcgcaaccaaacacccattaaatgctcttaattgtatgactactgttgatatcgttatcatttcggcccacttttgttgctcttgcgacaacaaaacgtttaagagtcgcgtcgtgtgtccatttcggttcagaataatttcaccagagcaggaaaatatgtttaaatcggcacttaaaatcaggaaagagagtcggtatctttcagctgggttttattctggacaaacttggcattattggagagtcgggtgctttgatggcagggggttttaattgatcgggcggccaccaggcagtcagcgccacaaaaagagccaagttaaacgctctccgaggtggcgctattatctcatttttgttgttttttttttgagcacggaaagcgcggaaaacaaataagtttgttcgcagcgctcgcttcgaattcagtttgcctttttgctcgtaacgagccggttgtccgtcgattttgaagtgctccgccgacgctgccctccatccaaatccaaatagcgatccgacctcaaccgctacggctcgttttgtttcgattcgattctattcactccgatcccccacaaccgattcgtttgaatcgcagcgagtttttttctacgtagaggtaattataagtgacatttcagtcgcatcgataccgccaacaacaaccaccgccgtccatttttgatacccttgttgatatgtggttgttggattccgccaaagcggaacaagtgtgccagtgtgcgttcgtatctatgtgttgtgtatctatctctgtgtgtccacattctttgcctgaaattgtgaaatttccgaaaggctccagaatatcccgcgcaaacatttctcagcaaacgaaagaaatacgaaaaaaaaaaaaaagaactgacgagaaatcgatgattcacattcaaagtagtttgatatggttaagtgttttgtcatgctcgcagctcgattatttaattgataacagaaaaagtgtaaaaattgtggtgcgcaaggttgtcgtactgctgttcgtacgaacaaatttgaagttaattgcctcgtgggttccactgacgtcacaggccttgaaagatggcctacgatctgtgggttcgacagcttctcgcccagtccgatggtaatcaagctccaaggactcagaatcagcagcaagtggagcaaacaagtgtgcgattaggagcaatatagggtttacgatgtgcaattcataactggagcaacgacaaacacaatggaagagtctagtagggggacagcaacaggcagcacacacgataaggttcagctgtggggtccccgataaggagctgctcgtataatcattctcgctatgtggaagttgttttctccagagtttgcacacttggctaaatgcagccagtcagccttatctcagctttttccctattaataaaagtcatcaagtgtcgagtgtcgttgatattctgtaaataaatcactcttctttggcggtgtaaacaatttgtgccggctggcatgatctgatccagaacaaacaaaccgtgtgtgtcagtcaggttgtgaagagagtggcgttttttgctgagaaaattgtcaggttttctccttgattttatggtgcagccaagagatctccatgccattttgcttagcatctcatcgtgagtcgacgtttttgtttttaaagagaaatttcacttgggtgtaaaggcaaaacacacacatttcgtacaattgaaatattaggttttgtaagggggttttttctgccgattgttttgtgcttatataatcgctgcgggaacaggtttcgccgttaattatatcgaactgaaaatactcgtttcagatgtgttagaattttatctaaagtcaaatggcttaaaacacatgcgtgtacggggcaaacaagtttttggcgcccataaaatgtgactagcccaataccttttatgagctccgttcaagattcgcttaaagtttctcattccttctttttagttgtgtgtatctctgtgtaaattagttcttcttcgaggcggggaaacacgttttagtcgctcatttgtcattggcattgtacaatctcgctggactataaactatcgtttcaagtgggcgcgattagaccttcctccaagtggccctggacatgtaaacacttaactgccgtagcgcacaataacgacggctagattacaaaacttcgtactaactacccgctcaaccctctttttgtttcaatacgatagatagtttgtcaaataatagtgtgcataggaattaaactgatttgtttggataattgattttttgcctttgttttgacgaattatccaatagttaagtgcaaaatactaattaataaccattaaaagattggaaatttgaatatacaaaaagtgtgcacaaactatagttaacttacggaattaattaaaaaatttagagcaattgattcaattttaaatacaagtaattcggatatgttttcaatattcgtaattggtttttaaagtcttgtcgaagattcgttaggatgggtttttctgtcctatgacgtgttccattcgcgtgcgtttgttcgccttatcgcgggttcactgtaccaccccgagcgattacgcgcaatcgacgtcgacgtgagatgtttatcaggttgacatggttccgcgctcgcagagattactgtgcacacacaagtgctaagtagaccataaacccagagtcatgcctactactagctggctgtaatctccggttagattctccgcgccaccggcagcgattgctgtgccatgtgaagctccggctgttgcaatggacgccacttacctgcggtcggctggacaatcagcgagtctcgcggcggcggtttctgctgcgggccgctgccctccggatcggcgcctccaaagtactggttaatattgtcctcaaactcgttctgcatttagaaaatgaaaaaaaaaaaaaacaagttcatctttagtggcgcagatagttcctcacatcgaatttctcaagttttgcttacccgcacaaagcgcaggttctggtcgcgaaaattgtcgttgccctcaatgaaattggaacgacgcgacattttgctgcacgatttcaattgccagttacgagttaatccaatgcaaatgctatttttgcgctgagcgacgagcgaaaaacgcaaattttatttgccagaatggagctgtcaactcgattgaaatgaaaactaatgtgacagtgtgaacgccggtggaaaaacatttaatgccatgcgataggctaaaaatactagataggcgttttccctgtacagggtgctcattaataaaaagtaaatgacaagaattttcgagaataattgctatgaatttctatatgaaactttaaaagcttaatccaaatttaagaaattcatttgtatttttgctgttgcaaatgcaattgatttctacttgcttctactaagttttccaagcaaatgtattttaataatttatgtacaaaaattacaagtttcacttaaatcaatataaacaattaaaataacacgcagtgcagaattatacactcattttccatccgacacccactgtgcccgcgaaataccagaaaaatactagcaatcaacttcccactgtcacgattagcggttgttgtagttgtgcggcttgggaaggaacagctgttggcccgaaaatatagatccgtttatttccttgccgctttacagttaccacatcgcccgatatagcatacgcatatagcccaattgcacgtggaggaggttgccgagcagtcgagtaaccatggcggatgacactagttcgccgatggacagattctgcggatccacgttctgggtgagtgcatcagcagtggtgttcaatccgaatgcatagtgtaaatgtatggtttccgtgtgtccaacgaacagaacgcaacagagacatggtataccaacgatccggactttacgccctgctttgagcaaacggcgctggtctggacaccctgcgccttctactgggcgttcgtgatctttgacttttactacctgaaggcgagtttggacaggaatataccgtggaacaagctgaacgtgagcaaagctctggtgaatctgggtctgctggtaatcactgccctggacctaattatggcgctggtcaagaagggcggcgactctgagctgccgctctacgacctggatg

SEQ ID NO: 12206 - DNA, 1122 bp, DROSOPHILA
agttgacagctccattctggcaaataaaatttgcgtttttcgctcgtcgctcagcgcaaaaatagcatttgcattggattaactcgtaactggcaattgaaatcgtgcagcaaaatgtcgcgtcgttccaatttcattgagggcaacgacaattttcgcgaccagaacctgcgctttgtgcggaacgagtttgaggacaatattaaccagtactttggaggcgccgatccggagggcagcggcccgcagcagaaaccgccgccgcgagactcgctgattgtccagccgaccgcaggaatctgcgtgaaaagcttcaagacaaacagtgatgaaaagttcttcattaacgtgtgccaggcagcggaagttccagcaccgcaggatgtcaccgaggaggaactgattggcatactggaatccactactcctggctcctatcgagtgcccatgagcatctcagatcccagattcacgaaggatcgttccgataagaccgtcgatgtctgcgacatcgctatcaacccaaagtttctggtaaagatccagaagtcgcagctcttcaagaacttctttatgcaaattgtgattgaggcgatgagcgaaaagtataatgtgcagctcaacatggaaaagaccattattctgaacaatcgcaagttcatcggcactttggtcactcatcgtgtgcgcaacgaagatatgaaaagggcccagtctacgtccggcattcctgctgctcttaacagccgggatggtggggctgtggcaccggaaaattccggaaaactggtgcaggagatcgacgagaaggatgctgctgccataaggaagagtcgacagtctgcaggcggcggttttctggatatacagtacaaacttcgtggtcgagttcgtgacgagtccgttgacgaaatccatgctgagatctacttgcccaactacgtttcttcgcaggagttcagtctccttgtcggcgaggatcgtatcgtggtggaaacccgcaagtatggctatgtgttcaacaaattcgtcaactaccgtctgcagcaggatcgtgcacaagctctgttcgataagaccaccaagatgcttcatgttcgcattccagtgttcagtaactaa

SEQ ID NO: 12207 - protein, 335 aa, DROSOPHILA
MSRRSNFIEGNDNFRDQNLRFVRNEFEDNINQYFGGADPEGSGPQQKPPPRDSLIVQPTAGICVKSFKTNSDEKFFINVCQAAEVPAPQDVTEEELIGILESTTPGSYRVPMSISDPRFTKDRSDKTVDVCDIAINPKFLVKIQKSQLFKNFFMQIVIEAMSEKYNVQLNMEKTIILNNRKFIGTLVTHRVRNEDMKRAQSTSGIPAALNSRDGGAVAPENSGKLVQEIDEKDAAAIRKSRQSAGGGFLDIQYKLRGRVRDESVDEIHAEIYLPNYVSSQEFSLLVGEDRIVVETRKYGYVFNKFVNYRLQQDRAQALFDKTTKMLHVRIPVFSN

SEQ ID NO: 12208 - DNA, 2459 bp, DROSOPHILA
tacgcttaaatcaaaattgtatgattgttaagtaatccttttacaattttaattgttttcgcatgctaagcctgaatgaaacttttcccttcttattctgtatataaaaacacagcatcagttttattcgaaacttctgcacaaaatattcttgggaagtgtgtgtgtgtgtgtgtgtgtgtgtatgcactaagtgtttactgtttgtcgagtagttagtttcaaagcaaatatttgagaggcttctgtttgccgttcctgcagtagcattacgtatacgccacgtggcacgcgcaaccttaagcacccttacatcaggccagcgttttcattgacaacacatccactggcgtaaattgcacggttggttactcgcatttgattatcgatgctgtgcaatactctggagacagcgacgtcagctcccagcccagtttatgtggcaactagctgaagttcaaacaatcgatgccattggcagcacgaatttctctatttttccgtcacaaaatccgtgggtcttcccttatttgcagactgttttgaaaccaaggcttttgaaaatgtaacgcttttgtatcacttatttttgagaaggatgagagaagccaatgttcacaaacagacagctcgcagtgcacgcaatgaggtactggaaatcgttaaaaaaaattcttattttaaatgtgaaaaatttgattttcaggactgaatatttcgaccaaaagcaattataacattcttcacgcttttttcgcagcataaaataactcggatgtttcatgtttctccacgtgtacttcgtggtaacaaaaactgaatataaaacgctcatttttccattttttgcctccatcagatgatgccctctgcactcgaaaccatcacattcatcgaatttgcagagagactgggttgaacgattgtcaatgcttttagctaaatgatgttgtacatagccaagtgtaagtatgaaatggattgatcgatatgtgcgcaattttaattcaatattcagactttattgtttaagcctttaatagggatccacgttgcagtgctgacatctgccattgacgatggtattaccacccctccggtaaatggtgccacctccaccgccactaccgtcatttccacgggaaatgaccacattaccatcgccaggggatgaggagaagctgcggtactgctggccatccaggtagacgggttcaccattcggattgggaccttttcgagtgcatattattattcattaagttgtccaattgcctagctggcaaaacaatcgcaacttacaagtcagacagacgccattcaccaccactgtgctgggatgagctggaaataatttcagtgtgtatcaattagcgtcagcagcaatcccgtccagcttaccgccgatcagagtcggaattaaagccaacgggagcagcacacacgtcaggtacttcatattaaagccgatagatagatgaccgtatcgactctcacgctacttatatagtccggcacttgattcgatccgaatcaaaatcgatttgcataagcctaagcgtttggagctttcgatttgtatttgaacaatatatttaaattaatttcacactagaacactatcaaatcgcaattcgatggggttttccgcacacggttttgtggcatcaggtcgacgtagttgatttccttgaacttcttcaaagaaacttatgacagtcacgccccgaaaagtcggtttacaattattcccagacgtaaacatgaatggcaagcgattccagagaatcgcacaccattaaattttatccatacatctaaggaaaactggttacagaaccgaaagtcgtgactcgtgagtgaaatgtagaagctttagttctaaagctaacaatttatatttaaataataagatacttaatacaatgaaaaagcaaaaaatatatttgaaaacaaatacatttcattaaaaataaatctttgcaactttgtagaaatgaaaagtgtctgacttattatagattttacagattttgtgtatttgttatgttaaaaaggtaacgtagagtatcttgaatgcaatacgactgaccaactgatgcgctacagattgtttttgaaacccatccgcgggcaattccctgagattaatacttaatacatacgtagtggtttgtttgcacagcaatagttctttgcagcgataaggtctgtttgggtttgaattcgaattcaaattcagtatcggaatcggaatcgatgagtgcatcgtatataagctgctgttgcggttcgtacctggtccagaccagttcgacgttctaatagaccagccacaatgagaaccttgacggcatttgcgattatcgctttttttgcactggctctaacggaggcggctgtttacatcggtggcggttgctacgactgtaagtcaatgcctattaatttgggccatt

SEQ ID NO: 12209 - DNA, 333 bp, DROSOPHILA
atgaagtacctgacgtgtgtgctgctcccgttggctttaattccgactctgatcggcgctcatcccagcacagtggtggtgaatggcgtctgtctgacttgtcccaatccgaatggtgaacccgtctacctggatggccagcagtaccgcagcttctcctcatcccctggcgatggtaatgtggtcatttcccgtggaaatgacggtagtggcggtggaggtggcaccatttaccggaggggtggtaataccatcgtcaatggcagatgtcagcactgcaacgtggatccctattaaaggcttaaacaataaagtctgaatattgaattaaaa

SEQ ID NO: 12210 - protein, 98 aa, DROSOPHILA
MKYLTCVLLPLALIPTLIGAHPSTVVVNGVCLTCPNPNGEPVYLDGQQYRSFSSSPGDGNVVISRGNDGSGGGGGTIYRRGGNTIVNGRCQHCNVDPY

SEQ ID NO: 12211 - DNA, 6891 bp, DROSOPHILA
tgggcgtcactgtccacacgggcacagcggatggcggccactactacagctttataaaggagcggacgaagactagttaccatacgcacgagcggtggtttcttttcaacgatgccgaagtgaagcctttcgatccctcacagatagcggcggagtgctttggcggcgagatgacggtaagtagtttgttacattggttttcgtgcacccaacatttatgttttatatctgcagagcaaaacctacgactcagtgacggagaaatatctggactttagtttcgagaagaccaactctgcctacatgctgttctacgagcgccgactgccagagcatctgcagcgccggcattccgagctgctggttacacccacgcccagtcccacagtggaagagaagtccgaggcggaggagcccactaaaatggagacaagctctagcgaaatcaaggcagatgtggatgtggaagtggaagttgaggagaaggacaaggagaagcctgcgcagactgacacagaatctaaggaaacgcctgcaaaagaggagatcgcggatgacaaatcgaagcaggatgagcctgaggaaaagaaaatcgaaaagcaatccagagagggcgaagagaaatcggaaacggacgaaaagcccacggagatgacgaccgtgagcactgaggaggaaaagcagccaacagccaattgtgataatcaccagcaaaacaacaatagcaacagcaaagccagcaacgatcagcaaccatccacgtcgaaggctgcccagaagctacaactatttcgtccattgttgaacaaggagctcgaggattggatttggcaggacaatcgacagttcctgcaggatcgcaacattttcgagcacacatatttcaagtgagattcgttatactttatcgcatttcattttaccacaaaccatgtttttttttcacagctttatgtggcagatatgtgggcacataccccaatcattaatatcagagacggacgtcacctgcatggcagccaagttgtctgtgtcctttttcattgagacttttattcatgctaaggaaaaggtgagttaatcccctcagcaaagctgtaggtgtgtgttttaatcatacgtctttgtagcccactatggtgccctgggtggagctgctgaccaagcagttcaatgccagccaagaggcctgcgagtggtttctgtcgcacatgtcgcaggagccctactggccggtccaggtgctaatccagtgtcccaaccaaatggtgcgtcaaatgtttcagcgtttggtaatccatgtcatccagcaactacggtaaatttaataaattacattaagattcgttatgtttattaaacaataatcacctttccagtgcctcacatgctcatctgtatctggaagtggagacagacgaggatgacaaggagttaataggccaagcctcttgcgtcacccgtttcattggttcgctcatctcgctcctggagcacggtgcccgagcgaacctgcggcacttgtccgagtactttggactgttgtgcgagttctcacggatgggagatgaggaagccatgtacttgctgcgcatcggtgtactcaagagcctggtcgacttctatctgggtcacaagcaaacagacagcgtaagttgatcaaaccattttgcgcataccatccttgttttgatgtttcattattccatcgagcagatagacataagctctgacaacgaagacaactcctctgaagaggcgctgtccgtggagaagatgcgtccggcctcgctggacaagatgattgctctgtgcgccagcctagtggaaagatcaagaggagccgacttccggctgcgactctcgcccaaagacttctctgcaatcgccggcggcaaggttatactcaaaaagctggaaagcttttaatcaatcaaacaaccattcaagcatgccatatccaataccaatcacctaaccaatccatccagcattaacccgtgacaaaatttccaaaaaaacaaaaaatcaagataaaaaattacatttaaattccatttttaattgtttttacgtgtgttcaaagtttcctacatttttgtcaaattttgcttatatttcgtagggttttccatttttgtaccaacaaataaaggacggcattaatccgcaccagacaaagcatttaatacacgcgctttgtcgctgggatgagcgcctggccacgcagatcattggcatgctcttcgcgtcggtaaccaagcacacggagctgtgcgcgccattcttcaagctgctaactctgctcaccgagacgcagggcggtccagtgggcctgccttgtttcacccagttgatcctgccacgaatgtgggacgccgccgagtactgtccacagtcggtgctcgactggctctcgctgcaggccaccaagaacaagatcgcccacgcctggatacttcaatcggccgagaagtggctcgagcaattcctgctggcccacgataacactcgtgttcggaacggtatgatatcggcgctaacctcttgggagatcctgttaaatggtcgggttttattacagctgccgcctttctgctggtggcactggtaccctcccagccattccgggccaacttccgcgcccactcgcaacacaagctgctggccctcaatccgcacagttatcggtaaattgtttggaatattgaatgatctcatatgcgatatattaaatacctatgttcccgcagcgacataaatagcgatgcccaggcggtgctgcaccaggtgatcacgctgctcctgcgattgctgcgtccagcgcgcgtctatgcggatatcggagcccatggcacgaccaagctgaccgcgtactttaatctgctcagctattgtatggtttcaaagactgaaaaactaatggcaagtttggcagcagcacttcctccttcttcccgatatgttcagcactaaattgttccactttgttgccacttacagataggttcgtacatgcgctccctgtgggagctgttccatccacgcctctcggagcccagtgttccggcccatcacaataagcacgcactattaaccttctggcaccactcactggtggactgtccggagaatgctgcccaggtggccaactgcccggagattacgcgcaacattgcatttaactatatactgtaagaatatcaatacttacgacttgtacttaacatgattagcccgcctcttaactcctagggccgatcatgatgacgcggagatagtcacctacaaccgttccatgctgcccgcctattatggactacttcgtctgtgctgcgagcagagccgtgcactcacacgccaattgtcccagcatcagaatcttcagtgggcatttaaaaacatcacaccgcatcccacgcagtacgcggccgccgtggacgagcttttcaagttgatggctctgttcgccacccgtcatccggatgctagtgaacaggaaaagcttgatgtgacccagtttaggagggctgtgattgtgtcctacaccagtagtctggatgcacgtgtctcttggtccacgctgatcagtgctcttaagatactcggtaagtggtttacttaacttagctctaggaatatgtccaactctgattcattccatttcgtctacagtggacaatgaggaggaccgcacgatggtgatcttcaacggcggcattgagatgtgtttcgaggcgctgcacacgctacattccatgcaccacgaggccaccgcctgccacgtggccggagacctattcgatctcttgggcgagatgctactcctcctagccactcttcgaacccgcacagacagtcctgctcaaaagaagcagcagcaacaacagcagcagctggagcaacagttgcagttgcagcagcaacagatgctgcagaaacaacagcagcagtcgcaaagccaaacgcaaacaccgcagtcgccgcagcaaaaggaaaagcagctgcagcaacaaatgcagcagcatctgcagctgcaacagttgcagcaaatgcagttccagcagcaacacttcctgcgccagcaacatcaacactcggcgctggcaaaggcactgccggatgcagtgaagcgactggctacgctactcaacaccttcaattcgccagagatcagtcgcatggccttggaggtgctcaaggagctggtgcgcaatcccagcctggaaaccattagtattctggcgcccattcttatcaactgtcatctgtccgtggcgaatgctcccaatgcgatcggtcctctgggaccgtactttccgcgtcgcggtgcgaagcatacgccttggccattgggagccaagaactcaccccgtccaccgcggcccatggtacagatgtgcatcgctctggctgagctgacaccacgcggtctcgatgccgattacgacgttcaggtggagtccttttaccgaccctaccatgactttatcgatgtcatgatgcgcatgtgcgtcaacacgggcactctgaacgacacgctagtcaagctgcaatgcttggtggccatcgagtccacgccgctgcacttcacctatttccccaaattctgggtgggcatacacaacaatgctctgacgcacaagtgagtatcagatgatctttctaaatataagagatatttaaactatactctccacgtcttcattaaagatacgttgagctgctggtgaaaaatcaactgttggtagagtaccttcacaatgtccttagggacgagcgaagcatgttgaaggatgcctgcgttcgtgaatttctggagctctattatcacaaggttgccgcccagctgccagtggcccgtatgatctacacaatcaactatggtatgcactccaaggacgacattgatgagctgtgtggcgatctgttcgccatccgaatcattgcccaggccactggagtgccggcctcagtgcgcaaggagttgcgaggatcgctgagggcgcttcagaacaagagcgagcggtttaggaaggaatcggagaggggtatgttttgcattaccattaccattttatttctaagaataatggaactacttgagtatattgaaattgatagagctatcatcatctccctatttgccagatccatttccgaacaagaagcagaaacgtgactcgcaaaagatcaaggaaaaggagcaccctcagccggagagcgagaaagagacctcaacggagaacgacaaaccatcagatgtttccatggaatccagcggtaacgcggagcaagcaacggacagcacaaaaccaccaactcctgcaggcagcgacgatgagcagatggacaaaacttcagttccctcgtccgatgacgagacagagttggaggacgagctgcagccgacgcccaagcgcaacaagaaggcttcgaataagaagaccgcccaggatcgtgtcaacgaggagcgcgagaagcgacttatcacgctgatcaccatggaatcatatatccagagcatttttgccatccttaagagagatgccagtgtccccagttcgggagcgactaaggagcccagtgaggaaccgtgtggcgaggcatccacttcggcggctgccgctgtaaagttatctcgtcccaaaggagcctgtactccgccggagccaattaccgacgtaaacgatacgcgttgcaacatagatactgagacagaggcggaggcggatgagcaatctccaaagacgagccagacaaatggtagccaacagaacgaatccccgccagcggcgaccagtgcagacactgcacccgcgaatccttcaccagctcccgcggccgccgttgcgtccacatcccaggcggcaagtccaacacagatttagttgtcattcaacgatttgctcagcattttgtttttcggcaagccattggactgataatgggcgccggcggctgaccacggctgagctcctaacctgtaagaattttgtggccaaaggtccattgttaggtaacacataagcaacccaaggttggtgctaatggttgggtttgggtgcgtacccgtgcacacaaacacaaaaaataagaatcagtctaatggcaaatcagaacgccacaagctatatagctcccattccgatgttcgttttcgatgaagtggaaagtgctgggaattcggctgccacgaaaatcggaaactggttttggggttaatagattaactaagtatcttattaacaaatagtaatgtaacacacattcagtcccgacacgcgaacagcccttacatatattcaatatatagatataaatgtaactaacttaagactacccagcacgcaatgtttcccacacagagaagcgaaacccgtaagaaatcccctttcaaatggatggttaaagtaaagttcccaatttgttatgccaaaaaaaaaaaaaaaagaaagttaagcagttgaatcagagcagcattaggactacaaattaaaagtttgaacgagagcggttgaagaagatcaatgaaacggcttacgagacgctaatatctatatatgttgtatccattaagtatcatttttaaaaacgatgctacgaacatttgctaaccaattttcctcgccttttcccacgcccctaagcaccataatggatacgttagaaatgaacagatattataattatagaacctaacgaaacatttttaatattggatgatgtgtgttagaaaaagagtatgtcataatcattttcaatgtaaatcgcataacgcaaaccgatcgaacgaaaagtttttagtttacatccgataatgataaattgtaatgtttagcacgtaaggagtatagagagattcgttgtcccacgtgaaacacaaaagga

SEQ ID NO: 12212 - DNA, 3972 bp, DROSOPHILA
gacgtcacctgcatggcagccaagttgtctgtgtcctttttcattgagacttttattcatgctaaggaaaagcccactatggtgccctgggtggagctgctgaccaagcagttcaatgccagccaagaggcctgcgagtggtttctgtcgcacatgtcgcaggagccctactggccggtccaggtgctaatccagtgtcccaaccaaatggtgcgtcaaatgtttcagcgtttggtaatccatgtcatccagcaactacgtgcctcacatgctcatctgtatctggaagtggagacagacgaggatgacaaggagttaataggccaagcctcttgcgtcacccgtttcattggttcgctcatctcgctcctggagcacggtgcccgagcgaacctgcggcacttgtccgagtactttggactgttgtgcgagttctcacggatgggagatgaggaagccatgtacttgctgcgcatcggtgtactcaagagcctggtcgacttctatctgggtcacaagcaaacagacagcatagacataagctctgacaacgaagacaactcctctgaagaggcgctgtccgtggagaagatgcgtccggcctcgctggacaagatgattgctctgtgcgccagcctagtggaaagatcaagaggagccgacttccggctgcgactctcgcccaaagacttctctgcaatcgccggcggcaagggttttccatttttgtaccaacaaataaaggacggcattaatccgcaccagacaaagcatttaatacacgcgctttgtcgctgggatgagcgcctggccacgcagatcattggcatgctcttcgcgtcggtaaccaagcacacggagctgtgcgcgccattcttcaagctgctaactctgctcaccgagacgcagggcggtccagtgggcctgccttgtttcacccagttgatcctgccacgaatgtgggacgccgccgagtactgtccacagtcggtgctcgactggctctcgctgcaggccaccaagaacaagatcgcccacgcctggatacttcaatcggccgagaagtggctcgagcaattcctgctggcccacgataacactcgtgttcggaacgctgccgcctttctgctggtggcactggtaccctcccagccattccgggccaacttccgcgcccactcgcaacacaagctgctggccctcaatcccgacataaatagcgatgcccaggcggtgctgcaccaggtgatcacgctgctcctgcgattgctgcgtccagcgcgcgtctatgcggatatcggagcccatggcacgaccaagctgaccgcgtactttaatctgctcagctattgtatggtttcaaagactgaaaaactaatggcaagttcgtacatgcgctccctgtgggagctgttccatccacgcctctcggagcccagtgttccggcccatcacaataagcacgcactattaaccttctggcaccactcactggtggactgtccggagaatgctgcccaggtggccaactgcccggagattacgcgcaacattgcatttaactatatactggccgatcatgatgacgcggagatagtcacctacaaccgttccatgctgcccgcctattatggactacttcgtctgtgctgcgagcagagccgtgcactcacacgccaattgtcccagcatcagaatcttcagtgggcatttaaaaacatcacaccgcatcccacgcagtacgcggccgccgtggacgagcttttcaagttgatggctctgttcgccacccgtcatccggatgctagtgaacaggaaaagcttgatgtgacccagtttaggagggctgtgattgtgtcctacaccagtagtctggatgcacgtgtctcttggtccacgctgatcagtgctcttaagatactcgtggacaatgaggaggaccgcacgatggtgatcttcaacggcggcattgagatgtgtttcgaggcgctgcacacgctacattccatgcaccacgaggccaccgcctgccacgtggccggagacctattcgatctcttgggcgagatgctactcctcctagccactcttcgaacccgcacagacagtcctgctcaaaagaagcagcagcaacaacagcagcagctggagcaacagttgcagttgcagcagcaacagatgctgcagaaacaacagcagcagtcgcaaagccaaacgcaaacaccgcagtcgccgcagcaaaaggaaaagcagctgcagcaacaaatgcagcagcatctgcagctgcaacagttgcagcaaatgcagttccagcagcaacacttcctgcgccagcaacatcaacactcggcgctggcaaaggcactgccggatgcagtgaagcgactggctacgctactcaacaccttcaattcgccagagatcagtcgcatggccttggaggtgctcaaggagctggtgcgcaatcccagcctggaaaccattagtattctggcgcccattcttatcaactgtcatctgtccgtggcgaatgctcccaatgcgatcggtcctctgggaccgtactttccgcgtcgcggtgcgaagcatacgccttggccattgggagccaagaactcaccccgtccaccgcggcccatggtacagatgtgcatcgctctggctgagctgacaccacgcggtctcgatgccgattacgacgttcaggtggagtccttttaccgaccctaccatgactttatcgatgtcatgatgcgcatgtgcgtcaacacgggcactctgaacgacacgctagtcaagctgcaatgcttggtggccatcgagtccacgccgctgcacttcacctatttccccaaattctgggtgggcatacacaacaatgctctgacgcacaaatacgttgagctgctggtgaaaaatcaactgttggtagagtaccttcacaatgtccttagggacgagcgaagcatgttgaaggatgcctgcgttcgtgaatttctggagctctattatcacaaggttgccgcccagctgccagtggcccgtatgatctacacaatcaactatggtatgcactccaaggacgacattgatgagctgtgtggcgatctgttcgccatccgaatcattgcccaggccactggagtgccggcctcagtgcgcaaggagttgcgaggatcgctgagggcgcttcagaacaagagcgagcggtttaggaaggaatcggagagggatccatttccgaacaagaagcagaaacgtgactcgcaaaagatcaaggaaaaggagcaccctcagccggagagcgagaaagagacctcaacggagaacgacaaaccatcagatgtttccatggaatccagcggtaacgcggagcaagcaacggacagcacaaaaccaccaactcctgcaggcagcgacgatgagcagatggacaaaacttcagttccctcgtccgatgacgagacagagttggaggacgagctgcagccgacgcccaagcgcaacaagaaggcttcgaataagaagaccgcccaggatcgtgtcaacgaggagcgcgagaagcgacttatcacgctgatcaccatggaatcatatatccagagcatttttgccatccttaagagagatgccagtgtccccagttcgggagcgactaaggagcccagtgaggaaccgtgtggcgaggcatccacttcggcggctgccgctgtaaagttatctcgtcccaaaggagcctgtactccgccggagccaattaccgacgtaaacgatacgcgttgcaacatagatactgagacagaggcggaggcggatgagcaatctccaaagacgagccagacaaatggtagccaacagaacgaatccccgccagcggcgaccagtgcagacactgcacccgcgaatccttcaccagctcccgcggccgccgttgcgtccacatcccaggcggcaagtccaacacagatttag

SEQ ID NO: 12213 - protein, 1297 aa, DROSOPHILA
MVPWVELLTKQFNASQEACEWFLSHMSQEPYWPVQVLIQCPNQMVRQMFQRLVIHVIQQLRASHAHLYLEVETDEDDKELIGQASCVTRFIGSLISLLEHGARANLRHLSEYFGLLCEFSRMGDEEAMYLLRIGVLKSLVDFYLGHKQTDSIDISSDNEDNSSEEALSVEKMRPASLDKMIALCASLVERSRGADFRLRLSPKDFSAIAGGKGFPFLYQQIKDGINPHQTKHLIHALCRWDERLATQIIGMLFASVTKHTELCAPFFKLLTLLTETQGGPVGLPCFTQLILPRMWDAAEYCPQSVLDWLSLQATKNKIAHAWILQSAEKWLEQFLLAHDNTRVRNAAAFLLVALVPSQPFRANFRAHSQHKLLALNPDINSDAQAVLHQVITLLLRLLRPARVYADIGAHGTTKLTAYFNLLSYCMVSKTEKLMASSYMRSLWELFHPRLSEPSVPAHHNKHALLTFWHHSLVDCPENAAQVANCPEITRNIAFNYILADHDDAEIVTYNRSMLPAYYGLLRLCCEQSRALTRQLSQHQNLQWAFKNITPHPTQYAAAVDELFKLMALFATRHPDASEQEKLDVTQFRRAVIVSYTSSLDARVSWSTLISALKILVDNEEDRTMVIFNGGIEMCFEALHTLHSMHHEATACHVAGDLFDLLGEMLLLLATLRTRTDSPAQKKQQQQQQQLEQQLQLQQQQMLQKQQQQSQSQTQTPQSPQQKEKQLQQQMQQHLQLQQLQQMQFQQQHFLRQQHQHSALAKALPDAVKRLATLLNTFNSPEISRMALEVLKELVRNPSLETISILAPILINCHLSVANAPNAIGPLGPYFPRRGAKHTPWPLGAKNSPRPPRPMVQMCIALAELTPRGLDADYDVQVESFYRPYHDFIDVMMRMCVNTGTLNDTLVKLQCLVAIESTPLHFTYFPKFWVGIHNNALTHKYVELLVKNQLLVEYLHNVLRDERSMLKDACVREFLELYYHKVAAQLPVARMIYTINYGMHSKDDIDELCGDLFAIRIIAQATGVPASVRKELRGSLRALQNKSERFRKESERDPFPNKKQKRDSQKIKEKEHPQPESEKETSTENDKPSDVSMESSGNAEQATDSTKPPTPAGSDDEQMDKTSVPSSDDETELEDELQPTPKRNKKASNKKTAQDRVNEEREKRLITLITMESYIQSIFAILKRDASVPSSGATKEPSEEPCGEASTSAAAAVKLSRPKGACTPPEPITDVNDTRCNIDTETEAEADEQSPKTSQTNGSQQNESPPAATSADTAPANPSPAPAAAVASTSQAASPTQI

SEQ ID NO: 12214 - DNA, 4245 bp, DROSOPHILA
ggatcgtttttgtagcgttgctgatagctcttctgcaatgcctgggtattaacagtgccattgctcaacaagaatccattggtcctgaaggagcactccgcaatacactgaggattacacgtttcccaagagtaaagccagttttaaaatgatatattttagagcgatacttactgcatgcaaagccactttatccgacttaagattgcgcacttccccattcgaattggttgaattattgcccagcaaggacttgcgacacgaattgatggccttgtcgtttttttgaacatcacagcatgagctcaactgccaaatattcagttgtagtaataaaaacacgattttatttgaagttttcatacaaactttggctgctttgcgtgatcgcagcttgtataattaaaggattttgcacaatagctaaaaactattacaacgaaaagcagattatacacatacatgttgtgcttaaaatttataattaaactggtacgatgggcagctgaacttgagttttaaagccacattttaattaaccgtaatttaaaagttaatgatgcataaatagctcgcctaatgctgtgaaaaaataattgaaatgagaaggcacagaactaaagtgctgttgaacgcatattttcttgttttattacattttagtttagtcagcaacttgcttcattttaatcaaagctaaaagttgtaactaatgaaaacagctacgaaataaagtagatggttttcagcggaaaaattaggtaatgaggtataagaatattcaattatccatctatacccttgtcgccaatagttttagtaacagaagtaatgttttttaataacaggctttcagaaaaatattttttcaccaggaaatcgttttcttatttaaaaaaaacgttgtttcgcgggcaaaggctgtgtgaccagctatcggtaatctggatggaagttttcgtgttattctcaataaaataatatcgaagtgcaaacggccccaacaggttcctaaataaacgtttcctcatttattttatttactttttaaaatatgcgagcttgaaatggaaatataccaaacattatgcactgcagcttatcaaccaatgaatagacttcgctttagacacaagttcctcccgtaaatataataaaccaaaaacgtatttggaaaactaagttttcgaatgttttcaatggactcttttgccatggacaaggatgcgaagttgtacgaaggaaatgctctattccgaaaccagccgtcgtacaaggtgttcaataaatccttcgagcacgtggacgatgcgctgtacacattgctgaacgaagtggagccagatgtactgcgaatggagctccaggaaacgggcgatctctttaagtcgttcaatcgcaactcggccttgagggatccgcgcaacaacgaggtgccaccgaaaccgactcgcgacctcaccaccgccagttcactctacagctttcccaatcccctggagcaatactcggagctgaatcttaagcaacaggccgcctgcatgcgagtgctcctcgcctggcaatgcagtcaacccgtcgatgagcaggacatcgtggtgtggcaggcaacggaaaagaagcgatacaacgagcagcagcgtgtgcagaaatacatacacgaccacgagcaaggacgcaaggaagtcatctacgcgcccatgaagagcctggtggcggtctacagaaagtggtacgaactgggtgttaagaaacttcaacaaacctaccccaatgactcatatatgaccttctccgggctgccacagctgccccagtgcaggagtctcaatgctcagaccgccagcatagagcaggtggagctggagcggattgtcggtcgggtaagactcttgccagaggtggaagttcgccatgaagccctgcggacattacgactgcgcttggatcgctatgcgacgagagaaacaagggctcctgtgcagctattgcgggaggaagacaaggaactggaactcgaagctggcaacgtcttcgtgctgcccctagactcgctgttaatgctccttaccaccggatcctatattgacctgcccaccgaaatgtttctcagcctaagagaatcgccaaacagcaagcacaagtgcatggagttccagtcgccattccccccccgcaactgtggttggcatacgaacagtttgatcttgaaactggcttatggagcctacatttcacagcccggacaagccaagtggctggatttcaatataaatggagcagtcaaggaggtgccagatgagcctgcctgtgataagtcatccatcgatctgcagatggtctacaagcctcgcgcaatcgatcagcaaccatcagacattgaagatggcaactgcaatagcgccttggttagttggacccttagatgtaaaggcgaaggcgatgattgcaacgattttcaaatctttagcacactatccataccagcagttaaggattccagcggcaaggaaccacttggatgccacttcattaagctggagaacaagccagactgcggttgcgaaataatgtccaaatacgagttgataagcgcctgggtgcagttaaagctaatgcgggcagagatgggacactgcacacgcatctcgctacgggattttgagccaatgctggaggagaagctgacgttaatttcgctggagcagcagcttcatgactattataacacaagtatgccgcagctactgtccaacttgtgtgagtttttgaagctgctggacacggtacccgctggagattacctgctgcgatactcacccaagtacaaggataagttcctgctgtgcattgtcaccaaggaggccacgccacagagttttcagctacaccagctcctcacggaatccatccccagcgaccaagccttccttacgcaaagcagctaccttccgatctcgcccactctttgtggccgcctgcacgaggagctccatctactgccctgtgcatttccagcaaaagccaacggtcgctctgtccagcgtcgaaaggtggtggtgcccataccagagccctccagacaagctccagtaagacggcaacgtttaaaaaagtggagcgaagcccaaactcgagaatttcgacgtcgatgtaaggtggatcaaaagaaaagagctcgggctcgcaagacagcagcggccaacaaagaaaaaatagagctggagaagattatgacgttgtaaaaaccgcactctgattgcataagttgattactattagggatgtagttactaactgttacaaaaccaaaaggtgatccccatagtggagttaaccgctcggcgtaaggataagagttaagtttatattgttatgtatcggaataataaaaattgaacgcggtgcttgtggcgcgagcaacaaagttttgatacattttgagatgcaccagaatttacactcatattcataacttttcattttttaaagcttttatttacgttacacaggcacctaacttctcagacttattctcatcattctctagccatttcttcaacatttcctcatcgtgaataacgcgaatgccttcatattttatgttcacttggctcgttttctgcagaatgtcctgataggcggccgtcaagggttgctgcactggctctttatacacatagttctcgccctaaaacaaaacattttagtggtttaaaccaaacgaagatatagtattaacataccaaatcgtatgtgcgatccgagtccaactcgcccttgtaggcaacaaagggaacttgaaccacgggcgggctctccttctttctgcccacccacgactcgggttgatcgtgccattcggtcgtcaggttgcaaggcttgtagccatcgggcagacaaaactctcgggccaccacgaaggcttcaatgctggagttgcgcgaggcggagggcttgaacacgcatacgttcttaaagaaccgcttgagctgagtgtacaaccgactggtcctgtctgcccggtagatcttggacacgaaggagcctccctcttccagtatgaaggtggatatgctgagggcggagagaagtagttcgccctgaacgtacgagtcaaagtcgtgcattccagtagaatcgggagcgccatcgctaacaacaatctgtgccttctcgccgccaaagaactcaattatggcctcggctgtcgactccttgctgatgtccgcccgcagttgtttg

SEQ ID NO: 12215 - DNA, 2245 bp, DROSOPHILA
ccaacaggttcctaaataaacgtttcctcatttattttatttactttttaaaatatgcgagcttgaaatggaaatataccaaacattatgcactgcagcttatcaaccaatgaatagacttcgctttagacacaagttcctcccgtaaatataataaaccaaaaacgtatttggaaaactaagttttcgaatgttttcaatggactcttttgccatggacaaggatgcgaagttgtacgaaggaaatgctctattccgaaaccagccgtcgtacaaggtgttcaataaatccttcgagcacgtggacgatgcgctgtacacattgctgaacgaagtggagccagatgtactgcgaatggagctccaggaaacgggcgatctctttaagtcgttcaatcgcaactcggccttgagggatccgcgcaacaacgaggtgccaccgaaaccgactcgcgacctcaccaccgccagttcactctacagctttcccaatcccctggagcaatactcggagctgaatcttaagcaacaggccgcctgcatgcgagtgctcctcgcctggcaatgcagtcaacccgtcgatgagcaggacatcgtggtgtggcaggcaacggaaaagaagcgatacaacgagcagcagcgtgtgcagaaatacatacacgaccacgagcaaggacgcaaggaagtcatctacgcgcccatgaagagcctggtggcggtctacagaaagtggtacgaactgggtgttaagaaacttcaacaaacctaccccaatgactcatatatgaccttctccgggctgccacagctgccccagtgcaggagtctcaatgctcagaccgccagcatagagcaggtggagctggagcggattgtcggtcgggtaagactcttgccagaggtggaagttcgccatgaagccctgcggacattacgactgcgcttggatcgctatgcgacgagagaaacaagggctcctgtgcagctattgcgggaggaagacaaggaactggaactcgaagctggcaacgtcttcgtgctgcccctagactcgctgttaatgctccttaccaccggatcctatattgacctgcccaccgaaatgtttctcagcctaagagaatcgccaaacagcaagcacaagtgcatggagttccagtcgccattccccccccgcaactgtggttggcatacgaacagtttgatcttgaaactggcttatggagcctacatttcacagcccggacaagccaagtggctggatttcaatataaatggagcagtcaaggaggtgccagatgagcctgcctgtgataagtcatccatcgatctgcagatggtctacaagcctcgcgcaatcgatcagcaaccatcagacattgaagatggcaactgcaatagcgccttggttagttggacccttagatgtaaaggcgaaggcgatgattgcaacgattttcaaatctttagcacactatccataccagcagttaaggattccagcggcaaggaaccacttggatgccacttcattaagctggagaacaagccagactgcggttgcgaaataatgtccaaatacgagttgataagcgcctgggtgcagttaaagctaatgcgggcagagatgggacactgcacacgcatctcgctacgggattttgagccaatgctggaggagaagctgacgttaatttcgctggagcagcagcttcatgactattataacacaagtatgccgcagctactgtccaacttgtgtgagtttttgaagctgctggacacggtacccgctggagattacctgctgcgatactcacccaagtacaaggataagttcctgctgtgcattgtcaccaaggaggccacgccacagagttttcagctacaccagctcctcacggaatccatccccagcgaccaagccttccttacgcaaagcagctaccttccgatctcgcccactctttgtggccgcctgcacgaggagctccatctactgccctgtgcatttccagcaaaagccaacggtcgctctgtccagcgtcgaaaggtggtggtgcccataccagagccctccagacaagctccagtaagacggcaacgtttaaaaaagtggagcgaagcccaaactcgagaatttcgacgtcgatgtaaggtggatcaaaagaaaagagctcgggctcgcaagacagcagcggccaacaaagaaaaaatagagctggagaagattatgacgttgtaa

SEQ ID NO: 12216 - protein, 681 aa, DROSOPHILA
MDSFAMDKDAKLYEGNALFRNQPSYKVFNKSFEHVDDALYTLLNEVEPDVLRMELQETGDLFKSFNRNSALRDPRNNEVPPKPTRDLTTASSLYSFPNPLEQYSELNLKQQAACMRVLLAWQCSQPVDEQDIVVWQATEKKRYNEQQRVQKYIHDHEQGRKEVIYAPMKSLVAVYRKWYELGVKKLQQTYPNDSYMTFSGLPQLPQCRSLNAQTASIEQVELERIVGRVRLLPEVEVRHEALRTLRLRLDRYATRETRAPVQLLREEDKELELEAGNVFVLPLDSLLMLLTTGSYIDLPTEMFLSLRESPNSKHKCMEFQSPFPPRNCGWHTNSLILKLAYGAYISQPGQAKWLDFNINGAVKEVPDEPACDKSSIDLQMVYKPRAIDQQPSDIEDGNCNSALVSWTLRCKGEGDDCNDFQIFSTLSIPAVKDSSGKEPLGCHFIKLENKPDCGCEIMSKYELISAWVQLKLMRAEMGHCTRISLRDFEPMLEEKLTLISLEQQLHDYYNTSMPQLLSNLCEFLKLLDTVPAGDYLLRYSPKYKDKFLLCIVTKEATPQSFQLHQLLTESIPSDQAFLTQSSYLPISPTLCGRLHEELHLLPCAFPAKANGRSVQRRKVVVPIPEPSRQAPVRRQRLKKWSEAQTREFRRRCKVDQKKRARARKTAAANKEKIELEKIMTL

SEQ ID NO: 12217 - DNA, 5410 bp, DROSOPHILA
ttaaaaatattattttgtttgtgtttccttctggtttttgttgtctgcttaaattctaagtcttagcacatacgggcaattaatatcttgtggatacgctttaaatcgttacaaggacaaactgacatacatctacatgtacacgtatctgtctatgtgtttcttttgcctgtgatgtgttagtgagcgtgtgtgtgtatgtatgtgtgtgtgtgtgtgcactttgagtacaatttacatatgttatattacgtatgcattcgtcaaatatttttctctgtcttcaatttgaattttctccgattggttttcatatttgttttttgactgcccacagtttttattttcttaaatttcatccccccgagtttgcattctgattgatttagtgggaaatttaaaaacatgtggtattggtttttcaaaatttgtttcttaaacttttggtagcagtaaataacgttttagggtaaatagtgcacagcaaataacgttttagagaaagcgaacttaatttgattacgattacatttttgcaaatgcaataataaaataaaatagatgcaaattagaatggatgacaaaatcatgttgatactggagacaaaagtaacaaaaaaagaatttaatacaattggcaattatataacaattttaaattatctcgtatataaatagaatgttagataataatagttccaaaaacttctttactgctacccctttggtaagacttatagtccgacttagcttaacaatatttcacagcttctatcgggaaatagaatggtttcaacaatagtcggatcaagaattggttttcctttgtctatgggttatctaatatatacagttaccaagatttatataacttcttcggcagttttaccatgcatgtgaacgtatattatacaaatgttgagccacaagttgggattttcggtgtctgatttatgataataactcttggaggaagggcttattggttttgggttcctttttccttttttttttctaaccgaacaacgaagaaattacacacacacatgcacacacatagtcacatacatattcatatatatgtgtatatatattcatatttatagatttagttacattcacatggttggttttccatatatgtatttttgggttatttttacgttatgcggggagttgagagtttgtcatgttattcaaagaaagaatgctgtacatatcctattttaaattagtttaagtttacaattagtttagtttagtttagttagttgagttacttgccaagtatactttagtgtagtgcagttgatttcgttttagctttctctttgctttgggcaattattatcttcattcgcattatctttttgtcagacactatcacaaacagttcgcttgcacaataatcgctgctcgcctaggaccccggagctatctatcagtgttatacctaaaagagctacctcccatccgtcgctacaccttatttgttttttttttttttattatttttatatctcttgtttagttgtgttaagtttagtcagttcttggtttggtttcctcgccgttccttccgccgagaagcgctgcgcttacacatccgtgccgcatccttcctggtatccctcgtccggcgaattccggctgctgctgatcagggcccttttcagcgccgtcacgggtggcaggacgggcacaccgcccttttgccacacccgtatcgtcttggcgttaattggctgcccgttgggcaggatggagcaggaggaactggaggtgctgggatttgccgcctggttggcatggccaccgctaaccgctggcgtcggcgacgaccgtgaactgccgcccccgccactgccctcgtgcaggcgtggcagtgtgcggctactgaagtgcggactgctcccggtggagctgccctcctgcttctgatggttcagcgtggaggtcagctgctgctggagctgctgcagtggatgcatctgcagctggtggttgtgctggtgctctgcccccggcaccagaggcagaccataatcgttggggtaacccgatgaggagccacccgacaaattagtggttaccgtcgacgccgtcgaggttcctccaccgccacccgtcatcatgccctgctggaggtgagatctcgggaatgtcttgctaaaataatccgtggccgccgttcgctcatgaaggtcgtacagctgtgtggagtctatgatgggcgtcttgtcggtgtagcgcttcatgaagaggtcatccgcggatgtggtgcccactggagcaccatgttcccacagacccgaaggatacagggaatcgcagccgttggcgcgactatactccccactgccgccgactccaacaccactgatgggtggtatcttcagatccgcaaactcgtcgctcccaaaacgtttggtatcattaatgagatcaggattgttgccaccgtttccggtggatccactgggcgagatgaaacaggaggcagtggacaggacacttccgttgttgtcatagccctgcgtagagtacggaagatctgttagcctcggcggtttctgcacgggatttgcactgcgctgatcgtgaactccatgcggtacacctccccgtccgctgcttttccgctccagagttcctccctgcaccactccgccatcgattatgttggccacagctccattggcgatgaccacgccgccaatactgccatttcccgttgcgggctgcgtcttgtttgttatggagttctggtggttaacagatgttatcacctccatgtgattgggcgtcttgctatcgacatacggctgccgttttaccctcaggagcaggcacatgataaccccaagggcaaacacaatcagagcaaccagggcggcactcagacccacaatttggccactacccagggaggccatgcccgcagctctcatgctcacgtgcagggtgaagttggcctcggccatcccagctcgattctcggccacgcagtagaactcactggaatccgtttcctgtgcgttggtcagcaccagtttggatcgcttttcgaatccaccttccacctgctccaacatgtgtatcctctggtacgcggtgaaggcggaattgttggccagcagccgtccgttccagtaccagttgatattcgcagctggaaccgctcgagctcgacatgtaatcgaggcattctcgcccatggccgcctccacataatgcgatatgggcaacatctccggtcggcaggcaaactcatccacatgcagatccgcaaagctgcgatcgataatcctttcggggccacccgagcaaaccggtgccaccggatagggtatgttcctcttcatcagccagagcttcgtgtccctcaatcgacaatcacagagccagggattgtcgtgcagttcgatgccatgaagacgactcagggtctcaattgtcttgggcaaaagctcgctcagtttattgccattcaatcggagcaacgtcaatccttggaggccaccaaatgcctgggcggaaatggtctgaatatcgcaatgcgacagatccaatttgtgcagcgatggtgtgttcccgaaggcctggctctcgattttgtgtatgtgattggaggccagggtgagttcgcgcagtgagggtatgtggcccagggccaaactgggcacggtaaccagcagattatgtgacagatccaactccaccagattggtcagtcccttgaaggtctcccgctcgatttcgccgatcttgcagttcctcaaatacagcttctgcagatttagcagattcgcacggatgaactgctcgttggagagggtctgcagcttattaccggacatgtccagcacctgggtattgggatcgatgtgctcgggtatctggatgaggtggcgatcgatgcactccaccgtctgcttgccacccttccacttgcaggcgcaaaccgtttggcaggtgctctgctgctgggcggggggatccaagtcggagtgggtgggcggaaagtgctggctggggggcatgtagccatcctcagtcatcggctggctgtccgctatggagtacacctcgttctgggacgagggggcgggcctgtagcctccagggcccgatgacgatgctcctccattggcatacagatgcagctgattgtagcgagtgcccaggatcattccaggcagcagggtgaggaccaggaaaactgcttccctgatatgcattttcctggatttttctttaagtcttctagttgagcgttctaggccaaagcccagtgtttatttgcgattagcaatatcatgggggtttcagttgttttagttatgatatgatgagttaacgattttcacacgaatacatcggtctttttgtaagttttttaatttgtttatgatattttattcttttatctgagttagtttctgatttaaactagttgatgtgtcctgtgttgatatggaaacgtttccagttctcgtttaaatttatatagattttgcattactttttgcgtaactcaaggatatgtttcgttgggttgaccttttgctcttactttcgtgcgattgtatccttcgtttttctgcgcccctcttttaattatgatatggaaacttccttatgggtcaagcggaaaattgattaattgccgccttggcttcacttgttgttgctgcggttttcgccaagattttcatgttttgccgtaattagcgctcgcccagacccaatgttatttatagggctagctcccgcacacacacgcgcgctctctcactcgcacacacacacacactggcacactcgtttggatgataatcgtttttatttttcggccaacgaaattcgtatttccctggctgttttttctattattctttttctacgcaattttccttcagctattctggattttttcctcttcacgtgctgctcatacatgtgtatatataatatgtatgtatattttcttatttcttttttttttaatggttggtttgttttgttgcttcggttagcacattttgccacgcaaagctttaattcgcatcgcgttttttcgtcgttttcggtttcgttttcgtttgcgctacgagcgaacctcggtccacgcgaaaggggatggtgtttgaattggatttttggagcgagggcggcgcgatgagttgtgatctaggcattgattgtgcccattgccattgcacacactggcaattgttttcactgcacaaaataacggtgtgtcctggctagcggtactctcacacacagacacacactccagcggcactcttacacacacaacgacagcgacagctacagcgggaacgacgcaaccgctcggcagcgtacatcgacttgaactgaactgagcttcttcgatttcaat

SEQ ID NO: 12218 - DNA, 3410 bp, DROSOPHILA
aaacaaattaaaaaacttacaaaaagaccgatgtattcgtgtgaaaatcgttaactcatcatatcataactaaaacaactgaaacccccatgatattgctaatcgcaaataaacactgggctttggcctagaacgctcaactagaagacttaaagaaaaatccaggaaaatgcatatcagggaagcagttttcctggtcctcaccctgctgcctggaatgatcctgggcactcgctacaatcagctgcatctgtatgccaatggaggagcatcgtcatcgggccctggaggctacaggcccgccccctcgtcccagaacgaggtgtactccatagcggacagccagccgatgactgaggatggctacatgccccccagccagcactttccgcccacccactccgacttggatccccccgcccagcagcagagcacctgccaaacggtttgcgcctgcaagtggaagggtggcaagcagacggtggagtgcatcgatcgccacctcatccagatacccgagcacatcgatcccaatacccaggtgctggacatgtccggtaataagctgcagaccctctccaacgagcagttcatccgtgcgaatctgctaaatctgcagaagctgtatttgaggaactgcaagatcggcgaaatcgagcgggagaccttcaagggactgaccaatctggtggagttggatctgtcacataatctgctggttaccgtgcccagtttggccctgggccacataccctcactgcgcgaactcaccctggcctccaatcacatacacaaaatcgagagccaggccttcgggaacacaccatcgctgcacaaattggatctgtcgcattgcgatattcagaccatttccgcccaggcatttggtggcctccaaggattgacgttgctccgattgaatggcaataaactgagcgagcttttgcccaagacaattgagaccctgagtcgtcttcatggcatcgaactgcacgacaatccctggctctgtgattgtcgattgagggacacgaagctctggctgatgaagaggaacataccctatccggtggcaccggtttgctcgggtggccccgaaaggattatcgatcgcagctttgcggatctgcatgtggatgagtttgcctgccgaccggagatgttgcccatatcgcattatgtggaggcggccatgggcgagaatgcctcgattacatgtcgagctcgagcggttccagctgcgaatatcaactggtactggaacggacggctgctggccaacaattccgccttcaccgcgtaccagaggatacacatgttggagcaggtggaaggtggattcgaaaagcgatccaaactggtgctgaccaacgcacaggaaacggattccagtgagttctactgcgtggccgagaatcgagctgggatggccgaggccaacttcaccctgcacgtgagcatgagagctgcgggcatggcctccctgggtagtggccaaattgtgggtctgagtgccgccctggttgctctgattgtgtttgcccttggggttatcatgtgcctgctcctgagggtaaaacggcagccgtatgtcgatagcaagacgcccaatcacatggaggtgataacatctgttaaccaccagaactccataacaaacaagacgcagcccgcaacgggaaatggcagtattggcggcgtggtcatcgccaatggagctgtggccaacataatcgatggcggagtggtgcagggaggaactctggagcggaaaagcagcggacggggaggtgtaccgcatggagttcacgatcagcgcagtgcaaatcccgtgcagaaaccgccgaggctaacagatcttccgtactctacgcagggctatgacaacaacggaagtgtcctgtccactgcctcctgtttcatctcgcccagtggatccaccggaaacggtggcaacaatcctgatctcattaatgataccaaacgttttgggagcgacgagtttgcggatctgaagataccacccatcagtggtgttggagtcggcggcagtggggagtatagtcgcgccaacggctgcgattccctgtatccttcgggtctgtgggaacatggtgctccagtgggcaccacatccgcggatgacctcttcatgaagcgctacaccgacaagacgcccatcatagactccacacagctgtacgaccttcatgagcgaacggcggccacggattattttagcaagacattcccgagatctcacctccagcagggcatgatgacgggtggcggtggaggaacctcgacggcgtcgacggtaaccactaatttgtcgggtggctcctcatcgggttaccccaacgattatggtctgcctctggtgccgggggcagagcaccagcacaaccaccagctgcagatgcatccactgcagcagctccagcagcagctgacctccacgctgaaccatcagaagcaggagggcagctccaccgggagcagtccgcacttcagtagccgcacactgccacgcctgcacgagggcagtggcgggggcggcagttcacggtcgtcgccgacgccagcggttagcggtggccatgccaaccaggcggcaaatcccagcacctccagttcctcctgctccatcctgcccaacgggcagccaattaacgccaagacgatacgggtgtggcaaaagggcggtgtgcccgtcctgccacccgtgacggcgctgaaaagggccctgatcagcagcagccggaattcgccggacgagggataccaggaaggatgcggcacggatgtgtaagcgcagcgcttctcggcggaaggaacggcgaggaaaccaaaccaagaactgactaaacttaacacaactaaacaagagatataaaaataataaaaaaaaaaaaaacaaataaggtgtagcgacggatgggaggtagctcttttaggtataacactgatagatagctccggggtcctaggcgagcagcgattattgtgcaagcgaactgtttgtgatagtgtctgacaaaaagataatgcgaatgaagataataattgcccaaagcaaagagaaagctaaaacgaaatcaactgcactacactaaagtatacttggcaagtaactcaactaactaaactaaactaaactaattgtaaacttaaactaatttaaaataggatatgtacagcattctttctttgaataacatgacaaactctcaactccccgcataacgtaaaaataacccaaaaatacatatatggaaaaccaaccatgtgaatgtaactaaatctataaatatgaatatatatacacatatatatgaatatgtatgtgactatgtgtgtgcatgtgtgtgtgtaatttcttcgttgttcggttagaaaaaaaaaaggaa

SEQ ID NO: 12219 - protein, 880 aa, DROSOPHILA
MHIREAVFLVLTLLPGMILGTRYNQLHLYANGGASSSGPGGYRPAPSSQNEVYSIADSQPMTEDGYMPPSQHFPPTHSDLDPPAQQQSTCQTVCACKWKGGKQTVECIDRHLIQIPEHIDPNTQVLDMSGNKLQTLSNEQFIRANLLNLQKLYLRNCKIGEIERETFKGLTNLVELDLSHNLLVTVPSLALGHIPSLRELTLASNHIHKIESQAFGNTPSLHKLDLSHCDIQTISAQAFGGLQGLTLLRLNGNKLSELLPKTIETLSRLHGIELHDNPWLCDCRLRDTKLWLMKRNIPYPVAPVCSGGPERIIDRSFADLHVDEFACRPEMLPISHYVEAAMGENASITCRARAVPAANINWYWNGRLLANNSAFTAYQRIHMLEQVEGGFEKRSKLVLTNAQETDSSEFYCVAENRAGMAEANFTLHVSMRAAGMASLGSGQIVGLSAALVALIVFALGVIMCLLLRVKRQPYVDSKTPNHMEVITSVNHQNSITNKTQPATGNGSIGGVVIANGAVANIIDGGVVQGGTLERKSSGRGGVPHGVHDQRSANPVQKPPRLTDLPYSTQGYDNNGSVLSTASCFISPSGSTGNGGNNPDLINDTKRFGSDEFADLKIPPISGVGVGGSGEYSRANGCDSLYPSGLWEHGAPVGTTSADDLFMKRYTDKTPIIDSTQLYDLHERTAATDYFSKTFPRSHLQQGMMTGGGGGTSTASTVTTNLSGGSSSGYPNDYGLPLVPGAEHQHNHQLQMHPLQQLQQQLTSTLNHQKQEGSSTGSSPHFSSRTLPRLHEGSGGGGSSRSSPTPAVSGGHANQAANPSTSSSSCSILPNGQPINAKTIRVWQKGGVPVLPPVTALKRALISSSRNSPDEGYQEGCGTDV

SEQ ID NO: 12220 - DNA, 10997 bp, DROSOPHILA
tccgcacgtttccggctgaccaaacaaaacttcactcactcagccagccagtcagtcagtcaatccgtcatccaaaagccaaaatgggcaatgcgatggagcggagaaatcaattcatttttggccagctgcagtattgaggttcccctcttagcttcccctttttttcacctcacgttcccatcagttttaagtttgcagctgttttcgatgccccacctctcatatttctgccacaatttgcaattttgcggctttcatttacagaaattagtcggtgatttccgaaatcgcagcctgtcgatacataccaagttattcttaaaatgttaagtatttggttaaatttcgcaattattagacattctgaaagttaaggtaaacacacatcttgatgtcggacgaaatcttagcaaaacgttgagctgtttaataaattgattttcatttaaacaatgaaaactcttttatttcaaattcatagtggacagcatattaagatcaaatttttgagttctgcttttatagtattttagtgaacttctagataaagaattaagcttaagccgcttgtatgccttccaaaatcacaaaaacccatgattacaatctaacgaaagttaaaattaaatcttttaccagaatctgcagaacccctagtctgaatttcattagaaattagtctccagcgacaaacttgaatttgccccgcctaaccgacaaggccaaagtcgagcaaacaaacaaggcaaagagcttcacttttgctagaacatttaatgctcaacttagaaaattactcaaatgtcttaattggcaaatggaaaatgcttaaaaagaatggcaagcaactgcagttgggagaactttgcgccaaactttttgaactgcggcaatgggaatgggaaaacatttccaaacaaaaccgagaaaaaagaaggaaagaataacttaattgaaacttaatgagaaaatgcagccgcattgtttgcagtggcaaatggaaaaacaagctgagatctctgggtatgcgatgcgtatcttaaagatgcaaacgtgcaggtgtctcccgctaaatgctacagtcatttgcctgattgccgagacattaggacagcgtgtcgagtgttgcatggaacgtgccgttttttgttgcccctctggcgaaagacaatgcctcggattatgcgataccgaatacccagataccagatattagatacttaaacgaattgcacaacagccacaacataacgtaatcgccccttttgtctgcacttatctttcagatgcactcacctgggcccaggtgaatgtggaacccaacacagcgctcctcaacgaaggcgatcgcaccgagctgctctgtcggtacggcagatccatcaactactgccgcattgagattcccggcgagcagaaggtactcaacctgtcgccggagtggagcaagacacccggattcacgtacttcggagcgggtctcacggccggacagtgcggcgtgagcatcgagagggtcaaggccagcaacaatggccaggtcaagtgcagtctgggcgtcgagggagaggagctgtcgggcaccatcgacctggtcgtggcacgtaagtatacagaaacaacaacatttgcacttaatggcatttgaatacattttcgtaaaatagaacaaaaatgtaactttgtaaaatactaacataattgttatctatccacctttcagtgcgtccccagcagcccatcatcgagctgttgtcgcggccaaatcgcgagggctacttcaacgagggcactgaattcagggcccgctgcagcgttcgcgatggccgtccgccggctaacatctcgtggtacatcgacaacatgccggccaacaagcgcaccactcccctggaggtcatgtcctcgaccaacgacaacgtggagctatcgacctccgtgcaggaaatccagtggcacctgtcgcccgaggacagcaaccggaaactggtctgccgctcccaccaccaaaccgatcgcgagagtgtgccgccccaggaagctgcctacatcatcaacgtgcgctgtaagtgacccagcataactgagcactacttaggcttatcctaaatcaaagggcagacacaaagtggagataggtcacttcaggtcaaatgcacgaaatatgttactaagctatcagcaagtcctccagattcattgctctattattaataggctagcattttttttgcctgatgatattgaaatctatttcacttttctctactttttgattattgttattatggtttttaatgactgaactggtggatattaatcataacttgtacccctctccagatgctcccgtccatcagccagatgccgccgtgtatggactctacctcgagcacactgccattgtgaacataaccatccgcgccagtccgcagcccaagatcgagtggaccatcgatggagctattgtggggcagggacgcaccgatggacgctactcggcgtatgagccgcagtatctgggcaacgatgagtacaacgttacactggccattgccggactgaccctggaagataccaccaaaatctacaatctgagggccagcaatgaactgggactgacggactaccaggtgcgaatcagttcgtcgagcaaaccgcccagcagcagcctcgatgtggcggcaatcgttggcattgtggtcgccgttgccgttttggtcctggtcgttttactgattgtgtttgcacgggctactggccgatggtgttttggcggtaagtagaacatggttttttttttcgtttctttatttttggttttccatacacacaattttgcttatttcgtgggtgaaacatcgtcattagcttctcagccacatcaacaaaaacaaaaacaacagcaacatcatcatcattacgaccatccatccaccgccactattgtctcatcatcagctatgctaacaataaattctggctttaggttccacccacccaaaccgctcaactccagcacccatttttccccccgaaactccaccattcatcctgcaactcatatacgtactctttgggtttttgggtcggcaatgggcctggctcttctgccacaagccgttgttaactttcgacacattgtgcggcttttaaattttaattagcgttaacatagcagaaggagcagctgaacggtcggaagaacgcagcagccctaaaaaattcatctaattaaaaaaatttcacttgactcttccggtgaagtttttgtggaaatttttctttgcaaagaatggggcacgggccacaaattcaaatgtggaacacatgatttagaaaagcaaagaataactgtggcttttcaaaaagatacaaaaagaaattggtttaatttgaaaaggtagttgaaaggttagtaaaagatgacattagttaggagacaaggttagaatgaaaataaaaaaaatttatgaattttatttgaagtggtcaataatcttgtacttaagtatggtccacttaattttaataaatattttgtcgcctcttaacatgtaatgattaaatgtgaaattgtgaattggaaatacgtatccagctgaaacgaaataatgtactgaactcaacaaaaataaattacttaatcgtatacctaagtttaacaaaacaattgtacaactctctgagaaaaagtgtctacaaatgacaacaacaagaagagctaacattgaaaacaaaaattggtcactaaaacatgccaagaaaaattccaaattatgtgtaataacgtgtttttggcttcctatgtaaagacatatataaagataaagtgtatttctctgtttcttaatgctttccgtacttcttgcctgataagctttttggtaaatggactaacctggactttaatatggaattttggtatcttcgagatcgaaatcttatcgctctgtctctacttcctctgccttccctttctctctctctctctctgcacacaaagctaaatgttagttcttgttgttgtcgtttttacaggcgccactctaaacacggacatcggtcccgattccgaggcccaaatccacccggaattcaatgacgacgaggagctggatggtcgcgataatggcgatgagcatatcgataccacccagcagtcggaggaggccacgccccccgtaaccgataaattggaggcgcaaaagaaggcggatctgaagaagagtgcggcagccacagcggcagcggttattgccgctggaaatggcagccagcacaatttaaatggcatcgaggctcccaagccgccaaatacttccgtttaagccgtttaggccatttaggccgccttcgccactcccaataaaggggcgtggctcttggccagttagctgtgtgccccatttgctgaaagcagaagggataagaaacaaaatcgaataatatatatccttaccacactttgctctcaaatagttgctctctcaaaaaagttacacaaatctcaaaaggcgcacaacaaaaagttatctataattttattataaacgaaacaaatgcaacaatttaccttaggccaagtaattttaagtgaccaattttcgcgaaatcgcgattctctcaaacccttgaatttccctttgtccactcgaaaataactaaaacaaaactctaataatatacaaattacgaataataaaacaacaatgtcccatttattgtaatatattttgtccagcaatattgatgttcatccatgtatttatttaagctataagagctgccagcattttgcattttgcgttttctaatttttattttttgtcgattggcaatttcaatcaattcgaacgcggcgaacaacgcaaattagaaaattaaacatgcctatgatttattttaattagttatccgcttcacacttgtgtttttttatgttctttggtaattttagcaagacgaaacaaataaacgaaaacatgaaaaatacaaatttggtttatgataaagtttgatgtggcagacagtaagctgatgatggtgttgtcaggtgggataccttttcccggatcattaatcatgaaaaccattattatcacgcatgcatgtgactctgcaagtattgcaaatatacttaaacgaatttcttaaatttcttctcacaggcaaatcaatcaagacgcccacaaacgaaacgtaagtacagtgaactctctcatcagtctaacaaatgtcaaaataagttcagaaaagtgcgataaaacagacggggccaggccatgcaatcataaattatttccacggatccacaactaacccgtcgacggtatctggtttgcttgaatttgcttaattttcaaagccattaatctgtatccattagtttaatgttgcgtagctcggatgtgtgtttgtttgtctacttgcatgtgtctcttgagtggctttaattttcgatcttacattaaccgtatgccgcataagcaatcatctatatactacaatatatacgtagcgcagctcattaccattctaggttagttcatagttcatttatagtctaaattcaacttaaagttaagcacacgcatacacataagcacactactacacaccacatttgaaaagtcctacaaaatgaaattccaaattctaatttcataaaagcaaaatcggtttaaaatgtctcacgctgtcacacacacacacaccatacacacatacatgtgatacacttctgaactttcactataaaaccctcgctagtcgctagtctgccacgcccactgtgctcgcccgcccaccagaaaaaataaacaagaagtgtctgtctcgctctgtctctctcttaccctctgaacatcatgaagctctcttgctctgtctcacgcatttactaaaatgtcaaaaatgtcgctgtcccagtcattcaaccaaacaaatgacaaagaaaaaagaagcaaacaaatgcattgaaaaaaaaaaaacaactctatagtgttagagccactttgctaatgcatcacaaaaataataaataacaaaaacaaaaaaaacgctcaaccacaaaaagaaacgaaaacaaacttcttgctatgttttgtcttctttttctactactttcatatggacgacaacccaccgaaaacccattcaaaaaaacgtgatggatccctaaaatgaacccacaacataaaaaatccaatacttttccttgaatttttttccctcaaatatttaaaaaacctatcgataaatagtcaaatcgacaagcaactggagttgggagcccagcagaatcacggtcaaaacgtagcactcttggaaacacccaatggcataaccttgttgggcgccagtaagctgagagaggttaatggaaacggaaacggaaatggccagcaggatcggttgtcggttgaaagacgccatcacgatgaagatgacagctttgaatacggaacggatcgggagagcagtgtatataaccccaccacgcgacctctgaagagcatcctgatgagccaggcggcaggacgaaactcccggagctctgccagcgataaggatgaaggcaacgagaacgccgatctcctgcagaagggcaatcaactggggattcctgaatcgcgcttctcacgctggctgcccaaggatcaacgtgagctgatcgaaaagcaggcgatgttgctttcgggaaggggcaagtcgacggcgccagccactccacccaagccccaaagacccccgatgggaacgactaccactgccacaacgacgacgacaccgacgacgccaaagttgccacaggaaacggaaatctgagcgtgtgcacgtgtgtgtgtgcgcgcacatggcgttcatatttatttatttctttttcggtacaggaaacgcccagcaggattaagaatggagtagtcttgtgaccatcgggaacttttcgggggacagccataagtgtcaagacttaaagctgatgtgtcagatccaactgaaccgatataaattaagtttagcacgcatatgcctggtatttatcaaatgagaccaccatgatgttaaaaagaattcttcttttcacaaccggaatatgaaaaccatataatatatatttttataattatatattactatttgctggttttggctgaaatacttcataccttattttattcgaaaagaatttgaatttgaagctgactcccatgaaaatagaaatagttccgtcgcaaatctgtccccataatagactctaagcttggtatttactcaagaaaatattttttcctgaacgacaaaaaccaaacgaaacattaacgaaactgatttatttgctagagattaagccggcatgaaattaagtttttatcgaatacattaaaaacgaaagagtttgcatggcaagcatgaagcaacaaataattgttttacgcaaatatttattgtagtcactgtagaacaaagtcgtcaactgacatatttgtgcatcaaaacagtgttcatttaagacgcgcacaatgtactttaagaacgaaaagaaaattccactaattttcgatcattttagttggcttaaattcgagtgccttaagttgaaaataaatttagtaattaaaaacgtgaacgatataaaatagttagaaatttgtgtacgtgttgcttttctttattattttttacaaaacgtatgtttaatatttaattaacaacaataaatattgttaaaagtgcaatagctttctattttggatttatttattttgcgaatgcctgaatatgtatgcgtgtgtgaaaggcgagttttgaataaaagggaattatgtaaagttcaccgagcccctgaaaggaaaattctaacaatgcagcgtatcagagaggaagtccccgtacaatattccattttccataacaaaagcaatatcattaaaatacgaaaggagcgtttcatgcaataaacatttcatatatgagagactgacacgccacgccagaaaccaacacaaatacaagcacgaacacatagccacgcacacacactgctagcaaaatgtatccatcagatacttgttgagctggcccagacagcaggcagacattcaaatgagccaaaaatatttatagaatatagatgaaactcattttggccaagcgaaagcaatttacttggccagcacacgccaaacgaaggttaaaatgggggatggaactggttaaactgggtccataaaaggtcaaatgcggattaaattttccatatgccatttcgtacgggtattaggtgtggcacagagcaaagtaaattgtagcccttgaatcaaaaattctagattgtttaaaccttagccattaaagaacttttgtagcgatattataggcagaaaattaatagtcttaggactcacaaaaataaactgcctcaaaaacgacagttataaaattctgtgtaacattttgttatctttttgttatagcgttagcatagcacattgacagggttacacatacatatagaccttaaactcttttccaagtaagttttcgaatgaaatgagagcttaacctttccactcgaatatttgctttccctaacacaatttgggttttaatggtccacacacaagcaacaataacaattatgccataaccaaaacacaagttcttaaacccactaacaaccaccagataggatagctcctaaaaggcagaaagatgccgagaaaggacttttaaccacacgactaaccccgaacactataatggctatcttttgttaacttatatttttaacgggaagaaattcgcacagcagcaactattttgacacagtaataagtataataaaaataaacagaaacaaaaactttcataccaaaacaaaatcatgaacccatccaaaacctcctcaccatttcacaaccgacaagcagcagcgacaccgaaagcgccgatataaaagccacgtcaacagccacggccacaaccaccatgggcggagtgggcgtgtcggccgaggaggaggaaaccgttaacgaacaggagagcccgcaggaacaacagcagcagcagcagaagaaggccaagagattgcccgcttttgccgcggcaattttaaggcgtttcaatgaaaaggattcgcggaagtacaaggataatcaggagtcgttgaatattgtggagggaagcgtacaggagattccagcgaccaataatgccatcgatggcaatgacaatgaaccaaaggtattgaaaaatgttcccgattccgtcctttccattttctcttttcaacttctctgtttttgactgggcacacagaaaataatatttttaaaaacgaccagacaatcgatattttttcatgttgacatccataagatacaaaatgaaattctcagatttatgataaagctttctcgatgttctagatatagttgttctgataaaagaaccatctcaatgcacacttccgtgaaactgtttaaatattgtcctatgtgccttattatataaatctttttagcatacaactttctatttaaatattaaacattttaatgcaaaaattaaaaacctctttgaagtaaatttgtatagtcacaatgatagtaatgactgaaattcttttcaagttgagatgataacatagaattaacttagtttttagcatttttctcttataagtattaaatgtgtgcgtgtgtgcgagtgcgagctgtattcaccttaagcttagcataattcctttatcttagacgcaagctttaagcaaactttaaattcgttcttttataatttctcttttgctattatcacaaacttttctacataattttctttgccattttctgctctttccgttaaaaaacaaaaaaaaaaaaaaccaaccgcatgcaaaataaaatccgttgttgtataactttgtatatatacgcaaataaaggctatagtttggcagagcacctcaccagtgtggacatttaagtaaagaaaagcaaaaagcatatgaaaaaggtataccaaattcccctatacaaacctacaattaacttcttgtgtaaatcttcatccacactagagaagtacttataaaggaatctctcatttatttccaaaaacatagcaagacaaacaactcgtctatgctgaacttgtactaaagccagccaatgaggcgacaccagcaacaacaccagcgccaacaacagcagcagcaacaacaacaacgccggagggctctggagccggggtcaaaagttcaacggaatacgccgaaatagtctatgtgcaaaagggaggcgaaggaaaaaaataatctagcccatcaatataaaaatccctgggaggctgacacagtaacaaatacagatgaatgcacaaaaattaaggagcagaaacgtaaacacaaacccagtgcagcataaaagtaaactctacgatgatattaagaatgcaaaaaaaaaaaaaaagaaatgaacaaaatgtcaaaagtggtttttcaaaaacttcttgaatgtgtgtactaaaatctaacgaaatgtaaaactaagaacataaaagcgtaaaaataaacgtatacagaataaacttacttctccgcacagaaatcttgacacaaaacacatcctctacatcagaaaccctcctcctccctcagcccacacattaaatcaaatttacaaccagataaacataataagaaccttaaaaatgctaaaagaatatttgcaacaaaaaaactaaatatatataaataaaatttacataaacataggcaagaaaaagaaaccatttgaaaatctcaattatttacataaatgtctcgcatttaagctaaatgtaaatttaagacaagaagcaagaaaattatgaaaaatacgcgaaatttaagtaaacctatttaaacgattattaaattatttttacgcaaatcttttttacgcatccgccgttttgaatatgcaaaattaggaactaaaaacagtaac

SEQ ID NO: 12221 - DNA, 1521 bp, DROSOPHILA
atggaaaaacaagctgagatctctgggtatgcgatgcatgcactcacctgggcccaggtgaatgtggaacccaacacagcgctcctcaacgaaggcgatcgcaccgagctgctctgtcggtacggcagatccatcaactactgccgcattgagattcccggcgagcagaaggtactcaacctgtcgccggagtggagcaagacacccggattcacgtacttcggagcgggtctcacggccggacagtgcggcgtgagcatcgagagggtcaaggccagcaacaatggccaggtcaagtgcagtctgggcgtcgagggagaggagctgtcgggcaccatcgacctggtcgtggcactgcgtccccagcagcccatcatcgagctgttgtcgcggccaaatcgcgagggctacttcaacgagggcactgaattcagggcccgctgcagcgttcgcgatggccgtccgccggctaacatctcgtggtacatcgacaacatgccggccaacaagcgcaccactcccctggaggtcatgtcctcgaccaacgacaacgtggagctatcgacctccgtgcaggaaatccagtggcacctgtcgcccgaggacagcaaccggaaactggtctgccgctcccaccaccaaaccgatcgcgagagtgtgccgccccaggaagctgcctacatcatcaacgtgcgctatgctcccgtccatcagccagatgccgccgtgtatggactctacctcgagcacactgccattgtgaacataaccatccgcgccagtccgcagcccaagatcgagtggaccatcgatggagctattgtggggcagggacgcaccgatggacgctactcggcgtatgagccgcagtatctgggcaacgatgagtacaacgttacactggccattgccggactgaccctggaagataccaccaaaatctacaatctgagggccagcaatgaactgggactgacggactaccaggtgcgaatcagttcgtcgagcaaaccgcccagcagcagcctcgatgtggcggcaatcgttggcattgtggtcgccgttgccgttttggtcctggtcgttttactgattgtgtttgcacgggctactggccgatggtgttttggcggcaaatcaatcaagacgcccacaaacgaaaccagcgacaccgaaagcgccgatataaaagccacgtcaacagccacggccacaaccaccatgggcggagtgggcgtgtcggccgaggaggaggaaaccgttaacgaacaggagagcccgcaggaacaacagcagcagcagcagaagaaggccaagagattgcccgcttttgccgcggcaattttaaggcgtttcaatgaaaaggattcgcggaagtacaaggataatcaggagtcgttgaatattgtggagggaagcgtacaggagattccagcgaccaataatgccatcgatggcaatgacaatgaaccaaaggctatagtttggcagagcacctcaccagtgtggacatttaagtaa

SEQ ID NO: 12222 - protein, 506 aa, DROSOPHILA
MEKQAEISGYAMHALTWAQVNVEPNTALLNEGDRTELLCRYGRSINYCRIEIPGEQKVLNLSPEWSKTPGFTYFGAGLTAGQCGVSIERVKASNNGQVKCSLGVEGEELSGTIDLVVALRPQQPIIELLSRPNREGYFNEGTEFRARCSVRDGRPPANISWYIDNMPANKRTTPLEVMSSTNDNVELSTSVQEIQWHLSPEDSNRKLVCRSHHQTDRESVPPQEAAYIINVRYAPVHQPDAAVYGLYLEHTAIVNITIRASPQPKIEWTIDGAIVGQGRTDGRYSAYEPQYLGNDEYNVTLAIAGLTLEDTTKIYNLRASNELGLTDYQVRISSSSKPPSSSLDVAAIVGIVVAVAVLVLVVLLIVFARATGRWCFGGKSIKTPTNETSDTESADIKATSTATATTTMGGVGVSAEEEETVNEQESPQEQQQQQQKKAKRLPAFAAAILRRFNEKDSRKYKDNQESLNIVEGSVQEIPATNNAIDGNDNEPKAIVWQSTSPVWTFK

SEQ ID NO: 12223 - DNA, 15656 bp, DROSOPHILA
attttttatgatgaatggtgaagttctttcgaaagagttgttgtcatttcttttaataattataaatttaggttcgcctaattgggattggtatgtttttgaagtgattttgtaaatgtttggtgggtctgtcatgattgttggttaagggcttgagcccggattagcggtattgttgtttttgttgttaagttttttattttctctttgtggttgatatttgtttatcaagattttgctgataagagttttgggcttacgcgaagcgaggctttagactgagaggcacgacttatctcttcggaggttgaagtggtactgagaatgggttaattaattaagtgaactcacttcaactcgtcatcggccacgtcatctttggtcttgaacttggccatatcgatgatcagtttgccgcgggtcttgttccgttcccggtggttggccttcttctccagctgctgctgaacccgctctctagtggtgcggtattccagggcgaactcggagagtgtccggcagaattcgttgggacgcgattccgcgacactgtgctgcggcattcccagccacaaaaggaacttccggtagcgattcatcacccgtcgatggacaatttgcaggatgatgatgcgctccgcacaatcggccaagaaatccaccagcttctgctttaacggtggcgggcagtcgtgtttggcaataagtttcagacgatcccagcatgccttgcactccgcctccaactgattgagattgtgtgccaagtccgtgaaatccgccttggaggctcgcgtaatgggtccgatctcggagtacagatcactagtatcactgctcgactccatgaccatgtggcagaggtggtgcagcagcgagtgcttgtgcaccgtgtccttcacttccggaacctttgccagatactcgatctggaatcccttgacgggagctccattcaaaaagatgcccacagacagcagagtagagaggatgctgcggaaggtgcgattctgacgcaggatctcaatgccttgcttgaggtccatcagcggttccgcaatctctttctgtagtttaaaaaagatgatggccatgtaagaattaacttttgtatgttttctaatctttagcgttataacttacctcactgttgtcaaagtccagacggaaagcccacaatttcaggcgagcttccagctccgaaatggaggccagggtcaaaaggaactgctcggcgctgcccaggggcaactctgggttggataactgggcctcctggatcttgccacgctcctcatcagtgggcagcatattgagtagcttgtcgattccctcccgtgtgaccacagtggcatccattttgaggatggccgtcttaatggccctcggaggaggcagcttagtgatcgcaatattgatggcattggagcgcttgtgatcaagcacgatgatctctttgctcttgttcagctcttgttgtttctgcaaggtcagcgggaaagggttaatacctttcgatcaggctgcgatcggtcagagataagaacacagtggtgcaaagagaaaacgagagtgtagggtgcaaagtgcggaattggattggagtttctgtgctgttctgtactgttagcaactaaatcatttcttcaagtgtacgtgggtgtgatagagtgtatatgaaaatagttatattaaccaacaccaaaacacaaaacataatgggcaatagatcgtgagttatggtgcgacatatgtttgtagagagatagagagacaaaaagacaaacaaatttaataacgttttgattggcactcacctcctagagacattggaaaacatttgaatatttgagaattatttgcattttggtttgagtttagcacaacatttatgtagatttatccgcaaacagaccgttcgacatttaggtattaagaattatataatatatccataaatagaaggggaaagaagaatacaaaaatcattcgcattttgttaacgcatcacacacttaaagaagagcctatgactaatttaatcacaatttatcgtagatccattgaatttcgagaacctttgaccaattgggtgttatatgaggaaaagtgttattggttagagcatacgaaccttggtcatcaagtctttggcccgggactcaaagagatgttcgagcttctgtgtgtccacgttggcatcgggcagctcatcccatatggtcttgcccaccacctgcggtatcatgtcctcgcgcacttccttccagaagagcttgaccttagggtgtatcaaatgcaatatgtaaattctcattctttatattaaacaatgatgagactaaccgttttcttgttctttttgatggtgttattaccattgaccagttcaccatttatagaaccatttaacgaattgacactattggttagactaccgccatatccgtacatgggtggtggtgccaagcttggaggcatcattggcggtggggcaatggctccacccagcgggggaggcggcgggggtataccggcacccaaacttcgaggggccagcacatccttctcgtcatcatccctcagatccgtaaagtccagatcgcaaagatttaggggccttgtcatattcctaaccagttcctcccagtgaagttcattttccgacttcttgggctcagacttctttacatcctgatcgacactagaagatctgtaaaggaaaaagtttatgccactacaattatagcttttatcgtgtaaatggtggccataaatgattagtctgaccttatctttgatagactaacgcctagcaccactttgtatgtacataaatatgataagtaatcaaaaatcagtcaacgagggtggcggcaaactactttctagggattcgagaaagccgatgacgatgtcaggctgggcaaaaacctgaactcttatgaaactggtacataaatctaatctaataaatttgcacaatggactcacacattatcggcttgcagtggcaaccattatcgatttctatatacagataagcgttgttaactagaacttcccgattttcgggaggtataaagacggcgcactgagagggacaagtcacatttgtcaagcataactcaagcaatatggccgatgtaagttgatgattgtaaagatcggaacacagaactctctaactcccatttgccattatttacagttcaacgctatcctcgagaagaccaaggccttcagcaagaagcccccaacggaggtgtacctggagttctatggcctgtacaagcagttccaggagggcgacattaacatcgagaagcccgctgatgccgagggtgccgctaagtacgatgcctggctgagccgcaagggactgtccgtcgatgacgccaaggccgcctacgtcgccctgtacgagaagtacaaccccatctacggataagctacagtttatggcccactctgataccaaccaataaatcttgaccatctgtgaactaagtgattgtctatttggaaggagcttctttcaattctgttttattggttcacagattatgaacccaaggtcgtaaaacaccttatatcagataaccggaaagcatgacaccgcttatcattaatagcttagacggatttcttatcttcaactggtggcgccatatattctcgtaaatctttgcttgtaaaacatctatcattttctgtaatctcaaggggttagcagagtgaacatttattgatagttagtggcattcaattgattttgatatggaagagctataaaaaagtttcctaacctaacttaaaagcttgattcccagaaagatggtaaacgactaacgccactgggtaacttcgagagtatagcctaagcctataggtttagtgggttttatcaaaagacttctacttttcttacctggatatctctcccttgctcttgctcttggccagaccctctttggctttcgaaatcagaccggacatatcgccgacgagggcgcgattcgccgaatcctgagtgggactcattggcaggttgctcaacttctgggtgagatccttgaccgtgtggtcccgcttcagctggaggagcagctgctgatcctcgctttccatatctgtgatacataacaaacgtaacgttaagcccattcatcaaatcttaactctcaaaagtatgcagcggcagatgcgcaatgcaatgtgaatgtattggcggcgctcgcgagtatgcaacacacaggtgagagacaggtgaatggaatggagttaaggtttaggttgagacccacctgaaggatccacaggatgcggcagcagctctgggttagtactggttagggttcgagcttgcgggctgttgtagatgggggcgtgccaccaaccaggtggtggtggtggcggcggtggcggtggaggaggcggtggtggtgccgcagcgggtttctttaccggactcagtggctccggttccggcgggacatcacacttaaccggggtggaactgaggggagcgggcgtgaaatcaaacccagaggcatttagcgtttttttgggactcaaaaggacttccggcgttggctgaatgggctgatggatctgatgtttcggcgactgactgtaatagttgttcagccggttcgcttcgttctcgtacttcttataggcactatcggtttgctggatattcttcataataccattgatcacagttgaattgcgttcccggaataggttcttcttggtcaggaactcgctctgattgttattgctcgccttatcgaagctgttgttaataatggagatgctgtggcttccagtgagcagttgcttgctaggactcatcaccaagaggctgttgttcggcgtgtcattgcagctaaggttgctgacattgttgttactaatgttggtgattccgctgatgttgttgcacggtggcacctcatgttgcaaggactgaggcggactatcgccggtttgaatggtagcgggtatggcggttacaatctggcctatttttggcatggtatggtgttttttgtttggttgtggttagcatgatcagcgggtgaacagcgggacaataatacacacagtgattagcgtttcggtgggagagagaatcacaagttagttagtcgctcaagtcaaaagcagcttgtgtaaacaaattaggatcttagatcaagaacttacccagtccctcccgctgctcgagagcagcaaagattccattggccgccgcctcctgttgctccttcagaaagctcttatgccgctccgcccgctcacgtcttcttcgaagtcctggtgtcacgcctgcaccatcacgagctggaagggattaaatgaggttagttatgctaagcactggaaagccattgtgccatttagtctcatacgtttcttctcattaaagagaccgccactaaattccgttgagttggtggagccagaactatcctcatccaccgtagcttgtgtaggtgtcatccggaggacagtggtgggcaggacctttgtgagtgatgcgggactattatctgtgctatggcgacgcgacttgcgtctttcagtggtatttgctcccggacgatagcgttgtgtttttcgcattgagttctgcggcaaacgctgtccatccgactcaccatcctcaaatctaaataataaaattgttatatattgtatattattagaattaagttttttactcacttgagaaccgcctcatacagttgcaactgatcgagcagatccaaatcagtgcccggcttggacatataacgctggatcacagtctccatgccctgctgctctagaagatcgctttcgtcgtagaagctgtcctgatcattcagacccgccagagttttgttaatcagcgaagtggcatagatcaccagttcggcatcagcattgtcatagtccttaagcagtctgaaaatgagagaaatatttgattcacttttgctcatctctaaccagagtttatgtgtgaatcatcccaaaagtaggctctgggctgacttacctcattatatttgaccagggcagtgtgccctgggaagcatccactgcgtgaatggcactgaccagcacatagcagttggactcggcgtactccacgaagaccagcaacaacttgagggcggtcttcaccacggatcggtaattggaggcaatcagcgagtagagccactgcatcgtcggctcatgcttcatcacgccgttcattccgtccacatagagcatgacctgccgccgcgtccaatgacataattagccaatgttcccatcgagggattgccaagtatgatagactcacctgaccgagggctcgcagaatgtaattctgatagttttgatccgcacaattgcccacgcgcaccaggcaattgaggccgccgagggccacgaaggcgtgcaccagatccttatcctcctggaacacctgcttcagcgagaagagagcacgccgcaggtcactgccctgtgcggagagcagtttctctgcaagaataaagccagttggttacacggggcgtatgggcaataagcaattgattcacttaccaattatggcttgtacgcgcacatttaactgcgttcgcaccaccagagagtttttgcggctgtggattgcaaatagatttattatttaagtttgaattctgagtttaatgaataagtcttcataaattatggtgtctattctatgcattccagaaacttcattttcctttcctggtcttaaacttttataaaatgcaagttaataaacgccacactatgaaccacatttcaccatgtgaagtgccaaaacacaaagattagggcgcacaatggggagctagcacctcgagcgccgactcctgcccatggaatcgaagcccggttcattgaccagttaagaacattgattacccgctggtgcccacgacgcctcaccccggttccaactggtcataataaaagtaataacaaacgacgcagataattgaaaatggactatggggaggcagtccgaccgaccgaccgaccgacaccgggctcatatactcgtacttctcatatagaatgccatatagacaaaggtgagtatctgagtgtctgagccgctggtgtgtccaagtgtccaagacacacctgtgtgtttgttggtaacgcgtctctccctttctgcagattgacgggcaccttctgcggaattttgatgcgaattgaagcgcatgatttgcatgcgagctcgcgctgccatgactaatgcgataagcatgattagtggccatcggactgagccaagttcccattctggccattctggccatggctagaaggaaagcactccactgcctgtggcgccacaccactcgtaaatagagtggggacgagtttgcgccgcaaagtggcggcaatttgcgcagacgcggcgacatttacgttataatttcaaagactgcagatacggcttagatgtctactccgccccactgatgactgatgatgatcatggatgcggatgcggtgcagaagtgaaagtcagaaatagaccagaaaaccatccattcccgagtcgcagtcgagggttaagcaacttcagaacattgactgggagcctggtacgaatatgaccatctatgttgccaacatcttttttaaggctaatgctcttgctttgacacttgtgccccgccgcgtacatcatttttctttgtgccccaagttttgtgagttttgtggagctactctagcgcctgcctatgccatgacatcacgttccccagactggccgcgaaaaatgaagaaaagccaagaagtgaataagggaaacccagaatcgactgaaagatacctcagaaaggttaaaaatataaaaaataacgcattttctttgattaaagaaaaaaaaagataattgtctaaaggatttgaagtttgtcagtctttaaaataatctacccaaacttcatttagatcctaataacatcattcgtttgagggttatttagatgtacttgtgcataaataacatgcatgccagttatgagaaaagagcacaaaaaatgtaaatataaccactgcagagctgcgacaacgacaactcaaaagtgacgtggcgagcgcttttttgtattttttattcattttgtttgtctctgggcttctttttctgcggctgtgcgcggattaaatgcaaattaactgcagagtgcggcaaggcaacaagttgcacgtagcaatgtcgtggcatgcaaatgtcttcaaacaatccactgagtgccggtcagagcgacagagtggcaggcaactaagcaggtaaccagccagccaggtaggcagatagccaactcggtttcctgtgccacagatagcgacagttttttatggcccggccaaataactttattagcgagagcggagatggcgattccgatcgcgatggcgatcactatgtcggtccaggcggtcccatatggcgtatgtgtaatatgttgcattttggtgaaaggctgacagtgccacccacgatccgttgccccaataacccagaggggttcgactggatcgaagttacccagagttgttcgattaaagttggccactagagatcacaaggagctctaaatccaacatgattacatttaatattatttgaattttcttcaatattaaatatatattagagtacattatttttgccctcgcttaatatttttagcagcatcccatcgttcccgaaaatagcaaaaatgagttcaaggtaaaatgcagcagcgactgcaccaactaaagttgcaaaagtgaaatcccctgacaaatgtttgcgagtgggtgaagtgcaccaggtgtgcccctcatgtgggctgacaattcttttctgtccaagctcattagccgtcgctttgagccaaatgttggtgtgagcgggaggggacataccacccaatatcgttagcttagcaccacactcacctgacgttgactccctcgatttcctcggcctgttcggccagcgatgactccagatccaagtaggctccgtagtcgccatccttgtacacctgaatggctgcatcgtcgatctgcaaggggaatggcaaaaaaaaggagaagcttagtttcgccggcaattataattaaagtctggctaaaagtaaatggcaactccgatctcgccactaccgcactacgcagtaaaagttgtttatggtctcggctcaagccaaagagaaagaagctgatggagatggcgatgtggtttgagtttgactttgggcctgagctgtggttggagaggttgatgcgctgctgcagcgtagaacgttttgagacacgcagagaaatcatactgcatctcttattattattgaaaacaattactagacacttcttcaagctgttcagggaatatataataacagttttgtgttataagcagaacacacagtttgaattaaagcggaaagtaatatctaaactttaagcttagcaatcactttcaacgttttaagtgttaaccttagataggtatgtctatttctctcagtgtacattgaaagtccacagacgatttcgtttaggcgcacattgaggacgccagttgattggtggccaagaccaagatgacgcgtcgtcgccggctggtcacctacttttctctgctttcggtttccagacatcagacatcggactttggatttcagttttccgttttccagccgctgattgatcaagctcctgctgcgtgcgcacaaatgcgctgattgacggcagtcgcagatgttgttttattggcgcattgaaagtaattatttctgcatttacagaacaattaccggacaacatggaattatctgtgtcgacgtcacttgcttaatgtgtgaaaaaataaacaaaacaacggaaaaataaagaagaaaaatactgtccgtcatccgggtgcaagattacacatacgcccctttgaacacgccctggtctaagccaaaaaaaaagtaaacttggtttagggttcgttcattttcttttgtttggcttcttgtcagggtcaggacacacccccaacagaaaacgcttcgcatgtcctgagcgatttcttggaacaaagaacatttgctaaattaaagtattaaccgcatattggtcaatgacttttcctagaactattaaataactttcctataaacaccgcaacttcatcacttttgtgattaattcatcattgagtaaacacgagccatgacaacaaaaccaattcaagatttcctaggtaaatgactcgccgcctctccacttaatatacgaaatatttcttaaagtgccaggctgtctagcgagtcacgatttcttatcaaaaagagagctctcgactttccgagcgaattttgccttcggtcaaacttccgcatgttgattcagcatttagacagggaaaaactttctagaccaagttgggccgtcattgtttgcccaagctggaaattcacattcaaattatgtgtcaaatgcgtgcttagtcggtatttataaacgccactttacataagccagcgggcaatttaaatcaaagcaaacattggccaaaaactaaacccattccggctcgcttttatgatttatttatatttcgcctcgtcttttacacccatattcattcattcgttcattcacaactctatgcaaattttctatcggtggcttttttgattattttctttgactgaagcatgacaagatttttaatcaaagtgatttttggcaaacacacaaatgtggctattgacacagttaaggcggcgagcataaaaatcgacgaggagaaaatgtaaaagaggtaaacaaaatccagcagaaatcgcatatggttaggaaaagatataaatattttgaaactattggcacgcggttaaatgttgttgaaaaacgttattgatggctatgacaaatttcaaattaattttcattattttatcaaacattctacaaccatacggggagttgaattcaagtggaattttaattggaactgtcggtatacacatgagaaaagtatatatataatgatggcaatttataatcagtaatgactgatatatttttgattatctgtgtatgccaaaggttatcaaaataactatttaaaacccgatagtcgagtaatattaggggtcgctaacaatctaaaaataataccacaaagatccataaatgcctgaccttgtttttgtgtgtgctgattcaggtgactaacactcttgctttcacatcaatcaaagttgattgaccctcatctgaccgcaaaatctgatggacggctctgctaattgaacataaaaacttcaaagagaagtggacgtcttgtgcgaattatttttgcaaatagccagagatgcgtaagtgtcaacgtggctcaaatatttggccgacgtgagtaaactatgcaatggataatggaaaatttcctggctcattcaagcggataagctgacctaactaatttgattgactttgaatttaaatattgtccggtcgtgtgaatgacacatgtaaatgacgcaatgccctcaatacaacgattaatataattaattaaattagttttttttttacttggtgaaccgcaaaaacatttcaaattgattgcttggtggcttttcacttcagtcagcctttttaatacttttatcggcctttgtttggcttcacttgattggtagaactcccgatatgcctatctaattccacgagaatagaatatatgtacttttttgtagtgcggtgaccaaagcaaaagtaaagcttaaaaagaattggcaaaaagaataacattcaaattgaaatcaaaacaaagtgaaataagcttatttttattaagatggtcgagcggtttataccctaagctgcagtaatatatatttctaataattggttattaaatattgtatcaaaatgttgataagtttaaacaccttacttaatatacagaatcatggttaggtttacaatttattttggatgaacaattaaaataccctgaccagcaatagcttttattggccattcaatgattatttatatttttaacattgttggctctcaatctgtttggctcgctggcctgatgtctgatgtcatcgaaaacagcgtcgacggcactggagattagtgatcggtgcggcgaaaatttatgaatctattgtaatgcgctaaatttaacaacttgctggggagcagcgagcgagcaaagttctgttcgctgactaattggacaaatggcatttacagctgccactggtcctcctccggttttccagatcagcaactgcctgccacataaatctggtaccgacgacaacatcctggtatggggagcagcagctagaagaacttccttttgcgatttgctcattagaatttattgccgccgcttgtcaagatttacgtatccttgcggctccgccgatttccagctacccgactcccaactttcagcatccaacttccaacttccaactggatgacagatgacaggcagggaatggggctattcgaagctccttagtggcttttttgcaaattagtcaaagtcaggcccaaacaatggcaggcttagataattgctggctagctagctgactagcccggctttcacaatgcagttcttcgctccgacttcctattagttgccacagattgtgcgatagcaataagttagcccagccttgaggcaactcctcttcccccagtggatcgtgtggagccacatccaaaccaaaccaaaccaaaccaagccgagccaagccaagccctcgtcgaaatccagagcctccggttgcgaggtgcatctgccattgtcttttggatggaatctcctggagaaacgggttcattgccatgcaatgcatcatttgttcaaatcgcttgccacacaataaaatattgcaaatggtgccatggaaaagaaaatgctaaaccctttgcttgtagtttcctggaaacttttcccttcattattgaccaattaccacttttgcagattctcaaaaaaactttacgtctatatgttttagttgtggcttttccaattcaacgctcactcagctggccgcaaataaaacttattccgtttcaattgacttatttccttcccttcaccaaacccattcgaccaatgttcagttttttgtgggattgtggccaaagtttaatcttttagctttcatgcgaaattttctcaaataaatcaattgtggattctgtttactttttctgtgttttcagctccagggcaataatggctcattctggtccgtgttgaacgagttatgattctttcattcgttcattttatagaaaatgtggaagcgatgtagaacgataaatgcgtctaaacacgctatgcaaatatttaagtttagccgcaaaaaccgcccgaaaatatgcgaaattaaaatttaactttttgccttcatttggcttgccagaataaaatagatattataaataaacgcttagagcaaattttatcatcaactaaaaatttcgtcattttttttcatattaaaattaaattcacagtcgatttggagtgttgaattattttcgcaaaattcacatctaaaaaccatatgattatattgagcattttaatcgaatgcgtagtagtatatacttttctggctaactgtttaactaatcagcagttgtatcactagtttggcgattggcaaaaaacttgtcgtcatggcacaaaaatacattttaatatagcaaaaccttcaaaaactataatgaataagaagaatacttaattgcgaatcttgatcgcgataatgcgatccacctatttatgtataatgtatataaatgtatctcgtaaatgcgcagtaaaagagttaatgccttttcatatttgtatgcgtgttgcttggctaattttgcgcaacaaaagatttttttttcggttgaaagatttagccagtgataagctggcaagagataagccaagccagttaagaccgaaaaagaaagagggaaaatacaattgttttctgttctgaacagactaagtagaaacggagtgaaaaaaaatatattgtttatagggaatcttttgatgacacatgatgactttgaatattataataaaatactaaatagcaagttttaaatgtaatcattggtgtttaaaaagaataagctttataataaaacatactaagtaagccaaactttgctcttggtcgaataaagaggcacgatatttaatgacttatagacaatttctgtcagtgtaaaaacggaatatcttacgctttgtggtgcattcagcagccgcaggattgtgcccagctgattggccagcggcatggtggtggcgaaggcgtaggtgggcgcccgcaccgggatcgggaaggcggtgcacgccgagagcggatcgctgtccaccagatactggacacggaatgtgatcagttcgtccggctccattttcacaatcattttcgacgcggctttcaatcacttttgcacatttgtcttacttaattcgaggtctatttacttttcgcgattttctctctctcactcgctctatgatttatttacattttcactcgaacacttgaacgaacactgaaatggatttttgccatgagatttgtttgctttaagaccgcttgcaatttgccttaatttcgattttgatggctctttggaccaaccaaatgccaagccccacattgcgctagcgcaggcgaatcgaaaataataaaaattgttgcataattgtacacacgcatgttgcgcaattttatgctaaatattgcaaattgttggcacgccacgcccactccgaccctccttcctcttgcccatttccatggcgatagcttatagcgagatatagcataattgctatgccgaaccggatcgctcgcttttctcttcatttgtgtaaatatttgtctttggatttctggtcggacgacagaaaacaagccttggctcataacgtcatgatgatgatgatgatgatggctggttaccttaactgttgtgtaactttcaattcaatgtcagttcagtaaggtaagaaaacgacgcccaaaatcatcagcatgcagggcgcactacctcaaatcgaaatcaaatcaggcctgaaatatcaagaaggcgacttcattttggcccgctatgtctatttccccgaggtaccgctaaatgtcagacgtttatgcaaatatgcaggagagtcggagttgcagagtggcgtttttttttttttctttgtggtctgtgtttatggccgaggagggtttgttaacgaggttcttgagtgtcggtcggtagccaaagtcagtagttctcccccctcgcataagtgctcataacgtgactctaatgtactccgttcggcccgccggtgttgctcttgaagtcggacttggacttggctttaaacttggacttgaagactcggctcaaacacttgtcgcacaccgacattgaactcgccggaggtccaaagacggttgagaaatgggttgaaataagatgagatggtagcggtttagaaagtactttaatgagtgcgcggaagagaaaaacaattaacgaacaattagtcgaatcag

SEQ ID NO: 12224 - DNA, 4416 bp, DROSOPHILA
gtgttcgttcaagtgttcgagtgaaaatgtaaataaatcatagagcgagtgagagagagaaaatcgcgaaaagtaaatagacctcgaattaagtaagacaaatgtgcaaaagtgattgaaagccgcgtcgaaaatgattgtgaaaatggagccggacgaactgatcacattccgtgtccagtatctggtggacagcgatccgctctcggcgtgcaccgccttcccgatcccggtgcgggcgcccacctacgccttcgccaccaccatgccgctggccaatcagctgggcacaatcctgcggctgctgaatgcaccacaaagcatcgacgatgcagccattcaggtgtacaaggatggcgactacggagcctacttggatctggagtcatcgctggccgaacaggccgaggaaatcgagggagtcaacgtcagccgcaaaaactctctggtggtgcgaacgcagttaaatgtgcgcgtacaagccataattgagaaactgctctccgcacagggcagtgacctgcggcgtgctctcttctcgctgaagcaggtgttccaggaggataaggatctggtgcacgccttcgtggccctcggcggcctcaattgcctggtgcgcgtgggcaattgtgcggatcaaaactatcagaattacattctgcgagccctcggtcaggtcatgctctatgtggacggaatgaacggcgtgatgaagcatgagccgacgatgcagtggctctactcgctgattgcctccaattaccgatccgtggtgaagaccgccctcaagttgttgctggtcttcgtggagtacgccgagtccaactgctatgtgctggtcagtgccattcacgcagtggatgcttcccagggcacactgccctggtcaaatataatgagactgcttaaggactatgacaatgctgatgccgaactggtgatctatgccacttcgctgattaacaaaactctggcgggtctgaatgatcaggacagcttctacgacgaaagcgatcttctagagcagcagggcatggagactgtgatccagcgttatatgtccaagccgggcactgatttggatctgctcgatcagttgcaactgtatgaggcggttctcaaatttgaggatggtgagtcggatggacagcgtttgccgcagaactcaatgcgaaaaacacaacgctatcgtccgggagcaaataccactgaaagacgcaagtcgcgtcgccatagcacagataatagtcccgcatcactcacaaaggtcctgcccaccactgtcctccggatgacacctacacaagctacggtggatgaggatagttctggctccaccaactcaacggaatttagtggcggtctctttaatgagaagaaacctcgtgatggtgcaggcgtgacaccaggacttcgaagaagacgtgagcgggcggagcggcataagagctttctgaaggagcaacaggaggcggcggccaatggaatctttgctgctctcgagcagcgggagggactgggccagattgtaaccgccatacccgctaccattcaaaccggcgatagtccgcctcagtccttgcaacatgaggtgccaccgtgcaacaacatcagcggaatcaccaacattagtaacaacaatgtcagcaaccttagctgcaatgacacgccgaacaacagcctcttggtgatgagtcctagcaagcaactgctcactggaagccacagcatctccattattaacaacagcttcgataaggcgagcaataacaatcagagcgagttcctgaccaagaagaacctattccgggaacgcaattcaactgtgatcaatggtattatgaagaatatccagcaaaccgatagtgcctataagaagtacgagaacgaagcgaaccggctgaacaactattacagtcagtcgccgaaacatcagatccatcagcccattcagccaacgccggaagtccttttgagtcccaaaaaaacgctaaatgcctctgggtttgatttcacgcccgctcccctcagttccaccccggttaagtgtgatgtcccgccggaaccggagccactgagtccggtaaagaaacccgctgcggcaccaccaccgcctcctccaccgccaccgccgccaccaccaccacctggttggtggcacgcccccatctacaacagcccgcaagctcgaaccctaaccagtactaacccagagctgctgccgcatcctgtggatccttcagatatggaaagcgaggatcagcagctgctcctccagctgaagcgggaccacacggtcaaggatctcacccagaagttgagcaacctgccaatgagtcccactcaggattcggcgaatcgcgccctcgtcggcgatatgtccggtctgatttcgaaagccaaagagggtctggccaagagcaagagcaagggagagatatccagcttatccgtagatggggttgtacttctcgtacagggcgacgtaggcggccttggcgtcatcgacggacagtcccttgcggctcagccaggcatcgtacttagcggcaccctcggcatcagcgggcttctcgatgttaatgtcgccctcctggaactgcttgtacaggccatagaactccaggtacacctccgttgggggcttcttgctgaaggccttggtcttctcgaggatagcgttgaactatcttctagtgtcgatcaggatgtaaagaagtctgagcccaagaagtcggaaaatgaacttcactgggaggaactggttaggaatatgacaaggcccctaaatctttgcgatctggactttacggatctgagggatgatgacgagaaggatgtgctggcccctcgaagtttgggtgccggtatacccccgccgcctcccccgctgggtggagccattgccccaccgccaatgatgcctccaagcttggcaccaccacccatgtacggatatggcggtagtctaaccaatagtgtcaattcgttaaatggttctataaatggtgaactggtcaatggtaataacaccatcaaaaagaacaagaaaacggtcaagctcttctggaaggaagtgcgcgaggacatgataccgcaggtggtgggcaagaccatatgggatgagctgcccgatgccaacgtggacacacagaagctcgaacatctctttgagtcccgggccaaagacttgatgaccaagaaacaacaagagctgaacaagagcaaagagatcatcgtgcttgatcacaagcgctccaatgccatcaatattgcgatcactaagctgcctcctccgagggccattaagacggccatcctcaaaatggatgccactgtggtcacacgggagggaatcgacaagctactcaatatgctgcccactgatgaggagcgtggcaagatccaggaggcccagttatccaacccagagttgcccctgggcagcgccgagcagttccttttgaccctggcctccatttcggagctggaagctcgcctgaaattgtgggctttccgtctggactttgacaacagtgagaaagagattgcggaaccgctgatggacctcaagcaaggcattgagatcctgcgtcagaatcgcaccttccgcagcatcctctctactctgctgtctgtgggcatctttttgaatggagctcccgtcaagggattccagatcgagtatctggcaaaggttccggaagtgaaggacacggtgcacaagcactcgctgctgcaccacctctgccacatggtcatggagtcgagcagtgatactagtgatctgtactccgagatcggacccattacgcgagcctccaaggcggatttcacggacttggcacacaatctcaatcagttggaggcggagtgcaaggcatgctgggatcgtctgaaacttattgccaaacacgactgcccgccaccgttaaagcagaagctggtggatttcttggccgattgtgcggagcgcatcatcatcctgcaaattgtccatcgacgggtgatgaatcgctaccggaagttccttttgtggctgggaatgccgcagcacagtgtcgcggaatcgcgtcccaacgaattctgccggacactctccgagttcgccctggaataccgcaccactagagagcgggttcagcagcagctggagaagaaggccaaccaccgggaacggaacaagacccgcggcaaactgatcatcgatatggccaagttcaagaccaaagatgacgtggccgatgacgagttgaagtgagttcacttaattaattaacccattctcagtaccacttcaacctccgaagagataagtcgtgcctctcagtctaaagcctcgcttcgcgtaagcccaaaactcttatcagcaaaatcttgataaacaaatatcaaccacaaagagaaaataaaaaa

SEQ ID NO: 12225 - protein, 1375 aa, DROSOPHILA
MIVKMEPDELITFRVQYLVDSDPLSACTAFPIPVRAPTYAFATTMPLANQLGTILRLLNAPQSIDDAAIQVYKDGDYGAYLDLESSLAEQAEEIEGVNVSRKNSLVVRTQLNVRVQAIIEKLLSAQGSDLRRALFSLKQVFQEDKDLVHAFVALGGLNCLVRVGNCADQNYQNYILRALGQVMLYVDGMNGVMKHEPTMQWLYSLIASNYRSVVKTALKLLLVFVEYAESNCYVLVSAIHAVDASQGTLPWSNIMRLLKDYDNADAELVIYATSLINKTLAGLNDQDSFYDESDLLEQQGMETVIQRYMSKPGTDLDLLDQLQLYEAVLKFEDGESDGQRLPQNSMRKTQRYRPGANTTERRKSRRHSTDNSPASLTKVLPTTVLRMTPTQATVDEDSSGSTNSTEFSGGLFNEKKPRDGAGVTPGLRRRRERAERHKSFLKEQQEAAANGIFAALEQREGLGQIVTAIPATIQTGDSPPQSLQHEVPPCNNISGITNISNNNVSNLSCNDTPNNSLLVMSPSKQLLTGSHSISIINNSFDKASNNNQSEFLTKKNLFRERNSTVINGIMKNIQQTDSAYKKYENEANRLNNYYSQSPKHQIHQPIQPTPEVLLSPKKTLNASGFDFTPAPLSSTPVKCDVPPEPEPLSPVKKPAAAPPPPPPPPPPPPPPPGWWHAPIYNSPQARTLTSTNPELLPHPVDPSDMESEDQQLLLQLKRDHTVKDLTQKLSNLPMSPTQDSANRALVGDMSGLISKAKEGLAKSKSKGEISSLSVDGVVLLVQGDVGGLGVIDGQSLAAQPGIVLSGTLGISGLLDVNVALLELLVQAIELQVHLRWGLLAEGLGLLEDSVELSSSVDQDVKKSEPKKSENELHWEELVRNMTRPLNLCDLDFTDLRDDDEKDVLAPRSLGAGIPPPPPPLGGAIAPPPMMPPSLAPPPMYGYGGSLTNSVNSLNGSINGELVNGNNTIKKNKKTVKLFWKEVREDMIPQVVGKTIWDELPDANVDTQKLEHLFESRAKDLMTKKQQELNKSKEIIVLDHKRSNAINIAITKLPPPRAIKTAILKMDATVVTREGIDKLLNMLPTDEERGKIQEAQLSNPELPLGSAEQFLLTLASISELEARLKLWAFRLDFDNSEKEIAEPLMDLKQGIEILRQNRTFRSILSTLLSVGIFLNGAPVKGFQIEYLAKVPEVKDTVHKHSLLHHLCHMVMESSSDTSDLYSEIGPITRASKADFTDLAHNLNQLEAECKACWDRLKLIAKHDCPPPLKQKLVDFLADCAERIIILQIVHRRVMNRYRKFLLWLGMPQHSVAESRPNEFCRTLSEFALEYRTTRERVQQQLEKKANHRERNKTRGKLIIDMAKFKTKDDVADDELK

SEQ ID NO: 12226 - DNA, 3772 bp, DROSOPHILA
gtgtgtgtggcacattttcacgttcactgagcccgttttcaacggataccgaattttgcacaattgccgttccgcaaatggccacgataattgcccggattttaagacgttttttgctcaattttccccgtaattggcaaacgcagcttgaaaatttttcacatttccaagtgctgcagctgtgtgtgtgtgtatgggtcccgtgaatatacatatacgcgataggcacttttccacacagtccactcactcacacacccagaataaaagacgcgacgcgctcaaacgcgaggaccaacctttctcgtcagcagcgtatacaattctgcgcgatgtcgactccgacgacatggaaatcggtggcccaatgtacttccgcacggcccaagctcgtctttgggagcttttcggagtcctgcggttggtgcgggctggacgcttcgttcgattcatcaaaactggcgccaaaacccattcactatgaatgacccagtgccgcggtgatggtgatgatgatggtaatggtgccgatgcaggtgcaagtgaacttccgcacgatgcacacgtggcgtatgaggaatgtcggaagaaattcattgcatacttttgggacgggtgcacaaatgcatgttaaatgagataaaataatggcaaataaaagtactatgcatttgtattcttgtatcaatgcttaaattaagtattatcaattgcactatattttatttaactttacataatttaacaataaatattctaaaaccattgtttcgattataagatattatgttagctgtagttaccaaaataagtataacaataaatgctatttattttataaaatatttatcccttcctttatttgattttattttctgcagaattgtcaattcaaaactcttcaatcgcatataacatcgattgcaagctcagcgattttggatttgagcttatcgatagcttcaacgatagttatgtcacctgggtttattttggtctgaacgatcgaagccggcatagattttttcgtctgcaaaccagaactagtctgaatcctctaagggattcgggagcaacgagaagcagcagaaggaccatgacgacggccgtgctgggaggcggattgagtggactatccgccggatactacctgttgcggcgattcgggaagccgctgaccatctacgaggcctcgccccgtgtgggcggatgggtgcggtcggagaatcgcaaggatcgcaacttcatcttcgagagcggaccgcgaaccatacgcccagttggtgagccaggtgccaatacgctagaattggtggaggatctgaagctggaggtgactcccattcgacgcagtcatgtcgcagcacgcaaccgaatgctgtatgccaagggacagctctgcatgctgcccaacagtcccaagggtctcttcggcgtcctgcctcccttcacgaagccgctatacaaagcggttcttcgcgatctgttcacagcaagcaagaaagcgaagctggaggatgagagcatctacagtttcgctgagcggcggtttggtaaggagatagccgactacgccatcagtcccatgatctgcggtatttgcgccggtgacgcgcgagaaataagtgtgcgcttcctgatggaggggctctttgaaaaggaacagaagtacggaggagtgctcaagggcacactcatttcccgctttgagaagaacaagaccaaggacaccaaggatggactatttgccgaaagacagcccaagctgtatgcgcaggcggtaaaggagaagtgggccatgtacgggctgaaaggcggtctggagaacctacccaaaactatgcgaaagtacttaggtgagcgggatgtgaacgtgcagctaagcaacgaatgccggaacctgaccttcagcagctccggggttcgaatgaacatcaaggatgccgaagttccggtggagcatgtggtcagctccctgcccgcctacaaactcgcgcccctggtaaagcagcagcatccctcgctgagcgcccaacttttgagcattccgtacgtggatgtgctggtagtgaacatgcagttccccggcaagctactcaaacaagacggctttggattgctagtgccgccagtggaaaagttacctctgctcggcgtcatcttcgacagctgctgcttcgacatgggcgagaacactgtgcttaccgtgatgatgggtggccattggttcgaccagtggttcggtgatcgtccaagccccaagcagattcttgacttagccaccagccatgtgcagaaaatgctgcagatacgcgaggaacccaaattcagtcgagtgcacacgctgcacaagtgcatcccgcagtacactgtgggccacaagcggcgcgttgaagccattcggaactacatcaagacctacaaactgccactgtctgtctgtggagctgcatacgatggcgtgggcatcaacgatgttatcctatccgcccggcgacaagtggaagccatacccttgtcctaaatcaaccattcccttctagcacaccctcttttccattggtgattctgttgtatttgcgtaagctggttttgtgaatagtaaagtaggtcctttgtacatagaatttgagttctgttccttctgtgtttttacttgccgtggcctcccaggcacggcggactcttctccggctcctgctccggttcccactgcttgggtgtcttggcctcaatggacagggcgtgcataaactcgaagcctgcttccttcagcgcattttttaccgtgtcattaaccaatcgatgacgctaagggaaaataaacctcttaataaatagaacggaaatccacggatttaacataccttgatgagcgtcagatcgttgaacttctccgagacgacgaacacacggaagtgggactccgaccgcttggggacattgtgctggggcgattcgttaatgacctccagatataccggcttcagctccgtgtttagtgcttttcgcatggcagactcgatgggcggatactgtcccgcctcctgcgacatagtggctctggggaggatctgtcctaagctgctgattgtgggtgtcagttgattcaggtttcgtatggaaactccagtgagtcggcgaagagtgaaatttaacatgattccagtatgcttctcgcacagctgtttacaattacataaacaactggcagccagagttgccaagtgcgggatgaaaatcaacttatcgataacgccaacgataaccacttttcaaaagaatgtttgcaacggtgaaaacaaaatataatattaaaattagtttaatttgctgcagttaagcacaaaaaagggtaacatatcttttaaaaatcttatcaagtagggcataaaaaaatgttaaataaaaataaattaaatgtacaaaaaagttgtaacttcaatactatgcgctataaatattttattgggggcagaatcaacagtgagcgcaaaacacgctccagaaataaatcgtacatctatgtataaacaatcgagcgaatatcaaatgtataatcaagtgaatagaaaaacgtcttcttcacaacggttttgggatcaatagtcaaccagtttcttgagctttggcggggcggagatgacgacgcgtcctcgattcgaagaaccactgccgccatggccgtaatccgcctcccggtcgcgatcacgaccacgcaaccgttcgttctgctgctgatgctgttgcctgtactgttcccgctcgcgat

SEQ ID NO: 12227 - DNA, 1772 bp, DROSOPHILA
aacgatcgaagccggcatagattttttcgtctgcaaaccagaactagtctgaatcctctaagggattcgggagcaacgagaagcagcagaaggaccatgacgacggccgtgctgggaggcggattgagtggactatccgccggatactacctgttgcggcgattcgggaagccgctgaccatctacgaggcctcgccccgtgtgggcggatgggtgcggtcggagaatcgcaaggatcgcaacttcatcttcgagagcggaccgcgaaccatacgcccagttggtgagccaggtgccaatacgctagaattggtggaggatctgaagctggaggtgactcccattcgacgcagtcatgtcgcagcacgcaaccgaatgctgtatgccaagggacagctctgcatgctgcccaacagtcccaagggtctcttcggcgtcctgcctcccttcacgaagccgctatacaaagcggttcttcgcgatctgttcacagcaagcaagaaagcgaagctggaggatgagagcatctacagtttcgctgagcggcggtttggtaaggagatagccgactacgccatcagtcccatgatctgcggtatttgcgccggtgacgcgcgagaaataagtgtgcgcttcctgatggaggggctctttgaaaaggaacagaagtacggaggagtgctcaagggcacactcatttcccgctttgagaagaacaagaccaaggacaccaaggatggactatttgccgaaagacagcccaagctgtatgcgcaggcggtaaaggagaagtgggccatgtacgggctgaaaggcggtctggagaacctacccaaaactatgcgaaagtacttaggtgagcgggatgtgaacgtgcagctaagcaacgaatgccggaacctgaccttcagcagctccggggttcgaatgaacatcaaggatgccgaagttccggtggagcatgtggtcagctccctgcccgcctacaaactcgcgcccctggtaaagcagcagcatccctcgctgagcgcccaacttttgagcattccgtacgtggatgtgctggtagtgaacatgcagttccccggcaagctactcaaacaagacggctttggattgctagtgccgccagtggaaaagttacctctgctcggcgtcatcttcgacagctgctgcttcgacatgggcgagaacactgtgcttaccgtgatgatgggtggccattggttcgaccagtggttcggtgatcgtccaagccccaagcagattcttgacttagccaccagccatgtgcagaaaatgctgcagatacgcgaggaacccaaattcagtcgagtgcacacgctgcacaagtgcatcccgcagtacactgtgggccacaagcggcgcgttgaagccattcggaactacatcaagacctacaaactgccactgtctgtctgtggagctgcatacgatggcgtgggcatcaacgatgttatcctatccgcccggcgacaagtggaagccatacccttgtcctaaatcaaccattcccttctagcacaccctcttttccattggtgattctgttgtatttgcgtaagctggttttgtgaatagtaaagtaggtcctttgtacatagaatttgagttctgttccttctgtgtttttacttgccgtggcctcccaggcacggcggactcttctccggctcctgctccggttcccactgcttgggtgtcttggcctcaatggacagggcgtgcataaactcgaagcctgcttcctt

SEQ ID NO: 12228 - protein, 475 aa, DROSOPHILA
MTTAVLGGGLSGLSAGYYLLRRFGKPLTIYEASPRVGGWVRSENRKDRNFIFESGPRTIRPVGEPGANTLELVEDLKLEVTPIRRSHVAARNRMLYAKGQLCMLPNSPKGLFGVLPPFTKPLYKAVLRDLFTASKKAKLEDESIYSFAERRFGKEIADYAISPMICGICAGDAREISVRFLMEGLFEKEQKYGGVLKGTLISRFEKNKTKDTKDGLFAERQPKLYAQAVKEKWAMYGLKGGLENLPKTMRKYLGERDVNVQLSNECRNLTFSSSGVRMNIKDAEVPVEHVVSSLPAYKLAPLVKQQHPSLSAQLLSIPYVDVLVVNMQFPGKLLKQDGFGLLVPPVEKLPLLGVIFDSCCFDMGENTVLTVMMGGHWFDQWFGDRPSPKQILDLATSHVQKMLQIREEPKFSRVHTLHKCIPQYTVGHKRRVEAIRNYIKTYKLPLSVCGAAYDGVGINDVILSARRQVEAIPLS

SEQ ID NO: 12229 - DNA, 5572 bp, DROSOPHILA
gtagatcttggacacgaaggagcctccctcttccagtatgaaggtggatatgctgagggcggagagaagtagttcgccctgaacgtacgagtcaaagtcgtgcattccagtagaatcgggagcgccatcgctaacaacaatctgtgccttctcgccgccaaagaactcaattatggcctcggctgtcgactccttgctgatgtccgcccgcagttgtttgactccttcgatcggagccattccctgcaggtctacggcgatgatctttaccttttcccgttcctctggcggcagaggctcgtacaagcgtttggccagcacctgtgaccagctgccaggagcggcgcaaaggtccacggctcgggtgagacctgaaataagtggacaattagaatcgctccgaaaaacacgcggttggatctgcaccttctagcaactgaaaggtctcatccgcctggagcagtttgaaagcacttcgtgcacgccatccctgctccttggccaggcggtagaatatgtctcgtttatccttcgaagtcctgcccatttaaaaataataaaaacaaaagggtatcagctgtgatacgacatctacagtgctgtcgttttagccgttttcccttcaactttgggagtttattggtattaaaaacattaaaaagtttgcaagtgtgagctcgaatttatagttttaaaatatatatcattcattttgtgttaaaatataattttatatttaaatggtagattaggaaaaagaatcaattttgtttccaaatccatagaaatagctacaaaatgtagtttagctttaatcttcataatattgagttacatattcattatatttgaatttgtttatttgaaataaaacacgtacagctaaaatacatatctagttggattttcaatattaatagctaaatggctaaatttgcacaatctaaatttgcacttctgacagcgccatcctatttctttgttatcgataaatttcatgcaaaataacaaatgattgtgttgttgcagcccagcccgcagattgagaaattcctgctatgagaacaggaaaatcggcgagatcccgattcccaaattcaacgtagcccgccccgacaacaaaaaacgaataatggccaagttgaagaaactgcatatgagctccaaccttgatgacctggagaagatgtccatcattccggatctgcgcagcaagggcatgaaaatgtaagtggacaccgcgatttggtgctgatgcggctgttttgatttacctggcattcttcgcagcctactgaacaccgcccgcaaactgtacatgaccgccgaggagtacagactggatggcgacgaggaactggcctacatcacctacatgaagtacttcaatatgctgaccgcaattcacaaaaaatccgattaccccagccacaagacgacggtgcgccagatgctgggcgacaccgagtcgaatcgccgcattatggacacgctggaggagattatcaactctctgcggcatcgttatgctcagcagcaccaagcgccggaaccaattgctcccgacctggttagcaatgggcgtgcgggtgtggactcgccgataacacagccaacgcagtacgcccgacttgggctgataacctgtcaggatctgtatcggcgcatgcaggagaaatcggtcctagttatggactgtcgcccaagcgccgactacgaggcctcccacctcacgtactactgtgcatttaatgtgcccgaggagttgataacgccagggtgagttgtccattataataatctcgctatttggatactaacttattggatttacacagaatgtcggctggcagattgcaggctcgtcttagcagcagcgccaaggcgtcgtgggcatcgcgttccgtcaaggattcggtggttcttatggactggaacaccaaagatgcccaaccggcgaccaacacagccatttcaacccttctggacatcctgaagaacgtgagtatgggtggtatttagccatagattacatataatcattattttctggtagtgggatccggatgtgacgtatcgcgcacccattcaaattgtcgagggcggttatgagtacttcattatgatgtacccgacccattgcactaatcccagtgtgcaggcgccgcagcagaacaacaacgacattgagaccatcgatgatatcgagtatccctcaatccacgacatcaccatgaaggaggatattagtgcgaaggacttcagaccgcgtccagacttcaatcgggccaacaagccagcggccactcgcgttaatgaacagggaatttcccgtccttctccgccggctaagcccattgctgagatcatgcgtgatcaggccgagtttttgcagcgcgcagagcagaacgatgagcagttggagaaggcctcaaaaatgtggaagcgtcaagcagcagagggcgatggtttgaatgctaccgaggaccaggagttgcacttcaggatcctacagttggagagcaaggcccaggactatgtaagatctataaattaccttataaggttcgattaattgttcgtttgtgtcgtagatcgtggaaaacaatcgtctgcgagaagaactaagtcgcatacaagagctacacaatgttacgcagcagttgtcgcaaaaggaggtcgaggcaacgaggaatatagaatccaagatccgcgaacgacagcgcttggacgagcagcatgaacttgaacgtcaagagcgggagcgccttttggcgatcgctcgcgagacaaaaaagcattacaagtcaccaacaccttcgggcccgccttcgccgggcaggaacttggaggacgtacatgtcgtgtcagacagcctggaatccctgctccagttgactggcgatccggatccgacaattgcgccaaacaaggcggaaataccaacattcgatcgggcgatgaaaccgcagccgaggaatgtggagaggacatcgcaacgcgttcgtgatttctcgcctgtcattggtcagaatgtggtaagtattgcttgggtagtggtggttgactcactggccacataaatatagccgcgacacgagtcaaatcaatagccagcgggtcacgttttgaagacacccgcccagacgtgcgccgttcttggtgcgctttctacccccactctcagtcgctcgacgtccgcactcaaagcatgttcaaaccaaagaaacgtacaattgccatactgttaagcaggaatagcattatacaggattccgcgaatgatttgtgtagcgggcgtgaggctccagctgccaacagctccgcccacctacagcatttatagctccatctttccgctgagacgagtaatagctatagattttattttcctctatctccgaatagttaactatatccttggataacatttcagggtcgtggactgactggactgaagaatctgggcaacacctgctatatgaacagcatactgcagtgcctgagcaacacgcctcagttgaccgagtactgcatttcggacaaatacaagaattacatcagcagaagcaacaagactaatggccaggtgatcgaagaggtggctgcactcatcaaggagctctggaatggacagtacaagtgtgtggccagccgagatttgagggtatgcaactgaaaaaaaaaaaacacccaaatttctttctaaactaaacatacttcattgcagtacgttgtgggccagtaccagaagatcttccgcggcgttgaccagcaggactcacacgaattcctcaccatcctgatggactggctgcactcggatctccagaccctacatgtgccccgtcagcgggagatgatcagtgcgtcggaaaaggcttggctggaatttaccaaggcgaaggagagcatgattctgcatttattctatggccaaatgaagagcactgtgaaatgtgtggcctgccacaaggagtccgccacgtacgagagtttttctaatctcagcctggagctgccgccaaactcgaatgtatgtcagctgaaccagtgcatggacatgtacttcagtggagaaaggatccatggctggaattgtcctagttgtaaaacgaaaagagatgccatcaagaagctggatatatcgaagctgccacctgtgctggtggtgcatcttaagcggtaagtgatgctaacactatgctatgcttgtttataatttcttaaatcccgcatagcttctatgcggatcccagtaactctggctcgtacatgaagaagcagaactacttgcgcttcccgctcgagaacttggacatgaatccctacatagcacgggcggaatcgcgggcggtaacacctaagacctaccagctgtacgccgtatccaatcactacggcaccatggaaggcgggcactacacggcattttgcaagagcgccaactacggaaaatggttcaagttcgacgatcaggtcgtctcggcgttggactcctctaacgtggtttctagcgctgcatacattcttttctacacctggctgccacccatgcaggtgcctctgtagacgcttcgctcggtttcctttcggtttttacccctttcgttttaattgttttttgtttttctctcatattatagcttttaaggtctagtcgccacacccttttatcatttacaaattaccgcttaactgttaactgctatttaagaggataatcgcttgtttgttgttgtctaggctcttagaacagtattacgcgtgggcgtattttcaatgggtgcaggctgcattcactaaaaccaagaacttcaagtgcattaccagtgtaacaaagagaagcccgcatatacgcctgtgtatgcgggactatagtttattgtattttgcaaatatattttaaaaccaaataaacgaaattcaatttctgatacaaagaatttctttgaaagaatcatgcgtagggtttttagaaaacaaattggggagagcgggtattttacactcaacaaataatataaaaaagggggtgaaagttattttaccattgcaaagaaaaattcagctaattttcgcgccgaaaagttcaattcgagatatccgataagtaaatatattcacttccaactaacggtcacactgtaaaacgcccccgctctttagcaaatgcagtgttgccaactcttgctttcaataaatagctagttagttgatttatcaattattacatttatagtgttttatgtatgccctatttttcatttataaagagttatgatttaaacttattaaataagatgatgaaattgatgattcaaaagaagaacatagctataacagtgcacctaaaaaatggccaaaaatacaggtgcttgcaatcacttaatctaatctggctagtagccagctaaagcggcagcaccgaccacgtatttgattggattatttgatagtcaacgccaaatcacggcactgcagccgcgactccagagaatgccaactgtttaggatcgtgcattaagtccgacttaaccaattcgcaagtcacacgctttaaaaaccgtca

SEQ ID NO: 12230 - DNA, 2823 bp, DROSOPHILA
caaaataacaaatgattgtgttgttgcagcccagcccgcagattgagaaattcctgctatgagaacaggaaaatcggcgagatcccgattcccaaattcaacgtagcccgccccgacaacaaaaaacgaataatggccaagttgaagaaactgcatatgagctccaaccttgatgacctggagaagatgtccatcattccggatctgcgcagcaagggcatgaaaatcctactgaacaccgcccgcaaactgtacatgaccgccgaggagtacagactggatggcgacgaggaactggcctacatcacctacatgaagtacttcaatatgctgaccgcaattcacaaaaaatccgattaccccagccacaagacgacggtgcgccagatgctgggcgacaccgagtcgaatcgccgcattatggacacgctggaggagattatcaactctctgcggcatcgttatgctcagcagcaccaagcgccggaaccaattgctcccgacctggttagcaatgggcgtgcgggtgtggactcgccgataacacagccaacgcagtacgcccgacttgggctgataacctgtcaggatctgtatcggcgcatgcaggagaaatcggtcctagttatggactgtcgcccaagcgccgactacgaggcctcccacctcacgtactactgtgcatttaatgtgcccgaggagttgataacgccaggaatgtcggctggcagattgcaggctcgtcttagcagcagcgccaaggcgtcgtgggcatcgcgttccgtcaaggattcggtggttcttatggactggaacaccaaagatgcccaaccggcgaccaacacagccatttcaacccttctggacatcctgaagaactgggatccggatgtgacgtatcgcgcacccattcaaattgtcgagggcggttatgagtacttcattatgatgtacccgacccattgcactaatcccagtgtgcaggcgccgcagcagaacaacaacgacattgagaccatcgatgatatcgagtatccctcaatccacgacatcaccatgaaggaggatattagtgcgaaggacttcagaccgcgtccagacttcaatcgggccaacaagccagcggccactcgcgttaatgaacagggaatttcccgtccttctccgccggctaagcccattgctgagatcatgcgtgatcaggccgagtttttgcagcgcgcagagcagaacgatgagcagttggagaaggcctcaaaaatgtggaagcgtcaagcagcagagggcgatggtttgaatgctaccgaggaccaggagttgcacttcaggatcctacagttggagagcaaggcccaggactatatcgtggaaaacaatcgtctgcgagaagaactaagtcgcatacaagagctacacaatgttacgcagcagttgtcgcaaaaggaggtcgaggcaacgaggaatatagaatccaagatccgcgaacgacagcgcttggacgagcagcatgaacttgaacgtcaagagcgggagcgccttttggcgatcgctcgcgagacaaaaaagcattacaagtcaccaacaccttcgggcccgccttcgccgggcaggaacttggaggacgtacatgtcgtgtcagacagcctggaatccctgctccagttgactggcgatccggatccgacaattgcgccaaacaaggcggaaataccaacattcgatcgggcgatgaaaccgcagccgaggaatgtggagaggacatcgcaacgcgttcgtgatttctcgcctgtcattggtcagaatgtgggtcgtggactgactggactgaagaatctgggcaacacctgctatatgaacagcatactgcagtgcctgagcaacacgcctcagttgaccgagtactgcatttcggacaaatacaagaattacatcagcagaagcaacaagactaatggccaggtgatcgaagaggtggctgcactcatcaaggagctctggaatggacagtacaagtgtgtggccagccgagatttgaggtacgttgtgggccagtaccagaagatcttccgcggcgttgaccagcaggactcacacgaattcctcaccatcctgatggactggctgcactcggatctccagaccctacatgtgccccgtcagcgggagatgatcagtgcgtcggaaaaggcttggctggaatttaccaaggcgaaggagagcatgattctgcatttattctatggccaaatgaagagcactgtgaaatgtgtggcctgccacaaggagtccgccacgtacgagagtttttctaatctcagcctggagctgccgccaaactcgaatgtatgtcagctgaaccagtgcatggacatgtacttcagtggagaaaggatccatggctggaattgtcctagttgtaaaacgaaaagagatgccatcaagaagctggatatatcgaagctgccacctgtgctggtggtgcatcttaagcgcttctatgcggatcccagtaactctggctcgtacatgaagaagcagaactacttgcgcttcccgctcgagaacttggacatgaatccctacatagcacgggcggaatcgcgggcggtaacacctaagacctaccagctgtacgccgtatccaatcactacggcaccatggaaggcgggcactacacggcattttgcaagagcgccaactacggaaaatggttcaagttcgacgatcaggtcgtctcggcgttggactcctctaacgtggtttctagcgctgcatacattcttttctacacctggctgccacccatgcaggtgcctctgtag

SEQ ID NO: 12231 - protein, 888 aa, DROSOPHILA
MSSNLDDLEKMSIIPDLRSKGMKILLNTARKLYMTAEEYRLDGDEELAYITYMKYFNMLTAIHKKSDYPSHKTTVRQMLGDTESNRRIMDTLEEIINSLRHRYAQQHQAPEPIAPDLVSNGRAGVDSPITQPTQYARLGLITCQDLYRRMQEKSVLVMDCRPSADYEASHLTYYCAFNVPEELITPGMSAGRLQARLSSSAKASWASRSVKDSVVLMDWNTKDAQPATNTAISTLLDILKNWDPDVTYRAPIQIVEGGYEYFIMMYPTHCTNPSVQAPQQNNNDIETIDDIEYPSIHDITMKEDISAKDFRPRPDFNRANKPAATRVNEQGISRPSPPAKPIAEIMRDQAEFLQRAEQNDEQLEKASKMWKRQAAEGDGLNATEDQELHFRILQLESKAQDYIVENNRLREELSRIQELHNVTQQLSQKEVEATRNIESKIRERQRLDEQHELERQERERLLAIARETKKHYKSPTPSGPPSPGRNLEDVHVVSDSLESLLQLTGDPDPTIAPNKAEIPTFDRAMKPQPRNVERTSQRVRDFSPVIGQNVGRGLTGLKNLGNTCYMNSILQCLSNTPQLTEYCISDKYKNYISRSNKTNGQVIEEVAALIKELWNGQYKCVASRDLRYVVGQYQKIFRGVDQQDSHEFLTILMDWLHSDLQTLHVPRQREMISASEKAWLEFTKAKESMILHLFYGQMKSTVKCVACHKESATYESFSNLSLELPPNSNVCQLNQCMDMYFSGERIHGWNCPSCKTKRDAIKKLDISKLPPVLVVHLKRFYADPSNSGSYMKKQNYLRFPLENLDMNPYIARAESRAVTPKTYQLYAVSNHYGTMEGGHYTAFCKSANYGKWFKFDDQVVSALDSSNVVSSAAYILFYTWLPPMQVPL

SEQ ID NO: 12232 - DNA, 32328 bp, DROSOPHILA
accaaaaacctttatctttcactgcacaaaaaacttgaacctgaactttagactatttagactactttaaaattgcattaatagcaacctcattttgtacgttatcgagagacacttcaagtagtgcgtaacttacttatcaaatggctgagaatacaaaaattatttgaataacattaatgagtaaattccaaagcattttctcggaaacatgagcggaagtggcctgacatgggatatatagacaaaagtctaggtcgaagaatttgccaagataattgataaaaaaaatcaatgatggatgccaagcaaaataaatgacaaaaagtggctccgaacacgtttagacctttgcaaagttcccagccattttattgagctgagataaccaatttaccctcttgataacttttcgctgttcttgctggtggtgggtgggctaagtgtttgggtgttgagtgatgtcagtcgatgtcagagttcattcggcaaattattaaaaccaagcgaagcttacatgaatgagtcgaaaacaggaacgtatgtatagacctatgtttaaattacttttatcccccaagtttgtaagctccattttaacttgatgacatttaattgtataggaaggcagctgaattgcttttgattaaaaaaaaaatcttccacatgatgatagagacattttttttatttttaaattaaacttgcctactatgttctgcacattaaagcaagcgagaaactcttatactgacagccgccccaaagtatgcaacgtttttcgttcaaatttattaaacgaattattaagtagccttaatgtagtgcagcacatatttaaaaaacactgaggtaattaaggccgcaaaatttcacttgcaggttggctgtcagcagtcgagcttgaagagctgtgattttcgcacagaatgctgcacaaagttttggcttaagaatttgctcttctaccattgacgcgcttgaatggagcaccacaatagccatctgttgcctggtggcagcgagaagatgtactacatagctcaccagcagccgatgctgcggaacgaggatgataactaccaggaggggtacttcatcaggccggaccccgcatccttaatttacaataccaccgcactgccagcggacgatgaagggtccaactatggatatggctccaccacaacgctcagtggcctccagttcgagacctataatatcactgtgatgatgaactttagctgtgacgactatgaccttctatcggaggacatgtggtctagtgcctactttaagatcatcgtctacatgctctacattcccatctttatcttcgccctgatcggcaacggaacggtctgctatatcgtctattccacacctcgcatgcgcacggtcaccaattactttatagccagcttggccatcggcgacatcctgatgtccttcttctgcgttccgtcgtccttcatctcgctgttcatcctgaactactggccttttggcctggccctctgtcactttgtgaactactcgcaggcggtctcagttctggtcagcgcctatactttggtggccatcagcattgaccgctacatagccattatgtggccattaaagccacgcatcacaaaacggtaagtcatacaaacaattttataaatttaaattgaatagccattatattgctcatttctgtatgcatccataattttatctttcaaattaaattcctttttcatgctatcgccgttttacactgactaaatttataaaactataactagcaactatttaagtactttctctaaaagcgttttccaatagtttgtacattggcgtgtctagaccctgttaagtgccaaccggggtatttacatttgtgtccactttgaccacttgacctaagccacgatccccagggaatggagtaccggtaggcttttagtgagacggctcacagtgttgattggcttacatagtaatccgagacccaaaaaatccgaggcatgcggctgtttaacaagcactggccggacttattgcaatcgccaatttgcttggtaactaaatacagcggtgtttcctcggaaaatcagccacctcttggtgtcaatccactggcatccatctcatcttccgccgagttcaagagctggcgtgagtatttcacgcttggacgacttttaatgtctttgacatttacacagagaaaaattagaagactgtgtttaaatagttactcaacaagaaatctccttcacaaaacattttaattgattaatataacttatgctatttggagctttataagctttgcaaatttaatttcgcttttttcctgtgttgtccaaatggaaattttgctgacatcagcgtttgcaagtgcgtgactctgtttcatagtagttgtgggtcacgaaagtcatccttcgtggcttctgcaaatatttgctgggacataacgtcaataaagcttataattattcaacatgaccgccatttatcaccgtagagcgctccttgagcaaaaacaaaccgagctcagtgcctaatgtccgattatcacgctccatcaacatacagcatcactcatacgccatgttgaaaggggagtaagtttaacaattcataagattaacatttagatgaaaaaaaatgtggtaacaatgtgactttaaataaccaacatttagaaggaaatcaactcaggtacccatttaaatatattctcttccttctcttgcagctatgccaccttcatcatcgccggcgtttggtttattgcacttgccaccgcacttcccatacccatcgtctctggactcgacatcccaatgtcgccgtggcacacgaaatgcgagaagtaagtaccgaccatttcaaacagcaaacaagggtaacaaaatgtgacagattgttatggacaccatattattcacatggtggaagcaatttattttaaagaactctgttatgatagcattgtgtgttgtaatataaggcagttaggaaaattaatttcggcgagtgtttttcttttgcaatattcatgaatccgagcgaagacgaatatgtctggcattaggcctaaaagctggccgcacagtattttaacccacagagcaaatggcaaaggatgctgacattcctgcaggtcaagtagagatcatatttaatgcaatacgcacatttaggagccttccaacacaatcaaatgaaattgtggtctaggataatgcaaatgcaaatagtaaaatcatctgcgtgccggtggcacgttctacaagtcatttctgattgctaatagttgaataaaatttgttattatgttgggtcgcgagacttgagctagatacagctaaaacctatcaaaatgaggaaaatgagaatatgttttggaggacatcacatcctgtcattgcatgcagaagcttgaagggcttagaattaaaatgaaaatgtgcactcaaccgagagtccatgagcgtatgtgcgggtgtccttttgtgacagctgattctcggtgacccccagaactgaccacttgaaactaatgcactgctcctcccttcttccatgcgatgtcctttgtgcgcatgcatccatcagatacatttgccgcgagatgtggccgtcgcggacgcaggagtactactacaccctgtccctcttcgcgctgcagttcgtcgtgccgctgggcgtgctcatcttcacctacgcccggatcaccattcgcgtctgggcgaaacgaccgccaggcgaggcggaaaccaaccgcgaccagcggatggcacgctccaaacggaaggtgagtccatttaaaaccttgaatctcaacttctgagccaccgcaaaaactaatttgcgcataaaattgaccctttcattagtcaaatccccgtgagagtggccatgggtaaggggttttgtgggaaaatatatggtgactagaaaacaattgaaaggaaaagaatagaactttggatatgctacatactatactagcatcattttagtataacgtaagttgcagatgcacttattgattatttatcttattacgcctaagcatacacaatcaatttgcttaatgaaaataatgatttagtgcatcataatttttaatcaaattttacaagcaaatttacgaagcatttgaaaatggattgcaaataatgttgttcaatgagcactttaatggtcccccgaagtttatttaattgttattattagtaaatattccccaatcagtgtgcttatatatattttgaacttataatttaagcaaataccagcaatcgccaaaacttctcttgcataatttaaaccatctcctgttcgggttgtgttgactccaaagtttaaccccaatcgcagcaccttgccgctgcctcgatctgcagtcaatgacaagcccccacttgctggctgctccaagtgaactcaaacttaagttgaagccccggcttaaactgagccatcagcaggatggagtttgtggaaacgacagccacgatgacgacagctgtcgaaacagcaatcttcatattgattttgcattttttccccttttttttcgctccgaacagccggagaaaaatctggggtcaatggggagcaagcgtggcaaggctggcttcctgctcctcactgttgattttataccctagcaaaggggtaatcgcacattttgtacgactaaggcatagttaataccttattaacttaacttatttatttataaacaataataaagtgttctacttttctaacgtcataaggattaatggaaagctaatccatttctgcagatttgttcgagccaaggtctattatacttttacataagttagtgtgtttaaagctttaacttcttgagcaactacttgtgttattttccgagacggattttggggctgtggcagcgtgccaaatggcatgtaatgctcacataatcacagtgtgcagacacagacactatttacaataaacttgcacgagccgagtttcggcaaaagtaaatgagaaaagatttatgcggtgcatgtggtccgcacttggtacaggggtccccgagcctatacacctatccacctatccacttgccagctggaagcctttgcgatccaacgagattgccattgcgtctaagtctgcgtacaagtcgccgtagccgtcgccttcgccttcgtcgtctgaagatgccatccagcgttttgtgatcttccaggaaatcaattgcgatgaggtgggggtgggagtaccacgtaaccacgttacttgtcaaacgagcccccaaagtcgatggccaattgtgcagctgagctaaagaagaagaaagccgaaagccagttggccaaaaatgtggtcatgcgagctggctaaaacctttcctgaacaaatgacagactcacccttaaattactagtaataaattgggaaagagtttatcttaaaatataattttcagtgcttatattgtagtcttttataaaaaacttttaaaataaaaatttccttcttatttaagggttcatactggtggacttcagtcagtaattaaaatgccatatttgctggataatgtaggcacagagtgcctgagtttgcccaatgactgcccagtcccagatagatcagacagtcatccgacagggactccttcagctggcaaacaaaaagagcccatgccaaaagatgaaaataaaaacaattgctgacagtttcgcccaccgctgtgcaatgttacccaatttgagcccaaggcaatgcagcttcatctgccattcacttttgcgatgcagtgcctcgaagtccggctcccctccagtgaccaagctctgaccatccttcgatgcagttgcccaaaaagtggctaccaatagctatttggttacttaacccggcaacaatttagctgacttggatttctcattttcccatgacgacggctcccttcgctcaattcgctgccatcgtccatcgttgacaatttcttccttgtgtcccggcatctctcgaacatttttgccaattggcagctgaaatgattagcaaattactcgatctccccatgagaccacgactgtgtgttcctcgaaatcgtaattgtcgcccgtttcaaaaatcgattggaaactgcaagtttattgggtaatcttgctcagacttaatttcttgtgtgggcaactggaaggatttatgagtgactcgcttggcataacaattaaagtataattatactaacccatataaggagacatgaaccacttctctctacttcgagataattcactttgttattgctagacaaatggcattcccatttggccattgcaatttttcaatatttgtctaatgtttcctaaatttgtttgcacgagttgcaaatcacagtccatcatctaattgctgggaaacacaccgcaggcaaaacaatcagtcggaatcgtagatctgcgagggggaataatattattgctgacttggggcgatgacacttcatagttgtcagcggacgattgcggctttggattgagtacgtgtatcgccatcacttctttattcttttttcgtttttgtcttttgcaacaaccaactatcgatctgctgggcagcatatgcatctgccatctgcattcgagtctgttttgtcaaagtgtcgactacgaatgtgtaatgtgtaggaaacgcggatcgtttggcgcgattgcttcttgtttgctggcgaaacgttaattgcataattgactgcaagaggcgtaactcttggccagaaagtgcccatgcattggccatcgttgtcatcgtcatcgccatcgccatcgccaccgtcgtcctctcgatatttgagcccctgctgaccgccccatggatggtcaaaatgcggactgatgagccatccaactgggcaggtcccaaacaggaggcggccagcagtccaaaccacaacgggttcccatttctactttttgtcttttgcatttatatgcctcacaaggggtatctgtaattttccaataattcgattcgaatgttataaaaatagtcgtattgttccattaaaagtattcttgactctggttgtgaatagaatatattgatcttagagagcaatctttgttctaaaagagtattttgggatgcggtctgcttgattaaagatgaaatttcttgttttatttctccgactgaggctgtggcagacgttgcagccgcgtcatcatcttttctttcagctgaattgtgttaaaatgttaatttcgcgttacgtaatctgtgtcatatctagcaggcagcaggcagccagtcggagttggccgggcagctgggatcttcatcatcgtcagctcatccacatcccatggatgcacggacacaatggggagtgcatgtgaaaaaagtgagaggattcccaggcttggccagttagctcggcttggtcttcccgcacactcacacaccaaagcagctacagctgtgcacacccacacacgctgcggagtgccgagtgttgagtgcactttgtgcgttttgtggcaaattaaaagataaaacccacagagccggcagctgcagaagcaaacacttcgcaaacaggctgcaattagtctccccttcgtgcgatttgtttatcttgccgctcggatctcgaatctcctccagctgcgattccggttccctctgcggatgcacagaccaccggatgggtaacactcgagcccttccatgtcattgatttatttacgcccaatttattgctgtctatacatgcatctgcgtatggcaggaaacaactttgcagaaatacagaaactttgctttagctcgcaaagatttaattttattttttcccatgcgtgtaaatgtcagcacgtaataacaatgtatgaatatacacaattttggaatataaagactgcaaactagtattgtttttaatgttttcttgtgcaattctaatattttttgcatctgagttgcacgttaaagaacttaaatgcccaaagaaaaaaaaaagagctgtaaatttaaatgccagattgtttaaacaagagaacataaatatgccgtaaaaatgtaaatataggaatctatccattttaaaatatttgtacatacaatgaatgcacgtttaatagcaatttttcgaataaataaatatctagcacctctacaaatatatttgttctcacaacttgggtgatttattggttaccaatatttgatgagtcctagccaaatgttggatacctaattctttgttaattatgcaagagtctactatttgttcgcagtcttgtggacaaatcgttgaactattgcataatgaagcgtgcagtctattaattatggaacaaacaagtagaaagacattaacattaaccatcgactttatgggcagctcatttggactgtttgccctcgactataaaattgatcagcctgttcgtattcggtcaattttggcttaaatcaataaaactgaatacggtggtggttcaatggccaggagtttttcggtgctcaggaccataaatcagccaattaatgttcgtaaattaaacatagacaaggtgagaggacagttcgtgtatgtaaaatggtttcaaatcgcttactgtagttgcataaaggacaaagtaaaagagtagcggtgccgctccacaccgctgcaaatgaggtttaattatgggactaggagaatgctctgtcatttgttggccagaaagagccgtttgtggccaaaacaaagcgcgttggtagctgcagatggtagacagctgttcggcaattgtggttgcatctgctgttgattgagaaaacatcttgtccagccgttgtcttgcccctcacctgtctagctgtttgtgcttgtttgtcggcgtggtttgtttgtttgtttggcgcccaaacaagtttattctataaaagtgaaaggttcggacttgcattcaactcttatgaatgtcgactgggtgcaatctgtgtcagtgacgcactaaaaatgttcggactcgaagacgagtgcccctaatggagatgatcacttgaactcaacgactatatttcatttgcgtacacttcaggcaaaagttctataagttccataccataaaaagaaatatttgtggctattttctaaaaaaaaaacaagaattaattatttaaaaattagctagactaaattattttatcgccaaagtcttacgcttcaagttttttttttaacgtgtagccatacacaacatagtgatattaccatcacgcagtcattgagaaaatcaatgaggctgctcattaatgttagaactatacgaccgcatcaaattgcagctgctactttgtcacattgcgtatacgcctcgtacgacgtggttacaaatgaatgggggagactcagctaacaagctaacccgtcgtcgacagcatttggataatgttaatttgtagctgaccaaggatggtgagcaattcgaatcaaagttcagctttggttgcgcaacaattggaagtggcaattttacgcggacttagataatttaaagctaattcattttgagcaatgagtgcatcatttaaaatactactgaaaagttcatcactcgttatagttgttacaatggcattacgaagatcatcagttgggcctgcccagggagtcaaaatgtgtgattcgcggcaatttgagccgattttcgtgtatccgtgtttcagccttccaactgagcggcttgtaattaattcgtgaacatcgcctgccgggcttttattcagccgcaggcccacaccctccatgggagtctctcccgcctccgactccagctgaagtattcatttgctggccgggcgatagcatcaggtggacaataaaaatgccttgacgagtttcaatttatgaagtgcaacatctctagcaattattttcttataattttaaccgcacagtatttttaactctttgtaaataggccgccgttatataacatttgagtaaacctctttaaaagttatatatgtgtttaggaattttcctctgtgcagcaatcaaatggaaaccaacaggtagctggtgtcggacttgagaaatggcagacacgaacaatttagattaaagcggatcccccagaaaggggaagggaagtggatgctggccgtactttccagcccaacgcttccctatttcacccattgaaccattcgaggaaatcccgcacagaaataattcaaattgataagccactgttaatggtcaactcttaatgaccagtagcagtggcgaagcggtttaacgttaacttgccatcgttttgttgttacttcttgcctcattgttgctgctgttgtcgactgccattatctttgagttggcactttaaactcgtaattagtttacacttgcggtaattgcggcataaatcttcaacttgccaagtgtcgtaatatccaaggcacacatacactggctctcgcatgcagagcaatccctatctggatccctggaggcgcacgagtgtggctctcgttcccaacaactttatatttgcatcccttgccacacaccaccttcttcccagctccgtttccacctccattcccataccatcccatcggatacgatcccatcccaagccaactgccgcaaaatgatttgtggccttaagtggagctcgaaacgtcgtgctctgcagcaaatttttccagctggcttgtggactccaaaaacatgaaaacaaaagcagttcgactgggctaaaaataaaaataaaatcccccaaaacgagtaaacacatcaagaaatatttctaaccttcttgatggaacagaactcaatgtacgaccaaagcatcgttattttcgcaaagtcaatataagtacgatatgtgaacagttttgttatttggtagggtaaataatattctcccacataaaccttttaaaacagatttttaatatgttatatttcgagtgcagagactgtgtgactttttgccgccagttggagttcgcctgttgtcatgccatttgcaaataaacagcgccactgcaaatatcatttctatcccgactgcaaataaaggcatgagcatggctcctctggacaaacccgcatcccactcttaacgtaggagcatttgttagttgctctcatggcgaaagtaatatggccatatcatggctcggacctggcccatgacgcagcatctgcgaccttttccgctcctcgagcaattgtctttgccggatcgagtgcgtgggtgcctttatggctattgtcgttttatgtgtttatagagccatggtgctattaaggtgtcgtctgtgcgactgttgccacaattgtcccattgtctgccaggtacggaaatgtcgcgtgctaagggcttcccccgtttctctacatatttggcttaaacgatagagttaatacaatattggggtaacgattgctgaagttcagtgggttagacgcaatgaggattgaagtgcaatgttgcagctcattggatatctcaagttatacgaacattttaatatgttagcttcaaagttttaagaaacatttaataatgaaaatactaagacaaaagtgcctaaaaacatcgaaatctcttgtcagattgagtaaattaaaaccgcaacttgtgcttgaaaacggaattgaatttcgttgtaatggaagatgttaacaggatagctaaaaggaaagaaacagagtaaaattggctgggaaaatggtttcattttgtttttcttcggcctgccgtctgcaatgaaatgtgaaaatgtgcgaaagaagcttgcaaaagtgaagcactttctcccgtctcgattttcgcgaaaagtaaacaacggttctgcatataagttgtagatacagataccgaaaaccagatagctggcaaccgccgacggaccacgacacgaccatgcatatccgtgagatacatttgctgatgccttttggccagcattgtggcgcctccactcgcttaattaaaacgtgagcatttgagggtgctgagtgtacgagtaaagactaaaggcgagcacaagccacaccaattcacccagaggcacgcatatcagatgcaagtaggtgcagatacagatacattcatgtggctaatgcactcgtgaggatgccaattagtgggtgcgattagcataaatgcgtaaaactttcgcgacaaccagccaccgtgatgtccagttgcagttgcggttgcacaattcggtggatcgcattgccgctcggatgcatccatgaaatacgccccaatccgcacaattatgtggtcacatgggtgaccaaggggcaaaaaagatgctatcggcgatggccaacacattggttcgaacttttgggtaaacctattagttgttgttacttaaaatgtaaagctaaataaatactaattgaagtttttaaaaggattttgttgtattaaaaattaaagaagaataaaacttatctaacctttacacaaatgtcaatgccgtatcgaatttacattaagtaccagattaaatccaagcccggcgaagatttgccataaaatgtaaccaattcgactttactattattttatgggtattaacatggaaaattacaagtattaaatgtttaaagctatctttcctggtcaatttctgcccacgtttctatccatctcttcctggagggcgaagtcgtggccaaattcatctgagaaagaagaaaaaagtatctcgtaccgacaaatgtgccacaaactgagccttggctctgttgtggttatgccagagcatttcctgacacgttttcccattcgaaaggttaaatgttgagcccctttgccaagatttcgccgggtgcgcctccttcgccttggccagacacttttgcggactccgactgccaactggcagacccacaacttacaacttacaactggctggctgcaactgtggcaaggtctgcaaggttaaaagcggccagctcgtgaatgcgaccacttgcggtcccatttgcaactgctgcaaattcgcgaattgcggatcgccagcctccggatacaaaccagttccaccagtgaccttttcgtgtctcgcgtaattttcataagcccctaatcgagccgcgtgtcaagtgcgtgagtcgcagcatctggcgatgattaaggggcggggcaggtgctgtagatcgcagatatatatctcccaactccaaggaaactggccaaatgcttgtacatttttcacaaattgagcacgcaaagttatgcgccacatccgttggcatacgttgggattttgcatcaaaagtgcgtgtgcctttaagtggcaaactgacttggatgttaacgctttagaggtgtttaaattgccttcatttcgggccttaacgagttggccttgccacagaataatcgatcgctctttagcctttttttcctttcgggtattacgcaacaaatgataaaaccctttcactcttctttctttgggccattgattatcttttccgcatttacgatgaagtcattttggcaagggacaattatcaccacattgcatacgaattcgtgaacgccccgatccgccggccatcgtcaacatctcggacacgttcgctcattaatatttgcactgccaattgaagcggtttcggtttgtcttaacaactaaaatggaaatgatgacaacaccggtggcagcaacaactgcaaaacaagcaacgccagctactttgcatgaatacaaaccgcaatgtgatctgcaaagtcacagcaattcgtagatactctataataatgcagaaaaatatttgttacagagttaaattaatttaaaaaattttaaaaatatatattttcagaaaactaccttacaggtaattgattaactttaagtagatccacattgtttaagtacaaatagggtagtaaaaatgtagtgcattctgattaattaaaccaaagcagcagattccagcttttaatgaatttagccaaattacgctatataattgaatgtacaccgaacaatgaattattcctaattgatatttaatgcttaatcgacttataaacgaaatacaaagaagactgaactgtgcactaccatttaagaggccgtttcagattaattacgagtgactgcatgtgacgttaaaaaatacttcaatcgacagcgtcttcatcttggatggcagtgcctaaaagcgaaagttagccagccagttccgatgggaatctcaatctctttgtggactggtcatttatctttgagttcaatttgcgcttacccaatcggttacggaggatttggggttgggggtggtggcgccgaggattcccatggcgatatggtcacggattttggagctgggggtgctgcatccattggagagccggtccatggtggtcatccattttggcgcgttgccacgcgttttgcagtcaccataaatcgccttgattatcgcgccattccaattgacggcagaggtctcgtctcatctttcataactcgatggccattgcatcctggaaccgggttgcgtaaccaatccgccgatggtccaatggaccactctctttggcttgactgtcatttgacggccgttctttcacttttcgctcgatgcccttaattgatttgaacaagttttcagccccggccgtgtttatcttgacattttcctgtttcccctggcataaagtgtccctcgccgcaggccttcagtcccttgaatcaatcttgtgactccaagttactggtttatatttcaggccttgtactcttggccaaagtgtgaaaactgaaacccatttacgcaaaatatgattttatattttgacttttgtttgtgttaaggaagctgctttaaacttagctgtcaacttcaattacttttgccaaagttttcggctttcaatcgaaattgaataagagcagcttaaccgaattacaagttccttgacagcaggtgaagaagtttttcaaggtttgtccctactctccagtgttttccatgacttcctgggagctctaaaatatccagaagacaaatcgagactgcagaggattgcgaaagacttgaagttaactccgctgctgcacgcaacaatggaaagatacaaagatacggtgatacaaaactatctgccgcccgaaaagtaaaaggaatcccaaacacctcacgcatatttacgtcttcgacagtgcaatttaaataattgtggtttcttctagccgcaagactgaagacttgtccaattgcataagccggccaataaagttgcgaatccgactctgtgcttaatgaccatttgcattatcttcttgccaaattgcacggagttcgtccagaggaactggccacgtatcgaggagtgtatggatgtctttgatgaattacgaatatttcgacagatatgcaaatgcgaatgtggctgccattgttggatcgatggccgaaagactcgcacgtttttccctttctcggcggcttttcttcttctcttcgggactccgggtttttggggcacgtgcagctgctgatggacagatactcgtaatgatgaaaaattgcgcccaggaaatgcagaaatgaaaatgaggagaaaacacaaagcgatttccgctgatttgggggaaaacctcttaatatgccacacaaaaagatattttcatttaatatgcatttgctgtctccaccccaaaagctgaaaaaaaaacaaacaaatcaacctcaatgaccgcgatcccacacaatttaacccccgcggttcccaccgcaaccataaattacaccgcaattggcattataaactcagttccaatccacagatttcacctccatttcagttccacttcagtttgggtgggagccgcagatatttgaaattccactcggcggcaagggaatcaattgcaatccaaatgcaataaaagtttggcacatgcaaatccaagtgagcggcatgcccttattggcatacaatgtgcttttctcactcaattttatgacgaagaggacacatcctttatagcgttaaaatatgatttattttacctaatattatactgcacaaaataaagaacattcaaaagttgtgtgcaatatatttggtttcaaatttaatacatatgcttttcatagcattacatacgtacattaaattttttagttttctctgtttacaaaaatgagataaatgcagatgtttttgaaagccctgatgttgtaaaccactttatactgctctcttgttttttcgctgtgcatcggctgttggctttaattatttcattaggtaaacttttacgatatgcattaagagcagactggcgcacaatcaaagtcggcagttttttctcacgttttcgcttttgcgaactcggcagcatccagttttaggatccattcgaattgcacctgatttgtaaaattacgcatacgccccgttgtgcgcccgttttatggcctcttttgcatttatgcctgtgcacatttaaactagcgccacatttcttgggactcataggtgtgaatttaatttttatttgtgaattaagttgagagttagcttcgtaactagtctccctcgttgcgaatccatatgaagtaactcctgctcaactttgaacttcgcagttactcttccgcggtgccagaaatgcagccaaagttgcaacttcaaaagtgatataggtgaaatgcgttgggtatgtgctagaggtggcggatgattaatgttctgcacttgacacgactttttcatttgtcagttggttagaaaggcaccgaaatgcgataaaacaacactactcggcaaattgtaacatagtggtattctactaaaattgcgtccattaaacggctactctaaattaaagaaaaaattgctgaaagtcatgcaaatttgagactgcagggcataagaaacagagatcggcaggtgtgaaagtgttttgcagccatgaacgacattgcaaggtattgcaattaaattaacaacttcttgtgggctctaaaacggaagtaataagttgcaagaatgagtgtggaatagtgtggaatggattgaaagcgcaaacgtttttaatgcattgaataagtgcagaaataaaactaatgcggcacttgtgaaatatttagtcgctgagctcagtgttcagagtttactcaaggtactattagtattacttaattcgtttgcttcttgcatttcaaggaatccgtgcattgttatacaaggaggtgtttaacaaaacttgtatggaaaaaaccttaatctctcaagtaaattgcttgggttaccagttgtttaatccaattttaaagtgagagctgcggtagacatctgtaaatccaaatccaatttaggtacaatgggcaaaagtttatgcagagacacacaccaacttttaattgccgcctgcaaatgaaggttaatgacaaacatttgcgttcggctcgaagactactaaccactgcgaatggcccattcgctatcagacattaacattttcatttgcctgcgaccttagacaatttgccgtgttgcttgaattgccaaatggtcaaaccgttaagctaaaatccaaaaaataaaagccatctctgtggcaaaaagtcgttgacactaattagcatttaaaagtgagcgagcagaaacttttgcgccggcagaagagttcgagtagcaaccaattcaattgaattgaacagctcgagccgttggacatccgaacataaaataaataataagtctgcagatcgcgaatcgatgctccaaagcggcgataccatcgcggacagatggaagatgcaattgacgcgccggcggcaacatacaacacacaccgcagccgcatgcaacatgcaccaactgaagcaacaccaaaaatgtcaaatgtaaaaacggcgaaaccgttcagtcggctgcacaaactaaaaatacaaaaaaaaaaaaacccagagaaaaacgcaaagagcctaaacacagaaatcgcatacaacaataaaaaaaatttgcacgctgccgtttgcctaacaagcaggaagtgttgctgggcagactggagatggaaaaccgaggaggaggaggaggatgaggtggtggcgagcgggatgatgccgccggtaaaaaccagcgacaatggatgcaggaagcaacaactgtcgtcgtcttagccgacttcctacccatcatccgccgaccgccgactcggtccccaaaatcataaaaattccccacttgccagggatgttcccatctttttgtccattgcgtgcgctttatctttcagtgtcaaactgaaggtattgcatctttgtatcttttatgcaactttctgttgtttcaccgcccaccgaggcgtcggcacagtgagcaaagttcaaatcatcggaatcccagatatgcatgttcggatgactgaataaacaaattttcctctgacattttgtgggttcacacatcatatgcaaatgattttgtagctgcacgaaattttaattactgctactcataaatggatacatgtcaggagtttatttacaacgtatattggaaattttaggggcaaaataaattgtggttggtaccaattttatttggcgattcaaattgttatttgaaaacgaacagtgattaccttagctaaacgaaatgtttaatgttaaatatgagagaaaatattgctggattatttcaaactaaacgtagcatccatttgtctaatacttgcatttcacagcctttgcaacgcattcaaattacgtcccacattacaacttactgagttaagcactccagtacactaaatctcacacagttgattttactccaatttaaacgctttttatcgtccccaaggcattgtgcccccccatcgacagtcgaccgctgcttttagccgcttatttttagccgcattgttgagcgtgagatttatcgccagctgcggtttctttttggccttttggcgatcggcgcgcttttggcgctattttcccagcggcattcggaagttgaatgaaaaccgtttagtttgggcaaaaggaaagcgcttactctcaccctttagctaccaaataccctttttagttttcaaaatatttgttaactgataagttacattgtttttaactttaactactactttgaactactattaactacaacaaatattattagaatcctaatcaaatacaatagtttgttaaaatgctatattttactgttttttaggcataacttggcttagaagtaagccacagatggccgatatgtatttttttacacctgatcacctacagaatcgaaccaaactattcccaggctaatgccaagaaaaattttttttctcaaaattttcgatttttataaggggtaccatcataaaatttttcaaaaattaaaaaaaaatttttttttatatttataataattcgaatgccagtttaaagacaataatttttctagctcatcaaggtatgacattccatattgaaactgatttttcagagtatctcagagatgcaaacgcaaaaaacgtgtgcatttcaaggcgaccgcttttcgtggactcagatgtgaactcgaacttggattgcagctccgatttgcattcccatccgtcgagtgacattcggaggcagcagagttgcagattgaacggccactggttgctccttggtggcggcgggtgctgttggccaggctttgaattcgatttaattcggctcttttggctctttgaattcgatttcgtttcccagaccgagcaatttattgcagcctcgagtttgtcaatacacgaaaaatcgctcgacgctcgttagccaagacagtgtttgcatatggcaacagttgctcctggctcaacgtggcccgaagaaaagccagctttggtttttttttattgcggttatgcaaccgctgagagcgattcaaggtgaaatcgcaataggaaacactgcccggctgacagctgactgcagttgcgttttaatttttattattattattcctaagagcgcgagcatcagcgagtttgagtccacatcctcacgggcatcaaaaggtggagctgggttgtgtttcccccaccaggtggtaattacacacacccaagccacaaagtcgtttgtcaagtgtcgtttatgaattgccgtgattcatgagcactcgaatttaattaccgggattggagaaatgctcattccattagccgcaagaaatatgagtaatcgagtgggcttgaaaacagtgtcaaacaaaactgtgatgtgtcaaaaagtgaaatacacacacattgatttttgaggtgagcgctgtatggggcataaaagtgttaattatatgtcaactactgtatgtttctaaatttatttgagtcgttactaggattaccacccagggattattttacgcaccatttggttcccccttacatatgttttttctttaatttgttatgttattattatcatttgaagctgccgccttaaaaaaatttaaaatcgcatcgaatcgtacaataaaaatgctgacccgaaaactgacatctaattgaaaaagtgttggttcgaattacacctttctctgttttgtattcggttcattgaacgttgagttggctcgaactgatggaccacttcattaaacttaacacaattagccgtctgaatacgaaaagtggcagtggaacgaagttgattggctttaataacattacgtgttaaaaaaaatccgttaagtcttgccatttaacagaattttattttgtttacaagtttgaattacgcaacacatcaattcaacgagccattgtgggttaatagttgtaataaaataaacaaaaaattacacatttatatgcaactaaaaaactatgatttatccgaaggcaaaatgatttctgaaatcttctatatttcgcatttatcataaaaacgaatgtagttaattcttaaaaaatactagcttgttactcaaaaaaagtgtaaacttacgacatactttatcacagcaaagtatatgtttcatgtagtatgaaatatgcaactgtgagccgaaatttggtaacctcacattatgcaccatacccatttttggtttcaaaaacaaacgccatccagagccaacattatttgtgatttatttgccatggctcgaacaccaaggatgtctgacaataaatacaatcccgcctggcaattactttcgcacaccaggcacggccaacccagttttatcgttatctatacggagaatctacggatcgtaggcctcgcacagtggcacacttacacacactcgcagtcacaaacacaatcacactcattcactcacacactcagtcagtcatctcatccatcatggcacgtattcgcatttgtcgtgcgaaggtgggcagagaaattgggctcccttagaaaagaaaacacaatggcagcccagagatccgcagacagacatcaaattatattcgaaattgccattgtttgcagagtggagagactgctagctcatcgggagttttcctacaattttcactttcgttgagagcagaagcgtgcagaaattttccaaattcgaccccagaaaagcctccgttcgccaggccagctgacgctgaagtgagggatcggttataacccagcagcggcaaaagcagcggcagcccagcggcgatgagagcgaaagtgcacgacactgggtctcgacttggccaaaatgtgtggccaaaacgaggagctcgaagagagagagaaagagagagagagagagctctccagcacatccacatccgacagcgggaaatcggcggtgctgtaataagttgattgtgcggtaatttcggtttcacttgccatcccacacagacaggcagacggtaaccccacagatacaagtaagctgggagttaaagatacagatacttttgcagacagagacacagacagatggccaagacagcgtctcattattggcctgctcgccacgcatgcgcagtgcccagaaagcaaagtcgcatcatcatcaccatcaccaaaaaacgaaaaacccaagccgaaacggagaccctctcgcagttacaacaactgctgatattgtggtagtggtgctgtgcatctggctggatttctgtataaattggtgatgcggctgcagtggttcgtcagtgaagcatttgatttggtctaataaacagcagccgagtgcaatccgaggatatagcaacgtgaggcacttgaagctttgagttaacccaaaccgtataactgaatccccgtcttgtttctgttcttcccaaacaaaaatcattgcatctacaaaaccacagaccgaggattactgtgacatagtgccgagtgctaaagtgtgtgcgttgtgaacgaaaaatccgtgaatccccatctagtatccataacccatacgcaccgttgacccgtgattgttcagccatgaaagccttcatcctaatgtcctgcctggcgctggccgccgctcgtcctgaagccggatacaactacaaccgtcctggtggcggcggtggctctggcggcggctccggcggtggcctgggcggtggattcggaggtggctccagcggcggcttcggcggcggtattggtggaggattcggtggtggattcggcggtggcagcggcggaggaggattcagcagcggcggaggcggtggcttcagcagcggcggtggtggaggcggaggcggtggattcggcggtggattcggaggcggctccggcggcggctccggcggcggtttcggcggaggtgcgtgggctttacacccaggatcacttccgaatgtaatcctaatttaacaaaacataatattgttcacccacaggtggcagcattggcggattcggaggcggcggcggtggtggtggtggcaccaccttggtgcagaagcacatctacgtgcacgtgccaccaccagagcaggaagaagtgcgccagcgccctaacctgcccattggccagtcccagaagcactacaagatcatcttcatcaaggccccatcgccaccatcgtaccaggctccggtcattcccctgcagcctcagaacgaggagaagactctggtctacgtgctggtgaagaagcccgaggatcagcaggacattgtcatccccacgcccgcacccacgcagccatcgaagcccgaggtgtacttcatcaagtacaagacccagaaggattccagcggcatttctggaggaatctccggctccactggtggcttcacccagaccaacaccggcaatggttacacctctggcggcgatggtggcttcactggtggagacagcggctccatctcggccccgtccagcaactacggaccacctggaaagtccggaccctactaaatggatcttcaacccatcgtgaactcaaaattgcgaacttcgaactcggcccaagctgctgactagtcctgtcgttgacacgcccccaaactctcacatttgagtaccacatcatccacatcacattaaccacctcacgatcttcgaccaccatgtgtccctgaattatctcagatttgcatcactccttttaatcgagggggcggcgctttcgcccacgacttttgtacataatacgtttccatttttccgtttccactcactctgactatccacctttttgcatctgtacatttttcaccttcaactaaattagagtctaaccttcagccctgcctggaaaattctattagctaataggcgacaagtgcgggttccttggatggtaacctcacctggcgcccggaagagcgaatgatgatgatgatgatgatttgtagcagaagatgatttagcggggcctgacttgctccatacatataaatacatatactttaattatactaggcttaagtacgttatgcacaaataaaaaaacaacggtgacaaaattacgaaaaaaaaaacactaagatattttaatttcacactctagaagctaaaaggtacttagtagtcaagggaactccttagctgaccctgtagttgaactctggggtagtgaactaatgaaaagttaatttcatgcttctgttttcttttcgatagattttacttctttctgtggttggatagaaactaagaacccagttgaccagcaatttaaatccttataattaatttgaatcttttcttggccaagttttcatttgaactttcagctaagttgcggtggaaagtgtgccaaaactttaaaacgcttttagtggctccagttgcacaatcgcaagaagttgctattttattacaagtttccaggaaagaggcaggaagatcgttcgcctgaagtttgttaatgacaaactgttgctccgggttttccctctcattaccaactgctttgaaacccttcaatttggctttgccttattttctttgtgaatttctgtttatttgtttaatctcatttcttttttttttgccacaatcttttaatgccttaagtatacagacagcatgacattgtcattgccgcccgaccttctttccctcattttcgacaaactctagcactttcactttatcgcgattgttgctgttacctttaacccatatcagcctactttttattgcaatacttaagataattcagatgaatttaaatttgttatgttttggctaacataaatatattcatctttcttgggttcaacaattaaacacacgataactgataaatgtatacatgaaatacaaaaaaaaaattaatagtttttaaaacaaaaatataaaatcgaagttatctaaaggggtggcaagcgaatatatcacccaaacgggttaaccatatattttcgtctatttttacagggggctcagttcaattcggcgtgcagtgtgccgctgcctttgttcccagcctcatatttcactggcatatgcttcgcttccgcctgtctgggccaaaaatgaactgctgctgttgtttttaccatgactatagattcaccaacaatttgtgcccgcgcaatcaatggcaatccgtcatacaaagcgtcgccctgcggcacactttactggaatttgttcgagagcctctcacaaatcacatacaaatttaagaaaagctagtatagcttttccattgatgttcaatatacatggtctactataggtattagaacgttctaactgaaagtatagtttggtagcaaaaaattcttcagtaagcctaattaattctttttggcacacgtgtggcattctctttgctcggatattcctagttggctcgtaaaaaaaggaaacgtgttgcccggcgggcaaagtggccaaaacagggcaaactgtgtaacagaacgaccataaacagggctttgaaagtgggcaattggccggaaaaaacgatgaagtggccaatgaaacgaacctgtatagatcctgcccaaaaaccgaacatgaccgcttgcagttgggaaatttgaaaagtctctaaagttgcaaatttttgcactttccttttcgatggaaatatccttttgtccttctgtcatttgcactttcaaccaatcatttgaaaaaagatgggaaatttttattttaacttaagtctaactttttaaatcattggttcttcatgataagcaaaataaataaacttttataaatgggacttccatttatgaagaaaattaaatcttcaaattttaatttgtacaagaacgcaaagcaaacataaagagatttgttacacggacactggaaaatacattattttatcatagcccaccaacattcctccaaaaaaatatatatatgtacacaaggcaacatatttatgacctttacttttcactcggtgggcgtgatggtttctcttgtgtgagtttttttttattcatttcccatttccaggcccacaataaatcgcagctgaaaaacttccgaaaggtcaaagcaaaaaaatgagactgtatagcactttcagtttcctcgtttaattgacatcggttgacaaaggtttatgacactttgacgctataattaattgtgcgtattcctgccacgccccctgactaacgagggcgttgggttaattataatgtatgtatgtaggtcgtaaatgcaaaagtaggctaacggacaaaaatccgtcaaaatattcctgtctttgacttaagttggttttatcgtctaatatggcttattcagaagctcgaggaaatgtagaacctatttctacaaccaagccttgttccttggactataaatcgcatagcctataattgcagccaacaaaagtccatttggcactccacccagtttactcccattttgtgttttgctttcttttattattttattggattattttttatgactttgttttttacggggctttgtggtggtcatttgctgattgcactcaatttatttgtgtgcagctttaaaattagcagctcttcaacttttgagttggttcactaaagttattataagtaataagcacccacaagcctttgatagctttgctgaaataaaatttataaatatcatctgaaagcttaaaataattcattcaaattgaattcaaaagttaaacaacactttgtaaagcgaggatgcaaaaggggcacaaactggtgctgtaatttgccgtgtaaattagttgctgattagtttggctgtcggccgagcgaaatgtttaatgaccgtttgattttggccatttcacggataacaacttaaaagttgggtgcgcacctcgactgattttcgggttgtggcttttaaattaccaaaactattacgaacttggcttcttttttttctagcactttcgcaattgctaggcaattaaaagctggttcaattaccacatcgtaagacatgcgggtgcccaggggtcagttgttattaccgggaattggtcaagataacttggggcacgagctaatcgataagtgaaatggattgattaatgattgtaagcttcaaatattggcgctctacccttttattgatccagtttccgttcgcgttgttattattttatttaaaattttttaggacccggttatctactcccacgcaaaagagagatttccattgtgcagcgttgtgaatataattttatgcttttaattttcagcaaactgtgttggcttactctccattcactttcaatgtcattaggctaagcagatggagaaaaaaacgttaccacgccttttttgtagttaactttaatagcattaaaagcatccggaaatgaattaaatctggcaaaatgcaaaacaaacatgcgccgtagaaagcttgattatcgaagttacgcctttaaagtttttttttaaaggaaaacatgtttacaacactttattaataactcaaactaaaaggatctagaataaggacccaattgcctgagacggacgtgtccggtaatttaattagtgaattactttggagaaaggaagtggcataaagtccgctcggtacctcatcacaacctttctattacactttctaactgattgaaacagactcgccggatccaagctcatttgtcagcctaagactttgatggcccaattccaaatgctgcccgctttgattttgtgggtgtgaatccgaaaacattttgatgaattacaacacggctgtactgagccacaaaaatgagctcattttttatgtaagcccagacgcggcataaactttgatgggcggactcaggcatatccagcaaccggttcaaaaccaaaacaaatcaccgaaaaagccaagtgccttgtgattgcagctaatgccggcagcctccgcagccggcaattaagtcatggaactgtcacgctcaggtggccaaaacaaactgccaaaataaagatgaaactggagccgcgggcgctgaaaatatagccggcacatatgacatatggcaggagagtcagcacttcagtcggccaaggcataaagacttctccagacgccagatgatgttgcagtttccgcccacagtcgaagagtgccctagaagaaaatcaacttttaaatcataatttttaaagaaataatcacatttaaaaaaaaaaacactttttcttcctgtgtggggttagggaaagttgatgccagagttcattcgtctgcagacacatgttggggccaaaggtcacagctggaggagacgcgtgtccaggcgtcaagggaaaaaaacagcatgaacatatttgtataaacattcattacgagcttgcttgggcgcactgtgtttgctcctcgtcttgctgctttgacgtccaacaacgcggcgtatacttaatgttgacattgttaacactacccggctggatggtcgactaacgagccattaaagcgaatcaaatggccgcgttgagcactcgttaagtttgcccagctaagctgtagactggaacgggaaactgcatctgaaatgggagaatcgcccgacaacaaaggcggccaataaaacgacttggcgggttcataaaatgcaactaccagctggcccagcggaaaactgcctccaaatgcacccatctgacatcagaaaattgtcggagaccgagattcgcatccccaacgaatctggagtccgttcataatcccctgcgattgagcaagattcaagattgtagtcgcattacccgccgattatgccataatatttgcatgcaaatatgattctatttatatccttgcaagtctgccttttaagaactcatctttgactttgcatttgattcgtctattgccctttgcatcaacaaaactttattatacattcaaataaaaaaaatttaaaaagtacatatttcagtttctgaaatccttggaaaccattttcgcataattagctaaaacattttatgttatgaggcttcgaaataacttttctgcaatctaagaaaacaatttttttttagtgtaagagattttagatgtgcaaactgaatgtatcatgcctttgtttcaggccgttaaactttatgtctagttttttattcaggtggtcacgttaaagagacgtggccactgagttcatcgttaaagtaaactaagccaccatattcgcaattcaggtcgattgtatttgcttgcagaaaaacaatccaaactcctctgaattgggcaacttttatagtatatgtgattaaagccccgtgacttacctaaataaatgatttaggatatccttgatatatgggctttttttccgttcacggaggtagagttttatatgtaacttgcgtgtcaaatagaaaagtaaaattgatgacctttctgtagagaatgaggaaagttttcgcagcctaagagtaggctacacaaatgtcacatttgcttgccaggctcaaagggaatcatatttcctaaacctcatgatgttacgatgaaaataagttgcaataggccataagggcgagtcattgccctatataaataaacttgaactgggtggttttatgttttatggtgggaatcgcaaacaacagattttacggctcaacagtctggaaaacgaaggtcaaggtcgttgtgtcataaaaaaattcgcggaataaattcgcgagtcctatgaatagactctgacttttagtgttcttgaattaacctcctcaccactttcagatggtcaaaatgatgctgacggttgtgattgtgttcacctgctgttggctgcccttcaatattttgcaggtgggttcttcgttgccggtgaataatcaacaattaactcgaattatattctatagcttttactgaacgacgaggagttcgcccactgggatcctctgccgtatgtgtggttcgcgtttcactggctggccatgtcgcactgctgctacaatccgatcatctactgctacatgaacgcccgtttcaggagcggattcgtccagctgatgcaccgtatgcccggcctgcgtcgctggtgctgcctgcggagcgtcggtgatcgcatgaacgcaacttccggtgagatgactacgaagtaccatcgccatgtcggcgatgccctattccggaaacccaaaatatgcattaggtgcaagacccttcacttagtatccgtttccgttttcctattcgtattgttgcgattttggttcatttaaagccagttgataatcatgtggatcgtccatagtccgtagccttgcatgccaattaggaagcacaacaaacacgctaccgcatgaattgcaccaaactgcatcttcccgttcgctagctttcaattttaaatcattttctaacagtatcctctcgtttacacgtacaactggcaaaaaaaacaaaaaaaaaggaacgggtccagcacttcctctcaatcgaatgaacacatccaccacctacatcagcgctcgtcgaaagccacgagcgacatctttgcgagcggtaagttcaaaacattttagaagattacttaagatatatttacaaaaatacgaagttgtttaattgaatatggaatgtcgaagatcttgccaaagatatttcattttccttcggcaaactattaaaatattaatacatatgtatgttctcctactcgttacgcctctattaaactagaacccattatcgtgcggcgagacgtcaccactgcggtagctgtcatatcaaaaaataaaactgattcaccggtgcgccgatcaggaagctcaggtggaacagaagcaaacataagaagcaccgagttttgagtgcgaatacaacgtgaaccaatcaaccaaagatcgaatacccccattttgttgagtgtatatgtgtgcgtgttttagtccgagtcctttaaattgtattgtaagtgtcaactcaatgtatttttaatgaaagtatattaaaagtaattaattaaaagtatatacaatattcacatgcaagtatttttgatcgtaattagcaagtttccgtaaagcccaaaatgatgcaatgaacaatgaactatctaaactattccacttaaaacgaagcctacttatgagctgcgagctcggattgagaagcgttttaccattaagtttattgcgccagcatccagaaacgtgcaaaagacacctgtatattcgatctaatcatatggctagcttaagtacaaacgggtagaaaaatcacttgactgttcctgttgcaattgcttattcgtcgagcacacccactaccaaatgcggcacttgggctggtcgggattcatgggcgttcctcgggcgcatttgaaggtcctggcaaactcctccgagttcgagagcactccccgcaaacgcatctgtcccgggcaatgagaatcggtgagcgcgtatcgcgatgctgccggcgtataggtctcacaccatagattcccaaacgagatgaagaagagctgctcatgggaatagtgctccaagccgggcaacttggaccgctcccggcccacttccttcacgtaaaggcggtacgcatagaaggcctcccgcattccgccgttgtctgcgatattctcgcccagcgtcagttcgccatcaatctgcattgaaagcatgtattatacataacggaaaattcaaattattcataagcaatgtttccctataattttactaacaaccagtattctactagtatatgaaaccagtgtacatgccatatttactcacatattcatcaatgtctgcgaggtggtagcggctatattgttccacaaagcactcggtgcgattgacatactcgtcaatggtcctatttgaccaccactcgaccatgttccctgcccggtcgaatctcctgccgctgtcgtcgaagccatgtgtgagttcgtggcccaggatggttccaatcgagccgtaattgagcgccctgccgaggacacagagcagcacacgggttatggccattccaggagaggattagtgctaggttcgggtgcgggtgcgtgcctgggtgtctgtttgctcggctatctgtgtgctcagtgctcggtttttagtgcttagtgctattcctgggtgaacttactcgagaccaaggtcgtaaaacgggtattgcagaatggcaatgggcacagctgcaaaagaagatagtgtcaggattaggcactacgcaagtaagtgttgtccacacccattcacagcaccactaaagttcagagagtcgtcaaactgtcttgacttgtttacattactctgtggttaaatttgacactttgacttagtaaacaaaaactaactcaggcaaaaacttcgtataattatgaaaatgaattcaattgttttctaaactttcagtggatttttcttaaagtgcacttact

SEQ ID NO: 12233 - DNA, 2063 bp, DROSOPHILA
gccatctgttgcctggtggcagcgagaagatgtactacatagctcaccagcagccgatgctgcggaacgaggatgataactaccaggaggggtacttcatcaggccggaccccgcatccttaatttacaataccaccgcactgccagcggacgatgaagggtccaactatggatatggctccaccacaacgctcagtggcctccagttcgagacctataatatcactgtgatgatgaactttagctgtgacgactatgaccttctatcggaggacatgtggtctagtgcctactttaagatcatcgtctacatgctctacattcccatctttatcttcgccctgatcggcaacggaacggtctgctatatcgtctattccacacctcgcatgcgcacggtcaccaattactttatagccagcttggccatcggcgacatcctgatgtccttcttctgcgttccgtcgtccttcatctcgctgttcatcctgaactactggccttttggcctggccctctgtcactttgtgaactactcgcaggcggtctcagttctggtcagcgcctatactttggtggccatcagcattgaccgctacatagccattatgtggccattaaagccacgcatcacaaaacgctatgccaccttcatcatcgccggcgtttggtttattgcacttgccaccgcacttcccatacccatcgtctctggactcgacatcccaatgtcgccgtggcacacgaaatgcgagaaatacatttgccgcgagatgtggccgtcgcggacgcaggagtactactacaccctgtccctcttcgcgctgcagttcgtcgtgccgctgggcgtgctcatcttcacctacgcccggatcaccattcgcgtctgggcgaaacgaccgccaggcgaggcggaaaccaaccgcgaccagcggatggcacgctccaaacggaaggtgagtcagatggtcaaaatgatgctgacggttgtgattgtgttcacctgctgttggctgcccttcaatattttgcagcttttactgaacgacgaggagttcgcccactgggatcctctgccgtatgtgtggttcgcgtttcactggctggccatgtcgcactgctgctacaatccgatcatctactgctacatgaacgcccgtttcaggagcggattcgtccagctgatgcaccgtatgcccggcctgcgtcgctggtgctgcctgcggagcgtcggtgatcgcatgaacgcaacttccggaacgggtccagcacttcctctcaatcgaatgaacacatccaccacctacatcagcgctcgtcgaaagccacgagcgacatctttgcgagcgaacccattatcgtgcggcgagacgtcaccactgcggtagctgtcatatcaaaaaataaaactgattcaccggtgcgccgatcaggaagctcaggtggaacagaagcaaacataagaagcaccgagttttgagtgcgaatacaacgtgaaccaatcaaccaaagatcgaatacccccattttgttgagtgtatatgtgtgcgtgttttagtccgagtcctttaaattgtattgtaagtgtcaactcaatgtatttttaatgaaagtatattaaaagtaattaattaaaagtatatacaatattcacatgcaagtatttttgatcgtaattagcaagtttccgtaaagcccaaaatgatgcaatgaacaatgaactatctaaactattccacttaaaacgaagcctacttatgagctgcgagctcggattgagaagcgttttaccattaagtttattgcgccagcatccagaaacgtgcaaaagacacctgtatattcgatctaatcatatggctagcttaagtacaaacgggtagaaaaatcacttgactgttcctgttgcaattgcttattcgtcgagcacacccactaccaaatgcggcacttgggctggtcgggattcatgggcgttcctcgggcgcatttgaaggtcctggcaaactcctccgagttcgagagcactccccgcaaacgcatctgtcccgggcaatgagaat

SEQ ID NO: 12234 - protein, 452 aa, DROSOPHILA
MYYIAHQQPMLRNEDDNYQEGYFIRPDPASLIYNTTALPADDEGSNYGYGSTTTLSGLQFETYNITVMMNFSCDDYDLLSEDMWSSAYFKIIVYMLYIPIFIFALIGNGTVCYIVYSTPRMRTVTNYFIASLAIGDILMSFFCVPSSFISLFILNYWPFGLALCHFVNYSQAVSVLVSAYTLVAISIDRYIAIMWPLKPRITKRYATFIIAGVWFIALATALPIPIVSGLDIPMSPWHTKCEKYICREMWPSRTQEYYYTLSLFALQFVVPLGVLIFTYARITIRVWAKRPPGEAETNRDQRMARSKRKVSQMVKMMLTVVIVFTCCWLPFNILQLLLNDEEFAHWDPLPYVWFAFHWLAMSHCCYNPIIYCYMNARFRSGFVQLMHRMPGLRRWCCLRSVGDRMNATSGTGPALPLNRMNTSTTYISARRKPRATSLRANPLSCGETSPLR

SEQ ID NO: 12235 - DNA, 3749 bp, DROSOPHILA
actacacggcattttgcaagagcgccaactacggaaaatggttcaagttcgacgatcaggtcgtctcggcgttggactcctctaacgtggtttctagcgctgcatacattcttttctacacctggctgccacccatgcaggtgcctctgtagacgcttcgctcggtttcctttcggtttttacccctttcgttttaattgttttttgtttttctctcatattatagcttttaaggtctagtcgccacacccttttatcatttacaaattaccgcttaactgttaactgctatttaagaggataatcgcttgtttgttgttgtctaggctcttagaacagtattacgcgtgggcgtattttcaatgggtgcaggctgcattcactaaaaccaagaacttcaagtgcattaccagtgtaacaaagagaagcccgcatatacgcctgtgtatgcgggactatagtttattgtattttgcaaatatattttaaaaccaaataaacgaaattcaatttctgatacaaagaatttctttgaaagaatcatgcgtagggtttttagaaaacaaattggggagagcgggtattttacactcaacaaataatataaaaaagggggtgaaagttattttaccattgcaaagaaaaattcagctaattttcgcgccgaaaagttcaattcgagatatccgataagtaaatatattcacttccaactaacggtcacactgtaaaacgcccccgctctttagcaaatgcagtgttgccaactcttgctttcaataaatagctagttagttgatttatcaattattacatttatagtgttttatgtatgccctatttttcatttataaagagttatgatttaaacttattaaataagatgatgaaattgatgattcaaaagaagaacatagctataacagtgcacctaaaaaatggccaaaaatacaggtgcttgcaatcacttaatctaatctggctagtagccagctaaagcggcagcaccgaccacgtatttgattggattatttgatagtcaacgccaaatcacggcactgcagccgcgactccagagaatgccaactgtttaggatcgtgcattaagtccgacttaaccaattcgcaagtcacacgctttaaaaaccgtcatctgcccgccatgaatctgccggaacgcagccgttttgtgatctacgccgtcggtatcttcgtatgctacttcttgtacggaattgtccaggagaagttgacgcggggccgctacggcgaggaggtacagacagatggatccgtgggagagcgcttcacttacgccttggcccttgtttgggtgcagtgcctctgcaactatgtgtttgccaagggtaaggattacgtggacttgtaacgaatcaattctgatctgtggtcttccagtgctgctgaccattaggccgcaaaaggaggacaccaccaacgcgggctcctacgtggcctgttcgctgacctatcttctggccatggtctccaccaatatggccatgcgctgggttccctatcccactgctgtggtgggtaaatccgccaagcccatccccgtcatgatcctgggcgtgctgattggtcgcaaatcctacagctggacgcgctatgcttgcgtattgaccattgtcctgggagttattctctttatgtacaaggagggcaaggtgtccaatttgccggctgagaccacgcttctcggcgaggtgctgctcttcctcagtttgtcaatggacggattgactggagccgttcaggaacgcatccgagcggccagcgcgccttccggtcagcagatgatgagggccatgaacttctggagcaccctgatgcttggcgttgccatggtatttacaggtgagtgttaaaaacactttatttgagctaaaaatattggctaagacctttttatgtaagccccatacgtttttataaatgttctgaaaaactataaaaaaaatcttcaggtgaggccaaggaattcatgtacttcaccatccgacatcccgaggcgtggacccatttatcgctgatagctgtgtgcggcgtgctcggtcagttcttcatctttctgatggtggccagctttggacctctggcctgctccgtggttacgacgacgcgaaagttctttaccgtcctgtgctccgttctgctgttcggaaacgtcctgattgcccgccagtggcttggagctgtcctggtgttcgccgcactctttgtggacatgctgtacggcaagaaggcgccactggctacggccaaaaagccgccagtcgagggaaagctatccgaggaaaagaaactgaattcgtagaatttgatagatgattgcatagccctatgtactgtacatacacaaattaagaagacaatgcttccggctcgagcggctgcagcgccaaagtttccccatttcctagaactgcttatcgtacaaaggattctagctatagcgaacacagcattcgatacttgatctgcaacccatagaccgtcgtttaagttaattaaattattgatatctattagaaaaggaacaaatattgtgcaaaagtttacaccagacctgcgggtctctaacatacaggatcattcaatcatttaatgctacaatttataattaaaacgtgctcttttattaatggttgtattatttatatggaacgttactaagaaggcctaacaaaggcaacttattttctggctcagtttaataaatattttcccatttttttttgtattttctttaacttgaatttaaagcgcttaaatcagagctgccaccttacacgaaatgtgaactacgttcataggcaaaagtaagatgctatgaaactcgagttccaagataaaatatcaatttcgtgttatactgaaataagatttaatattgtgttagctactatataaaccgtaataatatgaaaaaaagactacacaaattagttgtatcgataccgcgacgaatcaattggcaacaatcgataggatcactttgccgaccctggcaactctagtttattgccgtagccgttgcagatacggtcgaaattttcagaatgtttttaaaatgtataaatccagtgtgcgcaatgctaattatacaataaactaatcgggacgaaaatttccgaaaaataaaagaacgcatgtttcgagtttcggaacggaacggaaggaaacacaaacgcgaaattaagcgaaagttggaaaaaggatatgcccagtattagcgggaaaatgcaataaaaattgcaaagaaaagcaatcgaaatgcaaaaattgtgattatttttaacagcaacgaatgcagtgtgacgtgtgattaaaaagaataataaaattggctcgtttgcataaatcaaataaaatattttcttattggatgagtcgcactctagttgttgttgttgctgctaccgctgccagctgtttgactgtgtatttgtttttgccctggtgacgtccgtgcgcgtgtgtatgcgagtgtcttttagtgctttggcttaattttagcaactaaattcgatcgaaagtgagtgtgggtcgcagcgacgcgaataaaagcaaagacaaaggcggcaaagtaagtgaattgtgtgtacataagcgggatatgtaagatgtaatttcaaaattttactctgtaaatgtgctcacatgttgaagtgggagtgaaagcacgataaacaaccccaaatcacgctgtcgccctgtctctt

SEQ ID NO: 12236 - DNA, 1587 bp, DROSOPHILA
ggcagcaccgaccacgtatttgattggattatttgatagtcaacgccaaatcacggcactgcagccgcgactccagagaatgccaactgtttaggatcgtgcattaagtccgacttaaccaattcgcaagtcacacgctttaaaaaccgtcatctgcccgccatgaatctgccggaacgcagccgttttgtgatctacgccgtcggtatcttcgtatgctacttcttgtacggaattgtccaggagaagttgacgcggggccgctacggcgaggaggtacagacagatggatccgtgggagagcgcttcacttacgccttggcccttgtttgggtgcagtgcctctgcaactatgtgtttgccaaggtgctgctgaccattaggccgcaaaaggaggacaccaccaacgcgggctcctacgtggcctgttcgctgacctatcttctggccatggtctccaccaatatggccatgcgctgggttccctatcccactgctgtggtgggtaaatccgccaagcccatccccgtcatgatcctgggcgtgctgattggtcgcaaatcctacagctggacgcgctatgcttgcgtattgaccattgtcctgggagttattctctttatgtacaaggagggcaaggtgtccaatttgccggctgagaccacgcttctcggcgaggtgctgctcttcctcagtttgtcaatggacggattgactggagccgttcaggaacgcatccgagcggccagcgcgccttccggtcagcagatgatgagggccatgaacttctggagcaccctgatgcttggcgttgccatggtatttacaggtgaggccaaggaattcatgtacttcaccatccgacatcccgaggcgtggacccatttatcgctgatagctgtgtgcggcgtgctcggtcagttcttcatctttctgatggtggccagctttggacctctggcctgctccgtggttacgacgacgcgaaagttctttaccgtcctgtgctccgttctgctgttcggaaacgtcctgattgcccgccagtggcttggagctgtcctggtgttcgccgcactctttgtggacatgctgtacggcaagaaggcgccactggctacggccaaaaagccgccagtcgagggaaagctatccgaggaaaagaaactgaattcgtagaatttgatagatgattgcatagccctatgtactgtacatacacaaattaagaagacaatgcttccggctcgagcggctgcagcgccaaagtttccccatttcctagaactgcttatcgtacaaaggattctagctatagcgaacacagcattcgatacttgatctgcaacccatagaccgtcgtttaagttaattaaattattgatatctattagaaaaggaacaaatattgtgcaaaagtttacaccagacctgcgggtctctaacatacaggatcattcaatcatttaatgctacaatttataattaaaacgtgctcttttattaatggttgtattatttatatggaacgttactaagaaggcctaacaaaggcaacttattttctggctcagtttaataaatatt

SEQ ID NO: 12237 - protein, 338 aa, DROSOPHILA
MNLPERSRFVIYAVGIFVCYFLYGIVQEKLTRGRYGEEVQTDGSVGERFTYALALVWVQCLCNYVFAKVLLTIRPQKEDTTNAGSYVACSLTYLLAMVSTNMAMRWVPYPTAVVGKSAKPIPVMILGVLIGRKSYSWTRYACVLTIVLGVILFMYKEGKVSNLPAETTLLGEVLLFLSLSMDGLTGAVQERIRAASAPSGQQMMRAMNFWSTLMLGVAMVFTGEAKEFMYFTIRHPEAWTHLSLIAVCGVLGQFFIFLMVASFGPLACSVVTTTRKFFTVLCSVLLFGNVLIARQWLGAVLVFAALFVDMLYGKKAPLATAKKPPVEGKLSEEKKLNS

SEQ ID NO: 12238 - DNA, 4601 bp, DROSOPHILA
gccagcagaacgctttctaatctgaccacggacgagagtcaccaaactgatgacgacaccgattacgtatacgacgaagacatagccagcaatgacctggataagacgaagacccgaaaggagacggacctcaacgaattgaccacaaaaaagttcgaccaggacggctacatgcgaccacaacttatgcgagacgcgacccacaactcgaccggatacaacgtgacctcactggacgacaactacgtaatgcccatgctggagaacaggacgcggacgaactatgtgaccgaggtgcccaagcccatgctgtccacctccagccggagtgtgacgaacagcaaggtgaccgtctttccggacagcctagggaaacagttggccaacgacatccttgcggacgaggcgacggacgactacgtggacgcgaatgggcatacagaagcgcgactaaaggcccagaaactaaagcaactggccagtgtggcgttcgcaccaattaccgtactgaccaaaccggacagaccggacaactgggtgatctacaacaaggccagcgaggagccaccactgccacaaccgccagcagtcaacatggatgtggcgcccagcggagaggtgcccactccgatcaagaacttcaacaatgcgtggctaaagcaggatctaaaggctcggccggagacaccacctaccagattggcggaagaggtgaccacggtggcggcagcggacagtatctagaaatgccaaattagccctagattgattatttatttatttatacttcaaaggcaagaattcaatccaactataactatctgtcaattgtggtttcttatttcgtacatttcatggggaaggaatatcagatttctgattcagaatcctggcgatatatcgcttgccatatattcttagttctcctcctggagatcttcagccagttcgcccggacacagagcttcttttcgtattcaacagtgccaaaaatgtgacaattcttggtttgtactttattataatgcagactaaaactagtttatccactcagagaacacacacacacgaatgcttagctaagtgtagtgcctcccgacctctggggaggggcgaccctgtttcgatattaatttctaattcggcatgtccagtttgtggtattttgtttggcgcaaacattgctgtgcttagttgtgtaaaagtaattgggctaccaatgtaatcaacagtattatcaacatcatcatcaattacacgtacacgtacaagtttagttaggtgtataataaattatgcttgtcaccgatcggcctcttcgcgtgttaggtataaaacgactaagtataacaaaaataatgtacactttaagctacaacactttggggtatttgcatattgaattgcgttacttgaacatcctagccgcaagtatgttgcaacattctactacaatacatcctcgatgcgtccgccatcgatgatttataattcgctatcgtcggcaattcaactaattaacttgtgctcctctaattcattctctagctcttgttatttacaatcgggggcgaatctcctccagttctggtggttctcagtacgtcgcgtaaatgcagttttgagttggtttccgtttggctggggattgtgcgttctttaccagcggatctgatgcttgtactgctcgtccaccgcaatgcgcttgatcgtctcgtaacctagaataatgctgaatgagaaggctgccgactgcaccaggcgggcggacagtcccttgaagaagcagttcagcttctcctcctgccacagctcccggaaggcgacgctcatcgagtccaagcggtggacctgcggagacagagcgttataaagattacgtatgactggcgagtattttcaattgttaaagataagaacgtctgaagttcaggcgcagacaacggaagaattacgtcattttcaatcaaaattgcaataaaggttttacaaccaaataaactaaacagatttttaggttgaaactgctaaacttaggcaaaaaactcacctgcagacgggcacgcactatatctaaaggattggttagtattgtcgttgtgaagccacctaaactgccggccacgcactggataaacagatgggacacccaaacggggcagatgcggaacagttcgtctgcgaatatagtccgaaattagcataatctaatctcactaacgaacggaagacataccctgatagagatgatagaaggcccaccacatggccgaattcggtacgtaggccatcaggctggcggtgtagccgcggtagaagccccggaagccatcgcgccgcattatctccctgccaatgtccatggaaatgtgcaggcgactgcgaccgggccatgacttaatgcccagcggattgatatcgcccttggaaccggcatgggccgacatcccgagcaccatggcgtgctgcgatatcacatcgaaaggaactatgatggtctggcccaccagcgaggcgcaaccgccgccggcgagggccttcattcgatgcccagcacccagatcgttgagcacatggcgcacgccctcgtaggtgcttatgtaaaagacgccggacactatttgcacggaggagatccagaaacctctatacagaccgggcactccctccgatcggtagatcttcatggcgcaatccaccatgcccttgtacacatcgctcttgtgctgcacctgcaattgcgtcttgatcacggtcagcgggaataggcagcagcgcaccgaaaacgagctgagcatggagagcggaaagaacttggtcttgttcatcatgtcccattcgatggtgcgtatgtatgtggctccctcggctgctcctccaactccggtgggcgccaccgctaggcgggatttggtgctactgctgctttccgtcatcgctgctaccggacgacggggttgcggctgctccaacgactcctggtggactcagtgcgtccgcaaaggattgttcgcatgcgtggaagcttcgaggcgataggggcttccttcacagccgggtatgctgctgatgtctctggaggcattcgacctgcatgactcttgatcggttcctttgtgtgctgcgcttattgttgccgtgtattaacatatgcatatatgtatatctggggaaaacaaaacagcatctttagtacattgacgcaactcagacgcatacgcatgaaaaacattcccaaggtcgtgcgacacatacgtatttggctggtccgcccgtgacctttgctccaccgcccaatgccaaggaaatccggcggagtgcctgctcggctctgcggctatctaatctatatatatatatatcttggcgccttcgccgattcggagttgttattatataatacgcagacacctgactgagtggccaccacccccctcgccaagcaaaaagcacacggacgtaaacaaactcttttcgcggagtctggtcgagatttccggatctccgacaatgcgcgggccagtagctggtgttccggctgcttcctgggtcacttacctacgccactgtgtctgtttggatatttgccttgtgcatatcacataataaatctgatgagaatgaaaaaattgttttaagagagattttcgggaatgccagtgtggccagagtagtcggaggcatgcacatgaatgagccaaaagtcgtggtatagaactttgagggcatagcttggactcgaaccggaaatcaaagaaattttgtttccaataagaatataaaacatattttaaaattgttcagaactttaaataaaataaatacaaactctttaggtaatgcagctatcaagccaatttggatatccgtttgtttatgtaattaatgcgcttatcaaatttgttttagagtgaagcatatgcacatcattaatttcaaaccttatttattttgtagttaattttagtttatactttagacttaatgaatattttatttattaaaacaagctttaggattttaaaataatttttaacctatatgttaaagattatttcaaatatttggcttctagccttgcattcctttatttcaatttgaaagctaatcaaaccactttctgaaaattttgtaatattttctcctaattaccgccccgcagccaagccattggtctttcccctttaaagtgaattaaccaatcggcgggcagcggaggcgtgacgcggctgcgtagtgcatcctggccagctttcaggagcatcaacccccgaacggtgactccggccgcattgcctggcatcctatccaggtgccctcgaccagtcacaacggaaactcagaaccaactgcacgaaggcaacggaatgcgcgctgatcaccatcaacgtcaagtgaaagccatcgaactctgaataattgaggagtattgatgagcagcagccaggtgaaatcctattagtgaaaatccaacaagttcaagagtgcatccggaccaccgatcgatccatggatacggccaagttggtaagattcgcttaaagcttttattttcaaccgcatcggacgtacataaatagggcttaaactaggagtccttc

SEQ ID NO: 12239 - DNA, 1952 bp, DROSOPHILA
tgatatgcacaaggcaaatatccaaacagacacagtggcgtagatatacatatatgcatatgttaatacacggcaacaataagcgcagcacacaaaggaaccgatcaagagtcatgcaggtcgaatgcctccagagacatcagcagcatacccggctgtgaaggaagcccctatcgcctcgaagcttccacgcatgcgaacaatcctttgcggacgcactgagtccaccaggagtcgttggagcagccgcaaccccgtcgtccggtagcagcgatgacggaaagcagcagtagcaccaaatcccgcctagcggtggcgcccaccggagttggaggagcagccgagggagccacatacatacgcaccatcgaatgggacatgatgaacaagaccaagttctttccgctctccatgctcagctcgttttcggtgcgctgctgcctattcccgctgaccgtgatcaagacgcaattgcaggtgcagcacaagagcgatgtgtacaagggcatggtggattgcgccatgaagatctaccgatcggagggagtgcccggtctgtatagaggtttctggatctcctccgtgcaaatagtgtccggcgtcttttacataagcacctacgagggcgtgcgccatgtgctcaacgatctgggtgctgggcatcgaatgaaggccctcgccggcggcggttgcgcctcgctggtgggccagaccatcatagttcctttcgatgtgatatcgcagcacgccatggtgctcgggatgtcggcccatgccggttccaagggcgatatcaatccgctgggcattaagtcatggcccggtcgcagtcgcctgcacatttccatggacattggcagggagataatgcggcgcgatggcttccggggcttctaccgcggctacaccgccagcctgatggcctacgtaccgaattcggccatgtggtgggccttctatcatctctatcaggacgaactgttccgcatctgccccgtttgggtgtcccatctgtttatccagtgcgtggccggcagtttaggtggcttcacaacgacaatactaaccaatcctttagatatagtgcgtgcccgtctgcaggtccaccgcttggactcgatgagcgtcgccttccgggagctgtggcaggaggagaagctgaactgcttcttcaagggactgtccgcccgcctggtgcagtcggcagccttctcattcagcattattctaggttacgagacgatcaagcgcattgcggtggacgagcagtacaagcatcagatccgctggtaaagaacgcacaatccccagccaaacggaaaccaactcaaaactgcatttacgcgacgtactgagaaccaccagaactggaggagattcgcccccgattgtaaataacaagagctagagaatgaattagaggagcacaagttaattagttgaattgccgacgatagcgaattataaatcatcgatggcggacgcatcgaggatgtattgtagtagaatgttgcaacatacttgcggctaggatgttcaagtaacgcaattcaatatgcaaataccccaaagtgttgtagcttaaagtgtacattatttttgttatacttagtcgttttatacctaacacgcgaagaggccgatcggtgacaagcataatttattatacacctaactaaacttgtacgtgtacgtgtaattgatgatgatgttgataatactgttgattacattggtagcccaattacttttacacaactaagcacagcaatgtttgcgccaaacaaaataccacaaactggacatgccgaattagaaattaatatcgaaacagggtcgcccctccccagaggtcgggaggcactacacttagctaagcattcgtgtgtgtgtgttctctgagtggataaactagttttagtctgcattataataaagtacaaaccaagaat

SEQ ID NO: 12240 - protein, 339 aa, DROSOPHILA
MTESSSSTKSRLAVAPTGVGGAAEGATYIRTIEWDMMNKTKFFPLSMLSSFSVRCCLFPLTVIKTQLQVQHKSDVYKGMVDCAMKIYRSEGVPGLYRGFWISSVQIVSGVFYISTYEGVRHVLNDLGAGHRMKALAGGGCASLVGQTIIVPFDVISQHAMVLGMSAHAGSKGDINPLGIKSWPGRSRLHISMDIGREIMRRDGFRGFYRGYTASLMAYVPNSAMWWAFYHLYQDELFRICPVWVSHLFIQCVAGSLGGFTTTILTNPLDIVRARLQVHRLDSMSVAFRELWQEEKLNCFFKGLSARLVQSAAFSFSIILGYETIKRIAVDEQYKHQIRW

SEQ ID NO: 12241 - DNA, 2314 bp, DROSOPHILA
ggtcatcaagtctttggcccgggactcaaagagatgttcgagcttctgtgtgtccacgttggcatcgggcagctcatcccatatggtcttgcccaccacctgcggtatcatgtcctcgcgcacttccttccagaagagcttgaccttagggtgtatcaaatgcaatatgtaaattctcattctttatattaaacaatgatgagactaaccgttttcttgttctttttgatggtgttattaccattgaccagttcaccatttatagaaccatttaacgaattgacactattggttagactaccgccatatccgtacatgggtggtggtgccaagcttggaggcatcattggcggtggggcaatggctccacccagcgggggaggcggcgggggtataccggcacccaaacttcgaggggccagcacatccttctcgtcatcatccctcagatccgtaaagtccagatcgcaaagatttaggggccttgtcatattcctaaccagttcctcccagtgaagttcattttccgacttcttgggctcagacttctttacatcctgatcgacactagaagatctgtaaaggaaaaagtttatgccactacaattatagcttttatcgtgtaaatggtggccataaatgattagtctgaccttatctttgatagactaacgcctagcaccactttgtatgtacataaatatgataagtaatcaaaaatcagtcaacgagggtggcggcaaactactttctagggattcgagaaagccgatgacgatgtcaggctgggcaaaaacctgaactcttatgaaactggtacataaatctaatctaataaatttgcacaatggactcacacattatcggcttgcagtggcaaccattatcgatttctatatacagataagcgttgttaactagaacttcccgattttcgggaggtataaagacggcgcactgagagggacaagtcacatttgtcaagcataactcaagcaatatggccgatgtaagttgatgattgtaaagatcggaacacagaactctctaactcccatttgccattatttacagttcaacgctatcctcgagaagaccaaggccttcagcaagaagcccccaacggaggtgtacctggagttctatggcctgtacaagcagttccaggagggcgacattaacatcgagaagcccgctgatgccgagggtgccgctaagtacgatgcctggctgagccgcaagggactgtccgtcgatgacgccaaggccgcctacgtcgccctgtacgagaagtacaaccccatctacggataagctacagtttatggcccactctgataccaaccaataaatcttgaccatctgtgaactaagtgattgtctatttggaaggagcttctttcaattctgttttattggttcacagattatgaacccaaggtcgtaaaacaccttatatcagataaccggaaagcatgacaccgcttatcattaatagcttagacggatttcttatcttcaactggtggcgccatatattctcgtaaatctttgcttgtaaaacatctatcattttctgtaatctcaaggggttagcagagtgaacatttattgatagttagtggcattcaattgattttgatatggaagagctataaaaaagtttcctaacctaacttaaaagcttgattcccagaaagatggtaaacgactaacgccactgggtaacttcgagagtatagcctaagcctataggtttagtgggttttatcaaaagacttctacttttcttacctggatatctctcccttgctcttgctcttggccagaccctctttggctttcgaaatcagaccggacatatcgccgacgagggcgcgattcgccgaatcctgagtgggactcattggcaggttgctcaacttctgggtgagatccttgaccgtgtggtcccgcttcagctggaggagcagctgctgatcctcgctttccatatctgtgatacataacaaacgtaacgttaagcccattcatcaaatcttaactctcaaaagtatgcagcggcagatgcgcaatgcaatgtgaatgtattggcggcgctcgcgagtatgcaacacacaggtgagagacaggtgaatggaatggagttaaggtttaggttgagacccacctgaaggatccacaggatgcggcagcagctctgggttagtactggttagggttcgagcttgcgggctgttgtagatgggggcgtgccaccaaccaggtggtggtggtggcggcggtggcggtggaggaggcggtggtggtgccg

SEQ ID NO: 12242 - DNA, 249 bp, DROSOPHILA
atggccgatttcaacgctatcctcgagaagaccaaggccttcagcaagaagcccccaacggaggtgtacctggagttctatggcctgtacaagcagttccaggagggcgacattaacatcgagaagcccgctgatgccgagggtgccgctaagtacgatgcctggctgagccgcaagggactgtccgtcgatgacgccaaggccgcctacgtcgccctgtacgagaagtacaaccccatctacggataa

SEQ ID NO: 12243 - protein, 82 aa, DROSOPHILA
MADFNAILEKTKAFSKKPPTEVYLEFYGLYKQFQEGDINIEKPADAEGAAKYDAWLSRKGLSVDDAKAAYVALYEKYNPIYG

SEQ ID NO: 12244 - DNA, 4128 bp, DROSOPHILA
ctttgacacagagtgtgcagatgagtcacccggtgatcccattgcacttttgtttgtttcatcctttcaattgtctaaatcctccgcccacaattttccatctgtttttaattagcagacaagctcgccctcccccttgtcgaggggccgaggcgctcacgtgttgccaacagctgattgcggagcttctctggtggcgtatacgcaatttctggcactttctaggagctccctttctctcttatatgcaggcttctctctctctctcacttattcggtacttttagggagttcatgcattttgttcgtgtttaatgcagaatcagagattccttttcgaacatagacttaaagagtttgagaagaatctctttcttttcaacctactcttttatggtgcagtttactttatttactaattcagtaagtctagcagactatcgaagagatgatgtctatataaaagtctaaacttgcaataatgtatgtaataaatttggtaattagtcttccttttttacaaacagataaatctaatttaaaatcatattaaatgctttttaaaatctttagtaaattctttgtcggcgatgcccaaagaggaaaaacaatggccgcgactacgattgtatctcaatttttatgaattaaatataccgaagagctctctcgctcctcttctcttcgatgcaactctctctcaaacctctcactacatttgctttcagttgtggccactcttttcggtttcttcatctcgctttgacttcgggttcggtttattttggtgctgcattcattttgtttcgttttcgctttcgggtcgtctttgttgttgttttgccaatttcgcttttggcagttgcataaaatgaaacaaatgcgaaataaattccgcagcagttcgttctctctctctgtgattctcttagatggccgctctctttgtgcctctttgtttttattattttgttgcaagtgctcagtcgaaaagtgtttgcagcgcgttctaaatgctattttttattggtgctgttttagtgttgcggtgttaatttgtcgggcgcaaaaagagctgcaaaaaatcaataaaatattataaaacatttcgaaacacgcaaagtcacaagtttgtcaattccgaccgaccatctgtacaaatggcgtatgagcgatatatatagtattcgcatgtttggttgtgcgtgttatgcaaacgtttttaatacgtttaaaataatgcaaccaaacgataatactacaataatacgataataattcaaaaatgcaaagtaaagttaataactacttacttaaagtgaaagttttcataactaactatttctaaccaataacaattcaacttttcaattgctgaggcaaagatataaagatttattaggtaaataacgctgaaatcgtatatggtgaaatccttgcctttctctttgctaacgccaataagatgaaaataggattaaataaatgaattgaaaaacgtgattgttctcaaagaatttaaataaaaggaataggacttttcttaaattacttaaatatcgtatatatgtatttataaattaaggtcgctgactttagtcgcaattcaataaattgtatatgcaatttacttataaagatgccaagctttttattgtcatgcctagcattggcggtaatcaaaaattcctcttgatgctcggaaattagtcacataaatggtgtctcatgcgagtaaacaatttcgtttctagcgaaatttattacagattcaattgagaaaataaaaacaaacgataaaagatatgtgaaatgcttggctggcgtttttatttctgcgcagccaggcaatcaaccaaaaatatcacacatacgccgcgttgtcgcgtggcgctcagtcagctgttcagcccacaccgcttttcctatatatattaatatttctgcagttgaatgacttgtgtggcacacttttaaggaattcgttcatgcacttttcgagactttcaattatgatttccacaaagagagagtgagaaagagcgtggccaatgtgtacattatgtagtctgcttagaggcgtcaagaaagccaaactaaactagcgtgcaatgagcccgtaaagtcaactttccgactgcctctgaccactgcacagtggggcgaaactcggattaccaagccaaaaaaaccaacagcgttgaactaaagtcattccatagagccaacgtggcgtattagtaatgttaggaaatgttagctgtagttgagttgaaactattagttaaaattcgttcaagtaaagtctatataaaattaggtatgtataatgcaagatatataaatcaatgaccatttgttttaattgttttgattggttaattttagtgttcataaaagcgtctttatatctaagttttgctaagttttttatattagagaatttacggaaaatgttttatatagttccatcaaagatcaatatactctaatgccattggcttaattgagtttcagttgttttagtcaaaggaaacaagaactttgccacctgtgcgcaatattgatttgatttttctcacactccattgcagttttcggcgaggccgacaaggaagcatcagccacaggatgcagagcagtgccggcggagcgtcggggggcagcaactacgaggacgtggccgccgcccgccgaggacgcttccgtgtcacctcctccacgccacagggcccgcccgaaacgacgctcggccgctttcgtctcatgcccacgtgtaagttgatttggtactttttcgcctttacaatttgagtttatataaagtatacgacattaatcattacagttatgctaatagtaattgatatcttttggtcaaattctcgataataaatgcatggtgctgaatactgaccccttctttcgcctttgcagctaattatggcgccatttcgccaatcctccagcggggtcgcttcgccgtgattcccgaagagccccaagccggttcccccgcattgggaacgcctccgccgggcggccgaacagcgcgttctccatcgcccgaatgggacttcgacatcgagcaggtgagtgttcccagttcctcggctgggattgattgatcgagctagcaaaaaaccctgagcatcgaggaaacttattttcgagagtacttcaaatgtatttattgcgtccttggacctatttggaatggtctaaatgaagttcgtgaatggtggcaaattcatcgactccgatttcaagtattttgctgtttctggtggcgtcattgtgtgctcctcggtggcctctgtgcaatgcgccatttttattgatttttgttggcttagctgaagtttcaaagagtttgggtgggctccgaaagtgtgaaaggcatgccaaggcaactggttatgattatttatggggcataaaatctaatttccagcactatgatggaaataggaatatgcttatgtacataagtttaattttttttagctaaagctagctaaagttttttttatagcttttatagctttttttataaaagctaaagttttttttatagctaaaatgttttctattttgtatgttcggcgtgatttacagagcggagcaatttttgcaattcaaacttatatcattttggcgcctaaagcggcggtgcatgacaaaaactgattgctattgcgaacacggtccgatctggcaacgcgttgttttttaagtgtgaccgccgccggaaagtagcaaagcgcattttatttaaaataacttctacgcaactaaagaattctcaatgattcttgtttattgaataaataagtagatatatgtgcgtatttacttacgcgagtgggcacttaagaatttactatttaaatgcacatatttcagtaaaattgcaaacaacgagttatagaaaaatactaaaacaacgttacagttgtggtcacgctaattccaactggattgtaaaaagatctctagcgataacgataggcgaagagtaagaccttttctgctggatttcgcaaacgataacgatgaccacaatcgtgagttaggttgcgaactttgcttggtgaaaacgcagcggattacgaggttgggaaaaac

SEQ ID NO: 12245 - DNA, 775 bp, DROSOPHILA
cagcgcgttctaaatgctattttttattggtgctgttttagtgttgcggtgttaatttgtcgggcgcaaaaagagctgcaaaaaatcaataaaatattataaaacatttcgaaacacgcaaagtcacaagtttgtcaattccgaccgaccatctgtacaaatggcgtatgagcgatatatatagtattcgcatgtttggttgtgcgtgttatgcaaacgtttttaatacgtttaaaataatgcaaccaaacgataatactacaataatacgataataattcaaaaatgcaaagtaaagttaataactacttacttaaagtgaaagttttcataactaactatttctaaccaataacaattcaacttttcaattgctgaggcaaagatataaagatttattagttttcggcgaggccgacaaggaagcatcagccacaggatgcagagcagtgccggcggagcgtcggggggcagcaactacgaggacgtggccgccgcccgccgaggacgcttccgtgtcacctcctccacgccacagggcccgcccgaaacgacgctcggccgctttcgtctcatgcccacgtctaattatggcgccatttcgccaatcctccagcggggtcgcttcgccgtgattcccgaagagccccaagccggttcccccgcattgggaacgcctccgccgggcggccgaacagcgcgttctccatcgcccgaatgggacttcgacatcgagcaggtgagtgttcccagttcctcggctgggattgattga

SEQ ID NO: 12246 - protein, 111 aa, DROSOPHILA
MQSSAGGASGGSNYEDVAAARRGRFRVTSSTPQGPPETTLGRFRLMPTSNYGAISPILQRGRFAVIPEEPQAGSPALGTPPPGGRTARSPSPEWDFDIEQVSVPSSSAGID

SEQ ID NO: 12247 - DNA, 10346 bp, DROSOPHILA
atgcgtctggcacgcggctcctcctccgccaatccatttgcctccataatgcgctgtctctgcgaatgaatgtgctgccacagagagactgcgtcctggtgctcgctactgcccggtatgtagaaggccttggcattgccaataagcagctccaggtcggccatcagatcatccaaatcgtcgtaggaatcggttttcagcttctgctgaaccttgagcagatcaatgggattgaccaccacgtcatagtacgagggctcttgccggcgcttcggcacgcggatgaaggtgtcgcacagcattgaaccgtcctccttctttatgttccttatggaatcgtacaattgctggcacagttctgtgggatcgagacggcgcttttttcgcgccgattgtgtcgtcgtctgctgcaccggtgactgctccggcgtcgagtcgtccagctgcagcggatcctcgtcctgccggctggatatgctgctcgcccggcgcttgcggctcagcatcgtgttatccctgttcttattacagttaaaatctaaatatccgataataagacgccacacaaaatgccacaaattctgggaatgagcgaaaaagtagtggtgggcgaaaggttcgatagtgcgcggtcgatatatagttcgatagccggccacttgcgtggtgagttatcgtaatcgaagcgcgcggtggtgaatattattttaaatggtatgttcccaccaaaaatcatatttcttaaccaaataaacaagctgaacatcattttacttaagttctttattatagcatccctaaagcatcatttaaagttttaattaagtcattgaatcacagcaatatcgtaggtagttttccttaaattagctccttctcgaaaaaaggcattcaagccaatagaaacaacgaagttaggctgaaaaaaaagttaaacagaacaatatttaatttaaaagtcagcaaaacgcaagcgcgcaattaaaaagccatgatatttcgattaatttagtaaaatgctttgtttattattattttttatcacataagttttagacgcttgttagtgtgtgattgtgtgaatattgggttacagatttgagtatgccgtaaaatgaaatgaacacgcctcatcgtttcgctgcttaaggaacattgttaaaatcttataaaaataactgaaatatacgtggataaatagcgaaaaacatgtatgaaatggaattcactctgaacgacaagaaacgaaattctaaactacgcctactgcaaattgactgcggcttatgttgcacaattacatcttctatttacatgctagttattggcgagatttctgcgaatatcatggtacacgagtgccattgttctgtgtttactggcaccacagtgatatgctggtgcactgtgaggactctgtctgtataaagtacaacaattaagcacaacagttaacattgcaaaatttaaatattagtatcagttctgcacaactatacgtgatcatataacatatgtaaaggtatattatatagtttcagctgcccatctcccatgtttttctcgtgtcttaacagttcatttcgtttgccttgcgactagcggtggtattgcgactgctcttacgactaaggttacgatacttggtatagaaacttgttaggctctttagcggcgactcgacaaggcgcctcacctcctgtcggtttatacaaaacgcattgtcgtgtcgcttgcgccaatatcagttgatgaagctaatgtagttagtaaagagcacatagttctccactaaccgggctcttagctcccggcgcaccgtagccgtgaatttgtttgccaagcacagggcagttgtggttccaaaaaccaaattgtaaagcaatacaatctggaagtttcccaaccactcgatggctccaaaatcacccagcaggtcaaagtttgtgatgcctgtaagaatcaataatagtcgcttttaaacactgtattattcattagtaatttgccacagcctacctatgatcctgctgagaagcggcaatgccgacgacaaaaccagcatgaagccacagttcagcattagctgtggcagcgaagtctggcgccgcttgggacaaaccttgcgcatgaacggcatgctgtagaagcccaccaccgaggtggcgccgagatagaagatgagacacacctccaggccggcaccaaagggacccaacttcgagagcgaagagatgcccaatgcgaattgctaaataagggaaacaaactcaataagcattcgtcttacgatccctgcagttagacctacccttgtgcttagtggcagcgccttaatgccaataaggagctctagtgtattctgcacaaccagcagaatggtgacagctgtgcagaagagcagcagcagcatggccagcggatagacgaatgtgcgttggaaggtgctcgatgtgcgcagcttgtctagttccttgcgctcggagtccagttctcttagtctatcgttgagctcgtccacgtcactggccatcgccttgcgctggtatagatgagcctgggagtgttgcagcagtggctggggatagaaggtgcgcccacgtcccagaccaatccgattgccaaggcgacctccgttggcggcatccgcaatgctcacgttgtgcagctcaatgtgcgctagcttccgcttcacgctcgcctcctccatgtagaaggcgctaaactcctcgttgacgtcgcgcagtagcataggtcgcaccagcacctggttaacaacgccaaagaggcgcacaaagccatacggggtgcaaactgtaagaaaacaaaacggttgtcctggttaccaaacttgtacatgccttaatattagtatgtaagatctagaacttatttctcgttgtgtacgaaacgtaaacaaaggtctctttgacatcccactcaacttaaaagacattctgttctgagcagtcgaaccagtcggtatcttaactaaatttctattccttacatctttaaaatggcaaacgaagaggttaaagacaatgcccaacttaaggcaactatgttaaactgcaatttgaaccccagtgtcgcggatgattttgctgagttcgaggcaacccttgcgaagatcgattgtatactgcagaacaaggcaccctgtgacgatgaagattcaaaggcaggtggcgatgccaaggagaagatcaactttgacaacttggatgtggataaggtgcggcttaaagtgaaagaaaatcgaacagtcatcaacagaaagtctctagaagaagacaatgagaagcaagtcaaggatatgaaccagaagagtttcatggagcaggtggagaaggatgccaatgatcgtgcagaggcacgtgccaaagccgaatacgaagcagaactacagagaaggtaaacttaatggtctccctaaaattataatatattgtatataaggataattttttagtcagggaaacgaagcatttcgcagccagaagtacgagaaggcaatcctacattatgacaaggctatcatcaaagttaaggacagcgctattacatattgcaatcgcgccttgtgctacatcaagtgagttacaatcttcaagccttatgagctatcctaacaagccttcttcatcattttatttccatctaccaggctacagaactataagcgcgccctcaaggactgccagtacgtgttggagaagctgcaggagagtaatctccgcgcctggctctaccaggcccacgcctacaagggtttgaaacaagacgacaagttcgaggaaagcgtggtcaaggcacgtgaacacaatcccaagcaactggcgtacattgacaagtacattaagcaactggaagccgatcttaaagcactagaaatataacttatttaattttgcattatatactcactcagcataagcatgacacccaaaaacgagacacacgaataaagaaacggcaggtgaacactgcccaaatctgtgaagcatgaaaagcggaaattagaaatgcattgtgcatcagaatccaatcccaatttggggatgggcttgtcaggggcgcggaaagacaattgacattggaattgatctcttccgcacccgtgcatcattacattatatactcacttagaaaccagaagaattgaagcttttcaatgccaaagactgcacttaggacggcagttagtacgaggacaataatggccatcagcataaatactgtaaaggtttcgtagactcgcggcaggatgcccttcttgttgccgacgaatcccgtggattccgagaacaaatagacaaatggcaggaagatgaacagtgacagattggagaacagaaatacatggttccacaagcctgaaattggcatattaaacgggttagtcagtgttcctcggtggataatgtagtacttaccctgtatgagtgaactgtttagccatttcacatagtaactgttgggatagaggagtagcacctcattgctggcaatggaaacgggcagcagcatggcagccccttcggcaacggccagtgtgaatgtgcacagccaaaagctatggggttggttgggtggaaaaggcaaaagcaaagaaaaccattcattattgcgagtgcaagtcaagtgacgcggcaattagcgacacaggttgttgaccactggatgcctcaccttatgcgatagaccagcacctcgtcctcgtcattcgaatagagatcgtcacggtcgcgccgcctaaaacgtgagacgaccacataggagctggagtacagcaagattatcagtagcaagaatatctgaaaagaacaatgcaacatggcaagttagtaagctttatggttttatcagctaagtaatattttactataatataatcaaatttattttcccttagaaactgcaacatttcgatcgccctcctcaggttggttaattacgtaaaacccaaagtaaatttagactcgattgtcttttttgttttattttattgaggttttcatagcacatttccccacatattcttgtgtttaaacaaatgtcaaaaagtaaacacatcacccacgcatctcctttgttttgtttttataaatatttgtcattaccgccaactgtgtgcacattagccaaaaacattttcgattcgttaagttagggaaatctgtattaatctagctcggtgaatatattacttattgatactgatatgtgtacatgattcaatttagtgtcaaagtctggcattttaagcgtttcagggtctaatcgtcaaaaacattgccagagtgatttgaacttttgtttgcggacatttcaatttttcaatttccggtatgtatgcttaaaataatattatgtatgtatatagaacaggtactcaggtttcttttgcctacaaccctatatcaccataaaccacttggcaatcgatgaaatattatgaccgtcaattagaccaataaagttaatttcgtctgcgttcaaaggtcacaaaagaaagcttatctgtggccaacgacaaaacatgaaacatttgataagaactaaaccgatagcggtcatttaaatcccattgaatgtcagcaacatttgattatccgtactcttgactattaaatccgagtaggttggcaatttgaatcttcatcagcgatttccaaacattggacccatcatttgcagggtaaatatatttttgggaccgcgaaatatagatgccaatcacatggcacacgtcatattttcgctttttttgtgtatgcgaaaagcgaaaacaaaacaaaacgtaaatggatacgaaaatacaatagtctaggcgcacaaataaatcattaagtgaagatacttttcatgttatagctagcaaaaaaaaacttggggaaaaaatgcagagagagcaaaaaacattagtttatactcacgtccctgctgtgttttgctattctttgtttgctattcgagatattttcagtggtatctgtgagatactctattgcgttatacaacgcgagttttaattaacttataactttattcttctgcctgcatttgaccagatcaattaaatgaaattttctttaattgctcgcagcgtttcgcatttcgggattccaacctttcatcttgccattcgaaatgaccttcttttcagtcaacatttaaacagttttctctacacagtagacaaaaaatatgatcaaatattaaaaattaaatatagagacgtaaatcgcctgctatcaacagcagagtgcgtcgctttatttatagaacccaagtgtagatcatggaaaaatgtagatacactgaatggcaaaactataaggttgcagtataattaaacatccaaaagtacacattttgcgcatctagataacgaggcattcgaatactaatgtgatatgcacagagcatttttatagaatctaggccagctatgcagctatgaaacgcagtgtattttctagactatgacgtgttaaacttgaaacacataggcgacgaataccaactgatatgagaatcttataatatgtacgccaggcattcctgaatggaaacaattgagccagcgatcttcaagcttagtttagtgcttgtcagtcgagaaaacgtgcaactgcaatgcgcagccccaagtggcatttgtcacgctccaagcgatttggatttggccaaactaaacgatctgtgcctcggaattagccgcacttgcatcgtaggcgaacgacgagtcaatgacttgacatgaactcgagggggaacacaacacgcccattgaaatgtggacgacgatttggctaaaaatagcagctacgcccaaaatgcagccagaagccagcgaaaacgacgacactgtggccaggccaaaaggagaagggaagaggatcgccggtcggacgggttttggcttgatttgtagacaactttgccggtgaatgggctgcgaaatatttatacttttctatacccaatagttgtgccgaacaggggtatatattgtatccatatgtgctgcaaggtgggttggtctacgcctattgatacctcttcattttatcatttcagataattttttagaatgtagcgtctcttcagattctcaaagtggagaagagctgtatgagtcgtcccaattgttttaatgactccaaataaaaatgtgttttctaatgaggggaactgcatttgcaagacttttggtcatggtttaagttacccaattcagtttcttcatcagacttttccctaatcactacttgggaaatgactaagaacataagtgtggtgttacacaataagtttgtatgtattttctcagaatttcctgctactacacttggcattagtggttttaattcgggtttggctttaggttcctgaattatttatgagagctttgcgttgtttgcatttcattattgcatggagtcccacacatcacgtattcggtatgttgacccacattctgacgaattattcaattttcggccatccaatgcaatcagaaccgctgactgaaaccagtttccatttcctgttcctgttccagttccacagaatcatcctcaatgaaagaaatgtgtatttatagacgtacaaatcataatcggtggcataaaaagcaacctgcaagtgtattgtatctacgccagtctatgccaaccctttcaaatgtgtccatttaacgcctcgtctgccattgtttaaacagatccaacagctgatcacgacagcagacactttcagtgacccagacggtaccaaatcgtgaccactagccgtgcacttgaaatctggcctgcaagtgttttggccatttaaccgaattttcacaaaaggaaattaatgccttgcgcaatataataaacatgtgtttttattcgattcagtctgttgtttacataaatcactggtttcgtttattacacgcccaacatttctataaatagtagctcgagtgaaacactttcacttgttgcttttgcttatgttgcctttctttgtttttgcctgaattgtttaaaatttgatttcaattgaaagttctacgatattggtaccaattaagtgaagtttgttgattatcttatcaataccttggacttctagttaccttccatttttcaaatagcaaaacctaagcattctgatagggcttatgaactcacaagaaccaattaacttaagggcaacattactgggaactattaatgaaactatttaagcctgccttccatttggatattggaatttaaatattcaacaagaatggagagtaatattttaatgaaatttaaaacatatattttaagaacctattgttcttaattaatctaattgtaaacaagaacatgtaaaaaaacatttgtttataaagttctaataataaaatagaaacgaataaagcttggtaatggtagcaagtatctcgccgtcgaatcatcgattgtgtctaaactctttgattaacaacaggtgtccgtccgtgtgggccacttttggtgtgtctgcgtgataattttcgcagctcaaatagaaagtgcaagaagagagtggctatcgccgccacttccttccccgattttatatacaaagcccaaacgcaggcgccgaatgtgctgaccactgtagtccgaaaccgataacagaaccataaacaaatacatttctgtagacgaccagcaactgatttctctgtttatcaaaagaccaggcgaagtgtgtgtaatttccagaagtcgcacgcattttacacccagccacatgtacagttagaacaacaacaatagggacagctgcgccctgagttcttgttgttgttttatgcgtagtggggtgggaaattgggtggaaaggggatgaattcaatccagaaaaacacttacaatgtgctcgcgtactgtattgtggaacaattgcagctttagatccgtaacctcctcctcctcctcttcgtccatgcccacgaaatatttggacaatttatcgctggtagccagttttcacaatttttcctagatcacgcctcacttaaaaatgttacatacacatttgacagtcgccagagtctgtcaaattcctatgggcaacagtccttcttagtaatgcgctccaggttacaaattttctgaattaaagtcgctgtggcgctgcactgtctgatttcgcacggtaattgtgattaatttagttaactttttgatgccgcattgcctttcgacccgttttgcgctggtcactaattttctactagcattcgagccgatttacgaccgaaacgttaaaagatttctataaactggcgtcagattgaccgcatctgctagaggtggacaattgacgataggtcgatagctttcgatgtatgtgcttacgtttagaaaggaaaatattgaatctctaaaaaaaaaaaaattgaattggaaagaaaatactgaatttaaaatttttattgacctctattattagagaaaaaaatattataccaatgcaatatcttcaagttaagaaaactgtaaccctaaaaactatcaattggttcagacattctggcaaccttacatctgtcagctgttaccatacaaaaatgtccaatttgcggcgccaggtaaattaacttaaaatcataaataatcggttaatattgtttgtattccaggttctcagtgctttcaagaagctccaccgtacacgacaatacgtttttcagggggatgccaatgctttggcggcgggacgactaaaaatcaacgaatctttcctgcagaatcgtaatgaaagcagcgaggatgaaattcaaaaggtttaaccactttttgtaaattctaactaagtacatatatggcaatttggcaaattacagatgatcaagctggcgcaggacgtggatttggagctgcgaacgaatgtcatccaagcccagaaaaaagaggatggtgtttatggtcagtggggcatggcgattacataaaagagcgctcaaaattaaaatttggctatatttacagaactaaggatcacgccagagacaacgcgactcgacaatgtggtctttaatcctgacgcaattatcgaaaaaccgcgcaggcaacgcggcgacaaaaacactgaaggttgctgcggtggcgctgcgatggcggcgctggaagccgaagtccaggcccgcaacaaataaaaatatattcaatatttagctgtagtcaagatggttttgttctgattaattacgtcgtttatctttaatttctattatgtttcttcttcgatttgtgactactctttgacttggacttcttttgcttggattttgtactctttttgcg

SEQ ID NO: 12248 - DNA, 2690 bp, DROSOPHILA
cagatgcggtcaatctgacgccagtttatagaaatcttttaacgtttcggtcgtaaatcggctcgaatgctagtagaaaattagtgaccagcgcaaaacgggtcgaaaggcaatgcggcatcaaaaagttaactaaattaatcacaattaccgtgcgaaatcagacagtgcagcgccacagcgactttaattcagaaaatttgtaacctggagcgcattactaagaaggactgttgcccataggaatttgacagactctggcgactgtcaaatgtgtatgtaacatttttaagtgaggcgtgatctaggaaaaattgtgaaaactggctaccagcgataaattgtccaaatatttcgtgggcatggacgaagaggaggaggaggaggttacggatctaaagctgcaattgttccacaatacagtacgcgagcacattatattcttgctactgataatcttgctgtactccagctcctatgtggtcgtctcacgttttaggcggcgcgaccgtgacgatctctattcgaatgacgaggacgaggtgctggtctatcgcataagcttttggctgtgcacattcacactggccgttgccgaaggggctgccatgctgctgcccgtttccattgccagcaatgaggtgctactcctctatcccaacagttactatgtgaaatggctaaacagttcactcatacagggcttgtggaaccatgtatttctgttctccaatctgtcactgttcatcttcctgccatttgtctatttgttctcggaatccacgggattcgtcggcaacaagaagggcatcctgccgcgagtctacgaaacctttacagtatttatgctgatggccattattgtcctcgtactaactgccgtcctaagtgcagtctttggcattgaaaagcttcaattcttctggtttctaaatttgggcagtgttcacctgccgtttctttattcgtgtgtctcgtttttgggtgtcatgcttatgctgatttgcaccccgtatggctttgtgcgcctctttggcgttgttaaccaggtgctggtgcgacctatgctactgcgcgacgtcaacgaggagtttagcgccttctacatggaggaggcgagcgtgaagcggaagctagcgcacattgagctgcacaacgtgagcattgcggatgccgccaacggaggtcgccttggcaatcggattggtctgggacgtgggcgcaccttctatccccagccactgctgcaacactcccaggctcatctataccagcgcaaggcgatggccagtgacgtggacgagctcaacgatagactaagagaactggactccgagcgcaaggaactagacaagctgcgcacatcgagcaccttccaacgcacattcgtctatccgctggccatgctgctgctgctcttctgcacagctgtcaccattctgctggttgtgcagaatacactagagctccttattggcattaaggcgctgccactaagcacaaggcaattcgcattgggcatctcttcgctctcgaagttgggtccctttggtgccggcctggaggtgtgtctcatcttctatctcggcgccacctcggtggtgggcttctacagcatgccgttcatgcgcaaggtttgtcccaagcggcgccagacttcgctgccacagctaatgctgaactgtggcttcatgctggttttgtcgtcggcattgccgcttctcagcaggatcataggcatcacaaactttgacctgctgggtgattttggagccatcgagtggttgggaaacttccagattgtattgctttacaatttggtttttggaaccacaactgccctgtgcttggcaaacaaattcacggctacggtgcgccgggagctaagagcccggttagtggagaactatgtgctctttactaactacattagcttcatcaactgatattggcgcaagcgacacgacaatgcgttttgtataaaccgacaggaggtgaggcgccttgtcgagtcgccgctaaagagcctaacaagtttctataccaagtatcgtaaccttagtcgtaagagcagtcgcaataccaccgctagtcgcaaggcaaacgaaatgaactgttaagacacgagaaaaacatgggagatgggcagctgaaactatataatatacctttacatatgttatatgatcacgtatagttgtgcagaactgatactaatatttaaattttgcaatgttaactgttgtgcttaattgttgtactttatacagacagagtcctcacagtgcaccagcatatcactgtggtgccagtaaacacagaacaatggcactcgtgtaccatgatattcgcagaaatctcgccaataactagcatgtaaatagaagatgtaattgtgcaacataagccgcagtcaatttgcagtaggcgtagtttagaatttcgtttcttgtcgttcagagtgaattccatttcatacatgtttttcgctatttatccacgtatatttcagttatttttataagattttaacaatgttccttaagcagcgaaacgatgaggcgtgttcatttcattttacggcatactcaaatctgtaacccaatattcacacaatcacacactaacaagcgtctaaaacttatgtgataaaaaataataataaacaaagcattttactaaattaatcg

SEQ ID NO: 12249 - protein, 527 aa, DROSOPHILA
MDEEEEEEVTDLKLQLFHNTVREHIIFLLLIILLYSSSYVVVSRFRRRDRDDLYSNDEDEVLVYRISFWLCTFTLAVAEGAAMLLPVSIASNEVLLLYPNSYYVKWLNSSLIQGLWNHVFLFSNLSLFIFLPFVYLFSESTGFVGNKKGILPRVYETFTVFMLMAIIVLVLTAVLSAVFGIEKLQFFWFLNLGSVHLPFLYSCVSFLGVMLMLICTPYGFVRLFGVVNQVLVRPMLLRDVNEEFSAFYMEEASVKRKLAHIELHNVSIADAANGGRLGNRIGLGRGRTFYPQPLLQHSQAHLYQRKAMASDVDELNDRLRELDSERKELDKLRTSSTFQRTFVYPLAMLLLLFCTAVTILLVVQNTLELLIGIKALPLSTRQFALGISSLSKLGPFGAGLEVCLIFYLGATSVVGFYSMPFMRKVCPKRRQTSLPQLMLNCGFMLVLSSALPLLSRIIGITNFDLLGDFGAIEWLGNFQIVLLYNLVFGTTTALCLANKFTATVRRELRARLVENYVLFTNYISFIN

SEQ ID NO: 12250 - DNA, 4926 bp, DROSOPHILA
ctgttgtcccggattctccatctgaacggttgcacttcgccgggtgacaagtttattcagtcttaaacgactccatttgttgccatctcataagactcacggttgatttgttgacatatgctggaaaagtacttagcaaattttaaaaatcaatttaaagtaaaagcaagtaaaaggatacaaacacgctattcaatagtttagctcaaagttaataaaatcgttagtaagtaaccatttcgatggcaacactagaccagaacatgatttgctaccagaatactcgcgaattccgttaaaatcggtaaaaattcaggtgacacttacggtttgaatacccgctaaagagttcttgcattttccgacaaccgtaacccagacaatcgatccgggaatgctcactattcgcacacgttgccacactgttgaattgctccaagcaaacggctttcttatcagcggcttatcttatcagtcggaaacccgttgaacgatgccagcgaccagcaggtgagtaattttcctcggcctggcagtattagacctgcagttgcgcggaaaacttcttgaaaacgccaaaaaaaattgcactggaattccgaaaatatttaaccacaaagtgaaaaatgctgagggcgtggctgcatcggagtggcagttaaattctaaaatcggatattaaagttctccgtcagtttcgtgtgtttttttttggctttttatcccggttttctggcttttctgtttgggtgctctagttttgtggtagataagataagcgaagtgcagcgcgcaggggaaatacgagccataataaatcaacaggtgaataagaacggcctagttgtgacgtcactaacgccttgaaatcgtcgcaattttaaattgcgtttaagcaaaagcaaaaagcaagtgaaaaaacgttgataagggtctaatgaaaatgcatgcgcaataaaacggaagcacaccaccagtaacaaccatctatattgcagagatgaggatcgttttggagcttgcacttctggtcttgggggtcatctcctcatgccgggcagtcaactgtccttggccctgtcgttgcacgtgggtggtggacagcttgtacgcagattgttccaggaggagtctgcagacatatccgaacttcgacggcattcccgtggagcatttggatctgtcgggaaataagttcttggagtttccaaccctatatgcggacatagactccttgatatacttggatttgtccagcaattatatctcaagcattggtgcaaagactctgattggattcacatctctgaggactctgctgctggccaacaactccatagattcctgggagtcactcagtcccaatgaggcattcaaatatgctccaagcctgaagcgtttgggtctcgatggcaatcgattgggcagttttggcaacggagagagcttcgaactgctgaccagttcatccctgaccgatttggggctttcttcctgcggaatttccagcatcggtggagatcagatggttaatcagctgccaaatctggaacgtcttaatctggccaacaatcaattggctcaaatagcggcattaccttcgcgaaccctgagggttctcgatctgagtaactgcagcattaagaatttgtccggattctttttggacgccatgcaaaatctggaggccctaaacttgtcccggaatacggaactccagtttgacagcctgtcagaagatcccattctgacctatatgctgcgaaagttggatgtttcctattgcaacttggattctatagaactgagtggattgccacaactcactgaggtgcgattgcagggaaatcttctgagagtagtggatgtcaatacatttgccaacaactccatgctggaggtggttgatctttcacagaatgtgttgcgacacattggccaagatgcctttgccaagttgaagcgcctaaaggagctgaacttggctttcaatgaaatagccagactggacagaaatttcatacgcaacaatgacgtgctggttgagctcaatctcagtagaaatgtgctgcagaagttgacgaaaatcgtgtccaattcggtgcgcaccataaacatgagttggtgtgaaatcacctctattgaaagcactgcactctcgagtctttcggtcattcaaaagttggacttatccaacaatcttatcactgatatgcccacctttatgagatcggaaaccctacagcaactaaacctagccaactgcaggtgagcattaagcaaataacagtcgactagtataatagtgggtaatgatattatttcttcaggctgactactgtaaggaacaacaccttcagagagttccccgaactggcggatctacatctgaatggcaaccgtttaacgagtcccattccgcccaattatttcgacggcaataagttcttggatcagctgtggttgggcgataatccctggatttgtgactgccacagtccgctcttcgttgatttctacgactatctaacagcaaagccagctaaggttcgcatctttcctaagcgaatggattacaaataatgactttcatttcacttctatagataaaagatagaaatcacttgcgttgcgctgcgccagccgttttctatggaaagctttgggagtttgcctgtgcggatgtgtggattttgaatgccaggacgagcagtactggcgagaaggcttggtccatcataatgctgactctcctcggattgggtgctctggttttgggctatgcctgtctgcaaaagtatctgagaaagcgaaaagtccggcagagcgacagggagtacgaggagaatgatgatgagctacgacgcatgtgagtagtatatcttattccataaaatagaattctaatcagcattttgatacatagacgagatctcaacgaacgtattttgagggaggaggctacgccgagcctgcaacatacccaggagatcagcctgctgccctcctacgaagatgccctgcgcatgccgaaactagtcaggccagtgaagtcaatgatggatctctcgggaccagaaagagcccgcaactcacggaagctcagacgatcgcagacccatgccgatggtgatggatcccagtcggaggcggaggacggactgcaactggactctcgccagcgattccgcagcgtggagatgctctcgaaccgggacaaggaaagaaccgcccaatacggaccgtacagacgcactggttacatggagtacaatcagtcgggcagtcgacgctttagcatcgaggactcccgattccccgccgcccacttgaagacccaaaatcttcagagtgctgaacagatcggaaacttccagagttatgagaacagtccctacacaaagcgcaagccaaagatcgccgagattccgcccttcaagagggtgaatatgatggccgacagcgtggagttcctcactgatccagagtatgacgaagtgggcagcaaacacggaagcccgtttgcgaaaaggaagccaaagccaccagttcttccacctcccactatgaaagtgagtgcccaggtctacacactgcagcagagtccggttttggaactggatcccgccatcgaggactacttcagtgcggccaggaagcagccctcttcgtccaccattgccagcgacttccaggagctggatgagcccgaactgaagtccttgccggacgataatcgatcaagtacgatctcccgatcggacgtggagcaggatttggagcggggaaagcgcaagaagcgcaagaattcgactagtcgtcgggtgagcggtagcttcacggcagcaaatgccgccgaaagttcctccagcgactccgagctcaatgccctggttcacaagcccatgagggagacattgttttaggccacatagcacataccatattgttatacattcccaacatgttagacttcgcataatattatttaaaagcaccttgaaatacacaataacattttcttcaaagtaagtacttaccaacaaaaaaaattcatttttagccgttttgtgggaaaggtattttttgcatactcgaattggcactgaaggtccttcctgaccaagtttttccccaaaaaaaggcgaaaatatcgatattttttatcaaaatcccaaatgtagcgtctcattaaacttacaatcacatttataatcaattagaatccaccactgacaatttaatttttgtttcgatttttgccaaattttaatgagtaaccccttataaaaaatgtgaaaattggtaaaaaaactgatgttggcagatcgggcccagagtgatggggatcgttaggtaggatcattagttgcataaaactgttatttctatgggtgtgtgacactttttgaccacgttatgataaataacctgattttccactcaaaaaaaaacattattttagccaaaaatataatttttttgtcgaaaaaatttcaatttttttcgatttttgccaaattttaatgatgtaaccccttataaaaaaggcgaaaattggtaaaaaactgatgttggcagatcgggcccagagtgatggggatcgttaggtatgatcattagttgcataaaactgtaatttctatgggtgtgtgacactttttgaccaagttatgattataaacatttttgataaaatcgattttttggcctattttgttatcataatgatttcataaccatttgttaaactaaaaccattactaatacaaactaatgctaatcgattagcattcacgacgtaaaacttaaatatttataaatttaaagcataatgatgcataattttgtataactgaaaatcttgtaaaacaagatttaatggcgaattccggcccgaaaatttgagtttgaaaatattttgca

SEQ ID NO: 12251 - DNA, 2748 bp, DROSOPHILA
atgaggatcgttttggagcttgcacttctggtcttgggggtcatctcctcatgccgggcagtcaactgtccttggccctgtcgttgcacgtgggtggtggacagcttgtacgcagattgttccaggaggagtctgcagacatatccgaacttcgacggcattcccgtggagcatttggatctgtcgggaaataagttcttggagtttccaaccctatatgcggacatagactccttgatatacttggatttgtccagcaattatatctcaagcattggtgcaaagactctgattggattcacatctctgaggactctgctgctggccaacaactccatagattcctgggagtcactcagtcccaatgaggcattcaaatatgctccaagcctgaagcgtttgggtctcgatggcaatcgattgggcagttttggcaacggagagagcttcgaactgctgaccagttcatccctgaccgatttggggctttcttcctgcggaatttccagcatcggtggagatcagatggttaatcagctgccaaatctggaacgtcttaatctggccaacaatcaattggctcaaatagcggcattaccttcgcgaaccctgagggttctcgatctgagtaactgcagcattaagaatttgtccggattctttttggacgccatgcaaaatctggaggccctaaacttgtcccggaatacggaactccagtttgacagcctgtcagaagatcccattctgacctatatgctgcgaaagttggatgtttcctattgcaacttggattctatagaactgagtggattgccacaactcactgaggtgcgattgcagggaaatcttctgagagtagtggatgtcaatacatttgccaacaactccatgctggaggtggttgatctttcacagaatgtgttgcgacacattggccaagatgcctttgccaagttgaagcgcctaaaggagctgaacttggctttcaatgaaatagccagactggacagaaatttcatacgcaacaatgacgtgctggttgagctcaatctcagtagaaatgtgctgcagaagttgacgaaaatcgtgtccaattcggtgcgcaccataaacatgagttggtgtgaaatcacctctattgaaagcactgcactctcgagtctttcggtcattcaaaagttggacttatccaacaatcttatcactgatatgcccacctttatgagatcggaaaccctacagcaactaaacctagccaactgcaggctgactactgtaaggaacaacaccttcagagagttccccgaactggcggatctacatctgaatggcaaccgtttaacgagtcccattccgcccaattatttcgacggcaataagttcttggatcagctgtggttgggcgataatccctggatttgtgactgccacagtccgctcttcgttgatttctacgactatctaacagcaaagccagctaagataaaagatagaaatcacttgcgttgcgctgcgccagccgttttctatggaaagctttgggagtttgcctgtgcggatgtgtggattttgaatgccaggacgagcagtactggcgagaaggcttggtccatcataatgctgactctcctcggattgggtgctctggttttgggctatgcctgtctgcaaaagtatctgagaaagcgaaaagtccggcagagcgacagggagtacgaggagaatgatgatgagctacgacgcatacgagatctcaacgaacgtattttgagggaggaggctacgccgagcctgcaacatacccaggagatcagcctgctgccctcctacgaagatgccctgcgcatgccgaaactagtcaggccagtgaagtcaatgatggatctctcgggaccagaaagagcccgcaactcacggaagctcagacgatcgcagacccatgccgatggtgatggatcccagtcggaggcggaggacggactgcaactggactctcgccagcgattccgcagcgtggagatgctctcgaaccgggacaaggaaagaaccgcccaatacggaccgtacagacgcactggttacatggagtacaatcagtcgggcagtcgacgctttagcatcgaggactcccgattccccgccgcccacttgaagacccaaaatcttcagagtgctgaacagatcggaaacttccagagttatgagaacagtccctacacaaagcgcaagccaaagatcgccgagattccgcccttcaagagggtgaatatgatggccgacagcgtggagttcctcactgatccagagtatgacgaagtgggcagcaaacacggaagcccgtttgcgaaaaggaagccaaagccaccagttcttccacctcccactatgaaagtgagtgcccaggtctacacactgcagcagagtccggttttggaactggatcccgccatcgaggactacttcagtgcggccaggaagcagccctcttcgtccaccattgccagcgacttccaggagctggatgagcccgaactgaagtccttgccggacgataatcgatcaagtacgatctcccgatcggacgtggagcaggatttggagcggggaaagcgcaagaagcgcaagaattcgactagtcgtcgggtgagcggtagcttcacggcagcaaatgccgccgaaagttcctccagcgactccgagctcaatgccctggttcacaagcccatgagggagacattgttttag

SEQ ID NO: 12252 - protein, 915 aa, DROSOPHILA
MRIVLELALLVLGVISSCRAVNCPWPCRCTWVVDSLYADCSRRSLQTYPNFDGIPVEHLDLSGNKFLEFPTLYADIDSLIYLDLSSNYISSIGAKTLIGFTSLRTLLLANNSIDSWESLSPNEAFKYAPSLKRLGLDGNRLGSFGNGESFELLTSSSLTDLGLSSCGISSIGGDQMVNQLPNLERLNLANNQLAQIAALPSRTLRVLDLSNCSIKNLSGFFLDAMQNLEALNLSRNTELQFDSLSEDPILTYMLRKLDVSYCNLDSIELSGLPQLTEVRLQGNLLRVVDVNTFANNSMLEVVDLSQNVLRHIGQDAFAKLKRLKELNLAFNEIARLDRNFIRNNDVLVELNLSRNVLQKLTKIVSNSVRTINMSWCEITSIESTALSSLSVIQKLDLSNNLITDMPTFMRSETLQQLNLANCRLTTVRNNTFREFPELADLHLNGNRLTSPIPPNYFDGNKFLDQLWLGDNPWICDCHSPLFVDFYDYLTAKPAKIKDRNHLRCAAPAVFYGKLWEFACADVWILNARTSSTGEKAWSIIMLTLLGLGALVLGYACLQKYLRKRKVRQSDREYEENDDELRRIRDLNERILREEATPSLQHTQEISLLPSYEDALRMPKLVRPVKSMMDLSGPERARNSRKLRRSQTHADGDGSQSEAEDGLQLDSRQRFRSVEMLSNRDKERTAQYGPYRRTGYMEYNQSGSRRFSIEDSRFPAAHLKTQNLQSAEQIGNFQSYENSPYTKRKPKIAEIPPFKRVNMMADSVEFLTDPEYDEVGSKHGSPFAKRKPKPPVLPPPTMKVSAQVYTLQQSPVLELDPAIEDYFSAARKQPSSSTIASDFQELDEPELKSLPDDNRSSTISRSDVEQDLERGKRKKRKNSTSRRVSGSFTAANAAESSSSDSELNALVHKPMRETLF

SEQ ID NO: 12253 - DNA, 3287 bp, DROSOPHILA
tattaaatcagaacatatagcgcaccattttacgcctctattgtgggtgcttttatatggcgccgtcggtttatggcacttgatttatttcattgggtttattggtcattcgaacgctaaatgctcaggatatccaaaggttgttccacccatctgactgcaatgatgacgcaactagatggtgatataactggaaaatgagctaattgccattcaaattggcaagtttatgtccaagtgcttttgtaaatttgttctaaggcggaaatgctttcaataactatggctttataaataatatccaattttttgctacgaaacaagttagtttatatcagtgtagactgattttatgaacatatttatagcttaattagatgcagcaaatgcggggaaatacattattcgctttaaagataagaaatcaagctaagaaagtgaagatagttaagatagttaaagtttcaatcgaaaccatatgcagtccttagtccatcaaaagatattaatctcaattaactgctgtaaacaattcccatgattatcagagcgacaggccagacgtaatgtagccatacattggcttacttttgcaatggcaatacatcgtccacaaaacagcagccattccatatcagttggcacaactgggccataaactataaaccataactacgagtatgtgttatgaagtggaggatcgcgagatcgtgcttatcggccgggtattatgacaaaagcctgataatatttcccagcgaatcgtagaagcaaaaacaaagcaaatatattcattgagaggaacaataaaattttattgacaaaaaatcgaaccagattgtggagggggtcgacagaaaaacaaacaaacaaactagcgcctaaagacctgttttcgcttttttttgtttttttttttggctggtttctgaaggttgtgttctggttttgtattaaaatgccccccaagccaaaaattgctcagtcttttaaagccaagatgcggatgctaaactatctgaactatattttaatcgctgtgattgcttttgcgacttgtgagtcacaaaaactcgaggaaattgcaattgatagtttggattgccgcgaaaatacgtgcacgaatttgaaatacccttctgcttcagcagttgcctacttctcagaaaatgtgactaaacatttgagaaagtacgaaactctcgttcttcacagctccgatttggccaatttgccgagaaaaatctttttgaaccttcctcaacttgtggaattccatgtattggagtgtgagcttcagcaaattgaaagtgtatgttttgatggtgccaagaacttgaaaagattgaattttggaggtaatgccctgcgagttttggatagcaacacttttgaattggccactcaactggaggaactcaacttatcggacaatcaattggaggatctgcccaccaccatatttcgacccctgaagaaccttcagaagatcaacttatccaacaatcggttaatcactttatcccagcacatcttctcacaactgggatcgcttaaatccatcaatgtggacagtaatcagctagtggaactgcctggtgaacttttccgggatcagcggaaacatttgtcagaattctcagcccaaagtaatcaactagtgcggattcctttcaatatatttcgtgaaatagatcatctctcgctctcgtttaatcctcaactcagaagactccatctatcagctaaaatcaatgagctggaggccaccaattgtgatctcgagtcagtggagttggatggtcgagtgattggtgtccaattggaggcaaacccaaagctgcatgagttgaagatttcgcagccccaggatctggagcatctttacttggccaataccaatctgtatagacttgactttctgtccaaggccagtaagctcgttgacttggatgtaacggacattgtaaatctcgcggatttacccaaaattacctcagccaagggattggaaagattgagttttacctacgacaacttgacttcgaatcacatggacatgttgccccatctgaaggatctcaactacttggagataagtcacgagaagggaaaggagatctttatcaaggatctggatgaggatttctttgtcgaggaagcggaactcaattgcggccagttggcggatctgttggagttcgtcgaactgcctaaggacacaaccattttggaagatagattagttggagatcctcgagggccaatgagatgtggaatggcatagaaaaataatctattaaatgggaaatagtattaaaattcctacttatttatactaatgagaaaatattatataaatgaaactgcataaattaagccaaataaataccatttatttgccccctctttgtttgattttacatttacaactacaaacacttcactttaaggggccaacagaacaagtacttataattcgtcttcattaaaattaattaaaaaagtgtaatttttgcatactgtttacaaatcattaatcaacgctatacaagttgagatattttcacttcaacttttccgcctgtctccgcaattgttttcggtttgcaaacattgcagccattgtttaaaaacgatttgtcaattcaccgactcttgtgatcgctgaactcgaacttctgaacttctgcgtttttttattttttattactgaatccacgatgatcggtgtcagtggagcgcacagatcttgtcatctgcgatcagtggtcatcgattagcgatcactccattggccagcgaccagtttcccagacgaatgtgcttagatctgtctcagttgattagctcatattggactacacaggtgcagtggactacgactatggtgcagagatcgctggagaatgccatttggggtattagtagcgctcccgatgctccattttgtgatgggtagctggattggtagcgggattcgtgccgggaatcagagtattgggcaactgaacagggtgcacagtagaagattgctttggatttgctgaaggcaagggctcctttgtgctggccacgtcgtctaccttgttgttatccttgaggatgctgtttatgtccaaactgtcggatttgtggtagaaaagataggcggaaaacatcaggcccaccagggagaaagtaatgagggaccagcgcaggactgagttgatttttaggcccctaaaaagataattaaaatatgttatataatttctcttaacaatgtagattccaacttacagaaa

SEQ ID NO: 12254 - DNA, 1287 bp, DROSOPHILA
atgcggatgctaaactatctgaactatattttaatcgctgtgattgcttttgcgacttgtgagtcacaaaaactcgaggaaattgcaattgatagtttggattgccgcgaaaatacgtgcacgaatttgaaatacccttctgcttcagcagttgcctacttctcagaaaatgtgactaaacatttgagaaagtacgaaactctcgttcttcacagctccgatttggccaatttgccgagaaaaatctttttgaaccttcctcaacttgtggaattccatgtattggagtgtgagcttcagcaaattgaaagtgtatgttttgatggtgccaagaacttgaaaagattgaattttggaggtaatgccctgcgagttttggatagcaacacttttgaattggccactcaactggaggaactcaacttatcggacaatcaattggaggatctgcccaccaccatatttcgacccctgaagaaccttcagaagatcaacttatccaacaatcggttaatcactttatcccagcacatcttctcacaactgggatcgcttaaatccatcaatgtggacagtaatcagctagtggaactgcctggtgaacttttccgggatcagcggaaacatttgtcagaattctcagcccaaagtaatcaactagtgcggattcctttcaatatatttcgtgaaatagatcatctctcgctctcgtttaatcctcaactcagaagactccatctatcagctaaaatcaatgagctggaggccaccaattgtgatctcgagtcagtggagttggatggtcgagtgattggtgtccaattggaggcaaacccaaagctgcatgagttgaagatttcgcagccccaggatctggagcatctttacttggccaataccaatctgtatagacttgactttctgtccaaggccagtaagctcgttgacttggatgtaacggacattgtaaatctcgcggatttacccaaaattacctcagccaagggattggaaagattgagttttacctacgacaacttgacttcgaatcacatggacatgttgccccatctgaaggatctcaactacttggagataagtcacgagaagggaaaggagatctttatcaaggatctggatgaggatttctttgtcgaggaagcggaactcaattgcggccagttggcggatctgttggagttcgtcgaactgcctaaggacacaaccattttggaagatagattagttggagatcctcgagggccaatgagatgtggaatggcatag

SEQ ID NO: 12255 - protein, 426 aa, DROSOPHILA
MLNYLNYILIAVIAFATCESQKLEEIAIDSLDCRENTCTNLKYPSASAVAYFSENVTKHLRKYETLVLHSSDLANLPRKIFLNLPQLVEFHVLECELQQIESVCFDGAKNLKRLNFGGNALRVLDSNTFELATQLEELNLSDNQLEDLPTTIFRPLKNLQKINLSNNRLITLSQHIFSQLGSLKSINVDSNQLVELPGELFRDQRKHLSEFSAQSNQLVRIPFNIFREIDHLSLSFNPQLRRLHLSAKINELEATNCDLESVELDGRVIGVQLEANPKLHELKISQPQDLEHLYLANTNLYRLDFLSKASKLVDLDVTDIVNLADLPKITSAKGLERLSFTYDNLTSNHMDMLPHLKDLNYLEISHEKGKEIFIKDLDEDFFVEEAELNCGQLADLLEFVELPKDTTILEDRLVGDPRGPMRCGMA

SEQ ID NO: 12256 - DNA, 3672 bp, DROSOPHILA
ttgttctctgttcattttttttgtgggacagagccaaattgtggcaattgagtcacgttgcctggttgtttctttcgaaatccaagggaatttagcgatcttttttataccgtcttcacgcaacccaatttgcattaagaatccgaatcgtactaacagacgaactcttcgtgatgcctcgaattttgcactacattttaaaacgccgattcccgtccctttatatacacaggttgtacttaaatcgaaaccaagtacttaataattgtaccatgccaatcatagtttaagcgccaatctgccgccacgaatacatttaagaaatcttcagtttgtgcatttagaccagcatgagtatccttctatatattgtgtcaaaaaaaacgtttttagacgttatatagcattaagtctatcaaagtttatatacaaatctttttggacatttttatgtgagttttacataaaataaatggttttacctcacccaacggtaaaattctcacacattttattggaatttggggtggtaatgaactaattcttctgtattctatattaaattcattgatttacaataactttatatttatacagcgctacgttggaatacataaaaaactaatatgtatatcacttgttgattcttggatgtgatggtgctattgagtttttgaagaaaacaagcatatttgatgattcatttcaaagaaataactgaagaatgatctattcataagccaaactcatttccataaggaagaaaatgtaaactgaattttacggatattaagaattcttttctttgtataaaattcaacttatgcatttttttaaactcgctaagcacgaaacgcgcttttccgaacccgattaacacttgcccagaatttacacgttttgttgcacagtttattcattttgtggtacatagtttatatgatcgttggtttcgattcgtttagatctatgtgaggattgtagaaaaacgctaaaagataattaagagttatttatatttagatacgatggctgactaatgaatatcattcagaatgcaagtgtttgttagtttaataagtggaaatttgagcttgggccgcacagtcttgatttccgatcctcacagccttacagctcgtccttatccagatcgatgtcgctcagatcgatgtcctcctcggtgggcagttggccatctttgccgtcccaaggatccacggacacaatcgccggctttttggctccgcgaacaggcgccgtgtggccacgtccgtaggagatgtcgcgcaggaactcgttgatgccgtccttggagaaggagcccttgagcacggagaatttcatcttcttgaagttgaccacagccatggccggatagccgaatccgcccacttcgagcgactcttccagggccaactgctggccaccttctgcccaggcccagccccattgcttctgcttgaacttctcgcccagggtgcgcaatgtgtcgaggaacttgttgcggcacttggcatcgcagtcgagaatgtgtggcagaacggacacgacgcacaatggctttccttcgcaggcagtttcaaaagtcgattcattgataatctcgatgagttcgggtgctggcacattggccacatgcttgtcactggcccaggatacaatatccgaggcagtgcgtccgccatcatactcctgggcatcactggctcgcttggagcccgcagggaagaacttaatggtaggatacccacgcacattgtattcggcggccttgctctgatgcgcggtggcatccagggcgcccaacttaaccttgcccttcaattctttggcggccttggcccattcgggtgccaggttcttgcagtgaccacaccagggggcgaagaattccaccagccatatgtcgtcggagttcaggaccagtttgtcaaagttgtcctcggtgagttcgatgacatcatcgccggacgagctgccggaaccgccggaagacgatccaccgccgccgcccaggacaccctgcaccttcttcttgacctccgccagagcggcttcagcgatggccttagcggttcgctgaccattgtagtccgtgggcgacttcttgttggcgccaaagatcttgatggtgggaaagccacgtacaccgaactggccactcagcgtgctgtccgcatcggcattcacggagcccactttcacgactcccttcaatgccttggccagcttcttgtactcgggcaccaggctctgacaatggccgcaccatggagcatagaactccacgacccagatggcgtcgtctttcagcacctcccggtcgaaattcgagggcgtcagctccacaacgccatcgctgggcgaatagaaggcactaacgctgcccacgacaaatgccagcaacaaaatgctcgctgcgggggcgtattgaaaatgtattattaacataatttgtctatttcgtgcatgggccggaaacttacccagttgcctcatctttcttttttgagtttgcgaaaccgcttacgtgtctatctcttgcgagtttatctcaacaaattcttaatcaacgcgtcttgtcgataggctcttttaaactaaactatgtgtagagatgcggcttatattttgctaaaaaaaaagagtacacgtcactgcgagtgcggcgtactctcgatagttcgataggcgtttcaatactttgtgactatcgatgtagaagccggcaaatgcggatactgctgataatgtgaaataagccaaatcttatatacttttacaaaaacaaaggcgtgattttatttgtaattctaattatatatacgtacaaataacgaaaggaaaatggtccgagaagtttattgccactatcgatatatttcggtattttagactggttctaaaaatccttcagagctgccagataagttaaaaatgagcttattgacaacactgtgtgatttggcggctatttcaaggttgatttcttaacacattcattaaaaccaatgcaaaaaacttgcaaatttcagtgatgatacttttgacgtagaatgacaaagttctacttctactaccccaatgtactgctttctttatctctaaggtagattaaattatctatttatttctctcactgtaaaagttaactgcattatttttagtaagcaacaggcaacaatattaagaatattgaaaaaacaaaggtacatatataaaacaatttattggttaaatgattttatataatataacattttctctctttcatttcagcctactatccttaattgtatttaccttgttaattccccattttaattgtttcctttcccaacgttttgtttgatttgtgttttctggaagctttggcttaatttactcgcacattgttctggctctccagcttgttctcccactgccctccccacccaccagccaacattcgaatgacccctgaccctcgccattttcgtctacgttcgttgcgtgcgcatatgagataaaatatgtggtcaattttacttaatagcgacttagtagtagtgttgccaagatttatgtgacgttcatattggcacagaaagacacagagtcagacaatttccttttctgccattcaagggttaattggagggagctgttcagtcggggggactggatttt

SEQ ID NO: 12257 - DNA, 1603 bp, DROSOPHILA
ccgcactcgcagtgacgtgtactctttttttttagcaaaatataagccgcatctctacacatagtttagtttaaaagagcctatcgacaagacgcgttgattaagaatttgttgagataaactcgcaagagatagacacgtaagcggtttcgcaaactcaaaaaagaaagatgaggcaactggcgagcattttgttgctggcatttgtcgtgggcagcgttagtgccttctattcgcccagcgatggcgttgtggagctgacgccctcgaatttcgaccgggaggtgctgaaagacgacgccatctgggtcgtggagttctatgctccatggtgcggccattgtcagagcctggtgcccgagtacaagaagctggccaaggcattgaagggagtcgtgaaagtgggctccgtgaatgccgatgcggacagcacgctgagtggccagttcggtgtacgtggctttcccaccatcaagatctttggcgccaacaagaagtcgcccacggactacaatggtcagcgaaccgctaaggccatcgctgaagccgctctggcggaggtcaagaagaaggtgcagggtgtcctgggcggcggcggtggatcgtcttccggcggttccggcagctcgtccggcgatgatgtcatcgaactcaccgaggacaactttgacaaactggtcctgaactccgacgacatatggctggtggaattcttcgccccctggtgtggtcactgcaagaacctggcacccgaatgggccaaggccgccaaagaattgaagggcaaggttaagttgggcgccctggatgccaccgcgcatcagagcaaggccgccgaatacaatgtgcgtgggtatcctaccattaagttcttccctgcgggctccaagcgagccagtgatgcccaggagtatgatggcggacgcactgcctcggatattgtatcctgggccagtgacaagcatgtggccaatgtgccagcacccgaactcatcgagattatcaatgaatcgacttttgaaactgcctgcgaaggaaagccattgtgcgtcgtgtccgttctgccacacattctcgactgcgatgccaagtgccgcaacaagttcctcgacacattgcgcaccctgggcgagaagttcaagcagaagcaatggggctgggcctgggcagaaggtggccagcagttggccctggaagagtcgctcgaagtgggcggattcggctatccggccatggctgtggtcaacttcaagaagatgaaattctccgtgctcaagggctccttctccaaggacggcatcaacgagttcctgcgcgacatctcctacggacgtggccacacggcgcctgttcgcggagccaaaaagccggcgattgtgtccgtggatccttgggacggcaaagatggccaactgcccaccgaggaggacatcgatctgagcgacatcgatctggataaggacgagctgtaaggctgtgaggatcggaaatcaagactgtgcggcccaagctcaaatttccacttattaaactaacaaacacttgcattctgaatgatattcattagtcagccatcgtatctaaatataaataactcttaatt

SEQ ID NO: 12258 - protein, 433 aa, DROSOPHILA
MRQLASILLLAFVVGSVSAFYSPSDGVVELTPSNFDREVLKDDAIWVVEFYAPWCGHCQSLVPEYKKLAKALKGVVKVGSVNADADSTLSGQFGVRGFPTIKIFGANKKSPTDYNGQRTAKAIAEAALAEVKKKVQGVLGGGGGSSSGGSGSSSGDDVIELTEDNFDKLVLNSDDIWLVEFFAPWCGHCKNLAPEWAKAAKELKGKVKLGALDATAHQSKAAEYNVRGYPTIKFFPAGSKRASDAQEYDGGRTASDIVSWASDKHVANVPAPELIEIINESTFETACEGKPLCVVSVLPHILDCDAKCRNKFLDTLRTLGEKFKQKQWGWAWAEGGQQLALEESLEVGGFGYPAMAVVNFKKMKFSVLKGSFSKDGINEFLRDISYGRGHTAPVRGAKKPAIVSVDPWDGKDGQLPTEEDIDLSDIDLDKDEL

SEQ ID NO: 12259 - DNA, 4064 bp, DROSOPHILA
cgacccgttttgcgctggtcactaattttctactagcattcgagccgatttacgaccgaaacgttaaaagatttctataaactggcgtcagattgaccgcatctgctagaggtggacaattgacgataggtcgatagctttcgatgtatgtgcttacgtttagaaaggaaaatattgaatctctaaaaaaaaaaaaattgaattggaaagaaaatactgaatttaaaatttttattgacctctattattagagaaaaaaatattataccaatgcaatatcttcaagttaagaaaactgtaaccctaaaaactatcaattggttcagacattctggcaaccttacatctgtcagctgttaccatacaaaaatgtccaatttgcggcgccaggtaaattaacttaaaatcataaataatcggttaatattgtttgtattccaggttctcagtgctttcaagaagctccaccgtacacgacaatacgtttttcagggggatgccaatgctttggcggcgggacgactaaaaatcaacgaatctttcctgcagaatcgtaatgaaagcagcgaggatgaaattcaaaaggtttaaccactttttgtaaattctaactaagtacatatatggcaatttggcaaattacagatgatcaagctggcgcaggacgtggatttggagctgcgaacgaatgtcatccaagcccagaaaaaagaggatggtgtttatggtcagtggggcatggcgattacataaaagagcgctcaaaattaaaatttggctatatttacagaactaaggatcacgccagagacaacgcgactcgacaatgtggtctttaatcctgacgcaattatcgaaaaaccgcgcaggcaacgcggcgacaaaaacactgaaggttgctgcggtggcgctgcgatggcggcgctggaagccgaagtccaggcccgcaacaaataaaaatatattcaatatttagctgtagtcaagatggttttgttctgattaattacgtcgtttatctttaatttctattatgtttcttcttcgatttgtgactactctttgacttggacttcttttgcttggattttgtactctttttgcgtttgctgcgatcgtccgacgatgaggagctgctagagctgtcctcggaactatctgaagatgtggagtcgctttcggattccgaggaactttcactcgaatctgaactgctgctagctgctcgtttcgatttcttggcttgctttttgctcttttccactgaaagttttcttttcttctcatgactcttgttagggcttgagtgagtgtccattctatggtcttcccggttcctggattgttgcctataaaaagatagatagatagttaaagattttgtatacatccagatgcttaacatttttacctccgctctggcgatcttctttgattcctggaggtttctctatgcgatctctcatcgttacgtcttccttcttgaggggaatggaatcgcctgctgtcattgcgatctctgttttgagtcggtctttttccagtttgatctctagatctagaacgccttctctcattttgttcccttggcctagagcgtcttctttccttttggtcccttgacctagaacgtcttcctaattggtctctaggcctagaaggccttctctcttctcgatctcttgacctagagtaccttctatgtgttgcatcccgagacctcgatgaccttttttcattgcgattcctttcgcgatttgagttctctctgactgactcattttgcgattttttcgatctataaacacttttttcatctttttccttcgatctggtgcgtctttgcaaattctttcgaacatctcgttcgctttgctcctggtgtcgctgttctctcgcttttcttcgctctgcagagctcatcctatttcgaaaatcttccgtcctgttgcgctccttatggtcttctgttctggaccggccattgtttggtttcctgtgatctttgtcgtctcgcaaattgttaaaatccagctttctatagtcgccctcaataccacgtcctttgccccgccaggtgacctttgaaacggattgggagaagtccacgtggatgcgtcgatcgtcgataagcacattatccattttgaaatatgcggcctcacaagatttttgatcctcgaactccacaaaagcatattgcagagaatctcccgttttgcggtcgcgaatcacctcacatcctttaagcacgccgaagctactaaagattatctccagatcatcgtcggttgtaacaggattgagtttgcacacaaacaagacattttctggcggagccatgtctgcatcgggtaaatcgccgacaatctcaaggattgtggctcgagccttggcctctcgttcggccagcatctcctgcatctcctccgcggtcatgccatcagtgtcatcgatatcctcgtcggcagcgatgcgcccgttcttcagacgctccgcactgggcgaaggtgagcgacttggagcctgaaggccgcgcggattaggaaacggatcctcaagcacaacagtgtgtgtgatgcgtatatcctggtaaggacggaagctgtcgtcaacaatggcgtcgtttagcttgcgcagcacctcgtgaccttccaccacttcaccgataacgcagtggttgccgtccagcgatgttaggttctcacccagcgtgaggaagaactgggatcccaccagattcttgcctgcactgaccagcgatagcattccggcactggagtggttaatcttgggcaggaactccgcctcgaagaagcgcttttgcggaccctccaccacgccccagatggaggatccgccgtctccagctccactcggatcgcctgtttgggcgatgaatccctgctgcaccgtgtgaaatagattgaagttatagtacttcagccggcacagcttgaggaagtttaggcaggcaattgggcgctcgctgatgaacaggtcgacggtcaggtcacccatcgtggtttctataaccaccgacattgtgcgaattcacagataccggcaaaatcaagggataaacaagaacaatatagaggtggagaaacatcgatgccaaatcgatatcatcgatgctttcgaaaaatcacaaacatcgatgtttttcgaggaatcatcgatgtttttccatctctactgcgcatcggaggagagaagtgtataaattgtaggtataaattaattatccaaattttctaatacaattattaatttaatgtgacttatgtcggtgttatatgaaacttgtacaaaattggtattttacataaattttgaaaaaaaaatatttttttttatgtaccctaaactgagaaaaaagtaaaaaaaatacaaactgaacaaaactgaaaaaaaataaagaaaatacaaattgatcaaagaagtccatacctgtaaatgtaaatagttatacacgatgcgtaagttcatccgatacttgacatcgattgaatattttaaaaacagaacgtaacttcgtaatcgccattttcgattgtcattcgataattgtgtgtgtatcagtgagacttgtcaaagaattttcacacgtttcgagactggaaaaaagtacagaaaatttcattccaatcttaaaaagcgacaattaatagttaagcaagtgaccagtgatctagaacaaggtaaaatgcccgaggcaggaaagaaaatagcagagttgcgcgtgtgcgatctaaagagtgagctggagaaacgcgagttggagacagtcggccccaaggcggtgctcatcgaacgccttgaaaaagtaagtccacaaatatgtatgcaacttaaatggcggttcagtgccgctggcgatagagatagtgatgcaatttccggggatttatgaatgtgtgtaagcaacgcctggttttttctaatttcaagtcactcagagctgaagggctcgacccggccacccacttgattgtgccgggcgcgaaggccaagaagccgtttgccatgcccatgaaagatctccagtcggaggtggtgat

SEQ ID NO: 12260 - DNA, 2002 bp, DROSOPHILA
gtatctgtgaattcgcacaatgtcggtggttatagaaaccacgatgggtgacctgaccgtcgacctgttcatcagcgagcgcccaattgcctgcctaaacttcctcaagctgtgccggctgaagtactataacttcaatctatttcacacggtgcagcagggattcatcgcccaaacaggcgatccgagtggagctggagacggcggatcctccatctggggcgtggtggagggtccgcaaaagcgcttcttcgaggcggagttcctgcccaagattaaccactccagtgccggaatgctatcgctggtcagtgcaggcaagaatctggtgggatcccagttcttcctcacgctgggtgagaacctaacatcgctggacggcaaccactgcgttatcggtgaagtggtggaaggtcacgaggtgctgcgcaagctaaacgacgccattgttgacgacagcttccgtccttaccaggatatacgcatcacacacactgttgtgcttgaggatccgtttcctaatccgcgcggccttcaggctccaagtcgctcaccttcgcccagtgcggagcgtctgaagaacgggcgcatcgctgccgacgaggatatcgatgacactgatggcatgaccgcggaggagatgcaggagatgctggccgaacgagaggccaaggctcgagccacaatccttgagattgtcggcgatttacccgatgcagacatggctccgccagaaaatgtcttgtttgtgtgcaaactcaatcctgttacaaccgacgatgatctggagataatctttagtagcttcggcgtgcttaaaggatgtgaggtgattcgcgaccgcaaaacgggagattctctgcaatatgcttttgtggagttcgaggatcaaaaatcttgtgaggccgcatatttcaaaatggataatgtgcttatcgacgatcgacgcatccacgtggacttctcccaatccgtttcaaaggtcacctggcggggcaaaggacgtggtattgagggcgactatagaaagctggattttaacaatttgcgagacgacaaagatcacaggaaaccaaacaatggccggtccagaacagaagaccataaggagcgcaacaggacggaagattttcgaaataggatgagctctgcagagcgaagaaaagcgagagaacagcgacaccaggagcaaagcgaacgagatgttcgaaagaatttgcaaagacgcaccagatcgaaggaaaaagatgaaaaaagtgtttatagatcgaaaaaatcgcaaaatgagtcagtcagagagaactcaaatcgcgaaaggaatcgcaatgaaaaaaggtcatcgaggtctcgggatgcaacacatagaaggtactctaggtcaagagatcgagaagagagaaggccttctaggcctagagaccaattaggaagacgttctaggtcaagggaccaaaaggaaagaagacgctctaggccaagggaacaaaatgagagaaggcgttctagatctagagatcaaactggaaaaagaccgactcaaaacagagatcgcaatgacagcaggcgattccattcccctcaagaaggaagacgtaacgatgagagatcgcatagagaaacctccaggaatcaaagaagatcgccagagcggaggcaacaatccaggaaccgggaagaccatagaatggacactcactcaagccctaacaagagtcatgagaagaaaagaaaactttcagtggaaaagagcaaaaagcaagccaagaaatcgaaacgagcagctagcagcagttcagattcgagtgaaagttcctcggaatccgaaagcgactccacatcttcagatagttccgaggacagctctagcagctcctcatcgtcggacgatcgcagcaaacgcaaaaagagtacaaaatccaagcaaaagaagtccaagtcaaagagtagtcacaaatcgaagaagaaacataatagaaattaaagataaacgacgtaattaatc

SEQ ID NO: 12261 - protein, 653 aa, DROSOPHILA
MSVVIETTMGDLTVDLFISERPIACLNFLKLCRLKYYNFNLFHTVQQGFIAQTGDPSGAGDGGSSIWGVVEGPQKRFFEAEFLPKINHSSAGMLSLVSAGKNLVGSQFFLTLGENLTSLDGNHCVIGEVVEGHEVLRKLNDAIVDDSFRPYQDIRITHTVVLEDPFPNPRGLQAPSRSPSPSAERLKNGRIAADEDIDDTDGMTAEEMQEMLAEREAKARATILEIVGDLPDADMAPPENVLFVCKLNPVTTDDDLEIIFSSFGVLKGCEVIRDRKTGDSLQYAFVEFEDQKSCEAAYFKMDNVLIDDRRIHVDFSQSVSKVTWRGKGRGIEGDYRKLDFNNLRDDKDHRKPNNGRSRTEDHKERNRTEDFRNRMSSAERRKAREQRHQEQSERDVRKNLQRRTRSKEKDEKSVYRSKKSQNESVRENSNRERNRNEKRSSRSRDATHRRYSRSRDREERRPSRPRDQLGRRSRSRDQKERRRSRPREQNERRRSRSRDQTGKRPTQNRDRNDSRRFHSPQEGRRNDERSHRETSRNQRRSPERRQQSRNREDHRMDTHSSPNKSHEKKRKLSVEKSKKQAKKSKRAASSSSDSSESSSESESDSTSSDSSEDSSSSSSSSDDRSKRKKSTKSKQKKSKSKSSHKSKKKHNRN

SEQ ID NO: 12262 - DNA, 9044 bp, DROSOPHILA
ggctgaaacacgtcaatgttttgtttttttttttttttttgctgctctgcattaatattttccttccgcaatacttatgaccaattcgctcttcccacccaactaaaaataaattcccacacatcgaaaatgtgttgtgttttgtgtggtgctatataaaagttgcaatttataaacttttcaacatttttcgcaaaacaatttgcgcacctccctcggttctcatccaccacctgctgttgtgtccgcacagtgggcttaaattgtgagagctgtacgtctggaaaatgtgttataccgctcatttttgatacacgatttttcgttgttaagtggtaaatacatcaaaagtttatactgtattttaataatgttctgttagctgtggaatattgatttcgaccactgttgaacggcctaaacgactcgtggtgagagttctaaaattaaatatttaaatttgtcgttacatttttggcttcgctctgtcgtcttgagcgttataaactttggccataaaactcatctttattcaaattaacatgactcgctattcagatttggaatcaatgcgggaataagtataagtctaggtgaaggagaaacgattttcggcgaaaactggaagatgaatcacgttggtaaaaaaaaggggactcaaaccgctggtacaataaaccaactgatcggcctctaatatacgacactctctgataacgaaagtgcccgaaagataaatgatagcgcagagatagggcttcgagtattggcgtaacaacttccggtgagatacaacaataacaatgagtcgagttggtgcaaaaactgagaatctctccgtaaaaatcgctctcctttttctctctctccgaatgttcccccacaataacacagaaaatgatgcatggcaatgccgtcagctggtttttcgctctctcttttgatcaccgagttgtttcgtttcttgtgctttgcattcaattctcaacgattcattgccgcgtacggctgcaaaagtttttttcgttcattttaacatttcttggctcgctgcgttttccgtgtttttgttttataatgtgcagtttcgagtccgcgttcaaacgtagcattaagttaaaaacgagattggcctttgctggttaacgacaacaacaacaacaacatcgaaaaagcaaccgatgtaaatatacacatgcctttataaaaagtgcgagtgcatcgctcattgcgtgactttccatcgagctcaataaaaatataaatgcgcagcgttttcttatcgcacgcttgactgtgtcactgtgtgtgtgtgtgtgattgtgtgcgattgcagcagaagtacaaatgtgtatgtaggttatggcaaaattagcaccgaaaccatttaccatttcaaaaagaaaagaaaaaataatagaaaagaaaagaaaataaaaagagagcgaggcagacaacacgcaaccaactgttgatgcttcctcttgctgcttctccccacctttatccaactttatcgctgtttccccgccttgttgtttgtttgcttatcatcgatgcagtgtgacacaattcaaaatttaatcgcagcgtcaacaaatcgaatcgaatagtgaatagtgtgtgtggaaaatcttggctgcattgtcgccatttcgatggtgatgtaatttgcataaacaacaataacaccaagctgcgaaaacaacaaacattcggctttctgcagaccgcagactaaacgcatacataatttttggagtcacttcaggtttcaaactgcgccatgtaggcagcagctccatgtatgttgttgttgctgtctctggcaaacacacttgttgaatgtggtggagtctcccgagcttgtgattaaagctgctcgaatgcgatacggctaaataaatgattaaacactgggtggtaaataatgcggggtacaaatacaccgcaagtaaccacaaaaagctgcactgagcactctttgaaatgtttaaatgaaaacttaaaggagttatacctatcctatgtgattgaaaattgctaaaagtttactctctaaacaataatattcgtcacttagaattcttatctttcgtcttcttggtaaaggaaatcacaatctaaattaaaggagctcagggctagctaataccaatatttgcagtaattttattttacgcgtagaataatgaagtgaatcagctttatacattttctataaactgactttgtattgagcaatatttaagcagtgattttcttatttatcactggcgtgaccttgcacttatgacttcgttctgtaaagaacaatctgaaacggaatgtctcagactgtgaatcattccctcgatgaaatgggtttgatatttaaaaaccagttacgattaacgtattcgtatgtgctgcgttaatttcctcatttgtgtttggaagtctcgtaaaattgttacatctcttttcttgtaaatcgaaatgttataatgtcaaattagcatcatatcctcctaaaatcgaacatttcataccagactaacgctattttttttgggggtttatgaagtcgttaggaaagccaataaaattaggcaattgctttgtcgtgcaatctgattttgaacctttttttactctttatggggccttaaaaatcggaaagtaaagtctttaaaaccatatgcttcagtgagggcatttgtctgcttagagttaaaagcgatctgtggatcactagccaactgaaagatcagccaaatgccttaaatgccacagacgcccacaaaccgatggcaaggtgctgagtgctgaattctgatttctgagatatggtctcgcagctagccactgcttccaatccgacttgagccagtgaaatccaagccagagcgagccggtcttctgctgcctcattaccctggacagccccgccatcctgctcacctggtgaccgggcttctcctccagctcctcctatctcgactcctccgctgacgtgtgtgtcatgcggatggctggccaaccagccaaccagccagtcagccagctagctagccagccatcagaaacgtcaacggcagtcgcggcgtcgtcgtcgtcatttgctgcttttagacaatgctacgagttcctacacctacgacctagaatttgccgaatatgtcaacaggtatatactctatagctatagccgcaaagcgaacaaactacgcgcacacacactcacaagccggcaatatctctatttccctatatacgctatatagatagcacaatgtacgtacatgtttgtataaataaagggggaattcattcaaatgtatatatatgtatatatatgtatattattttcttcttttcccgcaaaattcattttcgatttgtatttataatcgggggtgttcttaaacccctattgctacatgtaaacagactaatcctaaagaatcattagatatacacctatgtagaataggaaatgcagcaaatgaaacggaaagtttcaaatgttgcattggaaattgcgcgcccggaagttcaagggccagcgttaacggtgaacagaaagtccttacaacgcttgccatccctttcgcaccagcttgcaacatgcgcagtgcgaatttcccgagcagaaaaaggaaaatggcccaggaccaatacggtggttccatggtgtaatggttagcactctggactctgaatccagcgatccgagttcaaatctcggtggaacctgagcctgaccttccggtgtccttattttatcgacggtcatcgaaggatggttaaaatgtaacttattcgtggcattttctttagttcatgaacttttgaccctgttattaatagattagtgcttttgatagttgaaagtgcacagaaactaatgaatgcctttcgtaattcatgcttaattgcagttaatgtgtcacagacaaatagttttaattgttactattgtaacaacttaaatacttaaatatagttttaagatgcattgtatctgttcgtccactgcgttcttaaaataattttccactattatatttaaatacgtaaagtatatatctttaatctattttgatgtgttaatagacaaatttatgtgacgccacgcacacgcaagacatcgaaaaccataaattagatctctgaaaaaatgtgagaaaaatctgaaaacacgatcaacttggatgaaccgcccataagaaccgaaccaaatctcaatattttcaacccacatcaagagcaacataaacacagcccagcgatgttggtcagtcgaacaacaagttttcaagttttgaagttcggttcggttcagttcagttcgagattgtgtaaatgcaaattgtcatgtcacttggccgcagggctaatttatcccaagcactttccacttgcaacaacagcaaacaacaacaaaaaaaagtaaaatacaggcaattggccgctgtaatgtgtttgataaaaaacactcgcgcatgaaatcaagccaaattgtgtcaagggggctgcatgacaacgggcggcagcaacaacaatacaaattaaataaaattagcgactattttgcacggaaatgtggaaggggggaggggggagggtatctgaggttcgagatcggagatccaagaggggcgcaaaacgcttgagcaactttgccccaaaagttgatggacggctaactgagcgccctacacatgcgccatgtattcgatatacccctctctctctctctgtctacacagagagaaattggcacttctaacactatattatggcatttacgaaatgttgcattttactttgcttgttggtataactttacttaaacattaaatctaaataattgcaatattcgaatatatatttggtaatctatgcttttgaatctctttttcgtcgcctttttatcgccgtgtactttttcggtttatcttgttcacagtttgcgtgtgtgggcgatggcataatggggttttcgaacgacattgaactcgaaaaaattgaaaagtgtcggcggcccatgcaaaccaagctgtctttgactttgctttactcgaaatctagtttatctgtgtgtgcgtgtgtgctcctctctatttgtttatgttttccatttcgcctttgctttttcagcaacaacatttgaaacataactccaaattcagttctgtctaaatccgattctaaaggtagacatttctcaaatattcccacatttttggctctaatcccttgactaatcatcatcttctgttcccgtttttttgttcatattttgcagaagcaaaagccggaaaaggattggaccaaaaactaaacgcattagattgcaattcgtgctgaaacgatatacagcgaatagagaccaccgagaactcgaagacacatcaccaacatggttgactactataaaattttggatgtttcgcgatccgctaccgatagtgaagtgaagaaggcgtaagtaaacaaatgactttcgaagtaacacatatcctccggtcaacatattcgtttcatcacaacattcaccacttgcagatatcgaaaactggcactaaaatggcacccagacaagaatcccgacaacctggatgaggccaacaaacgcttccgcgagctgtccgaagcctacgaagttctttccgatggtaagtgccttgctcaagcgcagatttcttcgagcgtcgaaaaacaaagaaatttgggttgggtatcacgtgatccggattcggatgatccaggctgcctggcattaagtctttatattgtgtatttagcacgtaagcgcagaatctacgatgcccgggccacgctgcacaaatcctcgaacagcggaagcagcagcagcaacagcagctcctatacccgctatcgcaacggcggcaccggtggatcgtcgtcctatggacgggactacgactacgactactatccgggctcggggtatgggtctggttccgggcggcgttccggcaaccggtaccaggccttcacgtttcgcaacattttcgagggcactccgttccacaagatgttcggtaaaggcgagaggccaaaagcgttgcaattgtttcgttactttggttttgctgactgacatcctggcgcacgtcgttttgtttttcgttcgtcattctatctgcaactaaacgctgttttcgtacagtgatgggggagcattcataagcattcataacctttcccaccactgtttccatgctaagtctaagctaatcctcgcagctcgagcgtttattactaattaattgcatttactttcctgttgtttcacacccaacttaccatgtactcccatttcttaacagagaaaaagcgtcgcatatacgatgagtatggcaaagatggactgggcgatcgtggccagagtcgctcgcatgcccgccaccattatagcacacacgatttcgatgacttcgatattttgggcggctttcagtttgcattccgcccgcccgaggaagtgttccgtgagttcttcggcatccactcgcccttcgccgacttattccgaggtgagtgttttgatgggatgggtaaacgtgtgtagagagtgttctaacttttatgattatcgttttgcagatgccaatggacattcgaatggcagcacaagcggctcgagtggcagtcgacgcaatggcggcagcagtggatcatctcgccaccatcatcatcaccaccagcacaaagtggccagtccgttcggggctccaatgcttaactactcaatgatggacttctttatgcccaccagcggcttcacctcgttctcgtcgatgacccacggcaatggcagcagcggtgtcacccacatctccagcggacccggtgccagtgtcaagcgcacctccacttcgacggtgtttgtgaatggcaagaaactgatgaccaaacggtatgataaactctatctggccatcatagaatcgtttcatatctgcatttgcattttcagggtcgtcgaaaacggcaaggaaactgtcttttcatatgaaaatgatgttctgaaatcaaagactgtgatgggctcccttcaatagctaattaattaaattcacacataatatatatatatataaatatcaacaaaaatcaacaaaggaaaagtcataaatgtaaagccgaatgaatattaacaagcccaagaagaactcggaattcgttaccgcttcgaaatatgatacttttaaaactttaaaactttgctctacactacaatttagttacttttaatggaccgaacagcaccataaatgaatcaacagccagcgaaaggaccaagcaaaaattaatcaacagcagaaacactaacagcagcgatatccacaccaaaaatatggaacatggaacaggccattgaattaaatcaaaattccccgtaatagcgaaatatggaaatttattttttaagcatagtttttgaacacagctgccctacaacaaaattgcaccggtggaataaagccaacaccatcgagcaccacgagaattaatggaaaaaccatactgaaaatttagccaataagttttaggggccagattttaaatatgctgttcggagcgagtgtgtttgggtgtatatctttttgggggggataattatgtattcttcgtgtatgtatcgttagtcacttaagttgccacaatacttactaggaaatcgaaagcggagaaattcaatctaagcaatgaatcggaactaaaataggctttgcgttaatttttctttacattgtaagggatatgaatatgaatattctaaacgatgacatttaatttttataaatatttcataacctagatttctttattaatttcgatgctgtatgctagcgtatagtcgttttttaaatgcttaagactattctcacataacctgcagagcgaaaagaaaattaatcgtaacataatcgccaataatttaatactttgttaagcgaaaatttcataatgagaataaaaaaaaaaacacatgagaatgaaaatatacaatagatgcgaaacaattaagacaagtgttttattactactttaaatatagtttcatttaattaattcgttgaatttctgcgatgcaagctgatcgatgataattctgacataatattaaatattattataaataggtatttttatataaacaattataatcacttatgcgagcatttatattgatgtatagaatcaagttttaattgaactcgcttttaagttatttttaaatcagcaataatgaataataaaccatgaaatcttaagagtgaaattttaaattttcccgccaactctctttggttggcaacgcgaccatcccctggccgtgctgccaacttttagcgtgaaaattaaaagaaattgaaatatcataagtaaaaaagccagaatcaagtggaagaaagctaaattggcaacactgatcgctggcggtattttcctacgatccaccaacgatcacacttccccaaaattattaacaaaacgcagcaggatcggagcaaatggcccaaaaatgagtcgcgatagtgatcccatgaaatggtaccacggcaacctgtcccgcgaggcagccgacgaactgctaaagcagggtaagtgctggcgcaggacgccaattggcctgacatcagtgatgatcgctgggatgtgggcgtggtggagcacaatgatgggtaattggtatggcaatcaatcaacaggttacgaggacgggacatttctggtgcgcgagagcagcacagcggccggggactttgtgctgagcctgctctgccagggtgaggtgtgtcactaccaggtgcggcgacatggcggcgaggacgccttcttctccatcgacgacaaggtacagacgaagatactgcacggcctggacacgctcgtcgactactatcagcaggcggccaatggtctgcccaccaagctgacggtgcccttgatccgcgatctgccgccgcacaacactcgcagccacggagtgaccaatctgctgcatcgcgccacaagcaaaa

SEQ ID NO: 12263 - DNA, 2045 bp, DROSOPHILA
gcgtacggctgcaaaagtttttttcgttcattttaacatttcttggctcgctgcgttttccgtgtttttgttttataatgtgcagtttcgagtccgcgttcaaacgtagcattaagttaaaaacgagattggcctttgctggttaacgacaacaacaacaacaacatcgaaaaagcaaccgataagcaaaagccggaaaaggattggaccaaaaactaaacgcattagattgcaattcgtgctgaaacgatatacagcgaatagagaccaccgagaactcgaagacacatcaccaacatggttgactactataaaattttggatgtttcgcgatccgctaccgatagtgaagtgaagaaggcatatcgaaaactggcactaaaatggcacccagacaagaatcccgacaacctggatgaggccaacaaacgcttccgcgagctgtccgaagcctacgaagttctttccgatgagaaaaagcgtcgcatatacgatgagtatggcaaagatggactgggcgatcgtggccagagtcgctcgcatgcccgccaccattatagcacacacgatttcgatgacttcgatattttgggcggctttcagtttgcattccgcccgcccgaggaagtgttccgtgagttcttcggcatccactcgcccttcgccgacttattccgagatgccaatggacattcgaatggcagcacaagcggctcgagtggcagtcgacgcaatggcggcagcagtggatcatctcgccaccatcatcatcaccaccagcacaaagtggccagtccgttcggggctccaatgcttaactactcaatgatggacttctttatgcccaccagcggcttcacctcgttctcgtcgatgacccacggcaatggcagcagcggtgtcacccacatctccagcggacccggtgccagtgtcaagcgcacctccacttcgacggtgtttgtgaatggcaagaaactgatgaccaaacgggtcgtcgaaaacggcaaggaaactgtcttttcatatgaaaatgatgttctgaaatcaaagactgtgatgggctcccttcaatagctaattaattaaattcacacataatatatatatatataaatatcaacaaaaatcaacaaaggaaaagtcataaatgtaaagccgaatgaatattaacaagcccaagaagaactcggaattcgttaccgcttcgaaatatgatacttttaaaactttaaaactttgctctacactacaatttagttacttttaatggaccgaacagcaccataaatgaatcaacagccagcgaaaggaccaagcaaaaattaatcaacagcagaaacactaacagcagcgatatccacaccaaaaatatggaacatggaacaggccattgaattaaatcaaaattccccgtaatagcgaaatatggaaatttattttttaagcatagtttttgaacacagctgccctacaacaaaattgcaccggtggaataaagccaacaccatcgagcaccacgagaattaatggaaaaaccatactgaaaatttagccaataagttttaggggccagattttaaatatgctgttcggagcgagtgtgtttgggtgtatatctttttgggggggataattatgtattcttcgtgtatgtatcgttagtcacttaagttgccacaatacttactaggaaatcgaaagcggagaaattcaatctaagcaatgaatcggaactaaaataggctttgcgttaatttttctttacattgtaagggatatgaatatgaatattctaaacgatgacatttaatttttataaatatttcataacctagatttctttattaatttcgatgctgtatgctagcgtatagtcgttttttaaatgcttaagactattctcacataacctgcagagcgaaaagaaaattaatcgtaacataatcgccaataatttaatactttgttaagcgaaaatttcataatgagaataaaaaaaaaaacacatgagaatgaaaatatacaatagatgcgaaacaatt

SEQ ID NO: 12264 - protein, 11 aa, DROSOPHILA
MAPRQESRQPG

SEQ ID NO: 12265 - DNA, 4006 bp, DROSOPHILA
gaaccgattccagccagggtttgatgtccttaggtcatcagccatcagctgttctatgatgagcgcggagaaaggagcacagattcagctgagaggattcgaaacaaaggaattagaatgggtggggtaatgggtatactcacggcaaagaagtctagatgtgctaaacgttttcccttaacctttgacatctaggagtttatgctctgtttctaacaattaaagattgaactgcaacaaatacatacattccagattctaggaaattgaaaataatgccctaaattatttaatcccctaggaactaggatcatttccaacatgctggataaagacagctaatttaaaatacttatttaaagtaaacataaacactaatgatactacaattgcattcaactagttatatctgagttaatactcacccgattttgaaacttccatcaggtttttaaaagagttttctagaaagaaaaataaaaatacgaatttattgcacttaccctattaaaagtaagaattttttcacttcgcccaccgttttccgaatgtaatgatggtaaaaagattgaagtatttttgaacggacgtaaaaatgtttattggtattctctcgcaaaacgatacatacataacactgagtacatacataactagttacttcaacaatgcaacgttatcaaccatccatggataaacgaggtgaactgaggcagggcggggcggggcggtatgatcaggaactgggaagttgatggtgagcgtccttcgaggggcgggaatgtgagcgcaaggaggggagtccatgaacgacttaacaaataacagcattaataacgacgacaggaacagatgcacatggcgtacatggcgtgcacgggacgagggttgatcgcagcgcatttccaggttgtacgggacacacgtgcctttcatagtcgcttcgtatccttgcgtttgtgtatctgtgtagaataagttagtggggatccgtgtctgctttggtggcttacgagttaggtttatttaatgctggcatctcttaagactaacgtacatattaaaacatgaatcgttttgggattttttgggtgggggtgctaaagataatgtcgcctttcgagtttagattgattgtgttcggctacgtatgcggtatgtgggaaaattaaacaataatacatggcaaaaagaaacaaaagcactcttaacataatatttatgcaaaaaacatgtcaataatgcgaaggtcacaataataattaaaatataataaattgcgaggacttgacgggaacactaggtaaggggtaaaatcaggggtttttagattaaggcggggatccgctgtttcgtcgggatggggctaatattgggaatagaagcgtcttagagcctaagtgaagcgtatcgtatcatgttgaatttggctaaactttgaggctgtcctacgacagattgctttcgttcaggtcaaggttgccctggaagagctcctggttcgtcagcagcggcaccttggccacctcgtggaatattttgtgcgagtacttgttccgtatcgtcttgatggtggcccgtggcttgcgatgcagtcctgcattgagcgcggtcacaatttcagcaaagtccgccaattgatagccggtgtagtagataagcgtcgatgtccacgtctgcttgtccagctgccccggaccgccgtgcatacgcagtgccatgaacagtgcggccgaagccatctgcgagtcactgaacgaaatattggcgtaatccatgagcgacaattccaggatgtatcgagccagggtcagcgtgggcataggcaccttggcgcatcgggcatagcggcgcaggaaacggtacgagagcgggatgcccagatcgtacttgataacgcgcagcgtctcccgctccattcgcaccagctcgtcgtgattataagcaccatcgcagatatacaaaaaatcctctataagcggcggctgtcgctcatcgtacttgcaggcaataaagaaggcagcggcgcccagaagttgcagcttctctttgttgatcacctcgcggcagagatacagatcgacgatcttaaccgctaggtacagagtctcgtggttcagctcgaacgtttcctgcacctccaccatccagtcgaccaacagggtgcgcatccaggtggtcagatggatctgcctgggcatatagtcggcaatggggaattccgcttcgcgcactttgaggtagttgaatatatccatggcgtagtgggacacctggaagggatcgtcccagttcttgcggtcgaagtcctctacttcctcgggcactggcggaatgggcaccacctggcttggagcagtctctgggagtgtcagcaacagcggctgtggctgctgctcagtcttttgctgcaacttggcggagcgacgtcgcgccgcctcaaagtttccagacagccgcatggagtcgcaactggagacatcctccagcgcggacatgtacaggctgtcctcagtcttgttgaagtcattggagatccgacgaactggcttgacggcggcaacctggggagcagccagattgtgcgtgggcggcagtaaaacgggaatctgcataggatttggcatggccggtagctgaacctcccccaaaacggtcttttttgcggcaggcactgccttggggcgcggtttgggcctggccaacgcctcttccagcttatcgagcactttgtggcagttctccaccgaatcctccactttactggaggcgcgcgtagtcatcttactggcgccaaagacatttacgctgagattctcctgtttcttagcatccatcagggcctgcagctgctgggccgttggctttttgcccacgcccgactgctcctcatcctgtgccggatgcagtgtcatgatcttaacattgttggtcaggttacccagcgccgagcgcttgattttgtcatttttaattggactgtggtcggccttgcgtttggcgcgcgtctgcatattctccacattcggatcgatgtttcccgtggcagccgccctccgagtcagtcccttcctagtggcagctcccagggctcccaggatgggattcactgcctgctgcagctgatgatgcccgcttgtgatggccgcgcgcgttgttgcttttgtgggcgccattttgaatgcgtgtttgcgtgtgagcgcactcgtcgtttgttgtttgtgttcttgtgcgcggcgcctggagtcctcgtctcctccacttccacttggtttcagcaagatcctcgctagcggattccttgcagaatgtggtctttgtgttggctagaacttgagtcgttcgctactgccgatattgtcgactcgatcaagcctagacattcacacaaactcacaatataattccggatcgagttttgtggagttatggcgcttggccggagggatagagagcactgagtaaaaaatcaaaaaaacaccgccagatgccagatgcagatgcggcctgcagtgtgaccgtaccgcggcgttcggtcgcctaacggaaatcgactggaatacacctctgtggtgaaggtaggcattgggggtagtcttccagagcgcggctaatttaaatgtctgaagttcaaaacatgtgaattgaactatttgggcagtttgcttaaatatgcaattgcaaatttatggaactaagaaactcatcaaagtagcctcgagcagctgacagaaaggaatttgtttaaatatatttatttaattaattgaacagtgcccaaaaatccccatcaatccaaacaagagagaaaagtaaaacacctgcttttacacacaactgtttatttaaatgttaaacaaaatatatgtatatatacgtttgcttgtatcagttgtaaaactaatgattatatataggcataattaatattaaatttaattcagtttttgttgcttcagccaaacgcgggtttctaagaactcaatcaagtatgcatacgacttgc

SEQ ID NO: 12266 - DNA, 2460 bp, DROSOPHILA
cagtgctctctatccctccggccaagcgccataactccacaaaactcgatccggaattatattgtgagtttgtgtgaatgtctaggcttgatcgagtcgacaatatcggcagtagcgaacgactcaagttctagccaacacaaagaccacattctgcaaggaatccgctagcgaggatcttgctgaaaccaagtggaagtggaggagacgaggactccaggcgccgcgcacaagaacacaaacaacaaacgacgagtgcgctcacacgcaaacacgcattcaaaatggcgcccacaaaagcaacaacgcgcgcggccatcacaagcgggcatcatcagctgcagcaggcagtgaatcccatcctgggagccctgggagctgccactaggaagggactgactcggagggcggctgccacgggaaacatcgatccgaatgtggagaatatgcagacgcgcgccaaacgcaaggccgaccacagtccaattaaaaatgacaaaatcaagcgctcggcgctgggtaacctgaccaacaatgttaagatcatgacactgcatccggcacaggatgaggagcagtcgggcgtgggcaaaaagccaacggcccagcagctgcaggccctgatggatgctaagaaacaggagaatctcagcgtaaatgtctttggcgccagtaagatgactacgcgcgcctccagtaaagtggaggattcggtggagaactgccacaaagtgctcgataagctggaagaggcgttggccaggcccaaaccgcgccccaaggcagtgcctgccgcaaaaaagaccgttttgggggaggttcagctaccggccatgccaaatcctatgcagattcccgttttactgccgcccacgcacaatctggctgctccccaggttgccgccgtcaagccagttcgtcggatctccaatgacttcaacaagactgaggacagcctgtacatgtccgcgctggaggatgtctccagttgcgactccatgcggctgtctggaaactttgaggcggcgcgacgtcgctccgccaagttgcagcaaaagactgagcagcagccacagccgctgttgctgacactcccagagactgctccaagccaggtggtgcccattccgccagtgcccgaggaagtagaggacttcgaccgcaagaactgggacgatcccttccaggtgtcccactacgccatggatatattcaactacctcaaagtgcgcgaagcggaattccccattgccgactatatgcccaggcagatccatctgaccacctggatgcgcaccctgttggtcgactggatggtggaggtgcaggaaacgttcgagctgaaccacgagactctgtacctagcggttaagatcgtcgatctgtatctctgccgcgaggtgatcaacaaagagaagctgcaacttctgggcgccgctgccttctttattgcctgcaagtacgatgagcgacagccgccgcttatagaggattttttgtatatctgcgatggtgcttataatcacgacgagctggtgcgaatggagcgggagacgctgcgcgttatcaagtacgatctgggcatcccgctctcgtaccgtttcctgcgccgctatgcccgatgcgccaaggtgcctatgcccacgctgaccctggctcgatacatcctggaattgtcgctcatggattacgccaatatttcgttcagtgactcgcagatggcttcggccgcactgttcatggcactgcgtatgcacggcggtccggggcagctggacaagcagacgtggacatcgacgcttatctactacaccggctatcaattggcggactttgctgaaattgtgaccgcgctcaatgcaggactgcatcgcaagccacgggccaccatcaagacgatacggaacaagtactcgcacaaaatattccacgaggtggccaaggtgccgctgctgacgaaccaggagctcttccagggcaaccttgacctgaacgaaagcaatctgtcgtaggacagcctcaaagtttagccaaattcaacatgatacgatacgcttcacttaggctctaagacgcttctattcccaatattagccccatcccgacgaaacagcggatccccgccttaatctaaaaacccctgattttaccccttacctagtgttcccgtcaagtcctcgcaatttattatattttaattattattgtgaccttcgcattattgacatgttttttgcataaatattatgttaagagtgcttttgtttctttttgccatgtattattgtttaattttcccacataccgcatacgtagccgaacacaatcaatctaaactcgaaaggcgacattatctttagcacccccacccaaaaaatcccaaaacgattcatgttttaatatgtacgttagtcttaagagatgccagcattaaataaacctaactcgtaagccaccaaa

SEQ ID NO: 12267 - protein, 575 aa, DROSOPHILA
MAPTKATTRAAITSGHHQLQQAVNPILGALGAATRKGLTRRAAATGNIDPNVENMQTRAKRKADHSPIKNDKIKRSALGNLTNNVKIMTLHPAQDEEQSGVGKKPTAQQLQALMDAKKQENLSVNVFGASKMTTRASSKVEDSVENCHKVLDKLEEALARPKPRPKAVPAAKKTVLGEVQLPAMPNPMQIPVLLPPTHNLAAPQVAAVKPVRRISNDFNKTEDSLYMSALEDVSSCDSMRLSGNFEAARRRSAKLQQKTEQQPQPLLLTLPETAPSQVVPIPPVPEEVEDFDRKNWDDPFQVSHYAMDIFNYLKVREAEFPIADYMPRQIHLTTWMRTLLVDWMVEVQETFELNHETLYLAVKIVDLYLCREVINKEKLQLLGAAAFFIACKYDERQPPLIEDFLYICDGAYNHDELVRMERETLRVIKYDLGIPLSYRFLRRYARCAKVPMPTLTLARYILELSLMDYANISFSDSQMASAALFMALRMHGGPGQLDKQTWTSTLIYYTGYQLADFAEIVTALNAGLHRKPRATIKTIRNKYSHKIFHEVAKVPLLTNQELFQGNLDLNESNLS

SEQ ID NO: 12268 - DNA, 12178 bp, DROSOPHILA
atatgcacgtaggtagtggactttgacagccgttttcgttttcgctcctttaaccaaggcaaacgttcgagatgggatttcttttgaatataattttctggaaggggatagttatcgaaggatgaaaacggtggaacagattgaacaatcagcggttgcacaggcagctgcaacacctgaatcgctggtagttttcctcgcaactggtttatttgattaaggctagcctgcatctccatttgcttgaaataattgcctatatagttgtttatacggtcaattgcttcacacataacatcggttagaactgaatggtgatggcttgcttcagagctagaggtttgatcttcattattatcgctggtattcgatttttcatgacgttcttctagtatttcgacctttttgtcttgcaataatctatctaatcccagtaaaatatccccgagctcatgaccgacatgcggtttagttgtatcgcacgtttcttccggtggaaatgagcttacattatcatattcatacctttctccagcatctaagcggttaaaaggcggaaatatatttccataaacattaggcattgcgttggtgctaaaatcgaatccccattggtttcccatctgcatagggtcatacattggaggatatgctataaagaagggatcccttcttcgtcttcttcgagaccttggcgccacaaagccattagcttcgatattaaagctcaatcgacgggttcttcgcatagtggtggttcggtttacaataggtgcagcggtatccagtctcatctgggatcttcgttgcctctccaacatttcaaaaaaccctcttatcaacaataaagtgctcacttgccaatagcaggtggagaactaatattttaaatgaaaattttgacagcttgtctaaaaaagtgaatacacttcacatagagctaaaaatatactattgattacaaaggaaggttcactaattacagcagcaaattagaatctttagttaagcgcaaagaatttttttattcgtctttgaaagtttgttttttgtttaagaagtgcttagaatgatgagttaagaatggatacaagtataaataagtgtgagtaatcactgcagttcagcggaatcgaatgaagtatggaattttaatatttatagttgaatcggaaatcgatcttcactttttcaggcccattggcttgctgcgtactccgatgcgggtattctcgccggggatctggctgcgaaaatgagcccactccttctgatagtactgaaataatgccaccggatcgcagtgcatggattttcgacgttggtgaactaaatggggaaagatgggaatgactattaagttattttaaaaaatatcaatgtgttaaaaattacttacccgaaccagatctccgattggaggcgctacgcggatgcgacttgctccggcggcggcgttgcatcctgaggcggtcttcattagcctccgattcgctgctagaaatagatggtgccttttcccggcgggtcttgctgcggctgcgacgccttccgttcacctgagatttttggggaactgcattgttagccgacattggaggcacagaagcatccatcaagagttgttccttaaaaaggcgagctaagtcagcaaaactggccccaccatcggagcgctccttaagatcgtcatccttgtcagtcttgcactccttctccttggcagatggacacggacatgatggagccgcattctccttatccttatccaaacttagtttggcacgcgagctgacggtgccgcgcttatgcaggccgctgaaatcgctctcctttgcgttctccgccaggcgttcctcatgcttgatgagcttgcgcaagtctatattgggatgggatcggatcagagaagtagccattagcagggaaatgaggatagcggatagtggatatgagataggtgcggttaatcaggatggcaagatgtaactagaaaatgacgtgcatataactaaccgaatctgtatggttaaaaaaactggacatcgactattccaacctaagaacatgaagctttgacccagatcagaagagagaaattacacaaatgtttttttacttgacattactactatcagcccatgcgatgtgcattcaataaattaaaactttcctttgtatgtttaattgaatatttaatttaatttactctttgttttaatatttttacaattgcttttggttttttgtttaaagttaattgtttttctgttacatagtttacgtttttctccttttttattttgcttgagcgttgactttgataatagtacatagctaagaaaatgatttccacaattaaaaacaaaaacgattaatggaatctttactacttaaaaactaggttgaaaatgagcgattttggaatagtccgaattggttgatgagaattcttttggggggcagggaatttgagctaaactaagattaaactaaggcttatgtacgtattttcgtgtgtgattgtttgtgggtttttattatgctacacttagctgataaatgggatgaactcttctaacgatctaactcgattaaatttgacggacttcatttgacagttagagttttcagaaaacattaatgatattcgcttttacacaattttggcagtggttctttgtctcaaacgagtatattaaatgggtacattagaccgtttatcatttaatttccactttgccaaatcagaaaaattaaaactggaaaattgactgaattgaaatcgctgtgactttgtggttttggagggatttgtggcctaaaaatacctaaaaactgaaacttattactcatcgtggctgtacacactaaaagctatacgtgattggtgctgaatgatgcgtttcttgatctggatgatgattagatgacacagggtgctcagcgacggtatcgaaagcgtcggaatggcgcccttagtcgcctgcaggtgacacgcacctccttcttcaggaactgcgagatggccaatgacttcacggcagccgtcgccgcttcggcggcacaactgctcgccgcctttccactattcggtggcgcatacttggagatgtcaaacttccgcttcggcgtcgtctggtgtgggcaatgctcatgcgaatcgcctgcctgggtgttgcttaaatccaaatcggtatccaagccgtcagatgataccgtgaatatgtcggaattgtcacccagtttctcacttggcgaaatacagctgcctagacttccgttcagctggggagttcttctctgatgctgttgaacttgcccggtacttggtgtggaggtggcctgtagtcgctggccattatgcagagtaagcaagagttttttgccctgtgaagagtcttcaggcggcgtggttaccgatatggaaggtattcgagctcttttttcatgaggctcagttttctgaatgcccatgtcctgctcttcgtaggcatcttcaaaaacatcttcgtcctcgtcctcctcctcttcttcttcctcgacatccgcatcagttgcttcgatttccgcctcaacatcctgctgctgatccacagaatccgccattgtttcatcttcgtcgggcagactttccatttcatccgcctgcggttcagcctgctcgtcaacatcggtcgctggcggagtcatcacggcatcttcgcgggaattctgtttatcatcagcaggtgatccaccagagggcgagtttccgcctccttcatcatcttcatcgtctttgctcaggagatttcctctcgtcgcagaagtcgtagtagttgtggtagtggttgtggtctgttcctcttccgtttccattggctcctgctttatagggtgtagctcagcaagacccattttctggaaattaattcgctcatctggcaaagctcgactgccacctaatccgcctgcgttccgtcttctctgagctttaggccaacccgtgcgattggacttcaggctcttccttttcctataatagctggcgtatagattgagattactcattcgtcgaccggaaccaggtgggtttcctctggatacatcttcatcatcatctccactccctgcactacccataattagatcgcacaagtcaaactcgcttgtaaagcaatcagtaggtggtggagtttgtggtgtgttaacaagtctttcttctcgtccttcagactccacctccggtgatatctggtcaaattctatatcgtactccttgccagctagctccagatatttatctaactgccaggcaacgaagccaggattgcaatactgacgggcttgatccaaagctttaagggcacacgtttccatttcgtattcgagcaatcccttcttgctgggcaatttgcggactccacgatacgcacccgttccgggaagattttgggtagtcggtcgcactgtgcctgcaacggaaggattaactcttcttttacgcttacccagaagcgcacttgctgaggattccctttgactggttgcgaattccaatcggcgcgaataaatctgactctgattacgagccgctggtgtcaggcggcgacttctaacgggtgaagaagttgcgggggtaggaactggcgctggcggggaatgatcatatttgttttgcccccgcctcattctctttactgtctcgctaatctcggtggcaaatcgtagttcctcaacaggagtcgcagcttgagaacgagtcgttcggggcgatgaaggtgctactggttcctgttttatcggagttttaagctttggtgcggctacaggaggaggtggctcttctgcttctgagttcgttttactttgtgagtcctgacgctgccgtataatgcaactgaccaaagccagagtagaagcatgttctctaggggattttcttggtggtaattcggcaatccgggccagctgcttattcctgcaggttatgccgctccgttgactgttactgcagcttgaactggatgtgctcctcactctctctatcagctgcactctatcccccatagaacccgaggcaaactccctttccagtaattctggtgtgctcgccttgctatcacatttggctccggcagtggccaaggaatttccctccaactgctgcagttgctcctgttcctgctgataacgttggagcagatggagctttttgttcttgtaggtcgcggatgaggaagaggactggacttcctcctccttcttaacttctttcttgggcgcgggcttctgatcttccagcttgatctgctctcccttatcctgctttacttcgcttgcctcgcggcataatgcacaactgtgtgctggcaatgttttggccatgggtatgggacccatttcatagggcagtttcctataattagtgctaccataatacgtgtaatagttctcttcacccgcatcctgtcgcagaaaaactctattccaaagctccccacttggcaacgattcgaaggtatactgcatttcccgaagtctttcgcttttactgcaatcaaagaataaatctatcgctggtggcactgccttcgtttgtttaactttatttttcgtgggacttgacggtttctggatcttagtgcggcttttcgaaggagacgttttgacctccgttaactccagctctccggcactacgatttatggttaatctggaaagccgcctagctgctctttgttcacgagtatctgttgatttacgaggagctgccgtgattcttcgttggctaccagcaatgtagtcttcatcgctaccactactgcaactactgtccacctcctcatctaattctttatctaatatctcttccagatcttccaactccttcactttctgctcttcgatcacttccttctttatttttattttgggctttactaattcccccatcctatcctccagtttattggccattttccggcaagttgtctgccttagctgctgctgctgatgactgctggcggtggctgctgtcacaatagccgtagctgtgcgactgcttttcctggtggccaccaattgctcctgctttatcttgatctttagctgcggttttggctgcggttgaggcccttcttctggctggatgggggcgcttggaaagcgctgctggttactattgctgctactactccccgttgataattggcgttggaaaacatcctgcgccgctgctcctcctacttttcttcgccttcccactgcttgagctcgcttgcgtatgctagtaggtaatcctgaagattccttagtttctgcttcgctggtgctagtgtctaggctggcggaggagatactgtatctgcctcttacatccgaggtggtttgtcgatcgacatccgtgggcagctcactgctgctccttgtagttggcaccgctgttctgggaaacataaagttctctgcctctccattgagtcgttgtaactctgtttgtcggatcttttggaactttacaatcagcgagggcgaatccacttggttgggaggtcttcctcgccctctgggaggcgtagcacattcctccctagtttctactactttataaatagaagaaggcggcaacatggctctcttagggggtgacagaccggagttctgtgttttccttcgtcctgaattcgttgttggcgttgctgcggctgttgttggatgttcctgacgctgaagttcagaaagactaccaggtgaatttccttgaaccttcttggcaccagggaatggcgtttgaggtgatgccactgcaactccttgaaacttttctgacgaatgctttcccttggttatccttttggacttctcccgcaacgctggcgatggcctctgacggggactctgcaactcctcattactcaacgattcatcgacatccatgtcaagttcactctctacgggctcctcctccaggaacctattcacatccgccgaactttgaattagagtgtctagagccagaaaattatccgaattctttgcaaacagctcgtgatctttgctctgcaaatggatattcaggatatcgtattccaatttacagatctcacacactccaccttgtttttcactcgaatctattggttcgcgacaattggaacgcggactattcggaatcgcagactgttttttaagttcctgcagagaaggatgctggagtggctttgcttccccagcagcttgtttgtctttctgtgatgtgcgtgaacccaaaggcttgcgggtcatgctatgctccttatccttggtcttcgactttgttagtagtcgaaaggcgccgtcttcgctgcttaaatctatctttggccagtcgtctggctgtttgataagatggtagtaaggtctataattacgcttgacggattcgatcttcacatactgcttttttagctgtatatgatgggggctagctgatgttgatcctcctccaccttccttcttaccctcaaggtattgcttaagctcggtctgaatgcgctttataaagcgttgggcataatccgtctgccagatggtatagctccgttttagggatgtcgtgggtgtgctattgccactgtttacgactccaaccgtgctccgccgcacgcgactcagtattgcatccgctcttgattgcctctgattcggttttcttgccgaaccatcattttgctggtagtgactcgtgggggtgccgggtgtgctaggtgtacctggtgttccggaggttccgcctatgacctctggcttatcagtgacaaaatgtgttatatcgtcactgagaaagaactcgagatgtccacccaatgctttgatgtcggactcaatgcgctttgctaactgatgatcgcaaatgtccaggtagaacttaaagtggcacagggggcgtttgctctttatgacctttactttaggaggagttgctgctgttgcggaagctgctgctgttgagtggctagttgttgttgcgagtctgctggcgctttgtttgtccgactgcggttgcataccttctggcgcaaattagctgcagccaacggacccagaattaaagagaaaagaaattgcagaaaacgccattaattaaaatttattttgaagagctgagctacagtcgaattttaacaaattaaagctttggcaatattctaccaaattcacaaagtacaaaataactgtatgctttatgtagagttaaatttaatgaaacttaagattttaccattgcactcaaaaataaatttaaaaatcagaccataaaaatgattatttacaaaaaaaaaaaaattgaacttaagtaatattaatttccaacttattacatccaaatacgttgtacatgttcttataaaatgtttcagtaacacaaatatttaaaaacattttattaaaaacaagaaccactcctataaagtttccctccaattttagttggaacaaagttataccagtctaaagctgtagttataaccattgatataattggtttagtttttaatttttattcaaaattcgaccgtagctggaaatccaacaccaaccgcgttttaaacttgtttgccacgaaaaatgatataaaaacaaataaatcactgtgggggaaatcctactcccggtggttcttcttcctcttgttccttgtacgtttcccgatgtgtgttatgcaatgttgcattcggatacacacaaatcaaatcaataactgcacttggatgcatttcggtatgtattgcctaaaaggccatcgagtgttaagtgtgagttaatttattttaattccaaactaaatggaacacagaaacacgacccaagcgggtggaagaagaagaagcagcagctgtgctgcagcatagcgctgccaggtcggggggctacgcttagcgaggcgttgccagcacgcgaaaaaattaggggtgacacagctgcaacataattgtactgtattgttgcatttgattaaaaaccagttatatttacaaaacaggcacgaaaaaacaaatgtggaagaatagcgattcaagaaaaaaaacagttggtgatgacacttattcttaatcactcatactaacctcggcttgtatataagctctatttaataaattgtactttctttatttatactattattatttaattttataaagtcaaccctaacaaatataattatgcatcttatcgttgtatttcttgctaatttgcgcaatatggcttatcacattccattcatatttgttgttttggttttttacgtctcccaaaaaaacaatgcgaatgagctgacaaagccataatggccgatgaccgatattaaactcataatgacaattagtccggcaaccctgccgttcacagtactaacacattcgtaaatacttgcaaataaattgtatgcctagccaatatgcactgacgcgcgtcaatatatatataacctgaaaaacgagcacatcagcgctgcgctggcactttttctgccctcgctttatatttgccattacaaaacgaaacgttggcgcaaagagaaacgaaagaaaccctagtggcaaccctcaagcggtagcagtagcaacaacaactaaggaaaaataagaaaaagagtaggagcacacaaggagtaaagcgaaaaataacacgaaaaacgcacaaaacacaaaaagagagtggagggaaaaaaacaacacacacacacaattcatacagttgcggtggaaattatagcactttcaatttaaaataaccgaaatagacattttaatgagtgtaatgagttttgtgcattaggtaaataaaatatattccgtaagacaatttttctattaatattacaaattcaaattgcacatcgacatttccctaacgctttacccgctgctgtatgcgtacatatgtatgtttgtggataaaattcatgtgaagttgcggatgaagcttacaatgtggtggaggccgaaacacacgagcaaacgcagaaaagcaggcccagggcagcagcaacaacaactatgactagcaagccaagtacaaaaaacacacagaacagtggggtcacaagagccgtgtgtttaggatttccactgaaatgtatttatgccacagtacgtgaaccttgccaaagcagttttccttcgatgtcgggccggcctttattcgattattcctaaatttttggtccgaatgaattttgttgctgcaaaccactgtgccatgggtatgtatagtgtgttattcacaatttccaagtaatactcgtttttatattttcttttttccattgctccgtatttctgcctgtgccgctgctctttttcttgtctgtgctttgtacgcacgttcgttttggaaataaaaacaaattgaaatggtgacgaatcgtttgaaattcagtttgaaaagccgcaaccaaaaaaaattgtgcatacaaaataacaaaccaaaaacaatcccacacacacacgcacgcacacttgtacggattgcttaccttttagaaattcacggagttgctcggctgatatgttcctatagcccaaatcatttagatactggagaatggcccgtgcatctagtggcaaatgtgacattttacttttcgccaagtagagcaatcgttcttgatattcgtattgttaattattttttgtttatattccaccctcacacatacacacgcgcgcgcactcgagcacatacaaacacacacacgaatgcaaaatcgccgttcgtttggtttctctttctcgtttgtttcgttcgcttcttcttccttttgttcgtattcgtcttcgtgcgccgacaatcgaccaattttcactgtacttttgctctgcgttggccgtttttgagtttatacttgcatttacttgcgtcaagttaatcagttgcaatgactaaatatacacaactgtatgggaacgatcggtataagcgtctatatgccttcgttcgcccgtcgttcgtttgctaacgcctttgttatttttatgccttttatcaggttttcgcggtcggatggtcgccaattcgattgtgcacgcacagttcgagtgtcgaaattgggccttttcttattttcacatatttcctcgctagttttataacaattttcaccaattgaaaataaagtgtacacggacagggcagcgcacacacgctcggcaaccaaattttcgtcgtgttatcgataactatgttggctggcgatggtcgatggttgctaagcggcgtgactgagtcgcggtcacatatcgttttaagggaaaaagtcacggattagcagttttaaaaaaggtctagtttaatattgattcgtttttcgtgacgagagacattaattattcattgaatttatttatttcatttaaaaatatacactaacgtacttacaattttgttaacatgaatctatgatatataccataaatttaaaatttgtaattgcgatttgaaacatcgacagcgatggctatcttcatgtatcgataggcaacgacagtccgtccctaccagcaacgcgaaaggtttttgtcttgctttcttgttgctttgtgtgattctcgagtctctgttctgcgtctgcgtcccgttctcgtgccaacgaactgatttcgccccgcgttcgtgctcaatcgtaaattcgaaataaattaaaaatgtctcgcagttcgtacctgttgtgtgtgctgtttttaggtgagcgaaagagagggagaagaaatgaagaaatcgcctcgcgatcagattttacggatacgcatctcgttattgcaggcgccagctgcttggttttcagtgcgagtgcagcgcggaacaatcgaaggggttacaaggccacggaaccgcccaccaccacccagcccccgcagacggccaaggagtatctggatagtcgacccggaatctccacattcggcatcatcgccatcatcttcaccgtaatcgttctctgcctcgtcttctactacggcatcatttgctaccccttactctgtcgcgatgacaagaaatatcggtttatggacgtatcttcaaccattactgccgccacatcgcgctccattcaatccatagagaactatcccgaccagaaacaccatcatacgttggcctgattcggggtgtggacacctggaggatagtggtttagtagtacttcaat
